United States Patent Application Publication US 2004/0234960 A1 - sequence listing, part 8

SEQ ID NO: 23568 - DNA, 707 bp, Artificial Sequence
  chemically treated genomic DNA (Homo sapiens) CpG-island No: 23568
aacgcgaccaaaaataaaaaatacgaaaaaaaaacgcccgaacgacctaaaccccgcgcacctaacacgaccgacacgaccaacccgacaaacaccactaaacgaactacgaacccgcgacccgaaccccgctaaacccgaactacactaacgcaataactactcgccacctcgaaccgcattcttaccacgactcccgccaaccgccgatactcgaactaaaaataaactaacgcgttctaacctctaacttacccgaacgtacgcgaaccaaaactcactccctcacacgtcccccaccgaccccgacaccttcccataccgaacctacctcccgtctttaccctaacgacgaccacgaccaacgactctcttcaaactaccaacgatacgaacaaaaacgaacgccaaaaccctactcgcgaaaaaacgaaacgaacgctctaaacccgctcccgacgcgaacgcgaaaaaacgacgaaaccgcgaccgaaaccgtaaacttaaaactctacaccaatcccaaactacccgctaaaaacgcattcgccccacccgcgccgaaatcgcgaccccgcctccctccccgaaactaaacaacgaaaaaacgaaaccttcgaacttaaaacgaaacgaacaaaaaactacaattcccaacaaatcttacgctaaaaccgtaaaaaccgctaaaaaaataactctccttt

SEQ ID NO: 23569 - DNA, 762 bp, Artificial Sequence
  chemically treated genomic DNA (Homo sapiens) CpG-island No: 23569
cgttatattttattgtcgtagtagaatcggtgttttttatttgtttgcgttttttgtagttcgttaagtagcgtttttagtttttgtgatattttagggagaaagtcgtagtatcggcgatgttggtcgttattaacgttcggtaaagcgttcggaattagaagtagcgaagaattcgggtgggtagcgatcgtgatagtcgagtcggaagcggagttgcgggaggggtttcgacgtttttttattttttattggagtttatcgttgttagtcgcgttgtttgttcgttttatttttttcgtgtaggtatttagttaaatgacgggcggagttcggcggcggttttcggtcgggggaaaaaagttgggtcgaaggaggggtcgggaagacgtaagaggaagaagagaaaacggtcgggcggcggtggttgtaggttgtgcggttgtagcggtttttttttgggcggacgatggatagttagggtaggaaggtggtggtgtgcgataacggtatcggggtaagggtcgcgcgaggagagttttggcggttatagacgtcggcggggacgagatagttggcgatagcgttttcgtttttagggttgtatttcgggtttcggggcgaaggggcgcgggcggtgttttttattttcgcgggcgtgggagcgagtcggtcgttttttggttttttttgagtttgttatttatttagtttgttatttttttattttcgggtgggggcggcgggcgagatcggtattgg

SEQ ID NO: 23570 - DNA, 762 bp, Artificial Sequence
  chemically treated genomic DNA (Homo sapiens) CpG-island No: 23570
ccaataccgatctcgcccgccgcccccacccgaaaataaaaaaataacaaactaaataaataacaaactcaaaaaaaaccaaaaaacgaccgactcgctcccacgcccgcgaaaataaaaaacaccgcccgcgccccttcgccccgaaacccgaaatacaaccctaaaaacgaaaacgctatcgccaactatctcgtccccgccgacgtctataaccgccaaaactctcctcgcgcgacccttaccccgataccgttatcgcacaccaccaccttcctaccctaactatccatcgtccgcccaaaaaaaaaccgctacaaccgcacaacctacaaccaccgccgcccgaccgttttctcttcttcctcttacgtcttcccgacccctccttcgacccaacttttttcccccgaccgaaaaccgccgccgaactccgcccgtcatttaactaaatacctacacgaaaaaaataaaacgaacaaacaacgcgactaacaacgataaactccaataaaaaataaaaaaacgtcgaaacccctcccgcaactccgcttccgactcgactatcacgatcgctacccacccgaattcttcgctacttctaattccgaacgctttaccgaacgttaataacgaccaacatcgccgatactacgactttctccctaaaatatcacaaaaactaaaaacgctacttaacgaactacaaaaaacgcaaacaaataaaaaacaccgattctactacgacaataaaatataacg

SEQ ID NO: 23571 - DNA, 762 bp, Artificial Sequence
  chemically treated genomic DNA (Homo sapiens) CpG-island No: 23571
ttagtgtcggtttcgttcgtcgtttttattcggaagtgagggggtggtaggttaaatgggtggtaggtttaagggagattagggaacggtcggttcgtttttacgttcgcggaggtgggaggtatcgttcgcgttttttcgtttcgaggttcggagtgtagttttgggggcgagggcgttgtcgttagttgtttcgttttcgtcggcgtttgtggtcgttaaggtttttttcgcgcggtttttatttcggtgtcgttgtcgtatattattatttttttgttttggttgtttatcgttcgtttagggaagagtcgttgtagtcgtataatttatagttatcgtcgttcggtcgttttttttttttttttttgcgttttttcggtttttttttcggtttaatttttttttttcgatcggaagtcgtcgtcgggtttcgttcgttatttagttgaatgtttgtacgaaaagggtgggacgggtaggtagcgcgattggtagcggtgagttttaataaaagatggaggagcgtcgaggtttttttcgtagtttcgttttcggttcggttgttacggtcgttgtttattcgggtttttcgttgtttttagtttcgggcgttttgtcgggcgttaatggcggttaatatcgtcggtgttgcggttttttttttaaagtgttataggagttaagggcgttgtttaacgaattgtagaagacgtaggtaggtgaaggatatcggttttgttgcggtagtggaatgtggcg

SEQ ID NO: 23572 - DNA, 762 bp, Artificial Sequence
  chemically treated genomic DNA (Homo sapiens) CpG-island No: 23572
cgccacattccactaccgcaacaaaaccgatatccttcacctacctacgtcttctacaattcgttaaacaacgcccttaactcctataacactttaaaaaaaaaaccgcaacaccgacgatattaaccgccattaacgcccgacaaaacgcccgaaactaaaaacaacgaaaaacccgaataaacaacgaccgtaacaaccgaaccgaaaacgaaactacgaaaaaaacctcgacgctcctccatcttttattaaaactcaccgctaccaatcgcgctacctacccgtcccacccttttcgtacaaacattcaactaaataacgaacgaaacccgacgacgacttccgatcgaaaaaaaaaaattaaaccgaaaaaaaaaccgaaaaaacgcaaaaaaaaaaaaaaaaaacgaccgaacgacgataactataaattatacgactacaacgactcttccctaaacgaacgataaacaaccaaaacaaaaaaataataatatacgacaacgacaccgaaataaaaaccgcgcgaaaaaaaccttaacgaccacaaacgccgacgaaaacgaaacaactaacgacaacgccctcgcccccaaaactacactccgaacctcgaaacgaaaaaacgcgaacgatacctcccacctccgcgaacgtaaaaacgaaccgaccgttccctaatctcccttaaacctaccacccatttaacctaccaccccctcacttccgaataaaaacgacgaacgaaaccgacactaa

SEQ ID NO: 23573 - DNA, 519 bp, Artificial Sequence
  chemically treated genomic DNA (Homo sapiens) CpG-island No: 23573
cgtataattttatacgatcgacgtttttgggtttaaataggaggaagaaggacgtatgcgttacgcgtacgttaggggtgttttttcggagcgttttcgaggcgcggacgtaggttatagtagcgtttggtttttgttgatgtcgtcgttattttatttttttttcgttttagttttacggcggcgcgcgttttaggtcggtcgttttatttttcggttttcgggattgtggattttacgattttgttttcggttttgttcgcgtcgaagtagttcgggattgcgtagttttcgcgtgtcggtgagcgatttcggacgtgtagtttttaggttttttttcggagcgaggttgagttgcgtcgcgtttgagtcgggtttgataaggaggggaggtcgttggggtgttgggttagtcgtaggtacggcggcggttagggttggtgatcgagttgttgtgtcgtttttaatgaggtttagttagggaatattcggtttcgtttaagttttatttttgggttg

SEQ ID NO: 23574 - DNA, 519 bp, Artificial Sequence
  chemically treated genomic DNA (Homo sapiens) CpG-island No: 23574
caacccaaaaataaaacttaaacgaaaccgaatattccctaactaaacctcattaaaaacgacacaacaactcgatcaccaaccctaaccgccgccgtacctacgactaacccaacaccccaacgacctcccctccttatcaaacccgactcaaacgcgacgcaactcaacctcgctccgaaaaaaaacctaaaaactacacgtccgaaatcgctcaccgacacgcgaaaactacgcaatcccgaactacttcgacgcgaacaaaaccgaaaacaaaatcgtaaaatccacaatcccgaaaaccgaaaaataaaacgaccgacctaaaacgcgcgccgccgtaaaactaaaacgaaaaaaaaataaaataacgacgacatcaacaaaaaccaaacgctactataacctacgtccgcgcctcgaaaacgctccgaaaaaacacccctaacgtacgcgtaacgcatacgtccttcttcctcctatttaaacccaaaaacgtcgatcgtataaaattatacg

SEQ ID NO: 23575 - DNA, 519 bp, Artificial Sequence
  chemically treated genomic DNA (Homo sapiens) CpG-island No: 23575
taatttagaggtagggtttgggcgaagtcgagtgttttttggttgggttttattagaggcgatatagtaattcgattattagttttgatcgtcgtcgtatttgcggttggtttagtattttagcggttttttttttttgttaggttcggtttaagcgcggcgtagtttagtttcgtttcggaaggggatttggggattgtacgttcggggtcgtttatcggtacgcgggggttgcgtagtttcgggttgtttcggcgcggatagggtcgaggatagggtcgtggagtttatagtttcgggagtcggggggtggagcgatcggtttggagcgcgcgtcgtcgtagagttgggacgggggaggggtaggataacgacggtattagtagaggttaagcgttgttgtaatttgcgttcgcgtttcgagagcgtttcggagggatatttttggcgtgcgcgtgacgtatgcgttttttttttttttgtttgagtttagaggcgtcgatcgtgtgagattgtgcg

SEQ ID NO: 23576 - DNA, 519 bp, Artificial Sequence
  chemically treated genomic DNA (Homo sapiens) CpG-island No: 23576
cgcacaatctcacacgatcgacgcctctaaactcaaacaaaaaaaaaaaaaacgcatacgtcacgcgcacgccaaaaatatccctccgaaacgctctcgaaacgcgaacgcaaattacaacaacgcttaacctctactaataccgtcgttatcctacccctcccccgtcccaactctacgacgacgcgcgctccaaaccgatcgctccaccccccgactcccgaaactataaactccacgaccctatcctcgaccctatccgcgccgaaacaacccgaaactacgcaacccccgcgtaccgataaacgaccccgaacgtacaatccccaaatccccttccgaaacgaaactaaactacgccgcgcttaaaccgaacctaacaaaaaaaaaaaaccgctaaaatactaaaccaaccgcaaatacgacgacgatcaaaactaataatcgaattactatatcgcctctaataaaacccaaccaaaaaacactcgacttcgcccaaaccctacctctaaatta

SEQ ID NO: 23577 - DNA, 612 bp, Artificial Sequence
  chemically treated genomic DNA (Homo sapiens) CpG-island No: 23577
gaggagtcgggtgggaacggtcgcgttttcgttttcgtttttttttttttgttttttggacgtcgttgggagtcgggtttcgcggtggatggtattatcgagattttttttattagaaatacgcggttcgttttcgcgtggggttttggtggagattttcgacgttaaggcgggggtttgttttcggttttttttttttttttcgtttcgcggggagttcggttttttttttgcggggggggaagttatttttcgaattcgcgcgttttttggcggtttgagtcggtgtagaagttaggttgtgttgatttcgttcgcgagtattttgtttggggatcgcgcgtcgcggggtagttttttattttcgtttcggagggatatagtttgtttgggcgtagtttttcggcgcggttttcgcggttttttcggcgttttttcgcggggtttttttagtcgtcgttttcggagtttttcgtttttttgtgttttcggtcgcgtgacgttttttatcgtggaacggggtagttgcgggacgtgtttttttttttattggatttagatttttttaggggagatttcgttagaggcgtattttcggagtttttttttcgg

SEQ ID NO: 23578 - DNA, 612 bp, Artificial Sequence
  chemically treated genomic DNA (Homo sapiens) CpG-island No: 23578
ccgaaaaaaaaactccgaaaatacgcctctaacgaaatctcccctaaaaaaatctaaatccaataaaaaaaaaaacacgtcccgcaactaccccgttccacgataaaaaacgtcacgcgaccgaaaacacaaaaaaacgaaaaactccgaaaacgacgactaaaaaaaccccgcgaaaaaacgccgaaaaaaccgcgaaaaccgcgccgaaaaactacgcccaaacaaactatatccctccgaaacgaaaataaaaaactaccccgcgacgcgcgatccccaaacaaaatactcgcgaacgaaatcaacacaacctaacttctacaccgactcaaaccgccaaaaaacgcgcgaattcgaaaaataacttccccccccgcaaaaaaaaaaccgaactccccgcgaaacgaaaaaaaaaaaaaaaaccgaaaacaaacccccgccttaacgtcgaaaatctccaccaaaaccccacgcgaaaacgaaccgcgtatttctaataaaaaaaatctcgataataccatccaccgcgaaacccgactcccaacgacgtccaaaaaacaaaaaaaaaaaaacgaaaacgaaaacgcgaccgttcccacccgactcctc

SEQ ID NO: 23579 - DNA, 612 bp, Artificial Sequence
  chemically treated genomic DNA (Homo sapiens) CpG-island No: 23579
tcggggaggagatttcggggatgcgtttttggcgggattttttttggaagaatttgagtttagtggggagaggaatacgtttcgtagttgtttcgttttacggtgggaggcgttacgcggtcgggaatatagggaggcggggggtttcggaggcggcggttgggaggatttcgcgggagggcgtcggggaggtcgcgaggatcgcgtcggggggttgcgtttaggtaagttgtgttttttcgaggcgaagataggaagttgtttcgcggcgcgcggtttttaggtagggtgttcgcgggcggagttaatatagtttggtttttgtatcggtttaggtcgttagagggcgcgcgggttcgggaaatggttttttttttcgtaggaggagggtcgagtttttcgcggggcgggaggaggagggaaaatcgaggataagttttcgttttggcgtcgagggtttttattaaagttttacgcgagaacgggtcgcgtgtttttggtgagaggggtttcgatagtgttatttatcgcgaggttcgatttttagcggcgtttaggaagtaagggagggagggcgggagcggggacgcggtcgtttttattcggtttttt

SEQ ID NO: 23580 - DNA, 612 bp, Artificial Sequence
  chemically treated genomic DNA (Homo sapiens) CpG-island No: 23580
aaaaaaccgaataaaaacgaccgcgtccccgctcccgccctccctcccttacttcctaaacgccgctaaaaatcgaacctcgcgataaataacactatcgaaacccctctcaccaaaaacacgcgacccgttctcgcgtaaaactttaataaaaaccctcgacgccaaaacgaaaacttatcctcgattttccctcctcctcccgccccgcgaaaaactcgaccctcctcctacgaaaaaaaaaaccatttcccgaacccgcgcgccctctaacgacctaaaccgatacaaaaaccaaactatattaactccgcccgcgaacaccctacctaaaaaccgcgcgccgcgaaacaacttcctatcttcgcctcgaaaaaacacaacttacctaaacgcaaccccccgacgcgatcctcgcgacctccccgacgccctcccgcgaaatcctcccaaccgccgcctccgaaaccccccgcctccctatattcccgaccgcgtaacgcctcccaccgtaaaacgaaacaactacgaaacgtattcctctccccactaaactcaaattcttccaaaaaaaatcccgccaaaaacgcatccccgaaatctcctccccga

SEQ ID NO: 23581 - DNA, 897 bp, Artificial Sequence
  chemically treated genomic DNA (Homo sapiens) CpG-island No: 23581
gcgtttcgggcgttcgggggcgggttttgtatagcgacgttacggcgtatcgtgcgttgggttaaagtttagtttcgttttcgtttttttttcgttgtttttttcggtttgtgtcgtcgtcgacgtcgtttgtgggttcgatttcgttttgtttgtttcgttatttttttttcgagtattgttcggtcggtcgttatggttaacgtggttgatacgaagttgtacgatattttgggcgtttcgttcggcgttagcgagaacgagttgaagaaggtatttgggagcgggtcgggcgggtgtgaggggcgcggggtttgcgcggttagggatgttttttttagttaggtcgcgttattgggttgttcgcgagtcggcgttcggtcgtgattggttcgggttgggagtcggcggcggcggcgggatcggtttcgtcgcgagtcgcgtatttcggtttcggttgattttggggtcgtcggtttcgttcgttcgtagatgtagtaaataaaatttatttttgcgtaaatacgatgggagttttttttttttttttttttgaacgagcgtcgggggttggtatttttcgggaggtagtagttcgttcggtttttcgcgtcgaggttattatttcggaaaaataggttggatcgaggtgtttagcgtatttcggtttcgagagagaagttgttcgtttcgcggtcgtcggtttcgggtttggtgtttcgcggggaggaacggcggggaggtcgaggtcgtttttatagagcgtttcgggcggatggggttgttttttgggtttcgcggtcgtcggttgcgggagtttttttttttttgcgtttttcgtttattgattcggaggtagttgggtttgtgtttggatgtattgttttttgggtaggt

SEQ ID NO: 23582 - DNA, 897 bp, Artificial Sequence
  chemically treated genomic DNA (Homo sapiens) CpG-island No: 23582
acctacccaaaaaacaatacatccaaacacaaacccaactacctccgaatcaataaacgaaaaacgcaaaaaaaaaaaaactcccgcaaccgacgaccgcgaaacccaaaaaacaaccccatccgcccgaaacgctctataaaaacgacctcgacctccccgccgttcctccccgcgaaacaccaaacccgaaaccgacgaccgcgaaacgaacaacttctctctcgaaaccgaaatacgctaaacacctcgatccaacctatttttccgaaataataacctcgacgcgaaaaaccgaacgaactactacctcccgaaaaataccaacccccgacgctcgttcaaaaaaaaaaaaaaaaaaaactcccatcgtatttacgcaaaaataaattttatttactacatctacgaacgaacgaaaccgacgaccccaaaatcaaccgaaaccgaaatacgcgactcgcgacgaaaccgatcccgccgccgccgccgactcccaacccgaaccaatcacgaccgaacgccgactcgcgaacaacccaataacgcgacctaactaaaaaaaacatccctaaccgcgcaaaccccgcgcccctcacacccgcccgacccgctcccaaataccttcttcaactcgttctcgctaacgccgaacgaaacgcccaaaatatcgtacaacttcgtatcaaccacgttaaccataacgaccgaccgaacaatactcgaaaaaaaaataacgaaacaaacaaaacgaaatcgaacccacaaacgacgtcgacgacgacacaaaccgaaaaaaacaacgaaaaaaaaacgaaaacgaaactaaactttaacccaacgcacgatacgccgtaacgtcgctatacaaaacccgcccccgaacgcccgaaacgc

SEQ ID NO: 23583 - DNA, 897 bp, Artificial Sequence
  chemically treated genomic DNA (Homo sapiens) CpG-island No: 23583
atttgtttaaagaataatgtatttaaatatagatttagttattttcgggttaatgggcgagggacgtagagagggaggagttttcgtagtcggcggtcgcggaatttaggaaataattttattcgttcgaggcgttttgtgggggcggtttcgattttttcgtcgttttttttcgcggagtattagattcggggtcgacggtcgcggggcggatagtttttttttcggggtcgggatgcgttgagtatttcggtttaatttgttttttcggggtggtgatttcgacgcgaaggatcgggcgagttgttgtttttcgggggatattagttttcggcgttcgtttaaggagggaggaaggaagggtttttatcgtgtttgcgtaggagtgagttttatttgttgtatttgcgggcgggcggggtcggcggttttaaggttagtcgaggtcggagtgcgcggttcgcggcgaggtcggtttcgtcgtcgtcgtcgatttttagttcgggttagttacggtcgggcgtcggttcgcgggtagtttagtagcgcggtttggttgaagaagatatttttggtcgcgtaggtttcgcgttttttatattcgttcggttcgtttttagatattttttttagttcgttttcgttggcgtcgggcgggacgtttaggatgtcgtatagtttcgtgttagttacgttagttatggcggtcggtcgggtagtgttcggggagaaggtggcgaagtagatagagcggagtcgggtttataagcggcgtcggcggcggtataggtcgagggagatagcgagggggaagcgggggcggggttgaattttgatttagcgtacggtgcgtcgtgacgtcgttgtgtagagttcgttttcgagcgttcgaggcgt

SEQ ID NO: 23584 - DNA, 897 bp, Artificial Sequence
  chemically treated genomic DNA (Homo sapiens) CpG-island No: 23584
acgcctcgaacgctcgaaaacgaactctacacaacgacgtcacgacgcaccgtacgctaaatcaaaattcaaccccgcccccgcttccccctcgctatctccctcgacctataccgccgccgacgccgcttataaacccgactccgctctatctacttcgccaccttctccccgaacactacccgaccgaccgccataactaacgtaactaacacgaaactatacgacatcctaaacgtcccgcccgacgccaacgaaaacgaactaaaaaaaatatctaaaaacgaaccgaacgaatataaaaaacgcgaaacctacgcgaccaaaaatatcttcttcaaccaaaccgcgctactaaactacccgcgaaccgacgcccgaccgtaactaacccgaactaaaaatcgacgacgacgacgaaaccgacctcgccgcgaaccgcgcactccgacctcgactaaccttaaaaccgccgaccccgcccgcccgcaaatacaacaaataaaactcactcctacgcaaacacgataaaaacccttccttcctccctccttaaacgaacgccgaaaactaatatcccccgaaaaacaacaactcgcccgatccttcgcgtcgaaatcaccaccccgaaaaaacaaattaaaccgaaatactcaacgcatcccgaccccgaaaaaaaaactatccgccccgcgaccgtcgaccccgaatctaatactccgcgaaaaaaaacgacgaaaaaatcgaaaccgcccccacaaaacgcctcgaacgaataaaattatttcctaaattccgcgaccgccgactacgaaaactcctccctctctacgtccctcgcccattaacccgaaaataactaaatctatatttaaatacattattctttaaacaaat

SEQ ID NO: 23585 - DNA, 556 bp, Artificial Sequence
  chemically treated genomic DNA (Homo sapiens) CpG-island No: 23585
  unsure (503, 506, 513..514, 517, 520..521, 523..524, 552)
gagggcgaggagagagcggggagagagagaggggagggggagagggagggaggggggcgagagagagagagagggtgggagggaggagagagtgagtaggaggaaggaggcgggggagcgagagggcgggggagaggagggggagagaggggagagagagagagtgggagggagagagagggggagaggaggaggggggggagggggggagagagagggagagcgagggagagagagagggagagagagaggggaggggggaggggagagagaggagggagtgagaggagagagagggacgagagaggagaggggggagaggggagagaggagaggagagaggagaggggagaggggcgagagaagaggcgtggggagaggagaggagaggagaggaggagaggagggaggagaggtgagcgagaggggaggaggggagaggaggagagaggagagcgaggagaggcgaggaggaggagtagaggaggagtagaggaggtagngangaggggnnnantannnnnaggaggaggaggggaggagggagaggantaat

SEQ ID NO: 23586 - DNA, 556 bp, Artificial Sequence
  chemically treated genomic DNA (Homo sapiens) CpG-island No: 23586
  unsure (5, 33..34, 36..37, 40, 42..43, 51, 54)
attantcctctccctcctcccctcctcctcctnnnnntantnnncccctcntcnctacctcctctactcctcctctactcctcctcctcgcctctcctcgctctcctctctcctcctctcccctcctcccctctcgctcacctctcctccctcctctcctcctctcctctcctctcctctccccacgcctcttctctcgcccctctcccctctcctctctcctctcctctctcccctctcccccctctcctctctcgtccctctctctcctctcactccctcctctctctcccctcccccctcccctctctctctccctctctctctccctcgctctccctctctctccccccctcccccccctcctcctctccccctctctctccctcccactctctctctctcccctctctccccctcctctcccccgccctctcgctcccccgcctccttcctcctactcactctctcctccctcccaccctctctctctctctcgcccccctccctccctctccccctcccctctctctctccccgctctctcctcgccctc

SEQ ID NO: 23587 - DNA, 556 bp, Artificial Sequence
  chemically treated genomic DNA (Homo sapiens) CpG-island No: 23587
  unsure (5, 33..34, 36..37, 40, 42..43, 51, 54)
attantttttttttttttttttttttttttttnnnnntgntnnnttttttnttnttattttttttattttttttttatttttttttttcgttttttttcgttttttttttttttttttttttttttttttttttcgtttattttttttttttttttttttttttttttttttttttttttttttacgttttttttttcgttttttttttttttttttttttttttttttttttttttttttttttttttttttttcgtttttttttttttttttattttttttttttttttttttttttttttttttttttttttttttttttttttttttcgttttttttttttttttttttttttttttttttttttttttttttttttttttttttttattttttttttttttttttttttttttttttttttttcgttttttcgttttttcgtttttttttttttatttattttttttttttttttattttttttttttttttcgtttttttttttttttttttttttttttttttttttttttcgtttttttttcgttttt

SEQ ID NO: 23588 - DNA, 556 bp, Artificial Sequence
  chemically treated genomic DNA (Homo sapiens) CpG-island No: 23588
  unsure (503, 506, 513..514, 517, 520..521, 523..524, 552)
aaaaacgaaaaaaaaacgaaaaaaaaaaaaaaaaaaaaaaaaaaaaaaaaaaaaaaacgaaaaaaaaaaaaaaaataaaaaaaaaaaaaaaataaataaaaaaaaaaaaacgaaaaaacgaaaaaacgaaaaaaaaaaaaaaaaaaaaaaaaaaaaaaaaaaaataaaaaaaaaaaaaaaaaaaaaaaaaaaaaaaaaaaaaaaaaaaaaaaaaaaaaaaaaacgaaaaaaaaaaaaaaaaaaaaaaaaaaaaaaaaaaaaaaaaaaaaaaaaaaaaaaaataaaaaaaaaaaaaaaaacgaaaaaaaaaaaaaaaaaaaaaaaaaaaaaaaaaaaaaaaaaaaaaaaaaaaaaaaacgaaaaaaaaaacgtaaaaaaaaaaaaaaaaaaaaaaaaaaaaaaaaaaaaaaaaaaaataaacgaaaaaaaaaaaaaaaaaaaaaaaaaaaaaaaaaacgaaaaaaaacgaaaaaaaaaaataaaaaaaaaataaaaaaaataanaanaaaaaannnancannnnnaaaaaaaaaaaaaaaaaaaaaaaaaaantaat

SEQ ID NO: 23589 - DNA, 772 bp, Artificial Sequence
  chemically treated genomic DNA (Homo sapiens) CpG-island No: 23589
gaggagggtaggaagtcgggattgcgtttttgttttcgtatttcgatttatttatcgtcggggtcgcggttagcgttagggttggggtcgggcggagtgagcgggtcggcgtagaggagagttgaggcggtttgggcggtagcggcggtcggtataatttcgggtagtcgcggttttagaggcgtttttttaggatgtggagttggaagattgtggcggcggtggtggaggcggaggtttttggttgcggacgtggcgttcgacgcgattcgtttttttcgtcgtttttttagttttcgttttttttcgcggttttagtttcgacgcgtacgcgcgttcgtgtagttcgggtttttttcgcgtttatcgggtatacgtttattcgttttcgtagggttcggtttttttagtagtttttagtcggttgtgttttaattgcgtacgcgcgacgtttcgaggttcgttttcgttttttcgttttttggacgttttcgtgggaattttcggtcggtttgcgcgtttttttttcgggggttttttcgtttttttttcgttattatttaattaaatcgggcgaggggcgcgaagttcgggagacgcgtaggtcgcggtttttaggttcggtgttttgacgtcggcggtgttcgcgtttcgcgtcgagtaacggttttcggaatttagagttttcgttttagggaaggtgggacggtcgttagtttttttagtatttttttcgtttagggacgttaattttttttgtatgttgttttta

SEQ ID NO: 23590 - DNA, 772 bp, Artificial Sequence
  chemically treated genomic DNA (Homo sapiens) CpG-island No: 23590
taaaaacaacatacaaaaaaaattaacgtccctaaacgaaaaaaatactaaaaaaactaacgaccgtcccaccttccctaaaacgaaaactctaaattccgaaaaccgttactcgacgcgaaacgcgaacaccgccgacgtcaaaacaccgaacctaaaaaccgcgacctacgcgtctcccgaacttcgcgcccctcgcccgatttaattaaataataacgaaaaaaaaacgaaaaaacccccgaaaaaaaaacgcgcaaaccgaccgaaaattcccacgaaaacgtccaaaaaacgaaaaaacgaaaacgaacctcgaaacgtcgcgcgtacgcaattaaaacacaaccgactaaaaactactaaaaaaaccgaaccctacgaaaacgaataaacgtatacccgataaacgcgaaaaaaacccgaactacacgaacgcgcgtacgcgtcgaaactaaaaccgcgaaaaaaaacgaaaactaaaaaaacgacgaaaaaaacgaatcgcgtcgaacgccacgtccgcaaccaaaaacctccgcctccaccaccgccgccacaatcttccaactccacatcctaaaaaaacgcctctaaaaccgcgactacccgaaattataccgaccgccgctaccgcccaaaccgcctcaactctcctctacgccgacccgctcactccgcccgaccccaaccctaacgctaaccgcgaccccgacgataaataaatcgaaatacgaaaacaaaaacgcaatcccgacttcctaccctcctc

SEQ ID NO: 23591 - DNA, 772 bp, Artificial Sequence
  chemically treated genomic DNA (Homo sapiens) CpG-island No: 23591
tgaggatagtatgtaagggaggttgacgtttttggacgaagaaagtgttggagaaattggcgatcgttttattttttttaaggcgaaggttttgaatttcgaagatcgttattcggcgcggaacgcgggtatcgtcgacgttaaaatatcgggtttgggggtcgcggtttacgcgtttttcgggtttcgcgtttttcgttcgatttgattggatggtggcgggaagaaggcggggagattttcggaggaggggcgcgtaggtcggtcgggggtttttacggaggcgtttagggggcgaaggggcgggagcgggtttcggagcgtcgcgcgtgcgtaattgggatatagtcggttggggattgttgggagggtcggattttgcgagaacgggtgggcgtgtgttcggtgggcgcgggaggggttcgggttgtacgagcgcgcgtgcgcgtcggaattggagtcgcgggaggaggcgggagttgaggaggcggcggagggggcgggtcgcgtcgggcgttacgttcgtagttagaggttttcgtttttattatcgtcgttatagttttttagttttatattttgagaggacgtttttggagtcgcgattgttcggggttgtgtcggtcgtcgttgtcgtttaggtcgttttagtttttttttgcgtcggttcgtttatttcgttcggttttagttttagcgttggtcgcgatttcggcggtgagtgagtcgggatgcgagggtaggggcgtagtttcggttttttgtttttttt

SEQ ID NO: 23592 - DNA, 772 bp, Artificial Sequence
  chemically treated genomic DNA (Homo sapiens) CpG-island No: 23592
aaaaaaaacaaaaaaccgaaactacgcccctaccctcgcatcccgactcactcaccgccgaaatcgcgaccaacgctaaaactaaaaccgaacgaaataaacgaaccgacgcaaaaaaaaactaaaacgacctaaacgacaacgacgaccgacacaaccccgaacaatcgcgactccaaaaacgtcctctcaaaatataaaactaaaaaactataacgacgataataaaaacgaaaacctctaactacgaacgtaacgcccgacgcgacccgccccctccgccgcctcctcaactcccgcctcctcccgcgactccaattccgacgcgcacgcgcgctcgtacaacccgaacccctcccgcgcccaccgaacacacgcccacccgttctcgcaaaatccgaccctcccaacaatccccaaccgactatatcccaattacgcacgcgcgacgctccgaaacccgctcccgccccttcgccccctaaacgcctccgtaaaaacccccgaccgacctacgcgcccctcctccgaaaatctccccgccttcttcccgccaccatccaatcaaatcgaacgaaaaacgcgaaacccgaaaaacgcgtaaaccgcgacccccaaacccgatattttaacgtcgacgatacccgcgttccgcgccgaataacgatcttcgaaattcaaaaccttcgccttaaaaaaaataaaacgatcgccaatttctccaacactttcttcgtccaaaaacgtcaacctcccttacatactatcctca

SEQ ID NO: 23593 - DNA, 530 bp, Artificial Sequence
  chemically treated genomic DNA (Homo sapiens) CpG-island No: 23593
tgtttgtagtggtttagtacgtgggttcgttttgtaagtaagttcggttttcgttcgtttcgttcgtttcgtttcgtttcgtttcgtttcgttcgtttcgtttcgtttcgtttcgttcgtttcgtttcgcgttcgtttttttcgttttggttcggtttcgttttttagttcgtgcgcgcgcgcgcgggagagcggtcgttcgttcggaagtgacgtaattttacggtttagtaatcgttgttaaggagttcgattttgggagcggtttagagttcgggcgttttttggggggtggggaaacggtttcgtgaggagaatttgaggtaatttcgttaattcgcggtcggaagtttttttgaatttcgaaataggagagagttttcgttttttttcggttttgatgtagtatttcgtaagtggaaggggtcgtcgcggttaagttttcggataggggaatcgggttttttttgggattcgagcggatttaggtcgttttttggagggatgaattgtcgaggggtttagggtag

SEQ ID NO: 23594 - DNA, 530 bp, Artificial Sequence
  chemically treated genomic DNA (Homo sapiens) CpG-island No: 23594
ctaccctaaacccctcgacaattcatccctccaaaaaacgacctaaatccgctcgaatcccaaaaaaaacccgattcccctatccgaaaacttaaccgcgacgaccccttccacttacgaaatactacatcaaaaccgaaaaaaaacgaaaactctctcctatttcgaaattcaaaaaaacttccgaccgcgaattaacgaaattacctcaaattctcctcacgaaaccgtttccccaccccccaaaaaacgcccgaactctaaaccgctcccaaaatcgaactccttaacaacgattactaaaccgtaaaattacgtcacttccgaacgaacgaccgctctcccgcgcgcgcgcgcacgaactaaaaaacgaaaccgaaccaaaacgaaaaaaacgaacgcgaaacgaaacgaacgaaacgaaacgaaacgaaacgaacgaaacgaaacgaaacgaaacgaaacgaacgaaacgaacgaaaaccgaacttacttacaaaacgaacccacgtactaaaccactacaaaca

SEQ ID NO: 23595 - DNA, 530 bp, Artificial Sequence
  chemically treated genomic DNA (Homo sapiens) CpG-island No: 23595
ttgttttgggtttttcgatagtttatttttttagggagcggtttggattcgttcgaattttagaaggggttcgatttttttattcgggggtttaatcgcgacgattttttttatttgcgaggtgttgtattaggatcgagagaggacgggagtttttttttatttcggggtttagaggagttttcgatcgcgagttggcgaggttattttaaattttttttacgaaatcgtttttttattttttaggaggcgttcgggttttagatcgtttttagagtcgagttttttggtaacggttgttaggtcgtagagttacgttattttcgggcgagcggtcgttttttcgcgcgcgcgcgtacgagttggggggcggggtcgggttagggcggggaggacgggcgcggggcggagcggacggggcggggcggggcggagcggacgggacggggcgggacggggcggggcggacggggcggacgggagtcgggtttatttgtaaagcgggtttacgtgttgagttattgtagata

SEQ ID NO: 23596 - DNA, 530 bp, Artificial Sequence
  chemically treated genomic DNA (Homo sapiens) CpG-island No: 23596
tatctacaataactcaacacgtaaacccgctttacaaataaacccgactcccgtccgccccgtccgccccgccccgtcccgccccgtcccgtccgctccgccccgccccgccccgtccgctccgccccgcgcccgtcctccccgccctaacccgaccccgccccccaactcgtacgcgcgcgcgcgaaaaaacgaccgctcgcccgaaaataacgtaactctacgacctaacaaccgttaccaaaaaactcgactctaaaaacgatctaaaacccgaacgcctcctaaaaaataaaaaaacgatttcgtaaaaaaaatttaaaataacctcgccaactcgcgatcgaaaactcctctaaaccccgaaataaaaaaaaactcccgtcctctctcgatcctaatacaacacctcgcaaataaaaaaaatcgtcgcgattaaacccccgaataaaaaaatcgaaccccttctaaaattcgaacgaatccaaaccgctccctaaaaaaataaactatcgaaaaacccaaaacaa

SEQ ID NO: 23597 - DNA, 1189 bp, Artificial Sequence
  chemically treated genomic DNA (Homo sapiens) CpG-island No: 23597
gcggttaaattcgaatagtaaaacgttgttgacgttaatgaagttatgttcgaaatggagcgaggcggcggagttggggaggcggtaatttcgcgagatggaagttagttttcgttaggttcggaagtttcgtttgagggggcgggggacggaggagggagcgggagtcgagcgagagtttgtggaggagttcgtttgttgtagcgtgcgtaagtaaggtagttacgtcgggcggttacgttgcggaatcggcgtaggcgtttttggagaatcggcgggttgcgtttcgttggggttggtcgcggagggggggaggggatgtcggttagtgcgagattcgttgttgttgaggagaggagcgttaatagtagtattatgggtgagttttagtttcgggtgtcgcgatttggggttagcggtttcgaatgtcgggaagttttgcggtcgttggatcgagttagggaacgttttgaggcgaggcggaggtagcggcgaggggagtcgggatgggggttattgcgggttcggggcgcggtagcggcgggttcggggggaggggaggcggcggcggtgatagtttgaattgaacgtgaggagagtcgaggcggcggtattttttgtgtcgcggcgggttggttttcggcgtagagtcgcggttttcgcggtcggagtagtttgagcgtggtggttttagttttgtttttgttttttttcgttttttcgtttttttttagttttttttcgggttcgtcggttttcgcggtttcgtttttttttgttttcggtcgtattttcgtcggtagaagttttttcgtggggtagtgggtttggttaggagggtggggacgagtgtgaacgttcgggcgagggtgttgtgtgggttaattcgggcgggcggcggcggggagggaggaagaaggatgtattaggttgaggttgtggtggaggcggcggcggcggttgtagtcgtagttttagttatcgcgtcgttttttcgttttttttttcgtttttcggggttgtttttttttaggcgtagttcggaaggtcggtggatggcgggcgagttttgagaacggagggagaatcggtagtttggtttggaatttgggtttaatttttaggagtaagggaaagagaacgtttgggaagggcgtttttcggaggagatagaaagggtgggaagggt

SEQ ID NO: 23598 - DNA, 1189 bp, Artificial Sequence
  chemically treated genomic DNA (Homo sapiens) CpG-island No: 23598
acccttcccaccctttctatctcctccgaaaaacgcccttcccaaacgttctctttcccttactcctaaaaattaaacccaaattccaaaccaaactaccgattctccctccgttctcaaaactcgcccgccatccaccgaccttccgaactacgcctaaaaaaaaacaaccccgaaaaacgaaaaaaaaaacgaaaaaacgacgcgataactaaaactacgactacaaccgccgccgccgcctccaccacaacctcaacctaatacatccttcttcctccctccccgccgccgcccgcccgaattaacccacacaacaccctcgcccgaacgttcacactcgtccccaccctcctaaccaaacccactaccccacgaaaaaacttctaccgacgaaaatacgaccgaaaacaaaaaaaaacgaaaccgcgaaaaccgacgaacccgaaaaaaaactaaaaaaaaacgaaaaaacgaaaaaaaacaaaaacaaaactaaaaccaccacgctcaaactactccgaccgcgaaaaccgcgactctacgccgaaaaccaacccgccgcgacacaaaaaataccgccgcctcgactctcctcacgttcaattcaaactatcaccgccgccgcctcccctccccccgaacccgccgctaccgcgccccgaacccgcaataacccccatcccgactcccctcgccgctacctccgcctcgcctcaaaacgttccctaactcgatccaacgaccgcaaaacttcccgacattcgaaaccgctaaccccaaatcgcgacacccgaaactaaaactcacccataatactactattaacgctcctctcctcaacaacaacgaatctcgcactaaccgacatcccctccccccctccgcgaccaaccccaacgaaacgcaacccgccgattctccaaaaacgcctacgccgattccgcaacgtaaccgcccgacgtaactaccttacttacgcacgctacaacaaacgaactcctccacaaactctcgctcgactcccgctccctcctccgtcccccgccccctcaaacgaaacttccgaacctaacgaaaactaacttccatctcgcgaaattaccgcctccccaactccgccgcctcgctccatttcgaacataacttcattaacgtcaacaacgttttactattcgaatttaaccgc

SEQ ID NO: 23599 - DNA, 1189 bp, Artificial Sequence
  chemically treated genomic DNA (Homo sapiens) CpG-island No: 23599
attttttttattttttttatttttttcggggggcgttttttttaggcgtttttttttttttatttttaaaaattaagtttaaattttaaattaaattatcgatttttttttcgtttttaagattcgttcgttatttatcggtttttcgggttgcgtttggagagaggtaatttcgagaggcgggaggaggagcggggaggcgacgcggtgattggagttgcggttgtagtcgtcgtcgtcgtttttattatagttttagtttggtgtattttttttttttttttttcgtcgtcgttcgttcgggttggtttatatagtattttcgttcgagcgtttatattcgtttttatttttttagttaggtttattgttttacgaggggatttttgtcgacggggatgcggtcggggataggaggaagcggggtcgcggaagtcggcgggttcgggaggagattgaggaaaggcgaagggacggagagaagtaagggtagggttgagattattacgtttaggttgtttcggtcgcggaggtcgcggttttgcgtcgggggttagttcgtcgcggtataggaaatgtcgtcgtttcggttttttttacgtttaatttaaattgttatcgtcgtcgtttttttttttttcgagttcgtcgttgtcgcgtttcgggttcgtagtggtttttatttcggtttttttcgtcgttgttttcgtttcgttttagggcgttttttagttcggtttagcggtcgtagagtttttcggtattcggagtcgttgattttaagtcgcggtattcgaagttgagatttatttatggtgttgttgttgacgtttttttttttagtagtagcggatttcgtattgatcgatatttttttttttttttcgcgattagttttagcggagcgtagttcgtcgattttttaaaggcgtttacgtcgatttcgtagcgtagtcgttcggcgtagttgttttgtttacgtacgttatagtaggcggatttttttataggttttcgttcgattttcgttttttttttcgtttttcgtttttttagacgaggttttcgggtttagcggaggttggtttttatttcgcgagattatcgtttttttagtttcgtcgtttcgttttatttcgagtatgattttattggcgttagtaacgttttgttgttcgggtttagtcgt

SEQ ID NO: 23600 - DNA, 1189 bp, Artificial Sequence
  chemically treated genomic DNA (Homo sapiens) CpG-island No: 23600
acgactaaacccgaacaacaaaacgttactaacgccaataaaatcatactcgaaataaaacgaaacgacgaaactaaaaaaacgataatctcgcgaaataaaaaccaacctccgctaaacccgaaaacctcgtctaaaaaaacgaaaaacgaaaaaaaaaacgaaaatcgaacgaaaacctataaaaaaatccgcctactataacgtacgtaaacaaaacaactacgccgaacgactacgctacgaaatcgacgtaaacgcctttaaaaaatcgacgaactacgctccgctaaaactaatcgcgaaaaaaaaaaaaaaatatcgatcaatacgaaatccgctactactaaaaaaaaaaacgtcaacaacaacaccataaataaatctcaacttcgaataccgcgacttaaaatcaacgactccgaataccgaaaaactctacgaccgctaaaccgaactaaaaaacgccctaaaacgaaacgaaaacaacgacgaaaaaaaccgaaataaaaaccactacgaacccgaaacgcgacaacgacgaactcgaaaaaaaaaaaaacgacgacgataacaatttaaattaaacgtaaaaaaaaccgaaacgacgacatttcctataccgcgacgaactaacccccgacgcaaaaccgcgacctccgcgaccgaaacaacctaaacgtaataatctcaaccctacccttacttctctccgtcccttcgcctttcctcaatctcctcccgaacccgccgacttccgcgaccccgcttcctcctatccccgaccgcatccccgtcgacaaaaatcccctcgtaaaacaataaacctaactaaaaaaataaaaacgaatataaacgctcgaacgaaaatactatataaaccaacccgaacgaacgacgacgaaaaaaaaaaaaaaaaaatacaccaaactaaaactataataaaaacgacgacgacgactacaaccgcaactccaatcaccgcgtcgcctccccgctcctcctcccgcctctcgaaattacctctctccaaacgcaacccgaaaaaccgataaataacgaacgaatcttaaaaacgaaaaaaaaatcgataatttaatttaaaatttaaacttaatttttaaaaataaaaaaaaaaaaacgcctaaaaaaaacgccccccgaaaaaaataaaaaaaataaaaaaaat

SEQ ID NO: 23601 - DNA, 527 bp, Artificial Sequence
  chemically treated genomic DNA (Homo sapiens) CpG-island No: 23601
gtgcgcgatttcggttcgcgttttttcggatattttttagtttagcgcgtcgtcgcgttttcgtttagtaatcgtttcgggcgcgtaaagtttaaggatcgtcgtttcgttttttgagggggacggagcgggttttaggatcgggagggtgcgcggacgcggcgggcgggggttcgttgattttagggttttcggaattttattttttcgtagtaatataatagggggtcgcggtcggtttcgcgttgggttttcggttttcgtttggattgttaaatttcggcggtcggaagtttcgtttcgagtgacgttacggggcgaggcgttgcgtgcggttgtggtttttggtcggatagaagtcggggtatagagggtttggttagggcggcgttgggtagtcgcgggggaagttattttagtgttagggcgggaattgcgggtcggggcggttttttttacgttttagcgacggagtttcggttattgttaattgtttgttatttatttgttgtttattgtgtgttagg

SEQ ID NO: 23602 - DNA, 527 bp, Artificial Sequence
  chemically treated genomic DNA (Homo sapiens) CpG-island No: 23602
cctaacacacaataaacaacaaataaataacaaacaattaacaataaccgaaactccgtcgctaaaacgtaaaaaaaaccgccccgacccgcaattcccgccctaacactaaaataacttcccccgcgactacccaacgccgccctaaccaaaccctctataccccgacttctatccgaccaaaaaccacaaccgcacgcaacgcctcgccccgtaacgtcactcgaaacgaaacttccgaccgccgaaatttaacaatccaaacgaaaaccgaaaacccaacgcgaaaccgaccgcgaccccctattatattactacgaaaaaataaaattccgaaaaccctaaaatcaacgaacccccgcccgccgcgtccgcgcaccctcccgatcctaaaacccgctccgtccccctcaaaaaacgaaacgacgatccttaaactttacgcgcccgaaacgattactaaacgaaaacgcgacgacgcgctaaactaaaaaatatccgaaaaaacgcgaaccgaaatcgcgcac

SEQ ID NO: 23603 - DNA, 527 bp, Artificial Sequence
  chemically treated genomic DNA (Homo sapiens) CpG-island No: 23603
tttggtatatagtaaatagtaagtgaatgataagtagttggtagtggtcggagtttcgtcgttggggcgtggagagggtcgtttcggttcgtagttttcgttttgatattgggataatttttttcgcggttgtttagcgtcgttttgattagattttttgtatttcgatttttgttcggttagaagttatagtcgtacgtagcgtttcgtttcgtgacgttattcggggcgggattttcggtcgtcgaagtttaatagtttaggcgggagtcggaagtttagcgcggagtcggtcgcggttttttgttgtgttgttgcggagaggtgaggtttcggaggttttgaggttagcgggttttcgttcgtcgcgttcgcgtattttttcgattttaagattcgtttcgttttttttagagggcggggcggcggtttttgggttttgcgcgttcggagcggttgttgggcgggggcgcggcggcgcgttgggttgggaagtgttcggggaggcgcgggtcggggtcgcgtat

SEQ ID NO: 23604 - DNA, 527 bp, Artificial Sequence
  chemically treated genomic DNA (Homo sapiens) CpG-island No: 23604
atacgcgaccccgacccgcgcctccccgaacacttcccaacccaacgcgccgccgcgcccccgcccaacaaccgctccgaacgcgcaaaacccaaaaaccgccgccccgccctctaaaaaaaacgaaacgaatcttaaaatcgaaaaaatacgcgaacgcgacgaacgaaaacccgctaacctcaaaacctccgaaacctcacctctccgcaacaacacaacaaaaaaccgcgaccgactccgcgctaaacttccgactcccgcctaaactattaaacttcgacgaccgaaaatcccgccccgaataacgtcacgaaacgaaacgctacgtacgactataacttctaaccgaacaaaaatcgaaatacaaaaaatctaatcaaaacgacgctaaacaaccgcgaaaaaaattatcccaatatcaaaacgaaaactacgaaccgaaacgaccctctccacgccccaacgacgaaactccgaccactaccaactacttatcattcacttactatttactatataccaaa

SEQ ID NO: 23605 - DNA, 953 bp, Artificial Sequence
  chemically treated genomic DNA (Homo sapiens) CpG-island No: 23605
cgacgcgcggttgtttgtgtggggcggggtatagggcgtgtttacgcggtcgagtatcgttttcgtcgttttcgtatcgttttattcgaaagtagtcgttaatgaggcgtcggtttgggggcggggtttaggttttcgaggggcgtgttcgcgcgttcgagtatcgttttcgacgtattttttcgtttcgtagttttcgggcggtggagttattttataaagcggcgatcgttttcgcggggcggggcgtagtcggtttcgttttacggggtgttttttcgttcgttcgttagtttttcgcgtttaggacggtcggtagagggcgttgcgttacggggtcgggtcgcggcgacggtggcggcggcggcggcgaggcggcgcgtggtcggtaggcggcgttgttcggttcggtttcggtttgtacggcggttgcggcggcggtagcggtagcggcggcggcggcggcggcggcggcggcggcggcggcggcggcggcggtagcggcggcggtttgggttcgggcgtagcggcggcggcggcggggtttggagtcggatttaagatggtagcggcggcggcggcggtggggtcgggcgcgggcggcgcggggtcggcggtttcgggcggcgcggggttttgcgttatcgtgtcggtgtttttcggcgttcgtttttttattatcggcgacgcgaacggcgagatttagcggtacgcggagtagtaggcgttgcgtttcgaggtgcgcgtcggttcggattcggcgggtatcgttttttatagtcgtgagtacggggtttcggggtaggcgtagggtcggggttgtttacgaggtcggttcggggcgggggtcggcggggaggggttttgagcgcgggggtttggcgtggggttttcgggattgagtcggtggtttgtagggagcgatcgtggagggtcggtgttaggggatagat

SEQ ID NO: 23606 - DNA, 953 bp, Artificial Sequence
  chemically treated genomic DNA (Homo sapiens) CpG-island No: 23606
atctatcccctaacaccgaccctccacgatcgctccctacaaaccaccgactcaatcccgaaaaccccacgccaaacccccgcgctcaaaacccctccccgccgacccccgccccgaaccgacctcgtaaacaaccccgaccctacgcctaccccgaaaccccgtactcacgactataaaaaacgatacccgccgaatccgaaccgacgcgcacctcgaaacgcaacgcctactactccgcgtaccgctaaatctcgccgttcgcgtcgccgataataaaaaaacgaacgccgaaaaacaccgacacgataacgcaaaaccccgcgccgcccgaaaccgccgaccccgcgccgcccgcgcccgaccccaccgccgccgccgccgctaccatcttaaatccgactccaaaccccgccgccgccgccgctacgcccgaacccaaaccgccgccgctaccgccgccgccgccgccgccgccgccgccgccgccgccgccgccgccgctaccgctaccgccgccgcaaccgccgtacaaaccgaaaccgaaccgaacaacgccgcctaccgaccacgcgccgcctcgccgccgccgccgccaccgtcgccgcgacccgaccccgtaacgcaacgccctctaccgaccgtcctaaacgcgaaaaactaacgaacgaacgaaaaaacaccccgtaaaacgaaaccgactacgccccgccccgcgaaaacgatcgccgctttataaaataactccaccgcccgaaaactacgaaacgaaaaaatacgtcgaaaacgatactcgaacgcgcgaacacgcccctcgaaaacctaaaccccgcccccaaaccgacgcctcattaacgactactttcgaataaaacgatacgaaaacgacgaaaacgatactcgaccgcgtaaacacgccctataccccgccccacacaaacaaccgcgcgtcg

SEQ ID NO: 23607 - DNA, 953 bp, Artificial Sequence
  chemically treated genomic DNA (Homo sapiens) CpG-island No: 23607
gtttgttttttggtatcggttttttacggtcgttttttgtaggttatcggtttagtttcggggattttacgttaggttttcgcgtttagggttttttttcgtcggttttcgtttcgggtcggtttcgtgagtagtttcggttttgcgtttgtttcggggtttcgtatttacggttgtagagggcgatgttcgtcgagttcgggtcggcgcgtatttcgaggcgtagcgtttgttgtttcgcgtgtcgttggatttcgtcgttcgcgtcgtcgatggtgaggaggcgggcgtcggggaatatcgatacggtagcgtagggtttcgcgtcgttcgggatcgtcgatttcgcgtcgttcgcgttcggttttatcgtcgtcgtcgtcgttgttattttagattcggttttaggtttcgtcgtcgtcgtcgttgcgttcgggtttaggtcgtcgtcgttgtcgtcgtcgtcgtcgtcgtcgtcgtcgtcgtcgtcgtcgtcgtcgtcgttgtcgttatcgtcgtcgtagtcgtcgtgtaggtcgaggtcgagtcgggtagcgtcgtttgtcggttacgcgtcgtttcgtcgtcgtcgtcgttatcgtcgtcgcggttcggtttcgtggcgtagcgttttttgtcggtcgttttgggcgcggggagttagcgagcgaacgagagggtatttcgtggggcgggatcggttacgtttcgtttcgcgagaacggtcgtcgttttgtgaggtggttttatcgttcgggaattgcggggcgggagggtacgtcgggggcggtgttcgggcgcgcgggtacgtttttcggaggtttgggtttcgtttttaggtcggcgttttattaacggttgttttcgagtgaggcggtgcggggacggcgggggcggtgttcggtcgcgtggatacgttttgtatttcgttttatataagtagtcgcgcgtcg

SEQ ID NO: 23608 - DNA, 953 bp, Artificial Sequence
  chemically treated genomic DNA (Homo sapiens) CpG-island No: 23608
cgacgcgcgactacttatataaaacgaaatacaaaacgtatccacgcgaccgaacaccgcccccgccgtccccgcaccgcctcactcgaaaacaaccgttaataaaacgccgacctaaaaacgaaacccaaacctccgaaaaacgtacccgcgcgcccgaacaccgcccccgacgtaccctcccgccccgcaattcccgaacgataaaaccacctcacaaaacgacgaccgttctcgcgaaacgaaacgtaaccgatcccgccccacgaaataccctctcgttcgctcgctaactccccgcgcccaaaacgaccgacaaaaaacgctacgccacgaaaccgaaccgcgacgacgataacgacgacgacgacgaaacgacgcgtaaccgacaaacgacgctacccgactcgacctcgacctacacgacgactacgacgacgataacgacaacgacgacgacgacgacgacgacgacgacgacgacgacgacgacgacgacaacgacgacgacctaaacccgaacgcaacgacgacgacgacgaaacctaaaaccgaatctaaaataacaacgacgacgacgacgataaaaccgaacgcgaacgacgcgaaatcgacgatcccgaacgacgcgaaaccctacgctaccgtatcgatattccccgacgcccgcctcctcaccatcgacgacgcgaacgacgaaatccaacgacacgcgaaacaacaaacgctacgcctcgaaatacgcgccgacccgaactcgacgaacatcgccctctacaaccgtaaatacgaaaccccgaaacaaacgcaaaaccgaaactactcacgaaaccgacccgaaacgaaaaccgacgaaaaaaaaccctaaacgcgaaaacctaacgtaaaatccccgaaactaaaccgataacctacaaaaaacgaccgtaaaaaaccgataccaaaaaacaaac

SEQ ID NO: 23609 - DNA, 594 bp, Artificial Sequence
  chemically treated genomic DNA (Homo sapiens) CpG-island No: 23609
ttcggcggcgttcgggtggtagtcggtgtttcgtcgcgtttttgagaggtttcggtttcgttcgattttaggttgaagattaggtggttcggggtcggtaggttatttgtagtagatgtagttgggttacgagacgtcgcggtaggtggaggaagtagtcgcgagcgttggtgaaggttatagttattgtcgtttcgttttttttagtattcgttaggcgatcgttgttttatatcgtttcggagcgtcgttttgggttcgtttattttagcgtcgtaaaggattcgggattcggtaggtcgaggacgtcggagtcggaggagatcgatcggtttcgttttttgcggtttcgtttttttttttcgttgcgtattttgtcgtaagtttgtagtgggtgggataagaaagtttttgttatttatcgcgttttttcgtcgagtcgttcgggggcggtatttcgtttattaaattttcgtacgtaggaaacgatggtcgacgttgtcgattttttagttaattttggtattttttaatttatttcgtttttttattggataaaagggagtttagtagggcggatgttgttttttttgt

SEQ ID NO: 23610 - DNA, 594 bp, Artificial Sequence
  chemically treated genomic DNA (Homo sapiens) CpG-island No: 23610
acaaaaaaaacaacatccgccctactaaactcccttttatccaataaaaaaacgaaataaattaaaaaataccaaaattaactaaaaaatcgacaacgtcgaccatcgtttcctacgtacgaaaatttaataaacgaaataccgcccccgaacgactcgacgaaaaaacgcgataaataacaaaaactttcttatcccacccactacaaacttacgacaaaatacgcaacgaaaaaaaaaaacgaaaccgcaaaaaacgaaaccgatcgatctcctccgactccgacgtcctcgacctaccgaatcccgaatcctttacgacgctaaaataaacgaacccaaaacgacgctccgaaacgatataaaacaacgatcgcctaacgaatactaaaaaaaacgaaacgacaataactataaccttcaccaacgctcgcgactacttcctccacctaccgcgacgtctcgtaacccaactacatctactacaaataacctaccgaccccgaaccacctaatcttcaacctaaaatcgaacgaaaccgaaacctctcaaaaacgcgacgaaacaccgactaccacccgaacgccgccgaa

SEQ ID NO: 23611 - DNA, 594 bp, Artificial Sequence
  chemically treated genomic DNA (Homo sapiens) CpG-island No: 23611
gtagggaggataatattcgttttattgagtttttttttatttaataagagagcgggatgagttaaggagtgttaggattggttggagaatcgatagcgtcggttatcgttttttgcgtgcgaagatttgatgaacgaggtgtcgttttcgagcggttcggcggagaggcgcggtgggtgatagaagtttttttgttttatttattataggtttacggtaggatgcgtagcggggagagggggcggggtcgtagggggcggggtcgatcgatttttttcggtttcgacgttttcggtttgtcgggtttcgggttttttgcggcgttagggtgggcgaatttagagcgacgtttcgggacgatgtggggtagcgatcgtttggcgggtgttgggggaggcggggcggtagtgattgtggtttttattaacgttcgcgattgttttttttatttgtcgcggcgtttcgtggtttagttgtatttgttgtaggtaatttgtcggtttcgagttatttgatttttagtttggggtcggacgaggtcgaagttttttagggacgcggcgggatatcggttgttattcgggcgtcgtcgaa

SEQ ID NO: 23612 - DNA, 594 bp, Artificial Sequence
  chemically treated genomic DNA (Homo sapiens) CpG-island No: 23612
ttcgacgacgcccgaataacaaccgatatcccgccgcgtccctaaaaaacttcgacctcgtccgaccccaaactaaaaatcaaataactcgaaaccgacaaattacctacaacaaatacaactaaaccacgaaacgccgcgacaaataaaaaaaacaatcgcgaacgttaataaaaaccacaatcactaccgccccgcctcccccaacacccgccaaacgatcgctaccccacatcgtcccgaaacgtcgctctaaattcgcccaccctaacgccgcaaaaaacccgaaacccgacaaaccgaaaacgtcgaaaccgaaaaaaatcgatcgaccccgccccctacgaccccgccccctctccccgctacgcatcctaccgtaaacctataataaataaaacaaaaaaacttctatcacccaccgcgcctctccgccgaaccgctcgaaaacgacacctcgttcatcaaatcttcgcacgcaaaaaacgataaccgacgctatcgattctccaaccaatcctaacactccttaactcatcccgctctcttattaaataaaaaaaaactcaataaaacgaatattatcctccctac

SEQ ID NO: 23613 - DNA, 798 bp, Artificial Sequence
  chemically treated genomic DNA (Homo sapiens) CpG-island No: 23613
tagtttcgttttatttcggttcgcggtttcgtattcggttaggagcgtttcggatttcgaaagttttttttttatagggattttgttttacgttttttacgttatttggttcggtttttaatttttttttttcgagttttcgatagtagttttcggttttaattttttgtaatttagttcgtgaattcgcgtttcgcgcgtttatttagtattgttttttttatttagttttgtttttcgtttcgtcggtttttgttaggcggcgtaggtatatgtttagaggataggttcgttcgttcgattcgtttttaggttgttttcgtcgggcgcgagtcgtttattcgggtcgaggtgtttgaggcgtcgtcgtcgaagttttcgttgtaaagtcgggcgaagtttttaatcgttgtcgtttttagtttggtattgagcgtcgtgcgggggaggggcgcgggtagtcgttatcgttttcgttatcgcgcgtaggtttcgttttcgcgtcgcgcgggatttaattagggttgtcgggtcgttgtgcgttacgtttattttcggaggggaagttcgttttttattttacgttttacgtttcgttacgttttttttggtcgtatcgagggatgtaggcggtgtttaagcgtacgtttcgttttttagttatttgagtggtagagggttacgtttataggcgttttcgagtaacgtttattgttttttagatttcggagcggggtttttagagtttcgtttattgattcgttaggttttgtaaggttacgttttttggttttttaa

SEQ ID NO: 23614 - DNA, 798 bp, Artificial Sequence
  chemically treated genomic DNA (Homo sapiens) CpG-island No: 23614
ttaaaaaaccaaaaaacgtaaccttacaaaacctaacgaatcaataaacgaaactctaaaaaccccgctccgaaatctaaaaaacaataaacgttactcgaaaacgcctataaacgtaaccctctaccactcaaataactaaaaaacgaaacgtacgcttaaacaccgcctacatccctcgatacgaccaaaaaaaacgtaacgaaacgtaaaacgtaaaataaaaaacgaacttcccctccgaaaataaacgtaacgcacaacgacccgacaaccctaattaaatcccgcgcgacgcgaaaacgaaacctacgcgcgataacgaaaacgataacgactacccgcgcccctcccccgcacgacgctcaataccaaactaaaaacgacaacgattaaaaacttcgcccgactttacaacgaaaacttcgacgacgacgcctcaaacacctcgacccgaataaacgactcgcgcccgacgaaaacaacctaaaaacgaatcgaacgaacgaacctatcctctaaacatatacctacgccgcctaacaaaaaccgacgaaacgaaaaacaaaactaaataaaaaaaacaatactaaataaacgcgcgaaacgcgaattcacgaactaaattacaaaaaattaaaaccgaaaactactatcgaaaactcgaaaaaaaaaaattaaaaaccgaaccaaataacgtaaaaaacgtaaaacaaaatccctataaaaaaaaaactttcgaaatccgaaacgctcctaaccgaatacgaaaccgcgaaccgaaataaaacgaaacta

SEQ ID NO: 23615 - DNA, 798 bp, Artificial Sequence
  chemically treated genomic DNA (Homo sapiens) CpG-island No: 23615
ttgaggagttaggggacgtggttttgtagagtttagcgggttagtgggcggggttttaagaatttcgtttcggggtttaaggagtagtgggcgttgttcggaggcgtttgtgggcgtggttttttattatttagatgattggagagcggggcgtgcgtttgggtatcgtttgtatttttcggtgcgattagagggggcgtagcgaggcgtggaacgtggggtgggaagcgggtttttttttcggaagtgggcgtggcgtatagcggttcggtagttttggttgggtttcgcgcggcgcgggggcggggtttacgcgcggtggcgggggcggtggcggttgttcgcgtttttttttcgtacggcgtttagtgttaggttggaggcggtagcggttggaggtttcgttcggttttgtagcggggatttcggcggcggcgttttaggtatttcggttcgggtgagcggttcgcgttcggcgggggtagtttgagagcgagtcgggcgggcggatttgttttttgagtatgtgtttgcgtcgtttgataggagtcggcggggcgaggggtagggttaggtggaggggatagtgttgggtgggcgcgcggggcgcgggtttacgggttgggttgtaaggggttagggtcgggggttgttgtcgggggttcggggaaagggagttggggatcgaattaggtggcgtggggagcgtgaagtagggtttttgtggggaggaggttttcgaggttcggaacgtttttggtcgggtgcggagtcgcgggtcgaggtgggacgaggttg

SEQ ID NO: 23616 - DNA, 798 bp, Artificial Sequence
  chemically treated genomic DNA (Homo sapiens) CpG-island No: 23616
caacctcgtcccacctcgacccgcgactccgcacccgaccaaaaacgttccgaacctcgaaaacctcctccccacaaaaaccctacttcacgctccccacgccacctaattcgatccccaactccctttccccgaacccccgacaacaacccccgaccctaaccccttacaacccaacccgtaaacccgcgccccgcgcgcccacccaacactatcccctccacctaaccctacccctcgccccgccgactcctatcaaacgacgcaaacacatactcaaaaaacaaatccgcccgcccgactcgctctcaaactacccccgccgaacgcgaaccgctcacccgaaccgaaatacctaaaacgccgccgccgaaatccccgctacaaaaccgaacgaaacctccaaccgctaccgcctccaacctaacactaaacgccgtacgaaaaaaaaacgcgaacaaccgccaccgcccccgccaccgcgcgtaaaccccgcccccgcgccgcgcgaaacccaaccaaaactaccgaaccgctatacgccacgcccacttccgaaaaaaaaacccgcttcccaccccacgttccacgcctcgctacgccccctctaatcgcaccgaaaaatacaaacgatacccaaacgcacgccccgctctccaatcatctaaataataaaaaaccacgcccacaaacgcctccgaacaacgcccactactccttaaaccccgaaacgaaattcttaaaaccccgcccactaacccgctaaactctacaaaaccacgtcccctaactcctcaa

SEQ ID NO: 23617 - DNA, 587 bp, Artificial Sequence
  chemically treated genomic DNA (Homo sapiens) CpG-island No: 23617
tcgatcgttttacgttaattaattcgttcgttgattttgttacgaaatcgcgtttttttttttgttttttttcgaggggacgggacgtttttttttttatttaaatttatatatcgtggcggtagtttttttatattagcgttcgttatacgttagtttagtttatgtttaacgtattgaaatcgttgcgagtcgttcgtattacgatatttttaattttttacgatgattttatagttaacgttatttttttcgagacggttatgtattatattatatatagatagcgatacggcgatatatagtgcgtgatattgttattcgtatatagtaatagcggttacgcggtaataacgtatgtttagcgtagacgcgtatatattgtttagtgtattcgtagcgcgagtttaatatacggatcgtttagtacgttcgggatttcgtttattttgaattgatttttaggtgatattgtttagagtttacgtatagaacggcggacgtagttaacgttgaggtacgattcgcgatacgcgaggagagagattcgtaacgcgtttttggttttttaggatacgtattgatcg

SEQ ID NO: 23618 - DNA, 587 bp, Artificial Sequence
  chemically treated genomic DNA (Homo sapiens) CpG-island No: 23618
cgatcaatacgtatcctaaaaaaccaaaaacgcgttacgaatctctctcctcgcgtatcgcgaatcgtacctcaacgttaactacgtccgccgttctatacgtaaactctaaacaatatcacctaaaaatcaattcaaaataaacgaaatcccgaacgtactaaacgatccgtatattaaactcgcgctacgaatacactaaacaatatatacgcgtctacgctaaacatacgttattaccgcgtaaccgctattactatatacgaataacaatatcacgcactatatatcgccgtatcgctatctatatataatataatacataaccgtctcgaaaaaaataacgttaactataaaatcatcgtaaaaaattaaaaatatcgtaatacgaacgactcgcaacgatttcaatacgttaaacataaactaaactaacgtataacgaacgctaatataaaaaaactaccgccacgatatataaatttaaataaaaaaaaaaacgtcccgtcccctcgaaaaaaaacaaaaaaaaaaacgcgatttcgtaacaaaatcaacgaacgaattaattaacgtaaaacgatcga

SEQ ID NO: 23619 - DNA, 587 bp, Artificial Sequence
  chemically treated genomic DNA (Homo sapiens) CpG-island No: 23619
cggttagtgcgtgttttgagaggttaagagcgcgttgcgggttttttttttcgcgtatcgcgggtcgtattttagcgttggttgcgttcgtcgttttgtgcgtgggttttgggtagtgttatttagaggttagtttagagtgagcggagtttcgggcgtgttgagcggttcgtgtgttgggttcgcgttgcgagtgtattgggtagtgtgtgcgcgtttgcgttggatatgcgttgttgtcgcgtggtcgttgttgttgtatgcgagtggtagtgttacgtattgtgtgtcgtcgtgtcgttgtttgtgtgtggtgtggtgtatggtcgtttcgaggagagtagcgttggttgtgaagttatcgtgagaagttgggggtgtcgtgatacgggcggttcgtagcggttttagtgcgttgggtataggttgggttgacgtgtagcgggcgttggtgtagaggggttgtcgttacggtgtgtggatttgggtgagggggagggcgtttcgttttttcggagaggggtaggggggagggcgcggtttcgtgatagggttagcgggcgggttggttggcgtgggacggtcgg

SEQ ID NO: 23620 - DNA, 587 bp, Artificial Sequence
  chemically treated genomic DNA (Homo sapiens) CpG-island No: 23620
ccgaccgtcccacgccaaccaacccgcccgctaaccctatcacgaaaccgcgccctcccccctacccctctccgaaaaaacgaaacgccctccccctcacccaaatccacacaccgtaacgacaacccctctacaccaacgcccgctacacgtcaacccaacctatacccaacgcactaaaaccgctacgaaccgcccgtatcacgacacccccaacttctcacgataacttcacaaccaacgctactctcctcgaaacgaccatacaccacaccacacacaaacaacgacacgacgacacacaatacgtaacactaccactcgcatacaacaacaacgaccacgcgacaacaacgcatatccaacgcaaacgcgcacacactacccaatacactcgcaacgcgaacccaacacacgaaccgctcaacacgcccgaaactccgctcactctaaactaacctctaaataacactacccaaaacccacgcacaaaacgacgaacgcaaccaacgctaaaatacgacccgcgatacgcgaaaaaaaaaacccgcaacgcgctcttaacctctcaaaacacgcactaaccg

SEQ ID NO: 23621 - DNA, 618 bp, Artificial Sequence
  chemically treated genomic DNA (Homo sapiens) CpG-island No: 23621
cgaattggagaggaagtaaagaagatttggtttggtagaaagtttttacgtttagcggtagaggaaaaaatttacgcggggaaaaattttagggagaaggatttatcgcggatagtttatttaggaggaatagacggggaaaaatcgaattttatttacggatggaggagtataagttcgcggatgttacggttataatgtaagagggcgtaacgataagaggggtaattaatcggcgcgacgttaatcggtttatttaaggagcgtgggttttcgtcgttaacggacgtaatagtttgttttttagaaagttaacggagagaatataatttatatagacgtagcgatcgtgttataggtagagatatagtcgagttaagagtgcgtgttatagaagcgagcgtcgattatttacgcgatagagagcggcgcgatagaaacgatattcgtgagggagaggagagtttttatagacgttacgagtgagtattggggagcgacgaagaggaatatcgatttttttttacgagacgagagaagattcgtgtcgcgtttcgatcgttgagtatacgatagattagtttggattagtcgacgtttcgagaatacgacgagacg

SEQ ID NO: 23622 - DNA, 618 bp, Artificial Sequence
  chemically treated genomic DNA (Homo sapiens) CpG-island No: 23622
cgtctcgtcgtattctcgaaacgtcgactaatccaaactaatctatcgtatactcaacgatcgaaacgcgacacgaatcttctctcgtctcgtaaaaaaaaatcgatattcctcttcgtcgctccccaatactcactcgtaacgtctataaaaactctcctctccctcacgaatatcgtttctatcgcgccgctctctatcgcgtaaataatcgacgctcgcttctataacacgcactcttaactcgactatatctctacctataacacgatcgctacgtctatataaattatattctctccgttaactttctaaaaaacaaactattacgtccgttaacgacgaaaacccacgctccttaaataaaccgattaacgtcgcgccgattaattacccctcttatcgttacgccctcttacattataaccgtaacatccgcgaacttatactcctccatccgtaaataaaattcgatttttccccgtctattcctcctaaataaactatccgcgataaatccttctccctaaaatttttccccgcgtaaattttttcctctaccgctaaacgtaaaaactttctaccaaaccaaatcttctttacttcctctccaattcg

SEQ ID NO: 23623 - DNA, 618 bp, Artificial Sequence
  chemically treated genomic DNA (Homo sapiens) CpG-island No: 23623
cgtttcgtcgtgttttcgaggcgtcggttggtttaagttggtttgtcgtgtgtttagcggtcgaggcgcgatacgagttttttttcgtttcgtggggagagatcggtgttttttttcgtcgttttttagtatttattcgtggcgtttgtgggggttttttttttttttacgagtgtcgtttttgtcgcgtcgttttttgtcgcgtgagtggtcgacgttcgtttttgtgatacgtatttttagttcggttgtgtttttgtttgtgatacggtcgttgcgtttgtgtggattgtgtttttttcgttgattttttgagaggtaagttgttacgttcgttaacggcgagagtttacgttttttgagtgggtcggttggcgtcgcgtcggttgattgttttttttgtcgttgcgtttttttgtattgtgatcgtgatattcgcgggtttatgtttttttattcgtgagtagggttcgattttttttcgtttattttttttgagtgggttattcgcggtgggtttttttttttggagttttttttcgcgtggatttttttttttgtcgttgagcgtaaaagttttttgttagattaggttttttttgttttttttttagttcg

SEQ ID NO: 23624 - DNA, 618 bp, Artificial Sequence
  chemically treated genomic DNA (Homo sapiens) CpG-island No: 23624
cgaactaaaaaaaaaacaaaaaaaacctaatctaacaaaaaacttttacgctcaacgacaaaaaaaaaaatccacgcgaaaaaaaactccaaaaaaaaaaacccaccgcgaataacccactcaaaaaaaataaacgaaaaaaaatcgaaccctactcacgaataaaaaaacataaacccgcgaatatcacgatcacaatacaaaaaaacgcaacgacaaaaaaaacaatcaaccgacgcgacgccaaccgacccactcaaaaaacgtaaactctcgccgttaacgaacgtaacaacttacctctcaaaaaatcaacgaaaaaaacacaatccacacaaacgcaacgaccgtatcacaaacaaaaacacaaccgaactaaaaatacgtatcacaaaaacgaacgtcgaccactcacgcgacaaaaaacgacgcgacaaaaacgacactcgtaaaaaaaaaaaaaacccccacaaacgccacgaataaatactaaaaaacgacgaaaaaaaacaccgatctctccccacgaaacgaaaaaaaactcgtatcgcgcctcgaccgctaaacacacgacaaaccaacttaaaccaaccgacgcctcgaaaacacgacgaaacg

SEQ ID NO: 23625 - DNA, 1074 bp, Artificial Sequence
  chemically treated genomic DNA (Homo sapiens) CpG-island No: 23625
  unsure (603)
aaaggaggcgtcggtagaaaataagggcggggcgggtataaaaaacgggggggggattcgaaaaaagaagggcgcgtagaggaaaaaaaaaggggggcgcggtaaaaaagaaggaggcgggtttaaataaaaggggggcgcgcggcgggaaaaatagggggcgagagcgtaaaaaaaggggggggcggaggaaaaaaaagggcgggcgcgcggataaaaaaaagcgcggagcggaaagaaaaaaaaacgcggggcgcggaaaaaaaagtcgcgggggggcgtaaaaaaaaatagggggggggcgggtaaataaagacggggggggggggtattataaaaaacggggggggggggatataaaaaaagcgcgggcggcgcggaaaataaaaaaaaggcgcggggggtcgaaaaatagagaagggggggcggggagaataaaaaaaaaaagggcggagggggaatagaaaaagaagcggggggcgcggggcggtaataaaaataaagagaggcgcggaagcgtttgaataaaataagaacgcggcggggcgcgcgacgataaagaaataagagcgggtagcggcggggagaaaataaaataatagngggcgcgtcggcgcgcgaaaaaaagaaaagaggagcgcgcggtcgggttttaataaataaattaggggagggcgcgtcgtcgtaataagaaataaagcgggcgggcgcggttacgtatatattaataaagggagcggcgcggcggcggataaatataaaataaagagcgaggcgcgggcggtgaaaaaataaaaaattagggagggggggcgcgagatgtagtaaagataagcgaagagagggaggcgggcgagatcgaaaaaaaataaaaataatacgggcgtagggcgggcgatttaaataaaataagacggcgggggcgtcgaacgcgtaattttatagaaaaataaacgacgagggggggagtcggtcgcggtaaaatataataataacgcgagaggcggcgcgcgatcggtaatataataaaataaataaaagaaacgcgggagtttaacgttttagaacgagaga

SEQ ID NO: 23626 - DNA, 1074 bp, Artificial Sequence
  chemically treated genomic DNA (Homo sapiens) CpG-island No: 23626
  unsure (472)
tctctcgttctaaaacgttaaactcccgcgtttcttttatttattttattatattaccgatcgcgcgccgcctctcgcgttattattatattttaccgcgaccgactccccccctcgtcgtttatttttctataaaattacgcgttcgacgcccccgccgtcttattttatttaaatcgcccgccctacgcccgtattatttttattttttttcgatctcgcccgcctccctctcttcgcttatctttactacatctcgcgccccccctccctaattttttattttttcaccgcccgcgcctcgctctttattttatatttatccgccgccgcgccgctccctttattaatatatacgtaaccgcgcccgcccgctttatttcttattacgacgacgcgccctcccctaatttatttattaaaacccgaccgcgcgctcctcttttctttttttcgcgcgccgacgcgcccnctattattttattttctccccgccgctacccgctcttatttctttatcgtcgcgcgccccgccgcgttcttattttattcaaacgcttccgcgcctctctttatttttattaccgccccgcgccccccgcttctttttctattccccctccgccctttttttttttattctccccgcccccccttctctatttttcgaccccccgcgccttttttttattttccgcgccgcccgcgctttttttatatccccccccccccgttttttataataccccccccccccgtctttatttacccgccccccccctatttttttttacgcccccccgcgacttttttttccgcgccccgcgtttttttttctttccgctccgcgcttttttttatccgcgcgcccgcccttttttttcctccgcccccccctttttttacgctctcgccccctatttttcccgccgcgcgccccccttttatttaaacccgcctccttcttttttaccgcgcccccctttttttttcctctacgcgcccttcttttttcgaatcccccccccgttttttatacccgccccgcccttattttctaccgacgcctccttt

SEQ ID NO: 23627 - DNA, 1074 bp, Artificial Sequence
  chemically treated genomic DNA (Homo sapiens) CpG-island No: 23627
  unsure (472)
tttttcgttttgaagcgttgggttttcgcgttttttttgtttgttttgttgtgttatcgatcgcgcgtcgtttttcgcgttgttgttgtattttatcgcggtcggttttttttttcgtcgtttgtttttttgtgaggttgcgcgttcggcgttttcgtcgttttgttttatttgggtcgttcgttttgcgttcgtgttgtttttgttttttttcggtttcgttcgttttttttttttcgtttatttttattgtatttcgcgttttttttttttggttttttgtttttttatcgttcgcgtttcgttttttgttttgtatttgttcgtcgtcgcgtcgttttttttgttagtgtatgcgtggtcgcgttcgttcgttttgttttttgttgcggcggcgcgtttttttttggtttgtttgttggggttcggtcgcgcgttttttttttttttttttcgcgcgtcggcgcgtttnttgttgttttatttttttttcgtcgttgttcgtttttgtttttttgtcgtcgcgcgtttcgtcgcgtttttattttgtttaggcgttttcgcgtttttttttgtttttgttgtcgtttcgcgtttttcgtttttttttttatttttttttcgttttttttttttttgtttttttcgtttttttttttttatttttcggtttttcgcgttttttttttgtttttcgcgtcgttcgcgttttttttatgttttttttttttcgttttttgtggtgtttttttttttcgtttttgtttgttcgttttttttttgtttttttttgcgttttttcgcggttttttttttcgcgtttcgcgttttttttttttttcgtttcgcgtttttttttgttcgcgcgttcgtttttttttttttttcgtttttttttttttttgcgttttcgttttttgtttttttcgtcgcgcgttttttttttgtttgggttcgttttttttttttttgtcgcgttttttttttttttttttttgcgcgttttttttttttcgggtttttttttcgttttttgtgttcgtttcgtttttgttttttatcggcgtttttttt

SEQ ID NO: 23628 - DNA, 1074 bp, Artificial Sequence
  chemically treated genomic DNA (Homo sapiens) CpG-island No: 23628
  unsure (603)
aaaaaaaacgccgataaaaaacaaaaacgaaacgaacacaaaaaacgaaaaaaaaacccgaaaaaaaaaaaacgcgcaaaaaaaaaaaaaaaaaaaacgcgacaaaaaaaaaaaaaacgaacccaaacaaaaaaaaaacgcgcgacgaaaaaaacaaaaaacgaaaacgcaaaaaaaaaaaaaaacgaaaaaaaaaaaaaaacgaacgcgcgaacaaaaaaaaacgcgaaacgaaaaaaaaaaaaaacgcgaaacgcgaaaaaaaaaaccgcgaaaaaacgcaaaaaaaaacaaaaaaaaaacgaacaaacaaaaacgaaaaaaaaaaacaccacaaaaaacgaaaaaaaaaaaacataaaaaaaacgcgaacgacgcgaaaaacaaaaaaaaaacgcgaaaaaccgaaaaataaaaaaaaaaaaacgaaaaaaacaaaaaaaaaaaaaacgaaaaaaaaataaaaaaaaaaacgaaaaacgcgaaacgacaacaaaaacaaaaaaaaacgcgaaaacgcctaaacaaaataaaaacgcgacgaaacgcgcgacgacaaaaaaacaaaaacgaacaacgacgaaaaaaaaataaaacaacaanaaacgcgccgacgcgcgaaaaaaaaaaaaaaaaaacgcgcgaccgaaccccaacaaacaaaccaaaaaaaaacgcgccgccgcaacaaaaaacaaaacgaacgaacgcgaccacgcatacactaacaaaaaaaacgacgcgacgacgaacaaatacaaaacaaaaaacgaaacgcgaacgataaaaaaacaaaaaaccaaaaaaaaaaaacgcgaaatacaataaaaataaacgaaaaaaaaaaaacgaacgaaaccgaaaaaaaacaaaaacaacacgaacgcaaaacgaacgacccaaataaaacaaaacgacgaaaacgccgaacgcgcaacctcacaaaaaaacaaacgacgaaaaaaaaaaccgaccgcgataaaatacaacaacaacgcgaaaaacgacgcgcgatcgataacacaacaaaacaaacaaaaaaaacgcgaaaacccaacgcttcaaaacgaaaaa

SEQ ID NO: 23629 - DNA, 951 bp, Artificial Sequence
  chemically treated genomic DNA (Homo sapiens) CpG-island No: 23629
gtgtgtgtcggcgcgtttgtgcgtggagggggataattgtatttagcgcgaggtattgggggaggaggaagcggtagtagagatttgaataattgattttttagtcgtattagacgttcgggagcgggcggagagcgtggttttaatattacggatagtagcgcgcgtcgtcgtaggcgttttcgtcgttagttagttatttattttggttttatttgtcgtcgtgcgttttcggaacgggtggtcgcgtttcgcgtcgtcgtcgagggattgcggggtttgtttcgatttatttaggagagaggttgcgggtaggagacgttttcgttcgtcggagttcgaagttttttgggtttgagcgggggttattgcgtttcgtcggttgagaataagtttttaagttggtgtggagggcgtcgttatttttttttttttttttttcggaggcgatcgtagtagaaagacgtttcgggaattcggttttgttagtgttgtgaattagggtgtttaggcgtttatcggattttcgttgggaagtggggagtcgaacgttcggcgcggagttggtttagtagcgaagggttcggagggagttgttttttttcgttcgcgtttttttcggtcggggatcgcggggattttcggttatacgcgagcgcgtttttatatttatatatatattcgtttttaaatatattagttcggagttgggttgcggagagggtgtttcggcgcgtttagaggatcgggtagttgtcgttcggagtggggtaggaagcggagttagggattttggaggggagtttttagggtttggtcggattatgggatcgggtgagcgttgagaatcgcggtcgtagttattagttttggagatgattaggagcggttattgttgagaattatgtggagagaggttgcggtgagtgttagcgcgggacgtcgggtttt

SEQ ID NO: 23630 - DNA, 951 bp, Artificial Sequence
  chemically treated genomic DNA (Homo sapiens) CpG-island No: 23630
aaaacccgacgtcccgcgctaacactcaccgcaacctctctccacataattctcaacaataaccgctcctaatcatctccaaaactaataactacgaccgcgattctcaacgctcacccgatcccataatccgaccaaaccctaaaaactcccctccaaaatccctaactccgcttcctaccccactccgaacgacaactacccgatcctctaaacgcgccgaaacaccctctccgcaacccaactccgaactaatatatttaaaaacgaatatatatataaatataaaaacgcgctcgcgtataaccgaaaatccccgcgatccccgaccgaaaaaaacgcgaacgaaaaaaaacaactccctccgaacccttcgctactaaaccaactccgcgccgaacgttcgactccccacttcccaacgaaaatccgataaacgcctaaacaccctaattcacaacactaacaaaaccgaattcccgaaacgtctttctactacgatcgcctccgaaaaaaaaaaaaaaaaaaataacgacgccctccacaccaacttaaaaacttattctcaaccgacgaaacgcaataacccccgctcaaacccaaaaaacttcgaactccgacgaacgaaaacgtctcctacccgcaacctctctcctaaataaatcgaaacaaaccccgcaatccctcgacgacgacgcgaaacgcgaccacccgttccgaaaacgcacgacgacaaataaaaccaaaataaataactaactaacgacgaaaacgcctacgacgacgcgcgctactatccgtaatattaaaaccacgctctccgcccgctcccgaacgtctaatacgactaaaaaatcaattattcaaatctctactaccgcttcctcctcccccaatacctcgcgctaaatacaattatccccctccacgcacaaacgcgccgacacacac

SEQ ID NO: 23631 - DNA, 951 bp, Artificial Sequence
  chemically treated genomic DNA (Homo sapiens) CpG-island No: 23631
agggttcggcgtttcgcgttagtatttatcgtagtttttttttatatagtttttagtagtggtcgtttttggttatttttagggttgatggttgcggtcgcgatttttagcgtttattcggttttatgattcggttaagttttaggagtttttttttaagatttttagtttcgttttttgttttatttcggacggtaattgttcggttttttgagcgcgtcggagtatttttttcgtaatttagtttcgggttggtgtgtttgagggcgagtgtgtgtgtgagtgtgggagcgcgttcgcgtgtggtcggggattttcgcggttttcggtcgagagaggcgcgggcggggaaaggtagtttttttcgggtttttcgttgttgggttagtttcgcgtcgggcgttcggttttttattttttagcgggagttcggtgagcgtttggatattttggtttatagtattggtaaagtcgggttttcggggcgtttttttgttgcggtcgttttcgaggaagaggagaaggaaggtagcggcgttttttatattaatttagggatttgtttttagtcggcgagacgtagtagttttcgtttaagtttaagaggtttcgagtttcggcgggcgaaagcgttttttgttcgtagttttttttttaggtgggtcgagatagatttcgtagtttttcggcggcgacgcggagcgcggttattcgtttcgagagcgtacggcggtaaataaggttaggataggtggttggttggcgacgggggcgtttgcggcggcgcgcgttgttgttcgtggtgttggaattacgtttttcgttcgttttcgggcgtttggtgcggttgaagaattaattatttagatttttgttatcgttttttttttttttagtgtttcgcgttgggtatagttatttttttttacgtataggcgcgtcgatatatat

SEQ ID NO: 23632 - DNA, 951 bp, Artificial Sequence
  chemically treated genomic DNA (Homo sapiens) CpG-island No: 23632
atatatatcgacgcgcctatacgtaaaaaaaaataactatacccaacgcgaaacactaaaaaaaaaaaaaacgataacaaaaatctaaataattaattcttcaaccgcaccaaacgcccgaaaacgaacgaaaaacgtaattccaacaccacgaacaacaacgcgcgccgccgcaaacgcccccgtcgccaaccaaccacctatcctaaccttatttaccgccgtacgctctcgaaacgaataaccgcgctccgcgtcgccgccgaaaaactacgaaatctatctcgacccacctaaaaaaaaaactacgaacaaaaaacgctttcgcccgccgaaactcgaaacctcttaaacttaaacgaaaactactacgtctcgccgactaaaaacaaatccctaaattaatataaaaaacgccgctaccttccttctcctcttcctcgaaaacgaccgcaacaaaaaaacgccccgaaaacccgactttaccaatactataaaccaaaatatccaaacgctcaccgaactcccgctaaaaaataaaaaaccgaacgcccgacgcgaaactaacccaacaacgaaaaacccgaaaaaaactacctttccccgcccgcgcctctctcgaccgaaaaccgcgaaaatccccgaccacacgcgaacgcgctcccacactcacacacacactcgccctcaaacacaccaacccgaaactaaattacgaaaaaaatactccgacgcgctcaaaaaaccgaacaattaccgtccgaaataaaacaaaaaacgaaactaaaaatcttaaaaaaaaactcctaaaacttaaccgaatcataaaaccgaataaacgctaaaaatcgcgaccgcaaccatcaaccctaaaaataaccaaaaacgaccactactaaaaactatataaaaaaaaactacgataaatactaacgcgaaacgccgaaccct

SEQ ID NO: 23633 - DNA, 589 bp, Artificial Sequence
  chemically treated genomic DNA (Homo sapiens) CpG-island No: 23633
tttgtgtgcgcgtgttatcgatgggttgggtgcgagagatagcgttagcgcgcggttataacgtattgcggggtcgagagtcggtaggaaatcgaaaaagttgttcgtcggtagaggttgggaggttggaagggttttttattcgttcggtgttttagaaacgcgtcggttttgtttcgacgcgatcgtttggggagtttaaggggcgcgtagggggtttcggggcgttcggtagtcgcggggtcgagcgcgcgtgtgagcgagtgcgaggttgcgggcggcgggcgggcgagtgtgcgcgggagggagggggagcgcgcgcgcgttcgggtttcggtttttttagtttttcggttttcgcgtttgtttttcgttcgcgcgtatcgttgttcgttgtcgcggttttcgttcgcgtcggcgttgtacggtagttagttcgtcgtcgtcgtttgttttgtgttttttatagaagatgggagcgatttttttttgatcgggagttgtttaaaaggagggagtgcgtcgtattttttattagcgtggaggaacggaggaagaatttatttatattttttaaattaggtaggat

SEQ ID NO: 23634 - DNA, 589 bp, Artificial Sequence
  chemically treated genomic DNA (Homo sapiens) CpG-island No: 23634
atcctacctaatttaaaaaatataaataaattcttcctccgttcctccacgctaataaaaaatacgacgcactccctccttttaaacaactcccgatcaaaaaaaaatcgctcccatcttctataaaaaacacaaaacaaacgacgacgacgaactaactaccgtacaacgccgacgcgaacgaaaaccgcgacaacgaacaacgatacgcgcgaacgaaaaacaaacgcgaaaaccgaaaaactaaaaaaaccgaaacccgaacgcgcgcgcgctccccctccctcccgcgcacactcgcccgcccgccgcccgcaacctcgcactcgctcacacgcgcgctcgaccccgcgactaccgaacgccccgaaaccccctacgcgccccttaaactccccaaacgatcgcgtcgaaacaaaaccgacgcgtttctaaaacaccgaacgaataaaaaacccttccaacctcccaacctctaccgacgaacaactttttcgatttcctaccgactctcgaccccgcaatacgttataaccgcgcgctaacgctatctctcgcacccaacccatcgataacacgcgcacacaaa

SEQ ID NO: 23635 - DNA, 589 bp, Artificial Sequence
  chemically treated genomic DNA (Homo sapiens) CpG-island No: 23635
attttatttggtttggggagtgtgaatggatttttttttcgtttttttacgttagtagaaaatacggcgtattttttttttttaaatagttttcgattaggaagaggtcgtttttattttttgtgggaagtataaagtaggcggcggcggcgggttgattatcgtgtagcgtcggcgcgagcgggagtcgcggtagcgggtagcggtgcgcgcgggcgggaggtaggcgcggaggtcgggaggttgggagggtcggggttcgggcgcgcgcgcgttttttttttttttcgcgtatattcgttcgttcgtcgttcgtagtttcgtattcgtttatacgcgcgttcggtttcgcggttgtcgggcgtttcggggttttttgcgcgttttttgggttttttaggcgatcgcgtcggggtaaagtcggcgcgtttttggagtatcgagcgggtggggagtttttttagttttttagtttttgtcggcgagtagttttttcgattttttgtcggttttcggtttcgtagtgcgttgtggtcgcgcgttagcgttgtttttcgtatttagtttatcgatgatacgcgtatatagg

SEQ ID NO: 23636 - DNA, 589 bp, Artificial Sequence
  chemically treated genomic DNA (Homo sapiens) CpG-island No: 23636
cctatatacgcgtatcatcgataaactaaatacgaaaaacaacgctaacgcgcgaccacaacgcactacgaaaccgaaaaccgacaaaaaatcgaaaaaactactcgccgacaaaaactaaaaaactaaaaaaactccccacccgctcgatactccaaaaacgcgccgactttaccccgacgcgatcgcctaaaaaacccaaaaaacgcgcaaaaaaccccgaaacgcccgacaaccgcgaaaccgaacgcgcgtataaacgaatacgaaactacgaacgacgaacgaacgaatatacgcgaaaaaaaaaaaaaacgcgcgcgcgcccgaaccccgaccctcccaacctcccgacctccgcgcctacctcccgcccgcgcgcaccgctacccgctaccgcgactcccgctcgcgccgacgctacacgataatcaacccgccgccgccgcctactttatacttcccacaaaaaataaaaacgacctcttcctaatcgaaaactatttaaaaaaaaaaaatacgccgtattttctactaacgtaaaaaaacgaaaaaaaaatccattcacactccccaaaccaaataaaat

SEQ ID NO: 23637 - DNA, 791 bp, Artificial Sequence
  chemically treated genomic DNA (Homo sapiens) CpG-island No: 23637
ttaattttagatcgtttttggtggggcgggcgcgagcgtaggatcgcggagtttgttgcgttgttcggttgtaggggaggagttgggtttcgttttcggtttttcgcgtttcgcgtttattggttggtttcgggggtgggcgggtttcgtcgtacggagttttgcgttttgaggtttaagcggcggcgtgtaaggcgtgtgaggcgcgtagagagtcgcgcgcgtcgtttgcgatgtttcgggacggcgtttttgtcgggaatattatttcggcggtattaggttgtcgcgtagagttcggatttcgcgattgtcggggtatcgtaggttttggattcgttgaagcggtgagttttgtttttgttttatatgtcgcgttttcgttcgtgttttggggtagttggtagtgggtgggtaggaaggggcgggtcggtagggcgtcgtacgttggcgttttcgcgtcgcgggaatggggttcggatttttttcgtgaatgttattttttaggttatcggtttttagcgttaagttgtatgggttggtgtgttagtcggttagcgaatagcggtagaacgtttggtcgggtcggcgtttttcgggatattcgtttcggtttcgtagtggtagcgttttttgcgagtttagatcggtttagtggacgcgtcgcgttgtgtacgcgggtttggggagacggcggtttttgaatgattttttatattgtagggtatttgggagcggtggattgagggggtataacgtggtttttgtgtcggtgaaatcgtttggattag

SEQ ID NO: 23638 - DNA, 791 bp, Artificial Sequence
  chemically treated genomic DNA (Homo sapiens) CpG-island No: 23638
ctaatccaaacgatttcaccgacacaaaaaccacgttataccccctcaatccaccgctcccaaataccctacaatataaaaaatcattcaaaaaccgccgtctccccaaacccgcgtacacaacgcgacgcgtccactaaaccgatctaaactcgcaaaaaacgctaccactacgaaaccgaaacgaatatcccgaaaaacgccgacccgaccaaacgttctaccgctattcgctaaccgactaacacaccaacccatacaacttaacgctaaaaaccgataacctaaaaaataacattcacgaaaaaaatccgaaccccattcccgcgacgcgaaaacgccaacgtacgacgccctaccgacccgccccttcctacccacccactaccaactaccccaaaacacgaacgaaaacgcgacatataaaacaaaaacaaaactcaccgcttcaacgaatccaaaacctacgataccccgacaatcgcgaaatccgaactctacgcgacaacctaataccgccgaaataatattcccgacaaaaacgccgtcccgaaacatcgcaaacgacgcgcgcgactctctacgcgcctcacacgccttacacgccgccgcttaaacctcaaaacgcaaaactccgtacgacgaaacccgcccacccccgaaaccaaccaataaacgcgaaacgcgaaaaaccgaaaacgaaacccaactcctcccctacaaccgaacaacgcaacaaactccgcgatcctacgctcgcgcccgccccaccaaaaacgatctaaaattaa

SEQ ID NO: 23639 - DNA, 791 bp, Artificial Sequence
  chemically treated genomic DNA (Homo sapiens) CpG-island No: 23639
ttggtttaagcgattttatcgatatagaagttacgttgtgtttttttaatttatcgtttttagatattttgtagtgtgagggattatttaagaatcgtcgtttttttagattcgcgtgtatagcgcggcgcgtttattgagtcggtttaggttcgtaggaggcgttgttattgcgaggtcgaaacgagtgtttcggaaaacgtcggttcggttaggcgttttgtcgttattcgttgatcgattggtatattagtttatgtaatttagcgttaaagatcggtagtttggggaatgatatttacggggggaattcgaattttattttcgcgacgcggggacgttaacgtgcgacgttttgtcggttcgtttttttttgtttatttattgttaattgttttagagtacgggcgagagcgcggtatatagggtaaaggtagagtttatcgttttagcgagtttaaaatttgcggtgtttcggtagtcgcggaattcgggttttgcgcggtagtttggtgtcgtcggggtggtattttcggtaggaacgtcgtttcggggtatcgtagacggcgcgcgcggttttttacgcgttttatacgttttgtacgtcgtcgtttgagttttaaggcgtaggatttcgtgcggcgggattcgtttattttcgaggttagttaatggacgcggagcgcgggaagtcgggggcggggtttagttttttttttgtagtcgagtaacgtagtaggtttcgcggttttgcgttcgcgttcgttttattaggagcggtttgggattgg

SEQ ID NO: 23640 - DNA, 791 bp, Artificial Sequence
  chemically treated genomic DNA (Homo sapiens) CpG-island No: 23640
ccaatcccaaaccgctcctaataaaacgaacgcgaacgcaaaaccgcgaaacctactacgttactcgactacaaaaaaaaaactaaaccccgcccccgacttcccgcgctccgcgtccattaactaacctcgaaaataaacgaatcccgccgcacgaaatcctacgccttaaaactcaaacgacgacgtacaaaacgtataaaacgcgtaaaaaaccgcgcgcgccgtctacgataccccgaaacgacgttcctaccgaaaataccaccccgacgacaccaaactaccgcgcaaaacccgaattccgcgactaccgaaacaccgcaaattttaaactcgctaaaacgataaactctacctttaccctatataccgcgctctcgcccgtactctaaaacaattaacaataaataaacaaaaaaaaacgaaccgacaaaacgtcgcacgttaacgtccccgcgtcgcgaaaataaaattcgaattccccccgtaaatatcattccccaaactaccgatctttaacgctaaattacataaactaatataccaatcgatcaacgaataacgacaaaacgcctaaccgaaccgacgttttccgaaacactcgtttcgacctcgcaataacaacgcctcctacgaacctaaaccgactcaataaacgcgccgcgctatacacgcgaatctaaaaaaacgacgattcttaaataatccctcacactacaaaatatctaaaaacgataaattaaaaaaacacaacgtaacttctatatcgataaaatcgcttaaaccaa

SEQ ID NO: 23641 - DNA, 566 bp, Artificial Sequence
  chemically treated genomic DNA (Homo sapiens) CpG-island No: 23641
ttcgggtcgattattgtatttgtgtcgtagcggtttcgtataaaatggcggcgggtagacggcgggggcgggaggaggttgggggattttcgggatgggaagggaagttgtgttgtgttgttttgtttcgtcgtttatttatttcgttattcgggagggttcgttcgggtattcgtgaaggattttgtttcgagaagagttgtttgacgtcgttgtattgggtcgaggatcgtgaagagttttttggcgaggtcgaggcggttttttttttagtagcgttcggtttgtcgaggttgcgttgggtttgatagtcgaggaagcggtggtgagggaatgtcgagtagggaggaagcgttttcgtcgggttcgaagaggcggtggagtttgagtcgagttttttgattagcgatattgtgtaagaagcgtggagagaagagcgtgtttgtgtttggggttggggagggggtgtcgggatgaaggagggaatgttaggatttagcggttttttcgggttggtgttttgtgttgcgtagtgtaggtatgaaattaaagaaaatattattttt

SEQ ID NO: 23642 - DNA, 566 bp, Artificial Sequence
  chemically treated genomic DNA (Homo sapiens) CpG-island No: 23642
aaaaataatattttctttaatttcatacctacactacgcaacacaaaacaccaacccgaaaaaaccgctaaatcctaacattccctccttcatcccgacaccccctccccaaccccaaacacaaacacgctcttctctccacgcttcttacacaatatcgctaatcaaaaaactcgactcaaactccaccgcctcttcgaacccgacgaaaacgcttcctccctactcgacattccctcaccaccgcttcctcgactatcaaacccaacgcaacctcgacaaaccgaacgctactaaaaaaaaaaccgcctcgacctcgccaaaaaactcttcacgatcctcgacccaatacaacgacgtcaaacaactcttctcgaaacaaaatccttcacgaatacccgaacgaaccctcccgaataacgaaataaataaacgacgaaacaaaacaacacaacacaacttcccttcccatcccgaaaatcccccaacctcctcccgcccccgccgtctacccgccgccattttatacgaaaccgctacgacacaaatacaataatcgacccgaa

SEQ ID NO: 23643 - DNA, 566 bp, Artificial Sequence
  chemically treated genomic DNA (Homo sapiens) CpG-island No: 23643
agaggtgatattttttttggttttatatttgtattacgtagtatagaatattagttcggaaaagtcgttggattttaatatttttttttttatttcgatattttttttttaattttaaatataaatacgtttttttttttacgttttttgtataatgtcgttggttagagggttcggtttaaattttatcgttttttcgggttcgacgggaacgttttttttttgttcggtatttttttattatcgttttttcggttgttaggtttagcgtagtttcggtaggtcgggcgttgttggggaaggggtcgtttcggtttcgttaaagggttttttacgattttcggtttagtgtaacggcgttaggtagtttttttcgaggtagggttttttacgagtattcggacgggttttttcgggtagcgaagtgaataaacgacggagtagggtagtatagtatagtttttttttttatttcgggggttttttaattttttttcgttttcgtcgtttgttcgtcgttattttgtgcggagtcgttgcgatatagatataatagtcggttcgga

SEQ ID NO: 23644 - DNA, 566 bp, Artificial Sequence
  chemically treated genomic DNA (Homo sapiens) CpG-island No: 23644
tccgaaccgactattatatctatatcgcaacgactccgcacaaaataacgacgaacaaacgacgaaaacgaaaaaaaattaaaaaacccccgaaataaaaaaaaaaactatactatactaccctactccgtcgtttattcacttcgctacccgaaaaaacccgtccgaatactcgtaaaaaaccctacctcgaaaaaaactacctaacgccgttacactaaaccgaaaatcgtaaaaaaccctttaacgaaaccgaaacgaccccttccccaacaacgcccgacctaccgaaactacgctaaacctaacaaccgaaaaaacgataataaaaaaataccgaacaaaaaaaaaacgttcccgtcgaacccgaaaaaacgataaaatttaaaccgaaccctctaaccaacgacattatacaaaaaacgtaaaaaaaaaaacgtatttatatttaaaattaaaaaaaaaatatcgaaataaaaaaaaaaatattaaaatccaacgacttttccgaactaatattctatactacgtaatacaaatataaaaccaaaaaaaatatcacctct

SEQ ID NO: 23645 - DNA, 538 bp, Artificial Sequence
  chemically treated genomic DNA (Homo sapiens) CpG-island No: 23645
gtttcgcgcggtttttgtttcgtgtttaggcggaggcggggtggttattgtttttttttttcgtttcgtttttcggcggttttttcgcggttttttgcgtcgcgttttttttaggaggcgttttgatttcgtatttcggttttttatttttcgatcgttagttttagggtcgcgcggcgacgcgcgattttttttttttgaggggcgcgggtttcggacgcgtcgggttttgttaggtatttagtggagggtcggaggtcggcgattagttcgagtttagtcgtttcgggagtggcgcgagtgtcgttacgattttttttgttttttgcgttcgcgttgttcgttcgggcggtcgttttagtttttttatatagttttttaaaaatagttcgtttcgtatcgttttgtaaggtagtagggagattcgtagcgtgttaattcgcgttcgtcgttaggttaagttcgttttaggttttgtttcgggttttttattggtttttagtgattttatgagttttttgtttattttatatggtta

SEQ ID NO: 23646 - DNA, 538 bp, Artificial Sequence
  chemically treated genomic DNA (Homo sapiens) CpG-island No: 23646
taaccatataaaataaacaaaaaactcataaaatcactaaaaaccaataaaaaacccgaaacaaaacctaaaacgaacttaacctaacgacgaacgcgaattaacacgctacgaatctccctactaccttacaaaacgatacgaaacgaactatttttaaaaaactatataaaaaaactaaaacgaccgcccgaacgaacaacgcgaacgcaaaaaacaaaaaaaatcgtaacgacactcgcgccactcccgaaacgactaaactcgaactaatcgccgacctccgaccctccactaaatacctaacaaaacccgacgcgtccgaaacccgcgcccctcaaaaaaaaaaaatcgcgcgtcgccgcgcgaccctaaaactaacgatcgaaaaataaaaaaccgaaatacgaaatcaaaacgcctcctaaaaaaaacgcgacgcaaaaaaccgcgaaaaaaccgccgaaaaacgaaacgaaaaaaaaaaacaataaccaccccgcctccgcctaaacacgaaacaaaaaccgcgcgaaac

SEQ ID NO: 23647 - DNA, 538 bp, Artificial Sequence
  chemically treated genomic DNA (Homo sapiens) CpG-island No: 23647
tgattatgtaaggtaaatagggggtttatgaagttattgaggattaatggggagttcggagtagagtttggggcgggtttggtttggcggcgggcgcggattggtacgttgcggatttttttgttgttttataaggcggtgcgaggcgagttatttttagagggttatataagggggttgaggcggtcgttcgggcgggtagcgcgagcgtaagggatagggagggtcgtggcgatattcgcgttattttcgggacggttgggttcgggttggtcgtcgattttcgattttttattagatgtttggtagagttcggcgcgttcggagttcgcgttttttagagggaaggggtcgcgcgtcgtcgcgcggttttgaggttgacggtcgggaggtgaaaggtcggagtgcggggttaggacgttttttggagggggcgcggcgtagggggtcgcggggaagtcgtcgaggggcggagcgggaaggaaggatagtggttatttcgttttcgtttgggtacggggtagggatcgcgcgaggt

SEQ ID NO: 23648 - DNA, 538 bp, Artificial Sequence
  chemically treated genomic DNA (Homo sapiens) CpG-island No: 23648
acctcgcgcgatccctaccccgtacccaaacgaaaacgaaataaccactatccttccttcccgctccgcccctcgacgacttccccgcgaccccctacgccgcgccccctccaaaaaacgtcctaaccccgcactccgacctttcacctcccgaccgtcaacctcaaaaccgcgcgacgacgcgcgaccccttccctctaaaaaacgcgaactccgaacgcgccgaactctaccaaacatctaataaaaaatcgaaaatcgacgaccaacccgaacccaaccgtcccgaaaataacgcgaatatcgccacgaccctccctatcccttacgctcgcgctacccgcccgaacgaccgcctcaacccccttatataaccctctaaaaataactcgcctcgcaccgccttataaaacaacaaaaaaatccgcaacgtaccaatccgcgcccgccgccaaaccaaacccgccccaaactctactccgaactccccattaatcctcaataacttcataaaccccctatttaccttacataatca

SEQ ID NO: 23649 - DNA, 535 bp, Artificial Sequence
  chemically treated genomic DNA (Homo sapiens) CpG-island No: 23649
  unsure (33, 49, 54, 56, 69, 87)
tttcggttcggtttggtttcgtcggttttattntggcggcgcgttgttncgttntnttagttattttgntttcggttaggagtcganttcggatgtttgtagttttttttcgttttttatttttgtatttatttttttttttttcggttttattaaaggtttcgagttttttgaagataagtgagcgtcggtcggttaaaagaatcgataatcgcgagttaaagttattatagcgaagacggtcggtatgtcggtgcggggcgcgtacgtagtaataagataaaaaatcgtcgcgtcgcgtacgcgcgattcgggcgacgattattgttaggtgcggggttcgcggcgcgatgcgttaaacggtcgttaagcgttaggatcgtttacggtcgtttaaacgtcgggcgtcgttgattgttatcgattgtgcgggtcgttaagtttgggttgtgtttagatatgtgttttcgcgatagttttttgtcgtcgagttattatttgttatttttgtgggtggtatttgattttaatttaa

SEQ ID NO: 23650 - DNA, 535 bp, Artificial Sequence
  chemically treated genomic DNA (Homo sapiens) CpG-island No: 23650
  unsure (449, 467, 480, 482, 487, 503)
ttaaattaaaatcaaataccacccacaaaaataacaaataataactcgacgacaaaaaactatcgcgaaaacacatatctaaacacaacccaaacttaacgacccgcacaatcgataacaatcaacgacgcccgacgtttaaacgaccgtaaacgatcctaacgcttaacgaccgtttaacgcatcgcgccgcgaaccccgcacctaacaataatcgtcgcccgaatcgcgcgtacgcgacgcgacgattttttatcttattactacgtacgcgccccgcaccgacataccgaccgtcttcgctataataactttaactcgcgattatcgattcttttaaccgaccgacgctcacttatcttcaaaaaactcgaaacctttaataaaaccgaaaaaaaaaaaaataaatacaaaaataaaaaacgaaaaaaaactacaaacatccgaantcgactcctaaccgaaancaaaataactaananaacgnaacaacgcgccgccanaataaaaccgacgaaaccaaaccgaaccgaaa

SEQ ID NO: 23651 - DNA, 535 bp, Artificial Sequence
  chemically treated genomic DNA (Homo sapiens) CpG-island No: 23651
  unsure (449, 467, 480, 482, 487, 503)
ttgggttagggttagatattatttataaagatgataggtggtaattcggcgataggagattgtcgcggaaatatatgtttgagtataatttaaatttgacggttcgtataatcgatggtagttagcggcgttcgacgtttgggcggtcgtgagcggttttagcgtttggcggtcgtttggcgtatcgcgtcgcgggtttcgtatttgatagtggtcgtcgttcgggtcgcgcgtgcgcggcgcggcggttttttattttgttgttgcgtgcgcgtttcgtatcgatatgtcgatcgttttcgttgtggtgattttaattcgcggttgtcggtttttttagtcggtcggcgtttatttgtttttaggaagttcggagtttttggtggagtcggggagaggaagggtgggtgtaagagtgaaaggcgagaggggattgtaagtattcgggntcggtttttggtcggagntaagatggttgangnggcgnagtagcgcgtcgttanggtaaggtcggcggggttaggtcgggtcgggg

SEQ ID NO: 23652 - DNA, 535 bp, Artificial Sequence
  chemically treated genomic DNA (Homo sapiens) CpG-island No: 23652
  unsure (33, 49, 54, 56, 69, 87)
ccccgacccgacctaaccccgccgaccttaccntaacgacgcgctactncgccncntcaaccatcttanctccgaccaaaaaccgancccgaatacttacaatcccctctcgcctttcactcttacacccacccttcctctccccgactccaccaaaaactccgaacttcctaaaaacaaataaacgccgaccgactaaaaaaaccgacaaccgcgaattaaaatcaccacaacgaaaacgatcgacatatcgatacgaaacgcgcacgcaacaacaaaataaaaaaccgccgcgccgcgcacgcgcgacccgaacgacgaccactatcaaatacgaaacccgcgacgcgatacgccaaacgaccgccaaacgctaaaaccgctcacgaccgcccaaacgtcgaacgccgctaactaccatcgattatacgaaccgtcaaatttaaattatactcaaacatatatttccgcgacaatctcctatcgccgaattaccacctatcatctttataaataatatctaaccctaacccaa

SEQ ID NO: 23653 - DNA, 623 bp, Artificial Sequence
  chemically treated genomic DNA (Homo sapiens) CpG-island No: 23653
  unsure (45, 146, 168, 181, 185, 326)
tcgtggtttcgttttcgattcgtagttagtttattgcgattcgtntattcggcgacgtttcgttttttcgttttcgttttttttgtttttttttaaggagatttcgttttatcgatgtttcgttttcgttttatagttaatttttngggtatcgttgttcgttcgggnttcgttatcgttntagntttcgtttcgcgagttttttttttcgggtgtttgttcgtagttcgttcggtttagagggtgggcgcggggttgtttttatcggttggcggttgtaatttagcgattttggttcgaaggttttagtaaggatttatcgattnttagttcggcggcgcggattttgttcggtgtgtggggcggagcggattgcgtgttcgcggacgggtagcgaagatgttagttttcgttgttaggatcgtggtgagtgcggcggaataatcgtttgagggttttggacggtttgggcgggtcgtgcggttgcgttcgggaacggagtaaaatcgtttgcggtcgttgttcgattcggtttttagttgatggggtggggttaggcgggcgttttaggtttggtagagtaggagattggggcgtaaggttagaagcgggattaaatttat

SEQ ID NO: 23654 - DNA, 623 bp, Artificial Sequence
  chemically treated genomic DNA (Homo sapiens) CpG-island No: 23654
  unsure (298, 439, 443, 456, 478, 579)
ataaatttaatcccgcttctaaccttacgccccaatctcctactctaccaaacctaaaacgcccgcctaaccccaccccatcaactaaaaaccgaatcgaacaacgaccgcaaacgattttactccgttcccgaacgcaaccgcacgacccgcccaaaccgtccaaaaccctcaaacgattattccgccgcactcaccacgatcctaacaacgaaaactaacatcttcgctacccgtccgcgaacacgcaatccgctccgccccacacaccgaacaaaatccgcgccgccgaactaanaatcgataaatccttactaaaaccttcgaaccaaaatcgctaaattacaaccgccaaccgataaaaacaaccccgcgcccaccctctaaaccgaacgaactacgaacaaacacccgaaaaaaaaaactcgcgaaacgaaanctanaacgataacgaancccgaacgaacaacgatacccnaaaaattaactataaaacgaaaacgaaacatcgataaaacgaaatctccttaaaaaaaaacaaaaaaaacgaaaacgaaaaaacgaaacgtcgccgaatanacgaatcgcaataaactaactacgaatcgaaaacgaaaccacga

SEQ ID NO: 23655 - DNA, 623 bp, Artificial Sequence
  chemically treated genomic DNA (Homo sapiens) CpG-island No: 23655
  unsure (298, 439, 443, 456, 478, 579)
gtgggtttaatttcgtttttgattttgcgttttaattttttgttttgttaaatttgggacgttcgtttgattttattttattagttggaggtcgggtcgaatagcggtcgtaggcggttttgtttcgttttcggacgtaatcgtacggttcgtttaggtcgtttagggtttttaggcgattgtttcgtcgtatttattacggttttggtagcgaaggttaatattttcgttgttcgttcgcggatacgtagttcgtttcgttttatatatcgggtaaagttcgcgtcgtcgggttggnggtcggtgggtttttgttagagttttcgggttaaggtcgttgagttatagtcgttagtcggtagaggtagtttcgcgtttattttttgggtcgagcgggttgcgggtaggtattcggggaggaggattcgcgaggcggggnttgnggcggtagcgggnttcgggcgggtaacggtgtttnggaggttggttgtggggcgggggcggggtatcgatggggcggagtttttttgaggagggataggaggggcggggacggaggggcggggcgtcgtcgggtangcgggtcgtagtaggttggttgcgagtcgggggcgggattacgg

SEQ ID NO: 23656 - DNA, 623 bp, Artificial Sequence
  chemically treated genomic DNA (Homo sapiens) CpG-island No: 23656
  unsure (45, 146, 168, 181, 185, 326)
ccgtaatcccgcccccgactcgcaaccaacctactacgacccgcntacccgacgacgccccgcccctccgtccccgcccctcctatccctcctcaaaaaaactccgccccatcgataccccgcccccgccccacaaccaacctccnaaacaccgttacccgcccgaancccgctaccgccncaanccccgcctcgcgaatcctcctccccgaatacctacccgcaacccgctcgacccaaaaaataaacgcgaaactacctctaccgactaacgactataactcaacgaccttaacccgaaaactctaacaaaaacccaccgaccnccaacccgacgacgcgaactttacccgatatataaaacgaaacgaactacgtatccgcgaacgaacaacgaaaatattaaccttcgctaccaaaaccgtaataaatacgacgaaacaatcgcctaaaaaccctaaacgacctaaacgaaccgtacgattacgtccgaaaacgaaacaaaaccgcctacgaccgctattcgacccgacctccaactaataaaataaaatcaaacgaacgtcccaaatttaacaaaacaaaaaattaaaacgcaaaatcaaaaacgaaattaaacccac

SEQ ID NO: 23657 - DNA, 588 bp, Artificial Sequence
  chemically treated genomic DNA (Homo sapiens) CpG-island No: 23657
  unsure (56, 228, 245, 305..306, 376, 395, 416)
ggcggggacgagggtagtagttcgggagggttttttcgcgtttttaggcgtttgtngtagggtgtttttcgatcgtcgtatattcgggttttcgcgtacggcgagacgttagattttatttgtatcgttcgggtgaagaagatgttcgcgttcgacgttagtttttttatgttgaagtttatggcgtgttcgtacggtcgtcgcgtacggttcgagcgtagtcggtangttttcggtttagtcgntcgtcgataatcgtatttcgtttatttgttgcggggtattagtttttcgcgtatttcgtnngtcggtttgttcgtttgttcgttcgtcgtagtcgtcgagttagttcgagcgcgtagggcggggcgcgaangttcgggggcgaagtaagnaggggcgggggcgaaattgtncgtattcgacgcgggacgagacggtattggggcgaatttaaaggcgcgcggatcgggttggtttttcgaattcgggcggattaggaggaattagaattatatatataggggcggagcgagagtatagtggggcggagttatatgggtgggggagagattttgttcggttaga

SEQ ID NO: 23658 - DNA, 588 bp, Artificial Sequence
  chemically treated genomic DNA (Homo sapiens) CpG-island No: 23658
  unsure (173, 194, 213, 283..284, 344, 361, 533)
tctaaccgaacaaaatctctcccccacccatataactccgccccactatactctcgctccgcccctatatatataattctaattcctcctaatccgcccgaattcgaaaaaccaacccgatccgcgcgcctttaaattcgccccaataccgtctcgtcccgcgtcgaatacgnacaatttcgcccccgcccctncttacttcgcccccgaacnttcgcgccccgccctacgcgctcgaactaactcgacgactacgacgaacgaacaaacgaacaaaccgacnnacgaaatacgcgaaaaactaataccccgcaacaaataaacgaaatacgattatcgacgancgactaaaccgaaaacntaccgactacgctcgaaccgtacgcgacgaccgtacgaacacgccataaacttcaacataaaaaaactaacgtcgaacgcgaacatcttcttcacccgaacgatacaaataaaatctaacgtctcgccgtacgcgaaaacccgaatatacgacgatcgaaaaacaccctacnacaaacgcctaaaaacgcgaaaaaaccctcccgaactactaccctcgtccccgcc

SEQ ID NO: 23659 - DNA, 588 bp, Artificial Sequence
  chemically treated genomic DNA (Homo sapiens) CpG-island No: 23659
  unsure (173, 194, 213, 283..284, 344, 361, 533)
tttggtcgggtaaggttttttttttatttatgtagtttcgttttattgtgttttcgtttcgtttttgtgtatgtagttttggttttttttaattcgttcgggttcgggaaattagttcggttcgcgcgtttttgagttcgttttagtgtcgtttcgtttcgcgtcggatgcgngtagtttcgttttcgtttttntttgtttcgttttcgggtnttcgcgtttcgttttgcgcgttcgggttggttcggcggttgcggcgggcgggtaggcgggtaggtcggtnnacgaggtgcgcggagggttggtgtttcgtagtaggtgggcggggtgcggttgtcggcggncggttgggtcgggggtntgtcggttgcgttcgggtcgtgcgcggcggtcgtgcgggtacgttatggattttaatatgaagaagttggcgtcggacgcgggtattttttttattcgggcggtgtaggtgaggtttggcgtttcgtcgtgcgcgggggttcggatgtgcggcggtcggggagtattttgtngtagacgtttggggacgcgggaaagttttttcgggttgttgttttcgttttcgtt

SEQ ID NO: 23660 - DNA, 588 bp, Artificial Sequence
  chemically treated genomic DNA (Homo sapiens) CpG-island No: 23660
  unsure (56, 228, 245, 305..306, 376, 395, 416)
aacgaaaacgaaaacaacaacccgaaaaaactttcccgcgtccccaaacgtctacnacaaaatactccccgaccgccgcacatccgaacccccgcgcacgacgaaacgccaaacctcacctacaccgcccgaataaaaaaaatacccgcgtccgacgccaacttcttcatattaaaatccataacgtacccgcacgaccgccgcgcacgacccgaacgcaaccgacanacccccgacccaaccgnccgccgacaaccgcaccccgcccacctactacgaaacaccaaccctccgcgcacctcgtnnaccgacctacccgcctacccgcccgccgcaaccgccgaaccaacccgaacgcgcaaaacgaaacgcgaanacccgaaaacgaaacaaanaaaaacgaaaacgaaactacncgcatccgacgcgaaacgaaacgacactaaaacgaactcaaaaacgcgcgaaccgaactaatttcccgaacccgaacgaattaaaaaaaaccaaaactacatacacaaaaacgaaacgaaaacacaataaaacgaaactacataaataaaaaaaaaaccttacccgaccaaa

SEQ ID NO: 23661 - DNA, 528 bp, Artificial Sequence
  chemically treated genomic DNA (Homo sapiens) CpG-island No: 23661
acgattcgacgtatttacgttttatattttataacgcgtttttttaggtcgttttttttcgttttttttttattttttttaaatttttattaatttttttatttttttttatttatttttatattataatttaaattagtaacgtatagtataattatcgatcgatcgtaatttattatacgacgtaatttatcgcgtatttgtattcgtattgttttatttattcgttttcgtattttattttatgtcgatttttcggtacgttatagcgtatcgcgaataggtagatatcggtttcgtttatcggaaggataggtttagtagtacggttatacgtatggatacgttatattttcgtgattgttaagtgtaacgtattcgttttttttcgaaagacgaagcgttggttcggttcgtcgtatgttacgtttagttatcgttaggaagttacggttatttacgtaattgattgttattatcgtttgcgatcgtacgtagtacgtatatttcgtatttttgtattatcga

SEQ ID NO: 23662 - DNA, 528 bp, Artificial Sequence
  chemically treated genomic DNA (Homo sapiens) CpG-island No: 23662
tcgataatacaaaaatacgaaatatacgtactacgtacgatcgcaaacgataataacaatcaattacgtaaataaccgtaacttcctaacgataactaaacgtaacatacgacgaaccgaaccaacgcttcgtctttcgaaaaaaaacgaatacgttacacttaacaatcacgaaaatataacgtatccatacgtataaccgtactactaaacctatccttccgataaacgaaaccgatatctacctattcgcgatacgctataacgtaccgaaaaatcgacataaaataaaatacgaaaacgaataaataaaacaatacgaatacaaatacgcgataaattacgtcgtataataaattacgatcgatcgataattatactatacgttactaatttaaattataatataaaaataaataaaaaaaaataaaaaaattaataaaaatttaaaaaaaataaaaaaaaaacgaaaaaaaacgacctaaaaaaacgcgttataaaatataaaacgtaaatacgtcgaatcgt

SEQ ID NO: 23663 - DNA, 528 bp, Artificial Sequence
  chemically treated genomic DNA (Homo sapiens) CpG-island No: 23663
tcgatagtatagaggtacgaagtatacgtgttacgtacggtcgtagacgatggtaatagttaattgcgtggatagtcgtagttttttgacggtagttaggcgtagtatgcgacgagtcgggttaacgtttcgtttttcgagaggaagcgaatgcgttgtatttgatagttacggaagtgtgacgtatttatacgtgtggtcgtattgttagatttgttttttcggtagacggaatcggtgtttgtttgttcgcgatgcgttgtgacgtgtcgagaagtcggtatgaggtgggatacgagagcggatggatagagtagtgcgagtgtaggtacgcgatggattacgtcgtgtagtaggttgcgatcggtcgatggttgtgttgtgcgttgttgatttgggttgtggtatgagagtgggtagaggaaggtggaggagttggtagaggtttagagagggtagggggaggacgaagggaggcgatttgaaagggcgcgttataaggtgtgagacgtgaatgcgtcgggtcgt

SEQ ID NO: 23664 - DNA, 528 bp, Artificial Sequence
  chemically treated genomic DNA (Homo sapiens) CpG-island No: 23664
acgacccgacgcattcacgtctcacaccttataacgcgccctttcaaatcgcctcccttcgtcctccccctaccctctctaaacctctaccaactcctccaccttcctctacccactctcataccacaacccaaatcaacaacgcacaacacaaccatcgaccgatcgcaacctactacacgacgtaatccatcgcgtacctacactcgcactactctatccatccgctctcgtatcccacctcataccgacttctcgacacgtcacaacgcatcgcgaacaaacaaacaccgattccgtctaccgaaaaaacaaatctaacaatacgaccacacgtataaatacgtcacacttccgtaactatcaaatacaacgcattcgcttcctctcgaaaaacgaaacgttaacccgactcgtcgcatactacgcctaactaccgtcaaaaaactacgactatccacgcaattaactattaccatcgtctacgaccgtacgtaacacgtatacttcgtacctctatactatcga

SEQ ID NO: 23665 - DNA, 691 bp, Artificial Sequence
  chemically treated genomic DNA (Homo sapiens) CpG-island No: 23665
  unsure (109, 393)
gttcgacgttcggtatacgcgagtacgtttacgttagatcgcgaaataaaatcgttttaatttttatcgcgagtgtttatgtcgatacgttaaatttttttttatttantatttattttattaagtttgatttatttcgcgttattttgtttatcgtttgcgtttacgcggatacggtatagattgattcgtattatcgtatatatcgtttcgtagatttatagtttatatatttgacgtttttcgttattcggttcgcgtattcgcgtatatttattatatcgacgcgttaatttttattaatatcgatttattttgattttattaatttatttatatagtatatttatttatacgagtatttgttatttcgttattttatcgatatagttncgtcggtattcgatcgattttgtaatttttttaatttacgatttattcgtttgtcgtaaagtaatattcgttcgttaacgtttacgtatatttagattcgtatcgttttcgtaattttaaagcgttttattgatttatatttattcggtttacgcgtttcgtagtttattagattattttttaaacgtaatttttatatatcgttttagtacgttttttatttacgagggtacgatatttttacgttgttaatatttatttgtattattaacgtataaagttttttattacgtatttt

SEQ ID NO: 23666 - DNA, 691 bp, Artificial Sequence
  chemically treated genomic DNA (Homo sapiens) CpG-island No: 23666
  unsure (299, 583)
aaaatacgtaataaaaaactttatacgttaataatacaaataaatattaacaacgtaaaaatatcgtaccctcgtaaataaaaaacgtactaaaacgatatataaaaattacgtttaaaaaataatctaataaactacgaaacgcgtaaaccgaataaatataaatcaataaaacgctttaaaattacgaaaacgatacgaatctaaatatacgtaaacgttaacgaacgaatattactttacgacaaacgaataaatcgtaaattaaaaaaattacaaaatcgatcgaataccgacgnaactatatcgataaaataacgaaataacaaatactcgtataaataaatatactatataaataaattaataaaatcaaaataaatcgatattaataaaaattaacgcgtcgatataataaatatacgcgaatacgcgaaccgaataacgaaaaacgtcaaatatataaactataaatctacgaaacgatatatacgataatacgaatcaatctataccgtatccgcgtaaacgcaaacgataaacaaaataacgcgaaataaatcaaacttaataaaataaatantaaataaaaaaaaatttaacgtatcgacataaacactcgcgataaaaattaaaacgattttatttcgcgatctaacgtaaacgtactcgcgtataccgaacgtcgaac

SEQ ID NO: 23667 - DNA, 691 bp, Artificial Sequence
  chemically treated genomic DNA (Homo sapiens) CpG-island No: 23667
  unsure (299, 583)
ggggtgcgtagtgaggggttttgtgcgttggtagtgtaaatgggtattaatagcgtgggggtgtcgtgttttcgtgagtggagggcgtgttggaacgatgtgtgggggttacgtttgggaggtggtttagtgaattgcggagcgcgtgggtcgggtgggtgtggattagtggagcgttttggagttgcggaggcggtgcgggtttgggtatacgtgagcgttagcgagcgagtgttgttttgcggtaagcgggtaggtcgtgggttaggagagttgtaggatcggtcgagtatcggcgnggttgtgtcggtggggtgacgaagtagtaagtgttcgtgtgggtgagtatgttatgtagatgggttggtagggttagagtaggtcgatattggtgggggttaacgcgtcgatgtagtgagtgtgcgcgagtgcgcgagtcgggtggcggagagcgttaggtgtgtaggttgtgagtttgcggggcggtatgtacgatagtgcgggttagtttgtatcgtgttcgcgtgggcgtaggcgatgagtagagtgacgcggggtgagttaggtttggtggggtgaatgntaggtggaaaggggtttggcgtgtcggtatgggtattcgcggtgagggttggggcggttttgtttcgcgatttagcgtgagcgtgttcgcgtgtgtcgggcgtcggat

SEQ ID NO: 23668 - DNA, 691 bp, Artificial Sequence
  chemically treated genomic DNA (Homo sapiens) CpG-island No: 23668
  unsure (109, 393)
atccgacgcccgacacacgcgaacacgctcacgctaaatcgcgaaacaaaaccgccccaaccctcaccgcgaatacccataccgacacgccaaacccctttccacctancattcaccccaccaaacctaactcaccccgcgtcactctactcatcgcctacgcccacgcgaacacgatacaaactaacccgcactatcgtacataccgccccgcaaactcacaacctacacacctaacgctctccgccacccgactcgcgcactcgcgcacactcactacatcgacgcgttaacccccaccaatatcgacctactctaaccctaccaacccatctacataacatactcacccacacgaacacttactacttcgtcaccccaccgacacaaccncgccgatactcgaccgatcctacaactctcctaacccacgacctacccgcttaccgcaaaacaacactcgctcgctaacgctcacgtatacccaaacccgcaccgcctccgcaactccaaaacgctccactaatccacacccacccgacccacgcgctccgcaattcactaaaccacctcccaaacgtaacccccacacatcgttccaacacgccctccactcacgaaaacacgacacccccacgctattaatacccatttacactaccaacgcacaaaacccctcactacgcacccc

SEQ ID NO: 23669 - DNA, 818 bp, Artificial Sequence
  chemically treated genomic DNA (Homo sapiens) CpG-island No: 23669
tatacgaggttttcggaacggaacgattttttttattatttgggttttatgttatatttgggagtttcggtattagattaatatgcgaagtttgcgttcgatttttgggtaacggttacgttattttttcgttatttatcgcgaaatatacggcgtatattggtttcggatatatattattattttcgtgtttttaagttaagtttagagatatattatttttacggttaaagaataggcgtattttaacgttttgacgtatttgataagagttattcgtgatttgacgcggtaagcgagaatattacgttgtttggtaaaagtattcgttttcgtttatcgtattttttgaatatgaatcgtatatggtattatagtagcggtattatatattttgtacggtatatattattttatttcgttttagcgttcggcgaattttttagcgcgcgcgtataatgtttaacgcgtcggtgaatagtttttagttaaagtttcgtgtttacgttatacgtgattgatgtatgtagtaggcgttaggcgtttagtttattgtaatatttacgtatatgaggtgttgcgtaatgtattgggttaatgcgttcggattagtcgtaacgtaaaggtgtaatgttaaggtttacggcgtacgagttatcggtaaggtattcgttttttttcgagttacgtattagcggtggcgtaagcgtgacgtttatttttatgtttttcgtattattatagcgtttcgtggtcgttgagcgttatgttgtagttttaacgttaatcggaattgtatagtattcgtgttatattcg

SEQ ID NO: 23670 - DNA, 818 bp, Artificial Sequence
  chemically treated genomic DNA (Homo sapiens) CpG-island No: 23670
cgaatataacacgaatactatacaattccgattaacgttaaaactacaacataacgctcaacgaccacgaaacgctataataatacgaaaaacataaaaataaacgtcacgcttacgccaccgctaatacgtaactcgaaaaaaaacgaataccttaccgataactcgtacgccgtaaaccttaacattacacctttacgttacgactaatccgaacgcattaacccaatacattacgcaacacctcatatacgtaaatattacaataaactaaacgcctaacgcctactacatacatcaatcacgtataacgtaaacacgaaactttaactaaaaactattcaccgacgcgttaaacattatacgcgcgcgctaaaaaattcgccgaacgctaaaacgaaataaaataatatataccgtacaaaatatataataccgctactataataccatatacgattcatattcaaaaaatacgataaacgaaaacgaatacttttaccaaacaacgtaatattctcgcttaccgcgtcaaatcacgaataactcttatcaaatacgtcaaaacgttaaaatacgcctattctttaaccgtaaaaataatatatctctaaacttaacttaaaaacacgaaaataataatatatatccgaaaccaatatacgccgtatatttcgcgataaataacgaaaaaataacgtaaccgttacccaaaaatcgaacgcaaacttcgcatattaatctaataccgaaactcccaaatataacataaaacccaaataataaaaaaaatcgttccgttccgaaaacctcgtata

SEQ ID NO: 23671 - DNA, 818 bp, Artificial Sequence
  chemically treated genomic DNA (Homo sapiens) CpG-island No: 23671
cgggtgtggtacgagtgttatgtagtttcgattggcgttgaggttgtagtatagcgtttagcgattacggagcgttgtggtagtgcgagaggtatgggagtgggcgttacgtttacgttatcgttagtacgtaattcgagggggagcgagtgttttatcgatagttcgtgcgtcgtagattttgatattgtatttttacgttacgattgattcggacgtattggtttagtgtattgcgtagtattttatgtgcgtagatgttgtagtgagttaggcgtttgacgtttattgtatatattagttacgtatggcgtgaatacggagttttagttggagattgtttatcggcgcgttaggtattgtacgcgcgcgttgaggggttcgtcgaacgttggagcgagatggagtggtgtatgtcgtatagggtatatgatatcgttattgtgatgttatgtgcggtttatgtttaaggagtacggtaggcgggagcgaatatttttattaggtagcgtagtgttttcgtttatcgcgttaggttacgggtagtttttattaggtgcgttaaggcgttgagatgcgtttgttttttggtcgtgaaggtggtatgtttttaggtttagtttgagggtacgagggtagtggtgtgtattcggagttagtgtacgtcgtgtgtttcgcgatgggtggcggaaaaatgacgtgatcgttgtttagaggtcgggcgtaggtttcgtatgttagtttgatatcgaagtttttaggtatggtatggagtttaggtgatggggaagatcgtttcgtttcgaaggtttcgtata

SEQ ID NO: 23672 - DNA, 818 bp, Artificial Sequence
  chemically treated genomic DNA (Homo sapiens) CpG-island No: 23672
tatacgaaaccttcgaaacgaaacgatcttccccatcacctaaactccataccatacctaaaaacttcgatatcaaactaacatacgaaacctacgcccgacctctaaacaacgatcacgtcatttttccgccacccatcgcgaaacacacgacgtacactaactccgaatacacaccactaccctcgtaccctcaaactaaacctaaaaacataccaccttcacgaccaaaaaacaaacgcatctcaacgccttaacgcacctaataaaaactacccgtaacctaacgcgataaacgaaaacactacgctacctaataaaaatattcgctcccgcctaccgtactccttaaacataaaccgcacataacatcacaataacgatatcatataccctatacgacatacaccactccatctcgctccaacgttcgacgaacccctcaacgcgcgcgtacaatacctaacgcgccgataaacaatctccaactaaaactccgtattcacgccatacgtaactaatatatacaataaacgtcaaacgcctaactcactacaacatctacgcacataaaatactacgcaatacactaaaccaatacgtccgaatcaatcgtaacgtaaaaatacaatatcaaaatctacgacgcacgaactatcgataaaacactcgctccccctcgaattacgtactaacgataacgtaaacgtaacgcccactcccatacctctcgcactaccacaacgctccgtaatcgctaaacgctatactacaacctcaacgccaatcgaaactacataacactcgtaccacacccg

SEQ ID NO: 23673 - DNA, 556 bp, Artificial Sequence
  chemically treated genomic DNA (Homo sapiens) CpG-island No: 23673
ttatttcgattttttttttaatttaggcgttataattatatgttttttcgatattaggtttttatttttttatttagttcgtttcgatgtgttttatttttttaaattcgttatttcgttttttttttttttttagtttttttttttattgtgtttcgttttttttttgcgtatttgaagagattttaacggtatcgtttgtttttggttacgtttcgcgttgttgaagttattttttttttttttgcgttcgttttcgttaatttacgcgttatttatcgcgtatttcgtttttatgtcgaacgttttcggatttttgtaattagttatttgtttttgtgtatcgtgatttattaatttggtcgcggttattttcgttatcgtatttattcgatttattgtcggttacgttttttagtaacgtattatagtatattacgttacgttacgtatttgaagtatcggttgttatcgttcgtttcgtatgtattttatcgtaacgaaggacgtttcggtcgtttaggttatttcgattaggttcgtttcggacgtttcg

SEQ ID NO: 23674 - DNA, 556 bp, Artificial Sequence
  chemically treated genomic DNA (Homo sapiens) CpG-island No: 23674
cgaaacgtccgaaacgaacctaatcgaaataacctaaacgaccgaaacgtccttcgttacgataaaatacatacgaaacgaacgataacaaccgatacttcaaatacgtaacgtaacgtaatatactataatacgttactaaaaaacgtaaccgacaataaatcgaataaatacgataacgaaaataaccgcgaccaaattaataaatcacgatacacaaaaacaaataactaattacaaaaatccgaaaacgttcgacataaaaacgaaatacgcgataaataacgcgtaaattaacgaaaacgaacgcaaaaaaaaaaaaaataacttcaacaacgcgaaacgtaaccaaaaacaaacgataccgttaaaatctcttcaaatacgcaaaaaaaaaacgaaacacaataaaaaaaaaaactaaaaaaaaaaaaaaaacgaaataacgaatttaaaaaaataaaacacatcgaaacgaactaaataaaaaaataaaaacctaatatcgaaaaaacatataattataacgcctaaattaaaaaaaaaatcgaaataa

SEQ ID NO: 23675 - DNA, 556 bp, Artificial Sequence
  chemically treated genomic DNA (Homo sapiens) CpG-island No: 23675
cggagcgttcggagcggatttgatcggagtgatttgagcgatcggggcgtttttcgttacggtggagtatatgcggagcgagcggtgataatcggtgttttagatgcgtgacgtggcgtggtatgttataatgcgttgttggagggcgtagtcggtagtaagtcggatagatacggtgacggaggtgatcgcggttagattgataggttacggtgtatagggatagatgattgattgtaggggttcgggggcgttcggtatgagagcgaggtgcgcggtagatgacgcgtaggttggcgaggacgagcgtaaagagaagagaggtgattttagtagcgcggggcgtagttaaaagtaggcggtgtcgttgaggtttttttaggtgcgtaaagggagagcggagtataatgagagagagggttgggggggaggagaagacgaagtagcgggtttggaggagtgggatatatcggggcgggttgagtgggggggtaaaggtttggtatcggaagggtatatagttatagcgtttgggttgggaaagggatcgggatga

SEQ ID NO: 23676 - DNA, 556 bp, Artificial Sequence
  chemically treated genomic DNA (Homo sapiens) CpG-island No: 23676
tcatcccgatccctttcccaacccaaacgctataactatatacccttccgataccaaacctttacccccccactcaacccgccccgatatatcccactcctccaaacccgctacttcgtcttctcctcccccccaaccctctctctcattatactccgctctccctttacgcacctaaaaaaacctcaacgacaccgcctacttttaactacgccccgcgctactaaaatcacctctcttctctttacgctcgtcctcgccaacctacgcgtcatctaccgcgcacctcgctctcataccgaacgcccccgaacccctacaatcaatcatctatccctatacaccgtaacctatcaatctaaccgcgatcacctccgtcaccgtatctatccgacttactaccgactacgccctccaacaacgcattataacataccacgccacgtcacgcatctaaaacaccgattatcaccgctcgctccgcatatactccaccgtaacgaaaaacgccccgatcgctcaaatcactccgatcaaatccgctccgaacgctccg

SEQ ID NO: 23677 - DNA, 918 bp, Artificial Sequence
  chemically treated genomic DNA (Homo sapiens) CpG-island No: 23677
  unsure (861)
gtttattacgatttttttattttttttcggattggttttttttattaattttttcgttttatttattttatattatatcgttttcgtcgttttagtcgagacgttttcgatattttgcgtttttcgtttcgtattatacgtatattttatcggattagtgtgattttatttttatcgtgtagtacgtatttatcgatattgtacgaggacgcgtattcgtttatttatcgtattgcgtacgcgtataggttggattttcgtgcgaacgttgtatttataacgttttatttttatatttagtattttatttatgttatatttttatatcgttttcgtattgtatataatatcgttttcgatattattgcgtttacgtaatagttttattattatttttttatttattatttttcgtgacgaacgtattattgtattatatgtatattaagttcgattgttatatatattttacgttatattatcggtttgttagttacggatcgtattttttagacgcgtatttatcgtacgtatttatatttattttttcgatcgtatgtaatttagtattttatattacgaatgattttttacgcgcgtatttaatcgattagttatcgtttttatttagttatcggcgtattaatatgcgtatcgacgattatcgtttcgacgtattattttttttattattcgttttttttttacgtatcgttttattatttatttttttattattattttttatattgatacgttatttttttatagttagttatagttattttagtaacgtagtatattcgtattcgtttatttatatttaatttagttttttatcgcgtattttatatttaagtnatatttagtatttaattttttaacgttttacgtaatttattttttttgaattttttt

SEQ ID NO: 23678 - DNA, 918 bp, Artificial Sequence
  chemically treated genomic DNA (Homo sapiens) CpG-island No: 23678
  unsure (58)
aaaaaaattcaaaaaaaataaattacgtaaaacgttaaaaaattaaatactaaatatnacttaaatataaaatacgcgataaaaaactaaattaaatataaataaacgaatacgaatatactacgttactaaaataactataactaactataaaaaaataacgtatcaatataaaaaataataataaaaaaataaataataaaacgatacgtaaaaaaaaaacgaataataaaaaaaataatacgtcgaaacgataatcgtcgatacgcatattaatacgccgataactaaataaaaacgataactaatcgattaaatacgcgcgtaaaaaatcattcgtaatataaaatactaaattacatacgatcgaaaaaataaatataaatacgtacgataaatacgcgtctaaaaaatacgatccgtaactaacaaaccgataatataacgtaaaatatatataacaatcgaacttaatatacatataatacaataatacgttcgtcacgaaaaataataaataaaaaaataataataaaactattacgtaaacgcaataatatcgaaaacgatattatatacaatacgaaaacgatataaaaatataacataaataaaatactaaatataaaaataaaacgttataaatacaacgttcgcacgaaaatccaacctatacgcgtacgcaatacgataaataaacgaatacgcgtcctcgtacaatatcgataaatacgtactacacgataaaaataaaatcacactaatccgataaaatatacgtataatacgaaacgaaaaacgcaaaatatcgaaaacgtctcgactaaaacgacgaaaacgatataatataaaataaataaaacgaaaaaattaataaaaaaaaccaatccgaaaaaaaataaaaaaatcgtaataaac

SEQ ID NO: 23679 - DNA, 918 bp, Artificial Sequence
  chemically treated genomic DNA (Homo sapiens) CpG-island No: 23679
  unsure (58)
agggggatttagggggggtgggttgcgtgagacgttaggagattgggtgttgggtgtnatttggatgtggagtgcgcggtggagagttgggttggatgtgagtgagcgggtacgggtatgttacgttgttagggtggttatggttggttgtgggggggtggcgtattagtgtggagggtagtggtgggggggtggatggtaaggcggtgcgtgggaggggagcgggtggtgggggggatggtgcgtcgggacgatggtcgtcggtgcgtatgttggtgcgtcggtagttgggtgggggcgatggttggtcggttgggtacgcgcgtggagagttattcgtagtgtgggatgttgggttatatgcggtcgaagagatgggtgtaggtgcgtgcggtggatgcgcgtttgaagggtacgattcgtggttgataggtcggtggtgtggcgtagggtgtgtgtggtagtcgagtttggtgtgtatgtggtgtagtggtgcgttcgttacggggggtggtgggtgaggagatagtggtgaggttgttgcgtagacgtagtggtatcgagggcggtgttatatgtagtacgagagcggtgtgagagtgtggtatagatagaatgttaggtgtggaagtgaggcgttgtgagtgtagcgttcgtacgagggtttagtttgtgcgcgtgcgtagtgcggtgagtgggcggatgcgcgttttcgtgtagtgtcgataagtacgtgttgtacggtagaggtgaggttatattagttcggtgaggtgtgcgtgtgatgcggagcgagggacgtaaggtgtcggggacgtttcggttggagcggcgagggcgatgtgatgtggggtgagtggagcgggggggttaatgggagaagttagttcggaggggggtggaggggtcgtgatgggt

SEQ ID NO: 23680 - DNA, 918 bp, Artificial Sequence
  chemically treated genomic DNA (Homo sapiens) CpG-island No: 23680
  unsure (861)
acccatcacgacccctccacccccctccgaactaacttctcccattaacccccccgctccactcaccccacatcacatcgccctcgccgctccaaccgaaacgtccccgacaccttacgtccctcgctccgcatcacacgcacacctcaccgaactaatataacctcacctctaccgtacaacacgtacttatcgacactacacgaaaacgcgcatccgcccactcaccgcactacgcacgcgcacaaactaaaccctcgtacgaacgctacactcacaacgcctcacttccacacctaacattctatctataccacactctcacaccgctctcgtactacatataacaccgccctcgataccactacgtctacgcaacaacctcaccactatctcctcacccaccaccccccgtaacgaacgcaccactacaccacatacacaccaaactcgactaccacacacaccctacgccacaccaccgacctatcaaccacgaatcgtacccttcaaacgcgcatccaccgcacgcacctacacccatctcttcgaccgcatataacccaacatcccacactacgaataactctccacgcgcgtacccaaccgaccaaccatcgcccccacccaactaccgacgcaccaacatacgcaccgacgaccatcgtcccgacgcaccatcccccccaccacccgctcccctcccacgcaccgccttaccatccacccccccaccactaccctccacactaatacgccacccccccacaaccaaccataaccaccctaacaacgtaacatacccgtacccgctcactcacatccaacccaactctccaccgcgcactccacatccaaatnacacccaacacccaatctcctaacgtctcacgcaacccaccccccctaaatccccct

SEQ ID NO: 23681 - DNA, 540 bp, Artificial Sequence
  chemically treated genomic DNA (Homo sapiens) CpG-island No: 23681
  unsure (33, 117, 130, 507)
tagcgttttaaatttaggcgtgaatttcggtanttttttgcgtttttgttttttttaagcggcgttttttttaagggtttttttttttatattttttcgattaacggggcgtatttncggttacgtttangtgtttttttcggggtttttttacggggcgtgtattattcgacgggattttttttttttattgtttggttcgcgcgacgtatttttgttttataatattataattttttgatgtgggtcgtttgatggttttttaaacgtttttgggataggtttattttttacgttatacgcgggcgttcgtcggcgagcgttttttttattcggtttattcgtttttattcgtttttttcgcgacgtgttatcgattttgtttttttttgcgtttatattcgggcgtttttttgagtcgattatcgttacgcggagtttgtttcggttcgtttattcgtatcgttacgacgaaagtcgtacggggtaggtcgtatcgatacgttnattttttattgtaatcgcgtcgtcgcggtcgtt

SEQ ID NO: 23682 - DNA, 540 bp, Artificial Sequence
  chemically treated genomic DNA (Homo sapiens) CpG-island No: 23682
  unsure (34, 411, 424, 508)
aacgaccgcgacgacgcgattacaataaaaaatnaacgtatcgatacgacctaccccgtacgactttcgtcgtaacgatacgaataaacgaaccgaaacaaactccgcgtaacgataatcgactcaaaaaaacgcccgaatataaacgcaaaaaaaaacaaaatcgataacacgtcgcgaaaaaaacgaataaaaacgaataaaccgaataaaaaaaacgctcgccgacgaacgcccgcgtataacgtaaaaaataaacctatcccaaaaacgtttaaaaaaccatcaaacgacccacatcaaaaaattataatattataaaacaaaaatacgtcgcgcgaaccaaacaataaaaaaaaaaaatcccgtcgaataatacacgccccgtaaaaaaaccccgaaaaaaacacntaaacgtaaccgnaaatacgccccgttaatcgaaaaaatataaaaaaaaaaacccttaaaaaaaacgccgcttaaaaaaaacaaaaacgcaaaaaantaccgaaattcacgcctaaatttaaaacgcta

SEQ ID NO: 23683 - DNA, 540 bp, Artificial Sequence
  chemically treated genomic DNA (Homo sapiens) CpG-island No: 23683
  unsure (34, 411, 424, 508)
agcgatcgcgacgacgcggttgtagtggggggtnagcgtgtcgatacggtttatttcgtacggttttcgtcgtggcgatacgggtgggcgggtcggaatagatttcgcgtgacgatagtcggtttagagagacgttcgggtgtgagcgtagagggaaatagggtcggtaatacgtcgcgggagaagcggataagaacggatggatcgagtagggggaacgttcgtcgacgagcgttcgcgtatgacgtggggggtaaatttattttaaaggcgtttggggggttattaggcggtttatattagggggttgtggtattataaaataggggtgcgtcgcgcgggttaagtaatagggggggggggtttcgtcggatgatatacgtttcgtgggggagtttcggggaaagtatntggacgtagtcgngggtgcgtttcgttggtcgaagggatatggggggggggatttttagggaaggcgtcgtttaaagagagtaaaggcgtaaggaantgtcggggtttacgtttggatttgaggcgtta

SEQ ID NO: 23684 - DNA, 540 bp, Artificial Sequence
  chemically treated genomic DNA (Homo sapiens) CpG-island No: 23684
  unsure (33, 117, 130, 507)
taacgcctcaaatccaaacgtaaaccccgacanttccttacgcctttactctctttaaacgacgccttccctaaaaatccccccccccatatcccttcgaccaacgaaacgcacccncgactacgtccanatactttccccgaaactcccccacgaaacgtatatcatccgacgaaaccccccccccctattacttaacccgcgcgacgcacccctattttataataccacaaccccctaatataaaccgcctaataaccccccaaacgcctttaaaataaatttaccccccacgtcatacgcgaacgctcgtcgacgaacgttccccctactcgatccatccgttcttatccgcttctcccgcgacgtattaccgaccctatttccctctacgctcacacccgaacgtctctctaaaccgactatcgtcacgcgaaatctattccgacccgcccacccgtatcgccacgacgaaaaccgtacgaaataaaccgtatcgacacgctnaccccccactacaaccgcgtcgtcgcgatcgct

SEQ ID NO: 23685 - DNA, 760 bp, Artificial Sequence
  chemically treated genomic DNA (Homo sapiens) CpG-island No: 23685
agaagcgcgttcgtaagatagcgtagttttcgcgggtcggaggaggcggggtcgcggtaggtagaggtagggtcgggtaagttttcgtttttcgtcgtttgacgggaattgtagtttttgggagaagtcgggttgttttacgaggtattaggaattatatttttcggtgagagagcggtttcggtcggtcgcgcggtatcggagcgtcgtattgttagcggttagagagtttggggtagatcgaaaagggagtgttttttttttttttttcgcgttttggcggtgtaagcggttttgttttttttcgtttcgtcgtcgggtgttttttgttcgttttttcgtgttagttttttttgggtttcgtcgggaaagtttgggtttcgaaattcgaaggtagcggcggttgtttagtacgggagtgtggggcgcgttattcggcggtttagtttatttagggttcggttcgcgtttttatgggttcgattcggaagtttaacgtgtgtagtcggttgagtcgtcgggcgttgggttgtttttcgcgcgacgtaggcgtggtgtagaggattaatttgggtattttgcgggcgttggtgtgttaggtgatcgttagtcggtcggggcgggacggagggtcgcgggcgcgcggcggtcgagttttttgcggggatgcggttttaacgcgttggggtttttttttatagggttatatgtgatggggaggaggatataagttcggaatttgggataggtggtaataggg

SEQ ID NO: 23686 - DNA, 760 bp, Artificial Sequence
  chemically treated genomic DNA (Homo sapiens) CpG-island No: 23686
ccctattaccacctatcccaaattccgaacttatatcctcctccccatcacatataaccctataaaaaaaaaccccaacgcgttaaaaccgcatccccgcaaaaaactcgaccgccgcgcgcccgcgaccctccgtcccgccccgaccgactaacgatcacctaacacaccaacgcccgcaaaatacccaaattaatcctctacaccacgcctacgtcgcgcgaaaaacaacccaacgcccgacgactcaaccgactacacacgttaaacttccgaatcgaacccataaaaacgcgaaccgaaccctaaataaactaaaccgccgaataacgcgccccacactcccgtactaaacaaccgccgctaccttcgaatttcgaaacccaaactttcccgacgaaacccaaaaaaaactaacacgaaaaaacgaacaaaaaacacccgacgacgaaacgaaaaaaaacaaaaccgcttacaccgccaaaacgcgaaaaaaaaaaaaaaaacactcccttttcgatctaccccaaactctctaaccgctaacaatacgacgctccgataccgcgcgaccgaccgaaaccgctctctcaccgaaaaatataattcctaatacctcgtaaaacaacccgacttctcccaaaaactacaattcccgtcaaacgacgaaaaacgaaaacttacccgaccctacctctacctaccgcgaccccgcctcctccgacccgcgaaaactacgctatcttacgaacgcgcttct

SEQ ID NO: 23687 - DNA, 760 bp, Artificial Sequence
  chemically treated genomic DNA (Homo sapiens) CpG-island No: 23687
ttttattattatttattttagatttcgggtttgtatttttttttttattatatgtgattttataaagggaggttttagcgcgttaaaatcgtattttcgtaggaggttcggtcgtcgcgcgttcgcggtttttcgtttcgtttcggtcggttggcggttatttggtatattagcgttcgtaggatgtttaggttggttttttgtattacgtttgcgtcgcgcgagaagtagtttagcgttcggcgatttagtcggttgtatacgttgggttttcgggtcgggtttatggaggcgcgggtcgggttttgggtaggttgggtcgtcgagtggcgcgttttatattttcgtgttgggtagtcgtcgttgttttcgaatttcgaggtttagattttttcggcggggtttagggaaagttgatacggggaggcgggtagggagtattcgacggcggggcgagggaaagtagagtcgtttgtatcgttagagcgcggagagaagggaagaagtatttttttttcgatttgttttaggttttttggtcgttgatagtgcgacgtttcggtatcgcgcggtcggtcggagtcgtttttttatcgggaaatgtagtttttagtgtttcgtgaggtagttcggttttttttaggaattataattttcgttaggcggcggggagcgagggtttgttcggttttgtttttgtttgtcgcggtttcgtttttttcggttcgcggaggttgcgttgttttgcgggcgcgttttt

SEQ ID NO: 23688 - DNA, 760 bp, Artificial Sequence
  chemically treated genomic DNA (Homo sapiens) CpG-island No: 23688
aaaaacgcgcccgcaaaacaacgcaacctccgcgaaccgaaaaaaacgaaaccgcgacaaacaaaaacaaaaccgaacaaaccctcgctccccgccgcctaacgaaaattataattcctaaaaaaaaccgaactacctcacgaaacactaaaaactacatttcccgataaaaaaacgactccgaccgaccgcgcgataccgaaacgtcgcactatcaacgaccaaaaaacctaaaacaaatcgaaaaaaaaatacttcttcccttctctccgcgctctaacgatacaaacgactctactttccctcgccccgccgtcgaatactccctacccgcctccccgtatcaactttccctaaaccccgccgaaaaaatctaaacctcgaaattcgaaaacaacgacgactacccaacacgaaaatataaaacgcgccactcgacgacccaacctacccaaaacccgacccgcgcctccataaacccgacccgaaaacccaacgtatacaaccgactaaatcgccgaacgctaaactacttctcgcgcgacgcaaacgtaatacaaaaaaccaacctaaacatcctacgaacgctaatataccaaataaccgccaaccgaccgaaacgaaacgaaaaaccgcgaacgcgcgacgaccgaacctcctacgaaaatacgattttaacgcgctaaaacctccctttataaaatcacatataataaaaaaaaaaatacaaacccgaaatctaaaataaataataataaaa

SEQ ID NO: 23689 - DNA, 523 bp, Artificial Sequence
  chemically treated genomic DNA (Homo sapiens) CpG-island No: 23689
tttcggtaatttttttttcgttgtttttttttttttatttgtagtttggaagtaagtttagtaaaaggttgaggcgaaagtgttttcgcgttttcgatcgcgtaggttcggtttataggggcgatttttcggggcgcgtgggttgtagcggttcgattgcgcggcgtttcggtatcgcgttcgggtttaagtttttgggttttggaggtttttttagtgcgttttagttagtcgtcgtaaagagttaattaagtggggtcggttcgtttcgtcgtttttagtagcgcgtttttatcgcgtattttcggtttcgcgttcgcggcgatttttttgaatcgtagttttgtttcgttttagagttagttagtttttttttcgtttagtcgatttggtttttcgcgcgttttttatcgtattttttcgggtttcgcgattttttagtatttttttagttggaaggggttttacggaggattttttgttttcgtcgtttttttcgttttttttttcgtatttttttagg

SEQ ID NO: 23690 - DNA, 523 bp, Artificial Sequence
  chemically treated genomic DNA (Homo sapiens) CpG-island No: 23690
cctaaaaaaatacgaaaaaaaaaacgaaaaaaacgacgaaaacaaaaaatcctccgtaaaaccccttccaactaaaaaaatactaaaaaatcgcgaaacccgaaaaaatacgataaaaaacgcgcgaaaaaccaaatcgactaaacgaaaaaaaaactaactaactctaaaacgaaacaaaactacgattcaaaaaaatcgccgcgaacgcgaaaccgaaaatacgcgataaaaacgcgctactaaaaacgacgaaacgaaccgaccccacttaattaactctttacgacgactaactaaaacgcactaaaaaaacctccaaaacccaaaaacttaaacccgaacgcgataccgaaacgccgcgcaatcgaaccgctacaacccacgcgccccgaaaaatcgcccctataaaccgaacctacgcgatcgaaaacgcgaaaacactttcgcctcaaccttttactaaacttacttccaaactacaaataaaaaaaaaaaaacaacgaaaaaaaaattaccgaaa

SEQ ID NO: 23691 - DNA, 523 bp, Artificial Sequence
  chemically treated genomic DNA (Homo sapiens) CpG-island No: 23691
tttgggggggtgcggggaggaaagcggggagaacggcgggggtagagggtttttcgtgaagttttttttagttgaggaagtgttggaggatcgcggggttcggaggagtgcggtgaggagcgcgcgggaagttaagtcggttgggcgggagggaggttggttggttttggggcgggatagagttgcggtttaggaggatcgtcgcgagcgcggggtcgggggtgcgcggtggagacgcgttgttgggggcggcggagcgggtcggttttatttggttaattttttgcggcgattggttaggacgtattggaggggtttttaagatttagaaatttgagttcgggcgcgatgtcggagcgtcgcgtagtcgggtcgttgtagtttacgcgtttcggaaagtcgtttttgtggatcgagtttgcgcgatcgggggcgcggaaatattttcgttttagttttttgttgaatttgtttttaggttgtagatgaggaggggaaggtagcggggaaaagattgtcggag

SEQ ID NO: 23692 - DNA, 523 bp, Artificial Sequence
  chemically treated genomic DNA (Homo sapiens) CpG-island No: 23692
ctccgacaatcttttccccgctaccttcccctcctcatctacaacctaaaaacaaattcaacaaaaaactaaaacgaaaatatttccgcgcccccgatcgcgcaaactcgatccacaaaaacgactttccgaaacgcgtaaactacaacgacccgactacgcgacgctccgacatcgcgcccgaactcaaatttctaaatcttaaaaacccctccaatacgtcctaaccaatcgccgcaaaaaattaaccaaataaaaccgacccgctccgccgcccccaacaacgcgtctccaccgcgcacccccgaccccgcgctcgcgacgatcctcctaaaccgcaactctatcccgccccaaaaccaaccaacctccctcccgcccaaccgacttaacttcccgcgcgctcctcaccgcactcctccgaaccccgcgatcctccaacacttcctcaactaaaaaaaacttcacgaaaaaccctctacccccgccgttctccccgctttcctccccgcacccccccaaa

SEQ ID NO: 23693 - DNA, 813 bp, Artificial Sequence
  chemically treated genomic DNA (Homo sapiens) CpG-island No: 23693
ggcgatgtcgtgggcggcgttttttttggcgatgttttgggcggcgttttcgttggcgatgttttgggcggcgttttcgttggcgatgttttgggcggtattttttttggcgatgttttggacggcgttttcgttggcgatgtcgtgggcggcgttttcgttggcgatttcgtgggcggcgttttcgttggcgatgttttgggcggtagttttcgttggcgatgttttgggcggcgttttttttggcgatgttttgggcggcgttttcgttggcgatgttttgggcggcgttttttttggcgatgttttgggcggcgttttttttggcgatgttttgggcggcgttttcgttggcgatgttttgggcggcgttttttttggcgatgttttggacggcgttttcgttggcgatgtcgtgggcggcgttttcgttggcgatttcgtgggcggagttttcgttggcgatgttttgggcggcgttttcgttggcgatgttttgggcggcgttttttttggcgatgttttgggcggcgttttcgttggcgatgttttgggcggcgttttcgttggcgatgttttgggcggcgttttcgttggcgatgtcgtgggcggcgttttcgttggcgatgtcgtgggcggcgttttcgttggcgatgtttttgtcggcggtttcgttagcgatgtcgtgtatagtattttcgttagcgatgtcgtgtgtggcgttttcgttagtgatgtcgtgtacggtgtttttatggggagttagaaaaatatagagttaaggttagtgttttggtggtggagattgtgaat

SEQ ID NO: 23694 - DNA, 813 bp, Artificial Sequence
  chemically treated genomic DNA (Homo sapiens) CpG-island No: 23694
attcacaatctccaccaccaaaacactaaccttaactctatatttttctaactccccataaaaacaccgtacacgacatcactaacgaaaacgccacacacgacatcgctaacgaaaatactatacacgacatcgctaacgaaaccgccgacaaaaacatcgccaacgaaaacgccgcccacgacatcgccaacgaaaacgccgcccacgacatcgccaacgaaaacgccgcccaaaacatcgccaacgaaaacgccgcccaaaacatcgccaacgaaaacgccgcccaaaacatcgccaaaaaaaacgccgcccaaaacatcgccaacgaaaacgccgcccaaaacatcgccaacgaaaactccgcccacgaaatcgccaacgaaaacgccgcccacgacatcgccaacgaaaacgccgtccaaaacatcgccaaaaaaaacgccgcccaaaacatcgccaacgaaaacgccgcccaaaacatcgccaaaaaaaacgccgcccaaaacatcgccaaaaaaaacgccgcccaaaacatcgccaacgaaaacgccgcccaaaacatcgccaaaaaaaacgccgcccaaaacatcgccaacgaaaactaccgcccaaaacatcgccaacgaaaacgccgcccacgaaatcgccaacgaaaacgccgcccacgacatcgccaacgaaaacgccgtccaaaacatcgccaaaaaaaataccgcccaaaacatcgccaacgaaaacgccgcccaaaacatcgccaacgaaaacgccgcccaaaacatcgccaaaaaaaacgccgcccacgacatcgcc

SEQ ID NO: 23695 - DNA, 813 bp, Artificial Sequence
  chemically treated genomic DNA (Homo sapiens) CpG-island No: 23695
atttatagtttttattattagggtattgattttaattttgtgtttttttagttttttatgaggatatcgtatacgatattattaacgaggacgttatatacgatatcgttaacgaggatattgtatacgatatcgttaacgaggtcgtcgataagggtatcgttaacgaggacgtcgtttacggtatcgttagcgaggacgtcgtttacggtatcgttagcgaggacgtcgtttagggtatcgttagcgaggacgtcgtttagggtatcgttagcgaggacgtcgtttagggtatcgttaaagaggacgtcgtttagggtatcgttaacgaggacgtcgtttagggtatcgttaacgaggatttcgtttacggaatcgttagcgaggacgtcgtttacggtatcgttagcgaggacgtcgtttagggtatcgttaaggaggacgtcgtttagggtatcgttaacgaggacgtcgtttagggtatcgttaaggaggacgtcgtttagggtatcgttaaggaggacgtcgtttagggtatcgttaacgagggcgtcgtttagggtatcgttaaagaggacgtcgtttagggtatcgttaacgaggattgtcgtttagggtatcgttaacgaggacgtcgtttacggaatcgttagcgaggacgtcgtttacggtatcgttagcgaggacgtcgtttagggtatcgttaaggaggatgtcgtttagggtatcgttaacgaggacgtcgtttagggtatcgttaacgaggacgtcgtttagggtatcgttaaagaggacgtcgtttacggtatcgtt

SEQ ID NO: 23696 - DNA, 813 bp, Artificial Sequence
  chemically treated genomic DNA (Homo sapiens) CpG-island No: 23696
aacgataccgtaaacgacgtcctctttaacgataccctaaacgacgtcctcgttaacgataccctaaacgacgtcctcgttaacgataccctaaacgacatcctccttaacgataccctaaacgacgtcctcgctaacgataccgtaaacgacgtcctcgctaacgattccgtaaacgacgtcctcgttaacgataccctaaacgacaatcctcgttaacgataccctaaacgacgtcctctttaacgataccctaaacgacgccctcgttaacgataccctaaacgacgtcctccttaacgataccctaaacgacgtcctccttaacgataccctaaacgacgtcctcgttaacgataccctaaacgacgtcctccttaacgataccctaaacgacgtcctcgctaacgataccgtaaacgacgtcctcgctaacgattccgtaaacgaaatcctcgttaacgataccctaaacgacgtcctcgttaacgataccctaaacgacgtcctctttaacgataccctaaacgacgtcctcgctaacgataccctaaacgacgtcctcgctaacgataccctaaacgacgtcctcgctaacgataccgtaaacgacgtcctcgctaacgataccgtaaacgacgtcctcgttaacgatacccttatcgacgacctcgttaacgatatcgtatacaatatcctcgttaacgatatcgtatataacgtcctcgttaataatatcgtatacgatatcctcataaaaaactaaaaaaacacaaaattaaaatcaataccctaataataaaaactataaat

SEQ ID NO: 23697 - DNA, 610 bp, Artificial Sequence
  chemically treated genomic DNA (Homo sapiens) CpG-island No: 23697
acgaacgtagtttattttttttttgtcggttattttcgttttggttttaggttcgtatttatcggttatttcgagttcgggtttatcgtcgggggcgttcgtcggggtttcgattttatttggggaggtcggcggggaaagtcgggtcgggaagggggagtttaatttcggagatcgtagatttcgttatttcggttttttgtcgttttacgttttggtttcggttttcgggatttttgagttgatttttgtcgtttttggtttcgtcggcgttttaggggttttaatttcgtcggtcgtcgttcgtttcgcgagtttttaagatgttcggtttcgggatcgggcgttgttggaataatggaggtttttagaggtagcgcgaggatagcggcggcggagatcgtggcggtaaaggttgtggtagcggcggcggtatagcggcggcgacggcgtttgcgtagggtaaacgtggcgtcgcggtttattgagttgtattttcgttacggattttcgttcgtacgtttaggttcgaaagatcgtgtttcgggatttagaaaggattttggatattttatagggtttttttagtttttttattttagagtggagt

SEQ ID NO: 23698 - DNA, 610 bp, Artificial Sequence
  chemically treated genomic DNA (Homo sapiens) CpG-island No: 23698
actccactctaaaataaaaaaactaaaaaaaccctataaaatatccaaaatcctttctaaatcccgaaacacgatctttcgaacctaaacgtacgaacgaaaatccgtaacgaaaatacaactcaataaaccgcgacgccacgtttaccctacgcaaacgccgtcgccgccgctataccgccgccgctaccacaacctttaccgccacgatctccgccgccgctatcctcgcgctacctctaaaaacctccattattccaacaacgcccgatcccgaaaccgaacatcttaaaaactcgcgaaacgaacgacgaccgacgaaattaaaacccctaaaacgccgacgaaaccaaaaacgacaaaaatcaactcaaaaatcccgaaaaccgaaaccaaaacgtaaaacgacaaaaaaccgaaataacgaaatctacgatctccgaaattaaactcccccttcccgacccgactttccccgccgacctccccaaataaaatcgaaaccccgacgaacgcccccgacgataaacccgaactcgaaataaccgataaatacgaacctaaaaccaaaacgaaaataaccgacaaaaaaaaaataaactacgttcgt

SEQ ID NO: 23699 - DNA, 610 bp, Artificial Sequence
  chemically treated genomic DNA (Homo sapiens) CpG-island No: 23699
attttattttaagatgggagagttagagaagttttgtggggtatttagggttttttttgaatttcggagtacggtttttcgagtttgagcgtgcgggcggggattcgtggcgaaggtgtagtttagtaggtcgcggcgttacgtttattttgcgtagacgtcgtcgtcgtcgttgtgtcgtcgtcgttgttatagtttttgtcgttacggttttcgtcgtcgttgttttcgcgttgtttttgggagtttttattgttttagtagcgttcggtttcgagatcgggtattttgggggttcgcgaaacgggcggcggtcgacggagttgagatttttagggcgtcggcgggattaggagcggtaggggttagtttaggaatttcgggagtcgggattaaagcgtggggcggtagggggtcggggtggcgaggtttacggttttcggagttgggtttttttttttcggttcgatttttttcgtcgatttttttaagtggggtcggagtttcggcgggcgttttcggcgatgagttcggattcgaggtggtcggtgagtgcgggtttgggattagggcgggagtggtcggtagggaaggggtaggttacgttcgt

SEQ ID NO: 23700 - DNA, 610 bp, Artificial Sequence
  chemically treated genomic DNA (Homo sapiens) CpG-island No: 23700
acgaacgtaacctaccccttccctaccgaccactcccgccctaatcccaaacccgcactcaccgaccacctcgaatccgaactcatcgccgaaaacgcccgccgaaactccgaccccacttaaaaaaatcgacgaaaaaaatcgaaccgaaaaaaaaaaacccaactccgaaaaccgtaaacctcgccaccccgaccccctaccgccccacgctttaatcccgactcccgaaattcctaaactaacccctaccgctcctaatcccgccgacgccctaaaaatctcaactccgtcgaccgccgcccgtttcgcgaacccccaaaatacccgatctcgaaaccgaacgctactaaaacaataaaaactcccaaaaacaacgcgaaaacaacgacgacgaaaaccgtaacgacaaaaactataacaacgacgacgacacaacgacgacgacgacgtctacgcaaaataaacgtaacgccgcgacctactaaactacaccttcgccacgaatccccgcccgcacgctcaaactcgaaaaaccgtactccgaaattcaaaaaaaaccctaaataccccacaaaacttctctaactctcccatcttaaaataaaat

SEQ ID NO: 23701 - DNA, 681 bp, Artificial Sequence
  chemically treated genomic DNA (Homo sapiens) CpG-island No: 23701
atatcggttgatgttttatttggttagggaattatttagcgtttagtatatttggcgttaatcggcggggattaattttatatttcgtagttggcggaaagtagcgggaggaggtatttagttttggggttgagattttagttttcgcgtgcgtaaattacgtttttgtagattttcgttgttgcgtgttcgcgcgcgtttcggagtgcgtatgcgtagcggcgggggttgtttcggttgttttttattgaggggattcgttagtttttaatttagtggcgtttgttttgattttcggggtttggtttttagcgtagtaattttgtcggcgaagaaggtgagcgtagtgttgtgtggtagtagagttttttaggacgaggagtagcgggacgaggaagggtagattggtgaaatcgtaaattgggcgtttgtttcggcgtcggatttttatttgtaaaggtgggtggttcgttcggagcgggaaaatatttcggaagtggagggtcgggttagcgtgattgataagcgggaatttttgtgtggggacgggtaggtttaggaaggttgtgtttgcggtggaattgggcggtgcgtagaagtgggtattaatagtagtcgcgtgtttgggttttagatttggtttagttgtgttgagttttttatggattattttacgtagat

SEQ ID NO: 23702 - DNA, 681 bp, Artificial Sequence
  chemically treated genomic DNA (Homo sapiens) CpG-island No: 23702
atctacgtaaaataatccataaaaaactcaacacaactaaaccaaatctaaaacccaaacacgcgactactattaatacccacttctacgcaccgcccaattccaccgcaaacacaaccttcctaaacctacccgtccccacacaaaaattcccgcttatcaatcacgctaacccgaccctccacttccgaaatattttcccgctccgaacgaaccacccacctttacaaataaaaatccgacgccgaaacaaacgcccaatttacgatttcaccaatctacccttcctcgtcccgctactcctcgtcctaaaaaactctactaccacacaacactacgctcaccttcttcgccgacaaaattactacgctaaaaaccaaaccccgaaaatcaaaacaaacgccactaaattaaaaactaacgaatcccctcaataaaaaacaaccgaaacaacccccgccgctacgcatacgcactccgaaacgcgcgcgaacacgcaacaacgaaaatctacaaaaacgtaatttacgcacgcgaaaactaaaatctcaaccccaaaactaaatacctcctcccgctactttccgccaactacgaaatataaaattaatccccgccgattaacgccaaatatactaaacgctaaataattccctaaccaaataaaacatcaaccgatat

SEQ ID NO: 23703 - DNA, 681 bp, Artificial Sequence
  chemically treated genomic DNA (Homo sapiens) CpG-island No: 23703
atttacgtaagataatttatgaaaagtttaatatagttgggttaaatttaagatttagatacgcggttgttgttaatgtttatttttgcgtatcgtttagttttatcgtaggtataatttttttaggtttattcgtttttatataggggttttcgtttgttaattacgttggttcggttttttattttcggaatgttttttcgtttcggacgggttatttatttttgtaaataggggttcggcgtcggaatagacgtttagtttgcgattttattagtttgttttttttcgtttcgttgtttttcgttttaaggagttttgttgttatatagtattgcgtttatttttttcgtcggtagaattgttacgttgaaagttaggtttcgggaattagggtaaacgttattgagttagaaattggcgggtttttttagtgaaaggtagtcggaataattttcgtcgttgcgtatgcgtatttcgggacgcgcgcgaatacgtagtagcgagaatttataggggcgtggtttgcgtacgcgggaattgggattttaattttagggttaggtgttttttttcgttgtttttcgttagttgcggggtgtgagattaattttcgtcgattagcgttaggtgtattaagcgttggatggttttttgattagatgaaatattagtcgatgt

SEQ ID NO: 23704 - DNA, 681 bp, Artificial Sequence
  chemically treated genomic DNA (Homo sapiens) CpG-island No: 23704
acatcgactaatatttcatctaatcaaaaaaccatccaacgcttaatacacctaacgctaatcgacgaaaattaatctcacaccccgcaactaacgaaaaacaacgaaaaaaaacacctaaccctaaaattaaaatcccaattcccgcgtacgcaaaccacgcccctataaattctcgctactacgtattcgcgcgcgtcccgaaatacgcatacgcaacgacgaaaattattccgactacctttcactaaaaaaacccgccaatttctaactcaataacgtttaccctaattcccgaaacctaactttcaacgtaacaattctaccgacgaaaaaaataaacgcaatactatataacaacaaaactccttaaaacgaaaaacaacgaaacgaaaaaaaacaaactaataaaatcgcaaactaaacgtctattccgacgccgaacccctatttacaaaaataaataacccgtccgaaacgaaaaaacattccgaaaataaaaaaccgaaccaacgtaattaacaaacgaaaacccctatataaaaacgaataaacctaaaaaaattatacctacgataaaactaaacgatacgcaaaaataaacattaacaacaaccgcgtatctaaatcttaaatttaacccaactatattaaacttttcataaattatcttacgtaaat

SEQ ID NO: 23705 - DNA, 540 bp, Artificial Sequence
  chemically treated genomic DNA (Homo sapiens) CpG-island No: 23705
cgttatatacgatatcgttaacgaggatattgtatacgatatcgttaacgaggtcgtcgataagggtatcgttaacgaggatgtcgtttacggtatcgttagcgaggacgtcgtttacggtatcgttagcgaggacgtcgtttacggtatcgttagcgaggacgtcgtttacggtatcgttagcgaggacgtcgtttacggtatcgttagcgaggacgtcgtttagggtatcgttaacgaggacgtcgtttagggtatcgttaaggaggacgtcgtttacggtatcgttaacgaggacgtcgtttagggtatcgttaaggaggacgtcgtttagggtatcgttaaggaggacgtcgtttagggtatcgttaacgaggacgtcgtttagggtatcgttaacgaggacgtcgtttagggtatcgttaaagaggacgtcgtttacggtatcgttaacgagttgtatacgatatcgttaacgaggatattttataagtcgtcgttaataagtatattgtatataatatcgttaatgagggtatt

SEQ ID NO: 23706 - DNA, 540 bp, Artificial Sequence
  chemically treated genomic DNA (Homo sapiens) CpG-island No: 23706
aataccctcattaacgatattatatacaatatacttattaacgacgacttataaaatatcctcgttaacgatatcgtatacaactcgttaacgataccgtaaacgacgtcctctttaacgataccctaaacgacgtcctcgttaacgataccctaaacgacgtcctcgttaacgataccctaaacgacgtcctccttaacgataccctaaacgacgtcctccttaacgataccctaaacgacgtcctcgttaacgataccgtaaacgacgtcctccttaacgataccctaaacgacgtcctcgttaacgataccctaaacgacgtcctcgctaacgataccgtaaacgacgtcctcgctaacgataccgtaaacgacgtcctcgctaacgataccgtaaacgacgtcctcgctaacgataccgtaaacgacgtcctcgctaacgataccgtaaacgacatcctcgttaacgatacccttatcgacgacctcgttaacgatatcgtatacaatatcctcgttaacgatatcgtatataacg

SEQ ID NO: 23707 - DNA, 540 bp, Artificial Sequence
  chemically treated genomic DNA (Homo sapiens) CpG-island No: 23707
agtgtttttattagcgatgttgtgtatagtgtatttgttagcgacggtttgtaaggtgttttcgttagcgatgtcgtatatagttcgttggcgatgtcgtgggcggcgttttttttggcgatgttttgggcggcgttttcgttggcgatgttttgggcggcgttttcgttggcgatgttttgggcggcgttttttttggcgatgttttgggcggcgttttttttggcgatgttttgggcggcgttttcgttggcgatgtcgtggacggcgttttttttggcgatgttttggacggcgttttcgttggcgatgttttgggcggcgttttcgttggcgatgtcgtgggcggcgttttcgttggcgatgtcgtgggcggcgttttcgttggcgatgtcgtgggcggcgttttcgttggcgatgtcgtgggcggcgttttcgttggcgatgtcgtgggcggtattttcgttggcgatgtttttgtcggcggtttcgttagcgatgtcgtgtatagtattttcgttagcgatgtcgtgtgtggcg

SEQ ID NO: 23708 - DNA, 540 bp, Artificial Sequence
  chemically treated genomic DNA (Homo sapiens) CpG-island No: 23708
cgccacacacgacatcgctaacgaaaatactatacacgacatcgctaacgaaaccgccgacaaaaacatcgccaacgaaaataccgcccacgacatcgccaacgaaaacgccgcccacgacatcgccaacgaaaacgccgcccacgacatcgccaacgaaaacgccgcccacgacatcgccaacgaaaacgccgcccacgacatcgccaacgaaaacgccgcccaaaacatcgccaacgaaaacgccgtccaaaacatcgccaaaaaaaacgccgtccacgacatcgccaacgaaaacgccgcccaaaacatcgccaaaaaaaacgccgcccaaaacatcgccaaaaaaaacgccgcccaaaacatcgccaacgaaaacgccgcccaaaacatcgccaacgaaaacgccgcccaaaacatcgccaaaaaaaacgccgcccacgacatcgccaacgaactatatacgacatcgctaacgaaaacaccttacaaaccgtcgctaacaaatacactatacacaacatcgctaataaaaacact

SEQ ID NO: 23709 - DNA, 522 bp, Artificial Sequence
  chemically treated genomic DNA (Homo sapiens) CpG-island No: 23709
  unsure (70, 170, 205, 429, 460, 496, 517)
gtttaggattagttgaggacgcggtttttcggtggtaattttggtaattagttagcgcgtcgttgcgttnttcggaagttagatttcgtcgggttgagtcgagttacgttagcgtcgattggttacgtggaggagtttgcgtagaggagatatttgattcggatggagancggttaggggagcgcgcgcggattggttggagttngacggggaacgtttgggcggggcgcggattgggggatagtagtttcgcggagcgtatcggaagttttcgtttggtttagtcgcggggtataagatagtggcgttaggagtagcgatttatcgatattagtcgggaaggggttttcgatcgagcgggaggttgggggtagtttggaggtgagatttcgttgcgtttatagagttggcggtcgcggcgtttgcgtnttatcggtaagcgaggagtggagtagagttntatatgtttatggggagaggtttgggggatcgtagnaggatgtaggcgtcgggtgtntaatg

SEQ ID NO: 23710 - DNA, 522 bp, Artificial Sequence
  chemically treated genomic DNA (Homo sapiens) CpG-island No: 23710
  unsure (6, 27, 63, 94, 318, 353, 453)
cattanacacccgacgcctacatcctnctacgatcccccaaacctctccccataaacatatanaactctactccactcctcgcttaccgataanacgcaaacgccgcgaccgccaactctataaacgcaacgaaatctcacctccaaactacccccaacctcccgctcgatcgaaaaccccttcccgactaatatcgataaatcgctactcctaacgccactatcttataccccgcgactaaaccaaacgaaaacttccgatacgctccgcgaaactactatcccccaatccgcgccccgcccaaacgttccccgtcnaactccaaccaatccgcgcgcgctcccctaaccgntctccatccgaatcaaatatctcctctacgcaaactcctccacgtaaccaatcgacgctaacgtaactcgactcaacccgacgaaatctaacttccgaanaacgcaacgacgcgctaactaattaccaaaattaccaccgaaaaaccgcgtcctcaactaatcctaaac

SEQ ID NO: 23711 - DNA, 522 bp, Artificial Sequence
  chemically treated genomic DNA (Homo sapiens) CpG-island No: 23711
  unsure (6, 27, 63, 94, 318, 353, 453)
tattgngtattcggcgtttatattttnttgcggttttttaggtttttttttataggtatatgnagttttgttttatttttcgtttgtcggtggnacgtaggcgtcgcggtcgttagttttgtgaacgtagcggggttttatttttaggttatttttaatttttcgttcggtcgggggttttttttcggttggtgtcggtgggtcgttgtttttggcgttattattttgtatttcgcggttgggttaggcgagaattttcggtgcgtttcgcgggattgttgttttttagttcgcgtttcgtttaggcgtttttcgttnggttttagttaattcgcgcgcgtttttttggtcgntttttattcggattaggtgttttttttgcgtagatttttttacgtagttagtcggcgttggcgtagttcggtttagttcggcggagtttgattttcgganggcgtagcggcgcgttggttggttattaaggttattatcgagaggtcgcgtttttagttggttttagat

SEQ ID NO: 23712 - DNA, 522 bp, Artificial Sequence
  chemically treated genomic DNA (Homo sapiens) CpG-island No: 23712
  unsure (70, 170, 205, 429, 460, 496, 517)
atctaaaaccaactaaaaacgcgacctctcgataataaccttaataaccaaccaacgcgccgctacgccntccgaaaatcaaactccgccgaactaaaccgaactacgccaacgccgactaactacgtaaaaaaatctacgcaaaaaaaacacctaatccgaataaaaancgaccaaaaaaacgcgcgcgaattaactaaaaccnaacgaaaaacgcctaaacgaaacgcgaactaaaaaacaacaatcccgcgaaacgcaccgaaaattctcgcctaacccaaccgcgaaatacaaaataataacgccaaaaacaacgacccaccgacaccaaccgaaaaaaaacccccgaccgaacgaaaaattaaaaataacctaaaaataaaaccccgctacgttcacaaaactaacgaccgcgacgcctacgtnccaccgacaaacgaaaaataaaacaaaactncatatacctataaaaaaaaacctaaaaaaccgcaanaaaatataaacgccgaatacncaata

SEQ ID NO: 23713 - DNA, 668 bp, Artificial Sequence
  chemically treated genomic DNA (Homo sapiens) CpG-island No: 23713
  unsure (144, 304, 337, 455, 525)
ggattcgattcgattcgatggtgcggatttaagttcgtggaagtcggaagtggtgacgcgggtcgcgagaagcggggtcgggatgtggtgaggggggtcgttcggagacgggacgggaagtggcgtcgagtagagagttcgtangcgtgaaggtttttttaatgagcgtttttagcgttgttcgcggttttttttgattgttagttggagcggggatagtatgggcgcggcgttaaggtagcgtcgagtgaggggaagattgatgggcgtttggagacgagtttttatagcggttatttatttnggagttgggcgtcggggttcgttcgtttcgttngcgtcgttagttgttttttttgtttggttttcgtgttttgcgtttttttgtgtcgtttagttttatagttttgaggttttttcggcgtacgtatttcgtttcgatttttcggcgttanttttagttttgacggtcggggaggttttttttagttcggcgtttcgaggatcgttttagtggttaaaggncgcgcggggtgcgttcgggttgtgttttcgggaggttggatcgttagttcgcgtatgaggttatttgtgaggtacgagtgtaggagagtgaaggagatcggggcgtgttgagtagggattttttttagtgattggaaggttat

SEQ ID NO: 23714 - DNA, 668 bp, Artificial Sequence
  chemically treated genomic DNA (Homo sapiens) CpG-island No: 23714
  unsure (144, 214, 332, 365, 525)
ataaccttccaatcactaaaaaaaatccctactcaacacgccccgatctccttcactctcctacactcgtacctcacaaataacctcatacgcgaactaacgatccaacctcccgaaaacacaacccgaacgcaccccgcgcgncctttaaccactaaaacgatcctcgaaacgccgaactaaaaaaaacctccccgaccgtcaaaactaaaantaacgccgaaaaatcgaaacgaaatacgtacgccgaaaaaacctcaaaactataaaactaaacgacacaaaaaaacgcaaaacacgaaaaccaaacaaaaaaaacaactaacgacgcnaacgaaacgaacgaaccccgacgcccaactccnaaataaataaccgctataaaaactcgtctccaaacgcccatcaatcttcccctcactcgacgctaccttaacgccgcgcccatactatccccgctccaactaacaatcaaaaaaaaccgcgaacaacgctaaaaacgctcattaaaaaaaccttcacgcntacgaactctctactcgacgccacttcccgtcccgtctccgaacgacccccctcaccacatcccgaccccgcttctcgcgacccgcgtcaccacttccgacttccacgaacttaaatccgcaccatcgaatcgaatcgaatcc

SEQ ID NO: 23715 - DNA, 668 bp, Artificial Sequence
  chemically treated genomic DNA (Homo sapiens) CpG-island No: 23715
  unsure (144, 214, 332, 365, 525)
ataattttttagttattgaaggaggtttttatttagtacgtttcggttttttttatttttttgtattcgtgttttatagatggttttatgcgcggattggcggtttagtttttcggggatatagttcgggcgtatttcgcgcgntttttggttattgaggcggttttcgaggcgtcgggttagggaaagttttttcggtcgttaaggttgggantagcgtcgggggatcggggcggggtgcgtgcgtcgaaagggttttaaagttgtagggttggacggtataaaggggcgtaaggtacggaggttaggtagaggggatagttagcggcgtnggcgggacgggcgggtttcgacgtttagttttnaaatgggtggtcgttgtgggagttcgtttttaggcgtttattagttttttttttattcgacgttattttggcgtcgcgtttatgttgttttcgttttaattagtagttaggaggggtcgcgggtagcgttggagacgtttattgagaggatttttacgtntgcgggttttttgttcgacgttatttttcgtttcgttttcgggcggttttttttattatatttcggtttcgtttttcgcggttcgcgttattattttcggtttttacgggtttaggttcgtattatcgagtcgaatcgagttt

SEQ ID NO: 23716 - DNA, 668 bp, Artificial Sequence
  chemically treated genomic DNA (Homo sapiens) CpG-island No: 23716
  unsure (144, 304, 337, 455, 525)
aaactcgattcgactcgataatacgaacctaaacccgtaaaaaccgaaaataataacgcgaaccgcgaaaaacgaaaccgaaatataataaaaaaaaccgcccgaaaacgaaacgaaaaataacgtcgaacaaaaaacccgcanacgtaaaaatcctctcaataaacgtctccaacgctacccgcgacccctcctaactactaattaaaacgaaaacaacataaacgcgacgccaaaataacgtcgaataaaaaaaaaactaataaacgcctaaaaacgaactcccacaacgaccacccatttnaaaactaaacgtcgaaacccgcccgtcccgccnacgccgctaactatcccctctacctaacctccgtaccttacgcccctttataccgtccaaccctacaactttaaaaccctttcgacgcacgcaccccgccccgatcccccgacgctantcccaaccttaacgaccgaaaaaactttccctaacccgacgcctcgaaaaccgcctcaataaccaaaaancgcgcgaaatacgcccgaactatatccccgaaaaactaaaccgccaatccgcgcataaaaccatctataaaacacgaatacaaaaaaataaaaaaaaccgaaacgtactaaataaaaacctccttcaataactaaaaaattat

SEQ ID NO: 23717 - DNA, 675 bp, Artificial Sequence
  chemically treated genomic DNA (Homo sapiens) CpG-island No: 23717
  unsure (125, 211, 231, 234..235, 250, 261, 385, 393, 505, 551, 559)
  unsure (577)
acgtagggttttcgttcggttttttagggagttgggagtttagttttcgtttatttttatagtcgcgacggaatgaggttttatcgtaggtcgttattgtttcgcgttcgtttatttcgttgagngtttcgcgttgttgggtcgttcgtatagagttcgtagttgttgtttcggtgttattggcgacgggtatcggttattttcggtattncgggcggtattttagttaanttnnggcgcgcgtcgtatnttcgttggagngaataggtggttagcgtatcgacgtttttttgtttttttcggtttgtttttcgtcggttttagttttagtttaagttttacgtcgtcgtcgtttgtcgagtcggttttttggaatagtaaagtngtattcgntcgatgtttattttagtttcggaattattgacgatttgagtttttcgggttttttagaacggtttcggggatgaattttcgtttcgcgatttgtcgttttgcgttttcgtgntcgttttttaagtattgttttaggtttaagaattcgagaaattttntcgtattnttcgcggggatcgtttgncgcgatttttttaatttttttaattcgtatcgtttttattttattttttttttttatagatttcgtgggtttgataagtatagggttgtagattttgg

SEQ ID NO: 23718 - DNA, 675 bp, Artificial Sequence
  chemically treated genomic DNA (Homo sapiens) CpG-island No: 23718
  unsure (99, 117, 125, 171, 283, 291, 415, 426, 441..442, 445, 465)
  unsure (551)
ccaaaatctacaaccctatacttatcaaacccacgaaatctataaaaaaaaaaaataaaataaaaacgatacgaattaaaaaaattaaaaaaatcgcgncaaacgatccccgcgaanaatacganaaaatttctcgaattcttaaacctaaaacaatacttaaaaaacgancacgaaaacgcaaaacgacaaatcgcgaaacgaaaattcatccccgaaaccgttctaaaaaacccgaaaaactcaaatcgtcaataattccgaaactaaaataaacatcgancgaatacnactttactattccaaaaaaccgactcgacaaacgacgacgacgtaaaacttaaactaaaactaaaaccgacgaaaaacaaaccgaaaaaaacaaaaaaacgtcgatacgctaaccacctattcnctccaacgaanatacgacgcgcgccnnaanttaactaaaataccgcccgnaataccgaaaataaccgatacccgtcgccaataacaccgaaacaacaactacgaactctatacgaacgacccaacaacgcgaaacnctcaacgaaataaacgaacgcgaaacaataacgacctacgataaaacctcattccgtcgcgactataaaaataaacgaaaactaaactcccaactccctaaaaaaccgaacgaaaaccctacgt

SEQ ID NO: 23719 - DNA, 675 bp, Artificial Sequence
  chemically treated genomic DNA (Homo sapiens) CpG-island No: 23719
  unsure (99, 117, 125, 171, 283, 291, 415, 426, 441..442, 445, 465)
  unsure (551)
ttaggatttgtagttttgtgtttattagatttacggagtttgtggaaaggaaggatgggataagaacgatgcgggttgggagagttaaaagggtcgcgntaaacggttttcgcgggnaatgcganaggatttttcgagtttttgagtttagagtaatgtttggggagcgantacgagggcgtagagcggtagatcgcggagcgaaagtttattttcggagtcgttttaggaaattcggaggatttaggtcgttaatgatttcggggttgaagtgggtatcgancgggtgtnattttgttgttttagggagtcggttcggtaggcggcggcgacgtggaatttgggttagggttagaatcggcgaaaagtaagtcggaaaaggtaagggggcgtcggtgcgttgattatttgtttnttttagcggangtgcgacgcgcgttnnganttggttggagtgtcgttcgnggtatcggaagtggtcgatgttcgtcgttagtgatatcgggataatagttgcgggttttgtgcgagcggtttagtagcgcggagtntttagcggagtgagcgagcgcggggtagtagcggtttgcggtgagattttatttcgtcgcggttgtgggggtaggcgggggttgggtttttagttttttagagagtcgagcggaaattttacgt

SEQ ID NO: 23720 - DNA, 675 bp, Artificial Sequence
  chemically treated genomic DNA (Homo sapiens) CpG-island No: 23720
  unsure (125, 211, 231, 234..235, 250, 261, 385, 393, 505, 551, 559)
  unsure (577)
acgtaaaatttccgctcgactctctaaaaaactaaaaacccaacccccgcctacccccacaaccgcgacgaaataaaatctcaccgcaaaccgctactaccccgcgctcgctcactccgctaaanactccgcgctactaaaccgctcgcacaaaacccgcaactattatcccgatatcactaacgacgaacatcgaccacttccgataccncgaacgacactccaaccaantcnnaacgcgcgtcgcacntccgctaaaanaaacaaataatcaacgcaccgacgcccccttaccttttccgacttacttttcgccgattctaaccctaacccaaattccacgtcgccgccgcctaccgaaccgactccctaaaacaacaaaatnacacccgntcgatacccacttcaaccccgaaatcattaacgacctaaatcctccgaatttcctaaaacgactccgaaaataaactttcgctccgcgatctaccgctctacgccctcgtantcgctccccaaacattactctaaactcaaaaactcgaaaaatcctntcgcattncccgcgaaaaccgtttancgcgacccttttaactctcccaacccgcatcgttcttatcccatccttcctttccacaaactccgtaaatctaataaacacaaaactacaaatcctaa

SEQ ID NO: 23721 - DNA, 678 bp, Artificial Sequence
  chemically treated genomic DNA (Homo sapiens) CpG-island No: 23721
atttgttcgggatttgttcgagaatattttagggagaaggtacgttcggttttgggtttggtcgagagtttagggtaggagcgtcggcggggagtttttcgggtgttggagaatgcgtgttcggaaagaagtagggcgcgtttcgtggatgtaattagggtcgtttcgcgtattttttttttattttgggatagcgtttgaattggagttgggcgtatatattttacggagttagttcgggtttttacgttttggtttattttcgttcgtcgttttaggatgtaggtgttgcggcgttttttggtagtttttcgcgttttttgggggcgcgtttttttttattttagggaagttttcggataggtgtttacgttttacgttgttcggtagaagttcgcgggtttaggtcgatttgcgcggtcgtttttttttagggagagaagttggagttttttttacgcggttttaaggcggggtcggttgggtcggagtgggcgcggttagggtgttttagcgcgttttttgtcgatcgcgcgttgcggggggtaattttattttttttggggaggtttcgttttcgttgtagggagattaaagcgtgggttcgcgattagtcggtttaggaacgaaaattttggaattaaaaataaaaaataaaattggtgagtgcgtagcgtg

SEQ ID NO: 23722 - DNA, 678 bp, Artificial Sequence
  chemically treated genomic DNA (Homo sapiens) CpG-island No: 23722
cacgctacgcactcaccaattttattttttatttttaattccaaaattttcgttcctaaaccgactaatcgcgaacccacgctttaatctccctacaacgaaaacgaaacctccccaaaaaaaataaaattaccccccgcaacgcgcgatcgacaaaaaacgcgctaaaacaccctaaccgcgcccactccgacccaaccgaccccgccttaaaaccgcgtaaaaaaaactccaacttctctccctaaaaaaaaacgaccgcgcaaatcgacctaaacccgcgaacttctaccgaacaacgtaaaacgtaaacacctatccgaaaacttccctaaaataaaaaaaaacgcgcccccaaaaaacgcgaaaaactaccaaaaaacgccgcaacacctacatcctaaaacgacgaacgaaaataaaccaaaacgtaaaaacccgaactaactccgtaaaatatatacgcccaactccaattcaaacgctatcccaaaataaaaaaaaaatacgcgaaacgaccctaattacatccacgaaacgcgccctacttctttccgaacacgcattctccaacacccgaaaaactccccgccgacgctcctaccctaaactctcgaccaaacccaaaaccgaacgtaccttctccctaaaatattctcgaacaaatcccgaacaaat

SEQ ID NO: 23723 - DNA, 678 bp, Artificial Sequence
  chemically treated genomic DNA (Homo sapiens) CpG-island No: 23723
tacgttgcgtatttattagttttattttttgtttttagttttagagttttcgtttttaaatcggttggtcgcggatttacgttttagtttttttgtagcggggacgaggtttttttaggggaggtggagttgtttttcgtagcgcgcggtcggtagggggcgcgttgggatattttggtcgcgtttatttcggtttagtcggtttcgttttagggtcgcgtgggggaagttttagtttttttttttggggagaagcggtcgcgtaagtcggtttgagttcgcgggtttttatcggatagcgtaaaacgtgggtatttgttcggggatttttttgaaatggaggaaagcgcgtttttagggagcgcgggaggttattagggagcgtcgtagtatttgtattttggggcggcgggcgggggtgagttagggcgtaagaattcgagttggtttcgtaaagtgtgtgcgtttagttttagtttaggcgttgttttagggtaggaagaaagtgcgcgagacggttttggttgtatttacgaagcgcgttttattttttttcggatacgtattttttagtattcggggagtttttcgtcggcgtttttgttttaaattttcggttaagtttaaagtcgggcgtgttttttttttagaatgttttcgagtaaatttcgaataagt

SEQ ID NO: 23724 - DNA, 678 bp, Artificial Sequence
  chemically treated genomic DNA (Homo sapiens) CpG-island No: 23724
acttattcgaaatttactcgaaaacattctaaaaaaaaaacacgcccgactttaaacttaaccgaaaatttaaaacaaaaacgccgacgaaaaactccccgaatactaaaaaatacgtatccgaaaaaaaataaaacgcgcttcgtaaatacaaccaaaaccgtctcgcgcactttcttcctaccctaaaacaacgcctaaactaaaactaaacgcacacactttacgaaaccaactcgaattcttacgccctaactcacccccgcccgccgccccaaaatacaaatactacgacgctccctaataacctcccgcgctccctaaaaacgcgctttcctccatttcaaaaaaatccccgaacaaatacccacgttttacgctatccgataaaaacccgcgaactcaaaccgacttacgcgaccgcttctccccaaaaaaaaaaactaaaacttcccccacgcgaccctaaaacgaaaccgactaaaccgaaataaacgcgaccaaaatatcccaacgcgccccctaccgaccgcgcgctacgaaaaacaactccacctcccctaaaaaaacctcgtccccgctacaaaaaaactaaaacgtaaatccgcgaccaaccgatttaaaaacgaaaactctaaaactaaaaacaaaaaataaaactaataaatacgcaacgta

SEQ ID NO: 23725 - DNA, 565 bp, Artificial Sequence
  chemically treated genomic DNA (Homo sapiens) CpG-island No: 23725
tgcgagtgtggtgagtgagaatgtggggtgtcggagtgtggagtgtgtgagtgtggagcgtggagtatggggtgttcgagtttggggtgttggagtgcggggtgtgagaatgcgggattgcggcgcgcggtagcgtgagagtttgagtttgggtgtgggagttagtatgtggggcgcggtattgcggggcgtgagtgtggggcgcgggagcgtggggtgtgggaatatgagggcgtgcgagtttcgggcgtcggagttcggcgtttagtttgcgtttcggatcgcggggttgtcggtttcggcgtttcggggttttagtttagtgcgtgggagtttggagcgcgcgagttcggcgcgttagagtttaggtcgtaggagtgtggggagtaggatcgcgagtttttgcgagttcggggcgcgggattttcgagtttcgatttcgggcgcgagattttcgttttcggatttttcggtcgggagtacgaggttcggagtgatgagcgcggagcgacggagtttcggcgcgggagttcgtttcgcgggagtttcgttttcgagttttagt

SEQ ID NO: 23726 - DNA, 565 bp, Artificial Sequence
  chemically treated genomic DNA (Homo sapiens) CpG-island No: 23726
actaaaactcgaaaacgaaactcccgcgaaacgaactcccgcgccgaaactccgtcgctccgcgctcatcactccgaacctcgtactcccgaccgaaaaatccgaaaacgaaaatctcgcgcccgaaatcgaaactcgaaaatcccgcgccccgaactcgcaaaaactcgcgatcctactccccacactcctacgacctaaactctaacgcgccgaactcgcgcgctccaaactcccacgcactaaactaaaaccccgaaacgccgaaaccgacaaccccgcgatccgaaacgcaaactaaacgccgaactccgacgcccgaaactcgcacgccctcatattcccacaccccacgctcccgcgccccacactcacgccccgcaataccgcgccccacatactaactcccacacccaaactcaaactctcacgctaccgcgcgccgcaatcccgcattctcacaccccgcactccaacaccccaaactcgaacaccccatactccacgctccacactcacacactccacactccgacaccccacattctcactcaccacactcgca

SEQ ID NO: 23727 - DNA, 565 bp, Artificial Sequence
  chemically treated genomic DNA (Homo sapiens) CpG-island No: 23727
attgagattcggggacgggattttcgcggggcgggttttcgcgtcgggatttcgtcgtttcgcgtttattatttcgaatttcgtattttcggtcggagggttcgggagcggaggtttcgcgttcgaagtcgaggttcgggggtttcgcgtttcggattcgtaggggttcgcggttttgttttttatatttttacggtttagattttgacgcgtcggattcgcgcgttttaggtttttacgtattggattgggatttcgggacgtcggggtcggtagtttcgcggttcggagcgtagattggacgtcggatttcggcgttcgaggttcgtacgtttttatatttttatattttacgttttcgcgttttatatttacgtttcgtagtgtcgcgttttatatgttgatttttatatttagatttagatttttacgttgtcgcgcgtcgtagtttcgtatttttatatttcgtattttagtattttagattcggatattttatattttacgttttatatttatatattttatatttcgatattttatatttttatttattatattcgta

SEQ ID NO: 23728 - DNA, 565 bp, Artificial Sequence
  chemically treated genomic DNA (Homo sapiens) CpG-island No: 23728
tacgaatataataaataaaaatataaaatatcgaaatataaaatatataaatataaaacgtaaaatataaaatatccgaatctaaaatactaaaatacgaaatataaaaatacgaaactacgacgcgcgacaacgtaaaaatctaaatctaaatataaaaatcaacatataaaacgcgacactacgaaacgtaaatataaaacgcgaaaacgtaaaatataaaaatataaaaacgtacgaacctcgaacgccgaaatccgacgtccaatctacgctccgaaccgcgaaactaccgaccccgacgtcccgaaatcccaatccaatacgtaaaaacctaaaacgcgcgaatccgacgcgtcaaaatctaaaccgtaaaaatataaaaaacaaaaccgcgaacccctacgaatccgaaacgcgaaacccccgaacctcgacttcgaacgcgaaacctccgctcccgaaccctccgaccgaaaatacgaaattcgaaataataaacgcgaaacgacgaaatcccgacgcgaaaacccgccccgcgaaaatcccgtccccgaatctcaat

SEQ ID NO: 23729 - DNA, 532 bp, Artificial Sequence
  chemically treated genomic DNA (Homo sapiens) CpG-island No: 23729
tagtttttcgtcgaatggggtcgcgatgttcggaagaggggttttcgttcggaggttcggcgtcggggtagtagtgtgtgtaggggcgcgtcgggaaggggggatttattttttcggaggttgatttttgttttattcggcgaattttcgttttaggaattgtattttggttttttgtcgttagtcgttattaattttttagcgcgcggcggtttagtttggtaggttgtagttttcggcggagtcgggattttttcgggggcgtttcgggagtcgtcgaggcgagcggagatcgtagagggcggatattaaattagcgggagatagaatgatttttagtagaattttagcgaataaacgttgtttttcggtcggtttcgcggcggtaggtatatttgtatatagagtgtttgggcgtgtgttgcgcgtattggacgttcgggcgtatttgtgtttagcggtgtaggagtttttatcgatttgatttttttattttaggaaaatagaaatgttggcgtttttttggtggtta

SEQ ID NO: 23730 - DNA, 532 bp, Artificial Sequence
  chemically treated genomic DNA (Homo sapiens) CpG-island No: 23730
taaccaccaaaaaaacgccaacatttctattttcctaaaataaaaaaatcaaatcgataaaaactcctacaccgctaaacacaaatacgcccgaacgtccaatacgcgcaacacacgcccaaacactctatatacaaatatacctaccgccgcgaaaccgaccgaaaaacaacgtttattcgctaaaattctactaaaaatcattctatctcccgctaatttaatatccgccctctacgatctccgctcgcctcgacgactcccgaaacgcccccgaaaaaatcccgactccgccgaaaactacaacctaccaaactaaaccgccgcgcgctaaaaaattaataacgactaacgacaaaaaaccaaaatacaattcctaaaacgaaaattcgccgaataaaacaaaaatcaacctccgaaaaaataaatccccccttcccgacgcgcccctacacacactactaccccgacgccgaacctccgaacgaaaacccctcttccgaacatcgcgaccccattcgacgaaaaacta

SEQ ID NO: 23731 - DNA, 532 bp, Artificial Sequence
  chemically treated genomic DNA (Homo sapiens) CpG-island No: 23731
tgattattaagagggcgttagtatttttgtttttttagagtgaaaaggttaaatcgatgggggtttttatatcgttggatataggtgcgttcgggcgtttagtgcgcgtaatatacgtttagatattttatatgtaaatatgtttgtcgtcgcggagtcggtcgggaggtagcgtttgttcgttggggttttgttagaagttattttgtttttcgttggtttaatattcgttttttgcggttttcgttcgtttcggcggttttcgaagcgttttcgggagggtttcggtttcgtcgaaaattgtagtttgttaggttgagtcgtcgcgcgttgggaggttaatagcgattgacgataaagggttaaggtgtaatttttaaagcggggattcgtcgggtgaggtagaaattagttttcggggagatgggtttttttttttcgacgcgtttttgtatatattgttgtttcggcgtcgggttttcgggcggggatttttttttcgggtatcgcggttttattcggcggagagtta

SEQ ID NO: 23732 - DNA, 532 bp, Artificial Sequence
  chemically treated genomic DNA (Homo sapiens) CpG-island No: 23732
taactctccgccgaataaaaccgcgatacccgaaaaaaaaatccccgcccgaaaacccgacgccgaaacaacaatatatacaaaaacgcgtcgaaaaaaaaaaacccatctccccgaaaactaatttctacctcacccgacgaatccccgctttaaaaattacaccttaaccctttatcgtcaatcgctattaacctcccaacgcgcgacgactcaacctaacaaactacaattttcgacgaaaccgaaaccctcccgaaaacgcttcgaaaaccgccgaaacgaacgaaaaccgcaaaaaacgaatattaaaccaacgaaaaacaaaataacttctaacaaaaccccaacgaacaaacgctacctcccgaccgactccgcgacgacaaacatatttacatataaaatatctaaacgtatattacgcgcactaaacgcccgaacgcacctatatccaacgatataaaaacccccatcgatttaaccttttcactctaaaaaaacaaaaatactaacgccctcttaataatca

SEQ ID NO: 23733 - DNA, 1185 bp, Artificial Sequence
  chemically treated genomic DNA (Homo sapiens) CpG-island No: 23733
tatagtaaattttatattggtttttcggggacgtttttttaaattagttttcgcgttttttcgcggcgtatacggagattttcgcgtttttatttcgtcgagtttttcgagggcgtgcgcggcggtcgcggttagggttgaggttttataagtcgtcggtcgcgttcggagttatttttgaatttacgaattgggttagaaatattacgagtcgtttcgttcgtttagacgatgagagatttaatagagttaagttttcgatttcgtcgcgtagcgggtgtttagatagtcgtagtggttcggcggggacgcgggtcgtttttcgggtttttcgttttttttcgcgttcggtcgtttcgggtttcggcgtcgcgttttgggtcgttcggggtagagttgcgcgtatgtaggtagcgcgtttttcggcgtttacgtcgttcgggtcggtttcgcgtcgtcgtcgttcggcgttttcgttcgtacgttttagtcggttttcgagggtgtcggcgtcgcggttagcgtcgttatcgttcgtacgtatatggaggttttttttcgcggtcgcgtttcgttgcggtcgggagttttatcggcgtgcggcgcgttttcgtcgagtttcgtagagtttcgcggttcgagtcgtatgggtgagagaacgcgaggttaggacgtcggcgcggttgggtcgttcgcgtttttcggtcgttcgtcgttttcgtcgtttcggttttcgcgcgggttcggaaatttttaggttattcggcgtaatttgagatatttttattttggatttttgtttttatttttaatagagttttttcgagtgacgtcgtaggtcggttttttggatacgtgtttcgggttaatggcgcggcgtcgcgcgtttacgtgacgtttcggtcgtcgttgggtgataggagtagttcgtcgttttttttttttttaaagcggtcgcgtttttcgtttcgggtgcgggagtttaggaattcggagagattttcgatcgcgttttttgcgttcgttcgcgttttttttgtcgtttcgcggtttaggggtgtgagttattcggcgatagtttcgttaggttatttcggggcgcgtaggtggatacgtataggaagatcgttatttttaagatttttatattgtttatcgtggggcgaaattttataattttttgta

SEQ ID NO: 23734 - DNA, 1185 bp, Artificial Sequence
  chemically treated genomic DNA (Homo sapiens) CpG-island No: 23734
tacaaaaaattataaaatttcgccccacgataaacaatataaaaatcttaaaaataacgatcttcctatacgtatccacctacgcgccccgaaataacctaacgaaactatcgccgaataactcacacccctaaaccgcgaaacgacaaaaaaaacgcgaacgaacgcaaaaaacgcgatcgaaaatctctccgaattcctaaactcccgcacccgaaacgaaaaacgcgaccgctttaaaaaaaaaaaaaacgacgaactactcctatcacccaacgacgaccgaaacgtcacgtaaacgcgcgacgccgcgccattaacccgaaacacgtatccaaaaaaccgacctacgacgtcactcgaaaaaactctattaaaaataaaaacaaaaatccaaaataaaaatatctcaaattacgccgaataacctaaaaatttccgaacccgcgcgaaaaccgaaacgacgaaaacgacgaacgaccgaaaaacgcgaacgacccaaccgcgccgacgtcctaacctcgcgttctctcacccatacgactcgaaccgcgaaactctacgaaactcgacgaaaacgcgccgcacgccgataaaactcccgaccgcaacgaaacgcgaccgcgaaaaaaaacctccatatacgtacgaacgataacgacgctaaccgcgacgccgacaccctcgaaaaccgactaaaacgtacgaacgaaaacgccgaacgacgacgacgcgaaaccgacccgaacgacgtaaacgccgaaaaacgcgctacctacatacgcgcaactctaccccgaacgacccaaaacgcgacgccgaaacccgaaacgaccgaacgcgaaaaaaaacgaaaaacccgaaaaacgacccgcgtccccgccgaaccactacgactatctaaacacccgctacgcgacgaaatcgaaaacttaactctattaaatctctcatcgtctaaacgaacgaaacgactcgtaatatttctaacccaattcgtaaattcaaaaataactccgaacgcgaccgacgacttataaaacctcaaccctaaccgcgaccgccgcgcacgccctcgaaaaactcgacgaaataaaaacgcgaaaatctccgtatacgccgcgaaaaaacgcgaaaactaatttaaaaaaacgtccccgaaaaaccaatataaaatttactata

SEQ ID NO: 23735 - DNA, 1185 bp, Artificial Sequence
  chemically treated genomic DNA (Homo sapiens) CpG-island No: 23735
tgtaaggaattgtgggatttcgttttacggtaaataatatggaaattttaaaaatagcgatttttttgtgcgtgtttatttacgcgtttcggggtgatttggcggggttgtcgtcgggtgatttatatttttgaatcgcgaagcgatagggaaagcgcgggcgagcgtaggagacgcggtcgggggttttttcgggtttttgggttttcgtattcggagcgggggacgcggtcgttttaaggggaggaggggcggcgggttgtttttgttatttagcggcggtcggagcgttacgtgggcgcgcggcgtcgcgttattggttcgaggtacgtgtttaggagatcggtttgcgacgttattcgagggggttttgttaaaaataagaataaaaatttagagtgaaagtgttttaggttgcgtcgagtggtttggaaattttcgagttcgcgcggaggtcgaggcggcgagggcggcggacggtcggggagcgcgggcgatttagtcgcgtcggcgttttggtttcgcgtttttttatttatgcgattcgggtcgcggagttttgcggggttcggcgggagcgcgtcgtacgtcggtggggttttcggtcgtagcggggcgcggtcgcgaggaggggtttttatgtgcgtgcgggcggtggcggcgttgatcgcggcgtcggtattttcgagggtcggttagggcgtgcgggcggggacgtcgggcggcggcggcgcggagtcggttcgggcggcgtgagcgtcggggaacgcgttgtttgtatgcgcgtagttttgtttcgggcggtttagggcgcggcgtcggagttcgaggcggtcggacgcggagaggagcggggagttcgggaggcggttcgcgttttcgtcggattattgcgattgtttagatattcgttgcgcggcgaagtcgaggatttggttttgttgaattttttatcgtttgggcgagcggggcggttcgtggtgtttttaatttagttcgtggatttaaaggtggtttcgagcgcggtcggcgatttgtaggattttagttttggtcgcggtcgtcgcgtacgttttcggaagattcggcggggtgggggcgcgggggttttcgtgtgcgtcgcgggagggcgcgaaggttgatttggaagggcgttttcggagaattagtgtgggatttattgtg

SEQ ID NO: 23736 - DNA, 1185 bp, Artificial Sequence
  chemically treated genomic DNA (Homo sapiens) CpG-island No: 23736
cacaataaatcccacactaattctccgaaaacgcccttccaaatcaaccttcgcgccctcccgcgacgcacacgaaaacccccgcgcccccaccccgccgaatcttccgaaaacgtacgcgacgaccgcgaccaaaactaaaatcctacaaatcgccgaccgcgctcgaaaccacctttaaatccacgaactaaattaaaaacaccacgaaccgccccgctcgcccaaacgataaaaaattcaacaaaaccaaatcctcgacttcgccgcgcaacgaatatctaaacaatcgcaataatccgacgaaaacgcgaaccgcctcccgaactccccgctcctctccgcgtccgaccgcctcgaactccgacgccgcgccctaaaccgcccgaaacaaaactacgcgcatacaaacaacgcgttccccgacgctcacgccgcccgaaccgactccgcgccgccgccgcccgacgtccccgcccgcacgccctaaccgaccctcgaaaataccgacgccgcgatcaacgccgccaccgcccgcacgcacataaaaacccctcctcgcgaccgcgccccgctacgaccgaaaaccccaccgacgtacgacgcgctcccgccgaaccccgcaaaactccgcgacccgaatcgcataaataaaaaaacgcgaaaccaaaacgccgacgcgactaaatcgcccgcgctccccgaccgtccgccgccctcgccgcctcgacctccgcgcgaactcgaaaatttccaaaccactcgacgcaacctaaaacactttcactctaaatttttattcttatttttaacaaaaccccctcgaataacgtcgcaaaccgatctcctaaacacgtacctcgaaccaataacgcgacgccgcgcgcccacgtaacgctccgaccgccgctaaataacaaaaacaacccgccgcccctcctccccttaaaacgaccgcgtcccccgctccgaatacgaaaacccaaaaacccgaaaaaacccccgaccgcgtctcctacgctcgcccgcgctttccctatcgcttcgcgattcaaaaatataaatcacccgacgacaaccccgccaaatcaccccgaaacgcgtaaataaacacgcacaaaaaaatcgctatttttaaaatttccatattatttaccgtaaaacgaaatcccacaattccttaca

SEQ ID NO: 23737 - DNA, 735 bp, Artificial Sequence
  chemically treated genomic DNA (Homo sapiens) CpG-island No: 23737
gaagcgcgtatgaggatcggtttcggtcgtttgttttagttgggacggcgtttcgcgttttttggggatgcggggtagtggcgtgttttttttttgcgatgttagtttcggttgtcgcgttttcgcgagtttagagttttcgttttttttttcgaacgatcgtcgtttttaaggtcggtttttttgtgcggattagacgagtttttttcggatattagtttttttcgggatggaaagtggggtattgattcgggaatttcgttttttttttagttttatttaggaatcggagagcgttcgcgattattcgtttgcggaggacggttttttatattttttaggttcgttgtataaagaggggtttcggagagggcgagtaggaaagtagtttttagacgtcgtgcgttttaggatacggacgttagttttgtaaataaaattttagtgaagcgtttcggagatatcgggcgttcggatgtcgagttaggttttcgtttttatttgaaaacgaggttagagaagggtgattttttcggtttttttgcgttttttttattcgtttcgtttttttagtttgacgtggtgatatttggaaaaatggatttaatgaaagtcgttcgttcgcggcggtttcgttattcgcggggtagagacgtttaataatttttgagagcgagatttttattttagttaaagtaggtttggttagttttgcgttttcggttgggagtcgag

SEQ ID NO: 23738 - DNA, 735 bp, Artificial Sequence
  chemically treated genomic DNA (Homo sapiens) CpG-island No: 23738
ctcgactcccaaccgaaaacgcaaaactaaccaaacctactttaactaaaataaaaatctcgctctcaaaaattattaaacgtctctaccccgcgaataacgaaaccgccgcgaacgaacgactttcattaaatccatttttccaaatatcaccacgtcaaactaaaaaaacgaaacgaataaaaaaaacgcaaaaaaaccgaaaaaatcacccttctctaacctcgttttcaaataaaaacgaaaacctaactcgacatccgaacgcccgatatctccgaaacgcttcactaaaattttatttacaaaactaacgtccgtatcctaaaacgcacgacgtctaaaaactactttcctactcgccctctccgaaacccctctttatacaacgaacctaaaaaatataaaaaaccgtcctccgcaaacgaataatcgcgaacgctctccgattcctaaataaaactaaaaaaaaaacgaaattcccgaatcaataccccactttccatcccgaaaaaaactaatatccgaaaaaaactcgtctaatccgcacaaaaaaaccgaccttaaaaacgacgatcgttcgaaaaaaaaaacgaaaactctaaactcgcgaaaacgcgacaaccgaaactaacatcgcaaaaaaaaaacacgccactaccccgcatccccaaaaaacgcgaaacgccgtcccaactaaaacaaacgaccgaaaccgatcctcatacgcgcttc

SEQ ID NO: 23739 - DNA, 735 bp, Artificial Sequence
  chemically treated genomic DNA (Homo sapiens) CpG-island No: 23739
ttcggtttttagtcgagggcgtagggttggttaggtttgttttggttgaggtggagatttcgtttttagggattgttgggcgtttttgtttcgcgagtaacgagatcgtcgcgagcgaacggtttttattgagtttatttttttaagtgttattacgttaagttagagaagcgaggcgagtggaggggacgtagaggggtcggaaaagttatttttttttggtttcgtttttagataaaaacgggagtttggttcggtattcgggcgttcggtgttttcggggcgttttattgaggttttgtttgtaaaattagcgttcgtgttttgaagcgtacggcgtttggaagttgtttttttgttcgtttttttcgaggtttttttttgtgtagcgagtttgagaaatatggaggatcgtttttcgtaagcgggtggtcgcgggcgtttttcgatttttgggtgaagttagagggaaaacggggttttcgggttagtgttttattttttatttcgggagaaattaatgttcggagagggttcgtttgattcgtatagaaaggtcgattttgagggcggcggtcgttcgggggagaaagcggaggttttgggttcgcgggagcgcggtagtcggggttggtatcgtagaggagagatacgttattgtttcgtatttttagaaagcgcgaggcgtcgttttagttggggtaggcggtcgaggtcggtttttatgcgcgtttt

SEQ ID NO: 23740 - DNA, 735 bp, Artificial Sequence
  chemically treated genomic DNA (Homo sapiens) CpG-island No: 23740
aaaacgcgcataaaaaccgacctcgaccgcctaccccaactaaaacgacgcctcgcgctttctaaaaatacgaaacaataacgtatctctcctctacgataccaaccccgactaccgcgctcccgcgaacccaaaacctccgctttctcccccgaacgaccgccgccctcaaaatcgacctttctatacgaatcaaacgaaccctctccgaacattaatttctcccgaaataaaaaataaaacactaacccgaaaaccccgttttccctctaacttcacccaaaaatcgaaaaacgcccgcgaccacccgcttacgaaaaacgatcctccatatttctcaaactcgctacacaaaaaaaaacctcgaaaaaaacgaacaaaaaaacaacttccaaacgccgtacgcttcaaaacacgaacgctaattttacaaacaaaacctcaataaaacgccccgaaaacaccgaacgcccgaataccgaaccaaactcccgtttttatctaaaaacgaaaccaaaaaaaaataacttttccgacccctctacgtcccctccactcgcctcgcttctctaacttaacgtaataacacttaaaaaaataaactcaataaaaaccgttcgctcgcgacgatctcgttactcgcgaaacaaaaacgcccaacaatccctaaaaacgaaatctccacctcaaccaaaacaaacctaaccaaccctacgccctcgactaaaaaccgaa

SEQ ID NO: 23741 - DNA, 760 bp, Artificial Sequence
  chemically treated genomic DNA (Homo sapiens) CpG-island No: 23741
tattttcgtaggaggttcggtcgtcgcgcgttcgcggtttttcgtttcgtttcggtcggttggcggttatttggtatattagcgttcgtaggatgtttaggttggttttttgtattacgtttgcgtcgcgcgagaagtagtttagcgttcggcgatttagtcggttgtatacgttgggttttcgggtcgggtttatggaggcgcgggtcgggttttgggtaggttgggtcgtcgagtggcgcgttttatattttcgtgttgggtagtcgtcgttgttttcgaatttcgaggtttagattttttcggcggggtttagggaaagttgatacggggaggcgggtagggagtattcgacggcggggcgagggaaagtagagtcgtttgtatcgttagagcgcggagagaagggaagaagtatttttttttcgatttgttttaggttttttggtcgttgatagtgcgacgtttcggtatcgcgcggtcggtcggagtcgtttttttatcgggaaatgtagtttttagtgtttcgtgaggtagttcggttttttttaggaattataattttcgttaggcggcggggagcgagggtttgttcggttttgtttttgtttgtcgcggtttcgtttttttcggttcgcggaggttgcgttgttttgcgggcgcgtttttttgtgttgcgagtggttagttgggtagagttttgggggcgcggtgttgtcgtttttaggttttcgtttcgtgtgtgcgttttgtatttagg

SEQ ID NO: 23742 - DNA, 760 bp, Artificial Sequence
  chemically treated genomic DNA (Homo sapiens) CpG-island No: 23742
cctaaatacaaaacgcacacacgaaacgaaaacctaaaaacgacaacaccgcgcccccaaaactctacccaactaaccactcgcaacacaaaaaaacgcgcccgcaaaacaacgcaacctccgcgaaccgaaaaaaacgaaaccgcgacaaacaaaaacaaaaccgaacaaaccctcgctccccgccgcctaacgaaaattataattcctaaaaaaaaccgaactacctcacgaaacactaaaaactacatttcccgataaaaaaacgactccgaccgaccgcgcgataccgaaacgtcgcactatcaacgaccaaaaaacctaaaacaaatcgaaaaaaaaatacttcttcccttctctccgcgctctaacgatacaaacgactctactttccctcgccccgccgtcgaatactccctacccgcctccccgtatcaactttccctaaaccccgccgaaaaaatctaaacctcgaaattcgaaaacaacgacgactacccaacacgaaaatataaaacgcgccactcgacgacccaacctacccaaaacccgacccgcgcctccataaacccgacccgaaaacccaacgtatacaaccgactaaatcgccgaacgctaaactacttctcgcgcgacgcaaacgtaatacaaaaaaccaacctaaacatcctacgaacgctaatataccaaataaccgccaaccgaccgaaacgaaacgaaaaaccgcgaacgcgcgacgaccgaacctcctacgaaaata

SEQ ID NO: 23743 - DNA, 760 bp, Artificial Sequence
  chemically treated genomic DNA (Homo sapiens) CpG-island No: 23743
tttaagtgtagggcgtatatacggggcggagatttggaggcggtagtatcgcgtttttagggttttgtttagttagttattcgtagtatagagaagcgcgttcgtaagatagcgtagttttcgcgggtcggaggaggcggggtcgcggtaggtagaggtagggtcgggtaagttttcgtttttcgtcgtttgacgggaattgtagtttttgggagaagtcgggttgttttacgaggtattaggaattatatttttcggtgagagagcggtttcggtcggtcgcgcggtatcggagcgtcgtattgttagcggttagagagtttggggtagatcgaaaagggagtgttttttttttttttttcgcgttttggcggtgtaagcggttttgttttttttcgtttcgtcgtcgggtgttttttgttcgttttttcgtgttagttttttttgggtttcgtcgggaaagtttgggtttcgaaattcgaaggtagcggcggttgtttagtacgggagtgtggggcgcgttattcggcggtttagtttatttagggttcggttcgcgtttttatgggttcgattcggaagtttaacgtgtgtagtcggttgagtcgtcgggcgttgggttgtttttcgcgcgacgtaggcgtggtgtagaggattaatttgggtattttgcgggcgttggtgtgttaggtgatcgttagtcggtcggggcgggacggagggtcgcgggcgcgcggcggtcgagttttttgcggggatg

SEQ ID NO: 23744 - DNA, 760 bp, Artificial Sequence
  chemically treated genomic DNA (Homo sapiens) CpG-island No: 23744
catccccgcaaaaaactcgaccgccgcgcgcccgcgaccctccgtcccgccccgaccgactaacgatcacctaacacaccaacgcccgcaaaatacccaaattaatcctctacaccacgcctacgtcgcgcgaaaaacaacccaacgcccgacgactcaaccgactacacacgttaaacttccgaatcgaacccataaaaacgcgaaccgaaccctaaataaactaaaccgccgaataacgcgccccacactcccgtactaaacaaccgccgctaccttcgaatttcgaaacccaaactttcccgacgaaacccaaaaaaaactaacacgaaaaaacgaacaaaaaacacccgacgacgaaacgaaaaaaaacaaaaccgcttacaccgccaaaacgcgaaaaaaaaaaaaaaaacactcccttttcgatctaccccaaactctctaaccgctaacaatacgacgctccgataccgcgcgaccgaccgaaaccgctctctcaccgaaaaatataattcctaatacctcgtaaaacaacccgacttctcccaaaaactacaattcccgtcaaacgacgaaaaacgaaaacttacccgaccctacctctacctaccgcgaccccgcctcctccgacccgcgaaaactacgctatcttacgaacgcgcttctctatactacgaataactaactaaacaaaaccctaaaaacgcgatactaccgcctccaaatctccgccccgtatatacgccctacacttaaa

SEQ ID NO: 23745 - DNA, 704 bp, Artificial Sequence
  chemically treated genomic DNA (Homo sapiens) CpG-island No: 23745
gtcgtttcgcgtagggtagtagtttgttgtagacgatttttttttgcgggacgaagtttcggggtttcggttcgggacgttcgttcggtttcgggggtttttcgattttcgttcgttcggtcggttttatgagtttagggatattttttttatttttttttaatacgttaataataattttattttttttcgggtttcgttttttcgcgttttcgtcgttttgcggtcgttggcgcgatcgttttcggatcgatcgttaggtttttttttttggtcggcgtgttgttgggttttacgcggtttttagttcgttggcggcggtagcggtcgttttgttcgtttcgtatcggttttgttggtgacgttgtagtcgtcgggtttagaggtttcggatcggttttaagttattttcggggcggggcggggcggagcgacggcgtcgggggaggcggtggtggcggtagttggagtttaacgggttgcgtttttttcgtcgtgggttcggttcggagtttttattttaggttttatcggtttagcgcgaggttgttttatcggaaatacgaggtcgaattttaagttattgttttgtttcgtcgggggtcgcgtattttaagcggtagtttattggagttttagtcgttacgataggcggtagttaggtcggtttggtttttttagtcgagtagtttcggtttttgggt

SEQ ID NO: 23746 - DNA, 704 bp, Artificial Sequence
  chemically treated genomic DNA (Homo sapiens) CpG-island No: 23746
acccaaaaaccgaaactactcgactaaaaaaaccaaaccgacctaactaccgcctatcgtaacgactaaaactccaataaactaccgcttaaaatacgcgacccccgacgaaacaaaacaataacttaaaattcgacctcgtatttccgataaaacaacctcgcgctaaaccgataaaacctaaaataaaaactccgaaccgaacccacgacgaaaaaaacgcaacccgttaaactccaactaccgccaccaccgcctcccccgacgccgtcgctccgccccgccccgccccgaaaataacttaaaaccgatccgaaacctctaaacccgacgactacaacgtcaccaacaaaaccgatacgaaacgaacaaaacgaccgctaccgccgccaacgaactaaaaaccgcgtaaaacccaacaacacgccgaccaaaaaaaaaaacctaacgatcgatccgaaaacgatcgcgccaacgaccgcaaaacgacgaaaacgcgaaaaaacgaaacccgaaaaaaaataaaattattattaacgtattaaaaaaaaataaaaaaaatatccctaaactcataaaaccgaccgaacgaacgaaaatcgaaaaacccccgaaaccgaacgaacgtcccgaaccgaaaccccgaaacttcgtcccgcaaaaaaaaatcgtctacaacaaactactaccctacgcgaaacgac

SEQ ID NO: 23747 - DNA, 704 bp, Artificial Sequence
  chemically treated genomic DNA (Homo sapiens) CpG-island No: 23747
atttagaagtcggggttgttcggttagggggattaggtcgatttggttgtcgtttgtcgtggcgattgggattttagtgggttgtcgtttggagtgcgcgattttcggcgaagtaggataatagtttggaattcggtttcgtgttttcggtgaggtagtttcgcgttgggtcggtgaggtttggggtgggggtttcgagtcgggtttacggcgaagaaggcgtagttcgttgggttttagttgtcgttattatcgtttttttcgacgtcgtcgtttcgtttcgtttcgtttcggaagtgatttgaggtcggttcggaatttttgggttcggcggttgtagcgttattagtagagtcggtgcggggcgggtagagcggtcgttgtcgtcgttaacgaattgagagtcgcgtggggtttagtagtacgtcggttagggaagggggtttagcgatcggttcgagggcgatcgcgttagcggtcgtagggcgacgaagacgcggaggagcggagttcggagagggatgggattattattagcgtgttgggagggggtggggggggtgtttttgggtttatggagtcggtcgagcgggcgggagtcggagagttttcggagtcgggcgggcgtttcgagtcggagtttcggggtttcgtttcgtagaaggagatcgtttataataagttgttgttttacgcggagcggt

SEQ ID NO: 23748 - DNA, 704 bp, Artificial Sequence
  chemically treated genomic DNA (Homo sapiens) CpG-island No: 23748
accgctccgcgtaaaacaacaacttattataaacgatctccttctacgaaacgaaaccccgaaactccgactcgaaacgcccgcccgactccgaaaactctccgactcccgcccgctcgaccgactccataaacccaaaaacaccccccccaccccctcccaacacgctaataataatcccatccctctccgaactccgctcctccgcgtcttcgtcgccctacgaccgctaacgcgatcgccctcgaaccgatcgctaaacccccttccctaaccgacgtactactaaaccccacgcgactctcaattcgttaacgacgacaacgaccgctctacccgccccgcaccgactctactaataacgctacaaccgccgaacccaaaaattccgaaccgacctcaaatcacttccgaaacgaaacgaaacgaaacgacgacgtcgaaaaaaacgataataacgacaactaaaacccaacgaactacgccttcttcgccgtaaacccgactcgaaacccccaccccaaacctcaccgacccaacgcgaaactacctcaccgaaaacacgaaaccgaattccaaactattatcctacttcgccgaaaatcgcgcactccaaacgacaacccactaaaatcccaatcgccacgacaaacgacaaccaaatcgacctaatccccctaaccgaacaaccccgacttctaaat

SEQ ID NO: 23749 - DNA, 750 bp, Artificial Sequence
  chemically treated genomic DNA (Homo sapiens) CpG-island No: 23749
  unsure (597)
agcgggtagggtttttggggcgtacgggtttcgggcggcgcgcgcgttttcgagttttaggtttgatagcggggcgcgcgggcgggggcgcgtgtgtcgggcgcgcgagggacgtgatcgattagtcgaggtttcgggtagtttttagggttttcgcgtacgcgcgttttttcgtttcgttttgttcgttttttcgtttatttcgcgtattgaggtttgcgcgcgtcggcgcgggaggcgggagttgggggcgggggcggtggcgacgtcgagggggaggggcgggttcggttcggttcggttcggtcgttcgcgcgcggttttaggaggtttcgggttcggttcgggcggcggtggcggtggcggttttagttcgagacgtttgtggcgttttcgtatcgcgtcgtagttatggttttggtgattttgtagcgttcgtttacgtttagcgtcgtttttttttcggttagtaatagcgaggtgagtatcgggttcgtcgcgtttcggtttgggtcgtcggacgtagcgtcgacgtcgtcggagtttggggaagcgcgtacggggtaagggggcggttgcgcgggtttttcgggtttncgtcgtaggaatagagtcgggtagtcggatcggggtgatcgtgcgaggattgtgtgcgatgtgattttgttttggggagttgtgcggggattttgtgtgcggtgtgatttttatcggggggcgattttgtagggattgtgtatgtagtgcgat

SEQ ID NO: 23750 - DNA, 750 bp, Artificial Sequence
  chemically treated genomic DNA (Homo sapiens) CpG-island No: 23750
  unsure (154)
atcgcactacatacacaatccctacaaaatcgccccccgataaaaatcacaccgcacacaaaatccccgcacaactccccaaaacaaaatcacatcgcacacaatcctcgcacgatcaccccgatccgactacccgactctattcctacgacgnaaacccgaaaaacccgcgcaaccgcccccttaccccgtacgcgcttccccaaactccgacgacgtcgacgctacgtccgacgacccaaaccgaaacgcgacgaacccgatactcacctcgctattactaaccgaaaaaaaaacgacgctaaacgtaaacgaacgctacaaaatcaccaaaaccataactacgacgcgatacgaaaacgccacaaacgtctcgaactaaaaccgccaccgccaccgccgcccgaaccgaacccgaaacctcctaaaaccgcgcgcgaacgaccgaaccgaaccgaaccgaacccgcccctccccctcgacgtcgccaccgcccccgcccccaactcccgcctcccgcgccgacgcgcgcaaacctcaatacgcgaaataaacgaaaaaacgaacaaaacgaaacgaaaaaacgcgcgtacgcgaaaaccctaaaaactacccgaaacctcgactaatcgatcacgtccctcgcgcgcccgacacacgcgcccccgcccgcgcgccccgctatcaaacctaaaactcgaaaacgcgcgcgccgcccgaaacccgtacgccccaaaaaccctacccgct

SEQ ID NO: 23751 - DNA, 750 bp, Artificial Sequence
  chemically treated genomic DNA (Homo sapiens) CpG-island No: 23751
  unsure (154)
gtcgtattgtatatatagtttttgtaaagtcgtttttcgataggggttatatcgtatataaagttttcgtatagttttttaagatagggttatatcgtatatagttttcgtacggttatttcggttcggttgttcggttttgtttttacggcgngggttcgaggagttcgcgtagtcgtttttttgtttcgtacgcgtttttttaagtttcggcggcgtcggcgttgcgttcggcggtttaggtcggggcgcggcgagttcggtgtttatttcgttgttgttggtcgaggaggaggcggcgttgggcgtgggcgagcgttgtagggttattagggttatggttgcggcgcggtgcgagggcgttatagacgtttcgagttagagtcgttatcgttatcgtcgttcgggtcgggttcggggttttttggagtcgcgcgcgggcggtcgggtcgagtcgggtcgggttcgtttttttttttcggcgtcgttatcgttttcgtttttagttttcgtttttcgcgtcggcgcgcgtaggttttagtgcgcggagtgggcggggaagcgggtagggcgggacgaggaggcgcgcgtgcgcgggggttttgagggttgttcgaggtttcggttggtcgattacgtttttcgcgcgttcgatatacgcgttttcgttcgcgcgtttcgttattaggtttgggattcgggggcgcgcgcgtcgttcggagttcgtacgttttaggggttttgttcgtt

SEQ ID NO: 23752 - DNA, 750 bp, Artificial Sequence
  chemically treated genomic DNA (Homo sapiens) CpG-island No: 23752
  unsure (597)
aacgaacaaaacccctaaaacgtacgaactccgaacgacgcgcgcgcccccgaatcccaaacctaataacgaaacgcgcgaacgaaaacgcgtatatcgaacgcgcgaaaaacgtaatcgaccaaccgaaacctcgaacaaccctcaaaacccccgcgcacgcgcgcctcctcgtcccgccctacccgcttccccgcccactccgcgcactaaaacctacgcgcgccgacgcgaaaaacgaaaactaaaaacgaaaacgataacgacgccgaaaaaaaaaaacgaacccgacccgactcgacccgaccgcccgcgcgcgactccaaaaaaccccgaacccgacccgaacgacgataacgataacgactctaactcgaaacgtctataacgccctcgcaccgcgccgcaaccataaccctaataaccctacaacgctcgcccacgcccaacgccgcctcctcctcgaccaacaacaacgaaataaacaccgaactcgccgcgccccgacctaaaccgccgaacgcaacgccgacgccgccgaaacttaaaaaaacgcgtacgaaacaaaaaaacgactacgcgaactcctcgaacccncgccgtaaaaacaaaaccgaacaaccgaaccgaaataaccgtacgaaaactatatacgatataaccctatcttaaaaaactatacgaaaactttatatacgatataacccctatcgaaaaacgactttacaaaaactatatatacaatacgac

SEQ ID NO: 23753 - DNA, 548 bp, Artificial Sequence
  chemically treated genomic DNA (Homo sapiens) CpG-island No: 23753
gtagatttcgtattcgcgcgacggatttgtttttgggatgttcgatataacggagcggatacggtagttggtttggttcgcgatgtgtatatggttatcgggtgtgatagtaagggcggcgatcgtgttgaatttggtattggtggttagatagtgtttcgtttcgaagtagtcgtaatcgcgttttaggtaattgtatttggattcggtattagtaaacggagcgattttttcgttcgtgtcgattacgcgtattcggtttattcgttgagagtcgtttttcgttacgtaaagtttatcgagtggatcgaacgcgatagattgcggtattattagggtagcgtgggtagttagattcgtatcgtaggtagtggaggttgtggcgtaatgtaggggacggtcggagatgacgcgtatacgatcgtttggtgttattcgtagattatgtggtcgtcgattatgtgtagcgtgttgtttatcggggagattgttagtttagtgggttagcgaagatgtattttttttagttttagggtttttttcgtagg

SEQ ID NO: 23754 - DNA, 548 bp, Artificial Sequence
  chemically treated genomic DNA (Homo sapiens) CpG-island No: 23754
cctacgaaaaaaaccctaaaactaaaaaaaatacatcttcgctaacccactaaactaacaatctccccgataaacaacacgctacacataatcgacgaccacataatctacgaataacaccaaacgatcgtatacgcgtcatctccgaccgtcccctacattacgccacaacctccactacctacgatacgaatctaactacccacgctaccctaataataccgcaatctatcgcgttcgatccactcgataaactttacgtaacgaaaaacgactctcaacgaataaaccgaatacgcgtaatcgacacgaacgaaaaaatcgctccgtttactaataccgaatccaaatacaattacctaaaacgcgattacgactacttcgaaacgaaacactatctaaccaccaataccaaattcaacacgatcgccgcccttactatcacacccgataaccatatacacatcgcgaaccaaaccaactaccgtatccgctccgttatatcgaacatcccaaaaacaaatccgtcgcgcgaatacgaaatctac

SEQ ID NO: 23755 - DNA, 548 bp, Artificial Sequence
  chemically treated genomic DNA (Homo sapiens) CpG-island No: 23755
tttgcgaggggaattttgaagttggaggagatgtattttcgttggtttattgagttagtagttttttcgatggataatacgttgtatataatcgacgattatatgatttgcggatgatattagacggtcgtgtgcgcgttattttcggtcgttttttatattgcgttatagtttttattgtttacgatacggatttggttatttacgttattttggtgatgtcgtagtttatcgcgttcggtttattcggtgagttttacgtggcggaaagcgatttttaacgaataaatcgggtgcgcgtgatcggtacggacggaaggatcgtttcgtttgttggtgtcgaatttaagtgtaattgtttggagcgcggttgcgattgtttcgaagcggaatattatttggttattagtgttaagtttaatacgatcgtcgtttttgttgttatattcgatagttatgtatatatcgcggattaggttaattatcgtattcgtttcgttatgtcgagtattttagaggtaagttcgtcgcgcgagtacgagatttat

SEQ ID NO: 23756 - DNA, 548 bp, Artificial Sequence
  chemically treated genomic DNA (Homo sapiens) CpG-island No: 23756
ataaatctcgtactcgcgcgacgaacttacctctaaaatactcgacataacgaaacgaatacgataattaacctaatccgcgatatatacataactatcgaatataacaacaaaaacgacgatcgtattaaacttaacactaataaccaaataatattccgcttcgaaacaatcgcaaccgcgctccaaacaattacacttaaattcgacaccaacaaacgaaacgatccttccgtccgtaccgatcacgcgcacccgatttattcgttaaaaatcgctttccgccacgtaaaactcaccgaataaaccgaacgcgataaactacgacatcaccaaaataacgtaaataaccaaatccgtatcgtaaacaataaaaactataacgcaatataaaaaacgaccgaaaataacgcgcacacgaccgtctaatatcatccgcaaatcatataatcgtcgattatatacaacgtattatccatcgaaaaaactactaactcaataaaccaacgaaaatacatctcctccaacttcaaaattcccctcgcaaa

SEQ ID NO: 23757 - DNA, 559 bp, Artificial Sequence
  chemically treated genomic DNA (Homo sapiens) CpG-island No: 23757
  unsure (164, 186, 227, 320)
cgcggggtcgtcgggatattgcgttgttcgggagatatttgacgtgataggaacgtcgttagttttagttcgtcgtgattttatagtttttcggtttcggaagtgttttggtttgtcggaagtgtcggagcggttgatagagcggttgacggagtcgggtttanttaggtcgttgtcgcgagggangttgttgtgttggggtttgggtggcggttggaggtttgagnttgggttcgcggcgggggtcggtagggggtcgggtggcggaatgatggaggaggaggaattggagttcgtggaggagttggaagtcgtgttgntagtttacgttcgaggtgtagttggttatcgagtaggtaagcgtttcgttttttaggaggggaaacgggagtgcgggaggggagacggtagtttcgggcgttggggaggtcgcggcgggtggacggagggtcgggggttcgcggtagaagggaaagtggaggtggggaggtggtgcgggtgagaagcggtttttgaattagaaggaaaggaaagagaattttttttaggttttgattgt

SEQ ID NO: 23758 - DNA, 559 bp, Artificial Sequence
  chemically treated genomic DNA (Homo sapiens) CpG-island No: 23758
  unsure (240, 333, 374, 396)
acaatcaaaacctaaaaaaaattctctttcctttccttctaattcaaaaaccgcttctcacccgcaccacctccccacctccactttcccttctaccgcgaacccccgaccctccgtccacccgccgcgacctccccaacgcccgaaactaccgtctcccctcccgcactcccgtttcccctcctaaaaaacgaaacgcttacctactcgataaccaactacacctcgaacgtaaactancaacacgacttccaactcctccacgaactccaattcctcctcctccatcattccgccacccgaccccctaccgacccccgccgcgaacccaanctcaaacctccaaccgccacccaaaccccaacacaacaacntccctcgcgacaacgacctaantaaacccgactccgtcaaccgctctatcaaccgctccgacacttccgacaaaccaaaacacttccgaaaccgaaaaactataaaatcacgacgaactaaaactaacgacgttcctatcacgtcaaatatctcccgaacaacgcaatatcccgacgaccccgcg

SEQ ID NO: 23759 - DNA, 559 bp, Artificial Sequence
  chemically treated genomic DNA (Homo sapiens) CpG-island No: 23759
  unsure (240, 333, 374, 396)
ataattaaagtttagaaagggtttttttttttttttttttgatttagaaatcgttttttattcgtattatttttttatttttatttttttttttgtcgcgagttttcggtttttcgtttattcgtcgcggtttttttagcgttcggagttgtcgttttttttttcgtattttcgtttttttttttgaggggcggaacgtttatttgttcgatggttagttgtatttcgggcgtgagttgntagtacggtttttagtttttttacgaattttagtttttttttttttattatttcgttattcggttttttgtcgattttcgtcgcgagtttaantttaggtttttagtcgttatttaggttttagtatagtaatntttttcgcggtagcgatttggntgagttcggtttcgttagtcgttttgttagtcgtttcggtattttcggtaggttagggtattttcgggatcggggaattgtgggattacggcggattgagattggcggcgtttttgttacgttaggtgtttttcgggtaacgtagtatttcggcggtttcgcg

SEQ ID NO: 23760 - DNA, 559 bp, Artificial Sequence
  chemically treated genomic DNA (Homo sapiens) CpG-island No: 23760
  unsure (164, 186, 227, 320)
cgcgaaaccgccgaaatactacgttacccgaaaaacacctaacgtaacaaaaacgccgccaatctcaatccgccgtaatcccacaattccccgatcccgaaaataccctaacctaccgaaaataccgaaacgactaacaaaacgactaacgaaaccgaactcanccaaatcgctaccgcgaaaaanattactatactaaaacctaaataacgactaaaaacctaaanttaaactcgcgacgaaaatcgacaaaaaaccgaataacgaaataataaaaaaaaaaaaactaaaattcgtaaaaaaactaaaaaccgtactancaactcacgcccgaaatacaactaaccatcgaacaaataaacgttccgcccctcaaaaaaaaaaacgaaaatacgaaaaaaaaaacgacaactccgaacgctaaaaaaaccgcgacgaataaacgaaaaaccgaaaactcgcgacaaaaaaaaaaataaaaataaaaaaataatacgaataaaaaacgatttctaaatcaaaaaaaaaaaaaaaaaaaccctttctaaactttaattat

SEQ ID NO: 23761 - DNA, 685 bp, Artificial Sequence
  chemically treated genomic DNA (Homo sapiens) CpG-island No: 23761
tagcgggtcggaggagaacggaagtttggggagattcgcgcgattcgtttggttgtattttatattttttttttcggtagttggggttacgaaggttgttttcgtcggcggtgttggaacgtggatacgtgcgttttggtaatagggtagtttttttcgcgggcgtagttttcgttgcgagcgttttcggttgttgaggcgggatcgaggattcggagatttgagtcgcgggtgggcggggaggggtttttgtgatttgttcgttttttttcggtattgtgatgtcggggggtagttgcgggttcggcgcgtttgttttcggcgtttttttttttcggtgtgttataacggcggaggcggttgtatttggagtagtcggggcgggtaggtttagttgagaggtgcgcgggcgaggatagcggtagcgatggtgaggtttttcggggttaggcgggttgcgggcgcgcggtaggcgtaggatcgagagtcgagtttacgcggaggcgtacggattcgtttttttggagtcgtagggtttaaggttttttgggggtggtagtttagggtcgaggagttcgtattttcgggcgggaatattcggtgttttttatcgtatgggggaaatagagattaggggttagttgttttttaaagggatttaagggagttttgcgtgtagacgagg

SEQ ID NO: 23762 - DNA, 685 bp, Artificial Sequence
  chemically treated genomic DNA (Homo sapiens) CpG-island No: 23762
cctcgtctacacgcaaaactcccttaaatccctttaaaaaacaactaacccctaatctctatttcccccatacgataaaaaacaccgaatattcccgcccgaaaatacgaactcctcgaccctaaactaccacccccaaaaaaccttaaaccctacgactccaaaaaaacgaatccgtacgcctccgcgtaaactcgactctcgatcctacgcctaccgcgcgcccgcaacccgcctaaccccgaaaaacctcaccatcgctaccgctatcctcgcccgcgcacctctcaactaaacctacccgccccgactactccaaatacaaccgcctccgccgttataacacaccgaaaaaaaaaaacgccgaaaacaaacgcgccgaacccgcaactaccccccgacatcacaataccgaaaaaaaacgaacaaatcacaaaaacccctccccgcccacccgcgactcaaatctccgaatcctcgatcccgcctcaacaaccgaaaacgctcgcaacgaaaactacgcccgcgaaaaaaactaccctattaccaaaacgcacgtatccacgttccaacaccgccgacgaaaacaaccttcgtaaccccaactaccgaaaaaaaaaatataaaatacaaccaaacgaatcgcgcgaatctccccaaacttccgttctcctccgacccgcta

SEQ ID NO: 23763 - DNA, 685 bp, Artificial Sequence
  chemically treated genomic DNA (Homo sapiens) CpG-island No: 23763
tttcgtttgtacgtaaagtttttttaggtttttttaaggaataattggtttttggtttttattttttttatacgataaagggtatcgggtgttttcgttcgagggtgcggatttttcgattttgaattgttatttttagaaggttttgagttttgcggttttaggaagacgggttcgtgcgttttcgcgtagattcggttttcggttttacgtttgtcgcgcgttcgtagttcgtttggtttcgggaagttttattatcgttgtcgttgttttcgttcgcgtattttttagttgggtttgttcgtttcgattgttttagatatagtcgttttcgtcgttgtgatatatcgggagggggggacgtcggggataggcgcgtcgggttcgtagttgtttttcggtattatagtgtcggggaggggcgggtaggttataaaggttttttttcgtttattcgcggtttaaattttcgggttttcggtttcgttttagtagtcgggggcgttcgtagcggggattgcgttcgcgggggaggttgttttattattaaagcgtacgtgtttacgttttaatatcgtcggcgagagtagttttcgtgattttagttgtcggagaaagaaatgtaaaatgtagttaggcgaatcgcgcgggtttttttaaattttcgttttttttcgattcgttg

SEQ ID NO: 23764 - DNA, 685 bp, Artificial Sequence
  chemically treated genomic DNA (Homo sapiens) CpG-island No: 23764
caacgaatcgaaaaaaaacgaaaatttaaaaaaacccgcgcgattcgcctaactacattttacatttctttctccgacaactaaaatcacgaaaactactctcgccgacgatattaaaacgtaaacacgtacgctttaataataaaacaacctcccccgcgaacgcaatccccgctacgaacgcccccgactactaaaacgaaaccgaaaacccgaaaatttaaaccgcgaataaacgaaaaaaaacctttataacctacccgcccctccccgacactataataccgaaaaacaactacgaacccgacgcgcctatccccgacgtccccccctcccgatatatcacaacgacgaaaacgactatatctaaaacaatcgaaacgaacaaacccaactaaaaaatacgcgaacgaaaacaacgacaacgataataaaacttcccgaaaccaaacgaactacgaacgcgcgacaaacgtaaaaccgaaaaccgaatctacgcgaaaacgcacgaacccgtcttcctaaaaccgcaaaactcaaaaccttctaaaaataacaattcaaaatcgaaaaatccgcaccctcgaacgaaaacacccgataccctttatcgtataaaaaaaataaaaaccaaaaaccaattattccttaaaaaaacctaaaaaaactttacgtacaaacgaaa

SEQ ID NO: 23765 - DNA, 881 bp, Artificial Sequence
  chemically treated genomic DNA (Homo sapiens) CpG-island No: 23765
gaggcgtcgatttcgaggaggcggtattttttttcgttgttttcgcgtatttcgatgttcgttttgtaggcgtaggcgttggttgtataggtttttttcggtgaggtgttggatttttagtagtttttgtacgatttcgaatacggtgtcgtcgagaagcgttagggttaggtcgtttagcgtggtgtaggataagcgttgttggaatgagttgcggggtagaggagcgcggtgagtttcggcgggatacgatgcggtttcggtaggtcgtcgttcgtttcgttcgcgtatttcggtaatttttttattaggttttgtaacgtcgatagtagttggtagtgtcgtttttgttgtcgggtatcgttcgttattttttttaaggcgtcggcgtagcgttttatggcgcggacgttcgttagtcgtcggttgtagcgacgagcgtttttagtttacgttatttcgatcgcggcgcgtttcgttttttttatgatagtttttagcgtagcgcgtttcgttcgttttaggatagttttcgatcgcggcgcgtttcgcgtttttttcgttttattacgcgtttcgttttttgcgttatttagaaggagacgcgtttcgttttttcgtggtggttgtaaggagggtttcgtttagttgaggttcgtatttttttgtttttcgggttattttagaggcgagatttcgtcgtttggatatcgtaggattatgtagaattttatcggtttttgttgagttattgcgggttgaggttcgggtttcgcgtcggcgcgtttgcgaggtggattgtttcggttatcggtttttttagagggaggggtttcgggttagagtttataggatttgggtttaaggtattatcgcggtcg

SEQ ID NO: 23766 - DNA, 881 bp, Artificial Sequence
  chemically treated genomic DNA (Homo sapiens) CpG-island No: 23766
cgaccgcgataataccttaaacccaaatcctataaactctaacccgaaacccctccctctaaaaaaaccgataaccgaaacaatccacctcgcaaacgcgccgacgcgaaacccgaacctcaacccgcaataactcaacaaaaaccgataaaattctacataatcctacgatatccaaacgacgaaatctcgcctctaaaataacccgaaaaacaaaaaaatacgaacctcaactaaacgaaaccctccttacaaccaccacgaaaaaacgaaacgcgtctccttctaaataacgcaaaaaacgaaacgcgtaataaaacgaaaaaaacgcgaaacgcgccgcgatcgaaaactatcctaaaacgaacgaaacgcgctacgctaaaaactatcataaaaaaaacgaaacgcgccgcgatcgaaataacgtaaactaaaaacgctcgtcgctacaaccgacgactaacgaacgtccgcgccataaaacgctacgccgacgccttaaaaaaaataacgaacgatacccgacaacaaaaacgacactaccaactactatcgacgttacaaaacctaataaaaaaattaccgaaatacgcgaacgaaacgaacgacgacctaccgaaaccgcatcgtatcccgccgaaactcaccgcgctcctctaccccgcaactcattccaacaacgcttatcctacaccacgctaaacgacctaaccctaacgcttctcgacgacaccgtattcgaaatcgtacaaaaactactaaaaatccaacacctcaccgaaaaaaacctatacaaccaacgcctacgcctacaaaacgaacatcgaaatacgcgaaaacaacgaaaaaaaataccgcctcctcgaaatcgacgcctc

SEQ ID NO: 23767 - DNA, 881 bp, Artificial Sequence
  chemically treated genomic DNA (Homo sapiens) CpG-island No: 23767
cggtcgcgatggtgttttagatttaggttttgtgggttttggttcgagatttttttttttgggaaggtcggtgatcgggatagtttatttcgtaggcgcgtcggcgcggagttcggattttagttcgtaatgatttagtaagggtcggtgggattttatatggttttgcgatatttaggcgacggagtttcgtttttaaagtggttcggggagtaggaaggtacgagttttagttgagcgaaattttttttgtagttattacggagggacggggcgcgtttttttttgaatgacgtaaggggcggggcgcgtggtggggcggggaaggcgcgaggcgcgtcgcgatcggggattgttttaagacgggcggggcgcgttgcgttagggattgttataaaaggggcgggacgcgtcgcggtcgggatgacgtgagttgggggcgttcgtcgttgtagtcggcggttagcgggcgttcgcgttatggagcgttacgtcggcgttttggaggaggtggcggacggtgttcggtagtaggagcgatattattagttgttgtcggcgttatagagtttggtgaaggagttgtcgaggtacgcgggcggggcgggcggcggtttgtcgaggtcgtatcgtgtttcgtcggggtttatcgcgtttttttatttcgtagtttattttagtagcgtttgttttatattacgttgagcgatttggttttggcgtttttcgacggtatcgtgttcgaaatcgtgtaggggttattggagatttagtattttatcgaaaagagtttgtataattagcgtttgcgtttatagaacgagtatcgaggtgcgcgggggtagcgggaggaggtgtcgttttttcggggtcggcgtttt

SEQ ID NO: 23768 - DNA, 881 bp, Artificial Sequence
  chemically treated genomic DNA (Homo sapiens) CpG-island No: 23768
aaaacgccgaccccgaaaaaacgacacctcctcccgctacccccgcgcacctcgatactcgttctataaacgcaaacgctaattatacaaactcttttcgataaaatactaaatctccaataacccctacacgatttcgaacacgataccgtcgaaaaacgccaaaaccaaatcgctcaacgtaatataaaacaaacgctactaaaataaactacgaaataaaaaaacgcgataaaccccgacgaaacacgatacgacctcgacaaaccgccgcccgccccgcccgcgtacctcgacaactccttcaccaaactctataacgccgacaacaactaataatatcgctcctactaccgaacaccgtccgccacctcctccaaaacgccgacgtaacgctccataacgcgaacgcccgctaaccgccgactacaacgacgaacgcccccaactcacgtcatcccgaccgcgacgcgtcccgccccttttataacaatccctaacgcaacgcgccccgcccgtcttaaaacaatccccgatcgcgacgcgcctcgcgccttccccgccccaccacgcgccccgccccttacgtcattcaaaaaaaaacgcgccccgtccctccgtaataactacaaaaaaaatttcgctcaactaaaactcgtaccttcctactccccgaaccactttaaaaacgaaactccgtcgcctaaatatcgcaaaaccatataaaatcccaccgacccttactaaatcattacgaactaaaatccgaactccgcgccgacgcgcctacgaaataaactatcccgatcaccgaccttcccaaaaaaaaaaatctcgaaccaaaacccacaaaacctaaatctaaaacaccatcgcgaccg

SEQ ID NO: 23769 - DNA, 766 bp, Artificial Sequence
  chemically treated genomic DNA (Homo sapiens) CpG-island No: 23769
cgttatatacgatatcgttaacgaggatattgtatacgatatcgttaacgaggtcgtcgataagggtatcgttaacgaggacgtcgtttacggtatcgttagcgaggacgtcgtttacggaatcgttagcgaggacgtcgtttacggtatcgttagcgaggacgtcgtttagggtatcgttagcgaggacgtcgtttagggtatcgttagggaggacgtcgtttagggtatcgttaaggaggacgtcgtttagggtatcgttaaggagggcgtcgtttagggtatcgttaaggaggacgtcgtttacggtatcgttaacgaggatttcgtttacggaatcgttagcgaggacgtcgtttacggtatcgttagcgaggacgtcgtttagggtatcgttaaggaggacgtcgtttagggtatcgttaacgaggacgtcgtttagggtatcgttaaggaggacgtcgtttagggtatcgttaaggaggacgtcgtttagggtatcgttaacgagggcgtcgtttagggtatcgttaaagaggacgtcgtttagggtatcgttaacgaggacgtcgtttagggtatcgttaacgaggacgtcgtttacggaatcgttagcgaggacgtcgtttacggtatcgttagcgaggacgtcgtttagggtatcgttaaggaggatgtcgtttagggtatcgttaacgaggacgtcgtttagggtatcgttaacgaggacgtcgtttagggtatcgttaaagaggacgtcgtttat

SEQ ID NO: 23770 - DNA, 766 bp, Artificial Sequence
  chemically treated genomic DNA (Homo sapiens) CpG-island No: 23770
ataaacgacgtcctctttaacgataccctaaacgacgtcctcgttaacgataccctaaacgacgtcctcgttaacgataccctaaacgacatcctccttaacgataccctaaacgacgtcctcgctaacgataccgtaaacgacgtcctcgctaacgattccgtaaacgacgtcctcgttaacgataccctaaacgacgtcctcgttaacgataccctaaacgacgtcctctttaacgataccctaaacgacgccctcgttaacgataccctaaacgacgtcctccttaacgataccctaaacgacgtcctccttaacgataccctaaacgacgtcctcgttaacgataccctaaacgacgtcctccttaacgataccctaaacgacgtcctcgctaacgataccgtaaacgacgtcctcgctaacgattccgtaaacgaaatcctcgttaacgataccgtaaacgacgtcctccttaacgataccctaaacgacgccctccttaacgataccctaaacgacgtcctccttaacgataccctaaacgacgtcctccctaacgataccctaaacgacgtcctcgctaacgataccctaaacgacgtcctcgctaacgataccgtaaacgacgtcctcgctaacgattccgtaaacgacgtcctcgctaacgataccgtaaacgacgtcctcgttaacgatacccttatcgacgacctcgttaacgatatcgtatacaatatcctcgttaacgatatcgtatataacg

SEQ ID NO: 23771 - DNA, 766 bp, Artificial Sequence
  chemically treated genomic DNA (Homo sapiens) CpG-island No: 23771
gtgggcggcgttttttttggcgatgttttgggcggcgttttcgttggcgatgttttgggcggcgttttcgttggcgatgttttgggcggtattttttttggcgatgttttggacggcgttttcgttggcgatgtcgtgggcggcgttttcgttggcgatttcgtgggcggcgttttcgttggcgatgttttgggcggcgttttcgttggcgatgttttgggcggcgttttttttggcgatgttttgggcggcgttttcgttggcgatgttttgggcggcgttttttttggcgatgttttgggcggcgttttttttggcgatgttttgggcggcgttttcgttggcgatgttttgggcggcgttttttttggcgatgttttggacggcgttttcgttggcgatgtcgtgggcggcgttttcgttggcgatttcgtgggcggagttttcgttggcgatgtcgtgggcggcgttttttttggcgatgttttgggcggcgttttttttggcgatgttttgggcggcgttttttttggcgatgttttgggcggcgttttttttggcgatgttttgggcggcgttttcgttggcgatgttttgggcggcgttttcgttggcgatgtcgtgggcggcgttttcgttggcgatttcgtgggcggcgttttcgttggcgatgtcgtgggcggcgttttcgttggcgatgtttttgtcggcggtttcgttagcgatgtcgtgtatagtattttcgttagcgatgtcgtgtgtggcg

SEQ ID NO: 23772 - DNA, 766 bp, Artificial Sequence
  chemically treated genomic DNA (Homo sapiens) CpG-island No: 23772
cgccacacacgacatcgctaacgaaaatactatacacgacatcgctaacgaaaccgccgacaaaaacatcgccaacgaaaacgccgcccacgacatcgccaacgaaaacgccgcccacgaaatcgccaacgaaaacgccgcccacgacatcgccaacgaaaacgccgcccaaaacatcgccaacgaaaacgccgcccaaaacatcgccaaaaaaaacgccgcccaaaacatcgccaaaaaaaacgccgcccaaaacatcgccaaaaaaaacgccgcccaaaacatcgccaaaaaaaacgccgcccacgacatcgccaacgaaaactccgcccacgaaatcgccaacgaaaacgccgcccacgacatcgccaacgaaaacgccgtccaaaacatcgccaaaaaaaacgccgcccaaaacatcgccaacgaaaacgccgcccaaaacatcgccaaaaaaaacgccgcccaaaacatcgccaaaaaaaacgccgcccaaaacatcgccaacgaaaacgccgcccaaaacatcgccaaaaaaaacgccgcccaaaacatcgccaacgaaaacgccgcccaaaacatcgccaacgaaaacgccgcccacgaaatcgccaacgaaaacgccgcccacgacatcgccaacgaaaacgccgtccaaaacatcgccaaaaaaaataccgcccaaaacatcgccaacgaaaacgccgcccaaaacatcgccaacgaaaacgccgcccaaaacatcgccaaaaaaaacgccgcccac

SEQ ID NO: 23773 - DNA, 838 bp, Artificial Sequence
  chemically treated genomic DNA (Homo sapiens) CpG-island No: 23773
  unsure (49, 190, 192, 203, 258, 293, 540, 599)
ggcgtcggcgggttagtgttgcggcggttcgtttgagttcgcgtcgtancgtgtcggtattaggttcgttagtacgtagtttagtattttcgagggtaaattgaagaattttttttgtttaggcgttagcgagtttgtttcggtcgtgatggtgcggttttcgtttagtaggaagatacggtttttttgntncgtgtcggttngattacgcggtagcggtgttataaaagttcgatttgtattaggtatagttcgttngggcgaggtcgaagcgttgtttagcgtttattggntcgcggtggtcgtcgttttttggatttttcggtttagtcgtaggtattcgtttcgtcgttcgtttattagtttttatagttgtatcgggattatatcgggatgtacgtttacgaaggatattcgtagggttagcgaggttttcggcgtcggtatttcgggcgtcgagtatattttgacggcgcgcgcggtttttattttcggaaattaagggtcgcgttttagggtttcgaaatttttcgcgttttntgaaggcgagttttagttaaattaggtttaaaggatttagtggaggggaagaatgtcgncgaggttttttttcggtaattttttcgtcgagggtttttcgggattttcgttacggattggtaagattcggtagtttttttaatcgttcgaggtcgcgttttcgggtacgtagtttattttatttcgcgtcgttattttcggtcgcggagagtgggcggggttagtcgaggtttggggttggtttaacgtttaagggtttaaggagtttgttgggacgtttaggagatttcgaggtggg

SEQ ID NO: 23774 - DNA, 838 bp, Artificial Sequence
  chemically treated genomic DNA (Homo sapiens) CpG-island No: 23774
  unsure (240, 299, 546, 581, 636, 647, 649, 790)
cccacctcgaaatctcctaaacgtcccaacaaactccttaaacccttaaacgttaaaccaaccccaaacctcgactaaccccgcccactctccgcgaccgaaaataacgacgcgaaataaaataaactacgtacccgaaaacgcgacctcgaacgattaaaaaaactaccgaatcttaccaatccgtaacgaaaatcccgaaaaaccctcgacgaaaaaattaccgaaaaaaaacctcgncgacattcttcccctccactaaatcctttaaacctaatttaactaaaactcgccttcanaaaacgcgaaaaatttcgaaaccctaaaacgcgacccttaatttccgaaaataaaaaccgcgcgcgccgtcaaaatatactcgacgcccgaaataccgacgccgaaaacctcgctaaccctacgaatatccttcgtaaacgtacatcccgatataatcccgatacaactataaaaactaataaacgaacgacgaaacgaatacctacgactaaaccgaaaaatccaaaaaacgacgaccaccgcganccaataaacgctaaacaacgcttcgacctcgcccnaacgaactatacctaatacaaatcgaacttttataacaccgctaccgcgtaatcnaaccgacacgnancaaaaaaaccgtatcttcctactaaacgaaaaccgcaccatcacgaccgaaacaaactcgctaacgcctaaacaaaaaaaattcttcaatttaccctcgaaaatactaaactacgtactaacgaacctaataccgacacgntacgacgcgaactcaaacgaaccgccgcaacactaacccgccgacgcc

SEQ ID NO: 23775 - DNA, 838 bp, Artificial Sequence
  chemically treated genomic DNA (Homo sapiens) CpG-island No: 23775
  unsure (240, 299, 546, 581, 636, 647, 649, 790)
tttatttcggggttttttgaacgttttaataagttttttgggtttttaggcgttaggttaattttaggtttcggttggtttcgtttatttttcgcggtcggaagtggcggcgcggagtgaggtaaattgcgtgttcggaagcgcgatttcgggcggttggaggggttatcgggttttattagttcgtggcgggagtttcggaggattttcgacgggggagttgtcgagaaaaggtttcgncggtattttttttttttattgggttttttgaatttagtttggttgggattcgtttttanggggcgcggaggatttcgaggttttgaggcgcggtttttaattttcggaagtgggggtcgcgcgcgtcgttaagatgtgttcgacgttcggaatgtcggcgtcgggggtttcgttggttttgcgggtgtttttcgtggacgtgtatttcgatgtgatttcggtgtagttgtgggggttggtgggcgagcggcggggcgagtatttgcggttgagtcgggaaatttaggaagcggcggttatcgcggnttagtgggcgttgggtagcgtttcggtttcgtttnggcgagttgtgtttggtgtaggtcgggtttttgtggtatcgttgtcgcgtggttnagtcggtacgnantaggagagtcgtgtttttttgttggacgagggtcgtattattacggtcggagtaggttcgttggcgtttgggtagagagagttttttaatttgttttcggaagtgttgggttgcgtgttagcgggtttggtgtcggtacgntgcggcgcgggtttaggcgagtcgtcgtagtattggttcgtcgacgtt

SEQ ID NO: 23776 - DNA, 838 bp, Artificial Sequence
  chemically treated genomic DNA (Homo sapiens) CpG-island No: 23776
  unsure (49, 190, 192, 203, 258, 293, 540, 599)
aacgtcgacgaaccaatactacgacgactcgcctaaacccgcgccgcancgtaccgacaccaaacccgctaacacgcaacccaacacttccgaaaacaaattaaaaaactctctctacccaaacgccaacgaacctactccgaccgtaataatacgaccctcgtccaacaaaaaaacacgactctcctantncgtaccgactnaaccacgcgacaacgataccacaaaaacccgacctacaccaaacacaactcgccnaaacgaaaccgaaacgctacccaacgcccactaanccgcgataaccgccgcttcctaaatttcccgactcaaccgcaaatactcgccccgccgctcgcccaccaacccccacaactacaccgaaatcacatcgaaatacacgtccacgaaaaacacccgcaaaaccaacgaaacccccgacgccgacattccgaacgtcgaacacatcttaacgacgcgcgcgacccccacttccgaaaattaaaaaccgcgcctcaaaacctcgaaatcctccgcgccccntaaaaacgaatcccaaccaaactaaattcaaaaaacccaataaaaaaaaaaaataccgncgaaaccttttctcgacaactcccccgtcgaaaatcctccgaaactcccgccacgaactaataaaacccgataacccctccaaccgcccgaaatcgcgcttccgaacacgcaatttacctcactccgcgccgccacttccgaccgcgaaaaataaacgaaaccaaccgaaacctaaaattaacctaacgcctaaaaacccaaaaaacttattaaaacgttcaaaaaaccccgaaataaa

SEQ ID NO: 23777 - DNA, 541 bp, Artificial Sequence
  chemically treated genomic DNA (Homo sapiens) CpG-island No: 23777
  unsure (116)
gtatgtaatttttcgtattttgtatttatcgttcgtttatcgtttcgcgttttaaattcgattcgatttatcgaatcgtatacgaattatttttcgatattaatttatcgtttttntttcgtttatcgattcggtatttttttttcgttttcgagcgcgattattatttttgagatgtttatatttttttttacgattatttgttttcgcgtatttgttttaacggttatattagttttgcgtttaattagttttttagatcgcgatttttttattttttatttcggttttcggcgattcgtttttttgtaaatcgcgatatggagtttttatttgcgttatcgtgaatttcgtattgtttttttcgatttttgtattcgatttgcgattttttattcgtttattattcgagttggatgcggattttaaatttaaacgtttttaatcgtaatatttttattgtattttttcgtattttttttaatgtttgtttcgaattaatcgtacgtatttatcgatataatcgcgaatttttttcgta

SEQ ID NO: 23778 - DNA, 541 bp, Artificial Sequence
  chemically treated genomic DNA (Homo sapiens) CpG-island No: 23778
  unsure (426)
tacgaaaaaaattcgcgattatatcgataaatacgtacgattaattcgaaacaaacattaaaaaaaatacgaaaaaatacaataaaaatattacgattaaaaacgtttaaatttaaaatccgcatccaactcgaataataaacgaataaaaaatcgcaaatcgaatacaaaaatcgaaaaaaacaatacgaaattcacgataacgcaaataaaaactccatatcgcgatttacaaaaaaacgaatcgccgaaaaccgaaataaaaaataaaaaaatcgcgatctaaaaaactaattaaacgcaaaactaatataaccgttaaaacaaatacgcgaaaacaaataatcgtaaaaaaaaatataaacatctcaaaaataataatcgcgctcgaaaacgaaaaaaaaataccgaatcgataaacgaaanaaaaacgataaattaatatcgaaaaataattcgtatacgattcgataaatcgaatcgaatttaaaacgcgaaacgataaacgaacgataaatacaaaatacgaaaaattacatac

SEQ ID NO: 23779 - DNA, 541 bp, Artificial Sequence
  chemically treated genomic DNA (Homo sapiens) CpG-island No: 23779
  unsure (426)
tacgaggagaattcgcggttgtgtcggtggatgcgtgcgattgattcgaagtaggtattagaaaagatgcgagagagtgtagtgggaatgttgcgattaggagcgtttgggtttgaggttcgtatttagttcgagtggtggacgggtgggaaatcgtaagtcgggtgtagaggtcgggaggagtaatacgaagtttacgatgacgtaagtagaagttttatatcgcggtttgtagagagacggatcgtcgagagtcgaaatgggaggtgagaagatcgcggtttgaggagttagttagacgtagagttgatatggtcgttggagtagatacgcggagataggtgatcgtgaaggagagtgtgagtattttaggagtggtagtcgcgttcggaggcggaaagaggatatcgagtcggtgagcgaagnggggacggtaggttggtatcgaggagtggttcgtatacggttcgataagtcgagtcggatttagagcgcgaggcgataagcgaacgatgggtgtagaatgcgaggaattgtatgt

SEQ ID NO: 23780 - DNA, 541 bp, Artificial Sequence
  chemically treated genomic DNA (Homo sapiens) CpG-island No: 23780
  unsure (116)
acatacaattcctcgcattctacacccatcgttcgcttatcgcctcgcgctctaaatccgactcgacttatcgaaccgtatacgaaccactcctcgataccaacctaccgtccccncttcgctcaccgactcgatatcctctttccgcctccgaacgcgactaccactcctaaaatactcacactctccttcacgatcacctatctccgcgtatctactccaacgaccatatcaactctacgtctaactaactcctcaaaccgcgatcttctcacctcccatttcgactctcgacgatccgtctctctacaaaccgcgatataaaacttctacttacgtcatcgtaaacttcgtattactcctcccgacctctacacccgacttacgatttcccacccgtccaccactcgaactaaatacgaacctcaaacccaaacgctcctaatcgcaacattcccactacactctctcgcatcttttctaatacctacttcgaatcaatcgcacgcatccaccgacacaaccgcgaattctcctcgta

SEQ ID NO: 23781 - DNA, 755 bp, Artificial Sequence
  chemically treated genomic DNA (Homo sapiens) CpG-island No: 23781
ttttggtcgaattcgatttttttatttttcgtatttcgtttcgaatttcgcgacggtttttttttatcgttcggatttggttatcgtttatttcgtttttttataattttatttttatattcggtgtttttattttacgtatatttttttcgtcgattttcgtttttttttcggatagtatttttttgtttagttttttcgttcgatgtcggtcgttcgcgcgtttttcgcgttttttttcgttttttttttcgcgttttaggttttcgtatttggattttttttttttttttttatttttgcgttcgatatttttttttttcgtattttttcgcgcgttttcgttcgttattgttttttttttttttttgtatttatttttcgtcggtcgtttcgtgcgtcgacgtttatcgcgtttcgttcgtcgttggattcgtgtttttttcgcggtcgtttatttttttttttcgttttttatttttttttcgttttatttgtttttttgtcgtcgttttcgttagttttttgttttttcgttcgcgttatcgtcgtttttacgtcgtttcggtttttttttttcgaattcggtatttcggtttatattttttttttttattgttcgtagattttatttttcgtacgtatttttgttttttttacgtttttatgattcgttggcgtcgttttttatatttcgtttttttgagttttcgttttattttattttgttattttttttcgtttcgttttttttt

SEQ ID NO: 23782 - DNA, 755 bp, Artificial Sequence
  chemically treated genomic DNA (Homo sapiens) CpG-island No: 23782
aaaaaaaaacgaaacgaaaaaaaataacaaaataaaataaaacgaaaactcaaaaaaacgaaatataaaaaacgacgccaacgaatcataaaaacgtaaaaaaaacaaaaatacgtacgaaaaataaaatctacgaacaataaaaaaaaaaaatataaaccgaaataccgaattcgaaaaaaaaaaaccgaaacgacgtaaaaacgacgataacgcgaacgaaaaaacaaaaaactaacgaaaacgacgacaaaaaaacaaataaaacgaaaaaaaaataaaaaacgaaaaaaaaaaataaacgaccgcgaaaaaaacacgaatccaacgacgaacgaaacgcgataaacgtcgacgcacgaaacgaccgacgaaaaataaatacaaaaaaaaaaaaaaaacaataacgaacgaaaacgcgcgaaaaaatacgaaaaaaaaaaatatcgaacgcaaaaataaaaaaaaaaaaaaaaaatccaaatacgaaaacctaaaacgcgaaaaaaaaaacgaaaaaaaacgcgaaaaacgcgcgaacgaccgacatcgaacgaaaaaactaaacaaaaaaatactatccgaaaaaaaaacgaaaatcgacgaaaaaaatatacgtaaaataaaaacaccgaatataaaaataaaattataaaaaaacgaaataaacgataaccaaatccgaacgataaaaaaaaaccgtcgcgaaattcgaaacgaaatacgaaaaataaaaaaatcgaattcgaccaaaa

SEQ ID NO: 23783 - DNA, 755 bp, Artificial Sequence
  chemically treated genomic DNA (Homo sapiens) CpG-island No: 23783
gggaggagacggagcgaggggaggtagtaggatagagtggagcgagggtttaaggaggcgaggtgtgagaggcggcgttagcgggttatgagagcgtgggagaggtagggatgcgtgcggggggtgagatttgcgggtagtgagggagaggggtgtagatcgaggtatcggattcgagagaggaaggtcggagcggcgtagaggcggcggtggcgcgggcgggaggatagagggttggcggggacggcggtagggaggtaaatagggcgaaggaggagtggggagcgagggaaggggatgggcggtcgcgagaggagtacgggtttagcggcgggcgaggcgcggtaggcgtcggcgtacgaaacgatcggcgagaggtaggtgtagggaagggaggggggtagtagcgagcggaggcgcgcgaggagatgcgggggagaggaatgtcgggcgtaggggtgggagagagggggggaggtttagatgcgggagtttggagcgcggaggagggggcgggagagagcgcgagggacgcgcgagcggtcggtatcgggcgggagaattaagtaggggaatgttgttcgaaaaaggagcgagggtcggcgaaaaggatgtacgtgaggtaagagtatcgggtatgagagtgaggttataggagggcgaggtaggcgatgattaagttcgagcgatagaggggagtcgtcgcgaaattcgagacggggtacgggaagtagaagggtcgggttcggttaggg

SEQ ID NO: 23784 - DNA, 755 bp, Artificial Sequence
  chemically treated genomic DNA (Homo sapiens) CpG-island No: 23784
ccctaaccgaacccgacccttctacttcccgtaccccgtctcgaatttcgcgacgactcccctctatcgctcgaacttaatcatcgcctacctcgccctcctataacctcactctcatacccgatactcttacctcacgtacatccttttcgccgaccctcgctcctttttcgaacaacattcccctacttaattctcccgcccgataccgaccgctcgcgcgtccctcgcgctctctcccgccccctcctccgcgctccaaactcccgcatctaaacctccccccctctctcccacccctacgcccgacattcctctcccccgcatctcctcgcgcgcctccgctcgctactacccccctcccttccctacacctacctctcgccgatcgtttcgtacgccgacgcctaccgcgcctcgcccgccgctaaacccgtactcctctcgcgaccgcccatccccttccctcgctccccactcctccttcgccctatttacctccctaccgccgtccccgccaaccctctatcctcccgcccgcgccaccgccgcctctacgccgctccgaccttcctctctcgaatccgatacctcgatctacacccctctccctcactacccgcaaatctcaccccccgcacgcatccctacctctcccacgctctcataacccgctaacgccgcctctcacacctcgcctccttaaaccctcgctccactctatcctactacctcccctcgctccgtctcctccc

SEQ ID NO: 23785 - DNA, 785 bp, Artificial Sequence
  chemically treated genomic DNA (Homo sapiens) CpG-island No: 23785
ttcgcgttgtcgtcgttcgttttttgcgttttttcgcggagtttgggttcgggagggggaaggtaggggcggcggggggcgggagagtttggcgagcggacgttagttttgaggaaatttattaattcgtgagtttcggagttcggggtgtatatcggtttagtcgtagcgtcggcggcggcggcggtagtagtacgaaggggtttagtcggggtaggcgggggcggtgtcggtgtcgcgggggcgggttcgatcgtttcgtttagaagttgtagggtttggtttttcgcgattttgtttttttttttttcgtttttttgatttagttgcgcggtttcggttcgggagttgtcgaattcgcgttttttttgggtgaggaggatacgtttgttttcgtcgagaaaattttttttgtcgatttagttggggcggcggtggtaggaagtgcgggtagcgatttttttttcgtttgtttcgcgcgttttgtcggaggtcggcgttgagtttgcgattaagtttgtgggggtttttttttttagttgtcggcgagtttcgtttcgagaggggcgttcgatttcggggagggcggtaggttagggcgaaggttaagggcgtgtggtggcgtcggagattaggtgcggagtaaggcggggattcgtattcgtattcgagagcgcggaggtcgcgtagttcgggagaagggagttttcggcggttgttttttagagtttatagtgcgttgttttttttggttgaggagagtgttttggtttcgagtttatcga

SEQ ID NO: 23786 - DNA, 785 bp, Artificial Sequence
  chemically treated genomic DNA (Homo sapiens) CpG-island No: 23786
tcgataaactcgaaaccaaaacactctcctcaaccaaaaaaaacaacgcactataaactctaaaaaacaaccgccgaaaactcccttctcccgaactacgcgacctccgcgctctcgaatacgaatacgaatccccgccttactccgcacctaatctccgacgccaccacacgcccttaaccttcgccctaacctaccgccctccccgaaatcgaacgcccctctcgaaacgaaactcgccgacaactaaaaaaaaaaacccccacaaacttaatcgcaaactcaacgccgacctccgacaaaacgcgcgaaacaaacgaaaaaaaaatcgctacccgcacttcctaccaccgccgccccaactaaatcgacaaaaaaaattttctcgacgaaaacaaacgtatcctcctcacccaaaaaaaacgcgaattcgacaactcccgaaccgaaaccgcgcaactaaatcaaaaaaacgaaaaaaaaaaaaacaaaatcgcgaaaaaccaaaccctacaacttctaaacgaaacgatcgaacccgcccccgcgacaccgacaccgcccccgcctaccccgactaaaccccttcgtactactaccgccgccgccgccgacgctacgactaaaccgatatacaccccgaactccgaaactcacgaattaataaatttcctcaaaactaacgtccgctcgccaaactctcccgccccccgccgcccctaccttccccctcccgaacccaaactccgcgaaaaaacgcaaaaaacgaacgacgacaacgcgaa

SEQ ID NO: 23787 - DNA, 785 bp, Artificial Sequence
  chemically treated genomic DNA (Homo sapiens) CpG-island No: 23787
tcgatagattcggggttaggatattttttttagttaaaggagatagcgtattgtggattttaggaagtagtcgtcggaggtttttttttttcgggttgcgcgattttcgcgttttcggatgcgggtgcgagttttcgttttgtttcgtatttagttttcggcgttattatacgtttttggttttcgttttggtttgtcgtttttttcggggtcgggcgtttttttcgaggcgagattcgtcggtaattgggaaggggggtttttataaatttgatcgtaagtttagcgtcgattttcggtagggcgcgcggggtaggcggaggagaggtcgttgttcgtattttttgttatcgtcgttttaattgagtcggtaggaaaagttttttcgacgagggtaggcgtgttttttttatttaggggaggcgcgggttcggtagttttcgggtcggggtcgcgtagttaggttagagaagcggaggggaaaggaataagatcgcgaggagttaagttttataatttttgggcgggacggtcgggttcgttttcgcggtatcggtatcgttttcgtttatttcgattgagttttttcgtgttgttgtcgtcgtcgtcgtcgacgttgcggttgggtcgatgtgtatttcggatttcggggtttacggattgatgagtttttttagagttagcgttcgttcgttagattttttcgtttttcgtcgtttttattttttttttttcggatttaggtttcgcggggaggcgtagggggcgggcggcggtaacgcgga

SEQ ID NO: 23788 - DNA, 785 bp, Artificial Sequence
  chemically treated genomic DNA (Homo sapiens) CpG-island No: 23788
tccgcgttaccgccgcccgccccctacgcctccccgcgaaacctaaatccgaaaaaaaaaaaataaaaacgacgaaaaacgaaaaaatctaacgaacgaacgctaactctaaaaaaactcatcaatccgtaaaccccgaaatccgaaatacacatcgacccaaccgcaacgtcgacgacgacgacgacaacaacacgaaaaaactcaatcgaaataaacgaaaacgataccgataccgcgaaaacgaacccgaccgtcccgcccaaaaattataaaacttaactcctcgcgatcttattcctttcccctccgcttctctaacctaactacgcgaccccgacccgaaaactaccgaacccgcgcctcccctaaataaaaaaaacacgcctaccctcgtcgaaaaaacttttcctaccgactcaattaaaacgacgataacaaaaaatacgaacaacgacctctcctccgcctaccccgcgcgccctaccgaaaatcgacgctaaacttacgatcaaatttataaaaaccccccttcccaattaccgacgaatctcgcctcgaaaaaaacgcccgaccccgaaaaaaacgacaaaccaaaacgaaaaccaaaaacgtataataacgccgaaaactaaatacgaaacaaaacgaaaactcgcacccgcatccgaaaacgcgaaaatcgcgcaacccgaaaaaaaaaaacctccgacgactacttcctaaaatccacaatacgctatctcctttaactaaaaaaaatatcctaaccccgaatctatcga

SEQ ID NO: 23789 - DNA, 834 bp, Artificial Sequence
  chemically treated genomic DNA (Homo sapiens) CpG-island No: 23789
  unsure (808)
taatttgtttttttaaggttcgttagtatcgattttatattgcgcgttagttcgttttgcgtggtgttgatcgtttttttttacgtatcgtattgtgtttcgtttcggttgtcgttcggggtgataacggtagttaggtcgtttgcggcgttgtatttatatcgcgttttacggttttgtgcgttttttatcgaggttaatcggttacggttgttatagcggcggtaaaggttgatgtttttttcgcggtggatcgtcgttatttggtcgaagcggtcgtatttataacgggtttggtagttcgagtagtcggtgaacgttagtaattgttcgtagcggttttaggttatttgtcgggtgttgttcgtcgtattcgttgtcgtcgtcggtaatttattgtgcgcgttatcgtagcggtagcgtattgttttttcgttgcgcgatgttttcgatattagtttgttcggtttattatattttcggcggttttttagttcgttcggggatattatcgtcgttagttggttttcgtcgttatagtaaaatttcgtttttcgttcgttcggtgtggtgatgttcgtgatatcggcggatattatatttagacggattttgttttcgtttcgtcgcgtcgtttgttcgtgagttttttgtcgggtatttcgttgcgcgtgatttgtcgtcgttagttttttttatattcggttatcgggttcgtttttggtgtagattttagcgggttaggttgcgggacgggagcggtttgttttaattagagagattttttttttattattattttacgtantatttttaaaggaacgataaggagga

SEQ ID NO: 23790 - DNA, 834 bp, Artificial Sequence
  chemically treated genomic DNA (Homo sapiens) CpG-island No: 23790
  unsure (27)
tcctccttatcgttcctttaaaaatantacgtaaaataataataaaaaaaaaatctctctaattaaaacaaaccgctcccgtcccgcaacctaacccgctaaaatctacaccaaaaacgaacccgataaccgaatataaaaaaaactaacgacgacaaatcacgcgcaacgaaatacccgacaaaaaactcacgaacaaacgacgcgacgaaacgaaaacaaaatccgtctaaatataatatccgccgatatcacgaacatcaccacaccgaacgaacgaaaaacgaaattttactataacgacgaaaaccaactaacgacgataatatccccgaacgaactaaaaaaccgccgaaaatataataaaccgaacaaactaatatcgaaaacatcgcgcaacgaaaaaacaatacgctaccgctacgataacgcgcacaataaattaccgacgacgacaacgaatacgacgaacaacacccgacaaataacctaaaaccgctacgaacaattactaacgttcaccgactactcgaactaccaaacccgttataaatacgaccgcttcgaccaaataacgacgatccaccgcgaaaaaaacatcaacctttaccgccgctataacaaccgtaaccgattaacctcgataaaaaacgcacaaaaccgtaaaacgcgatataaatacaacgccgcaaacgacctaactaccgttatcaccccgaacgacaaccgaaacgaaacacaatacgatacgtaaaaaaaaacgatcaacaccacgcaaaacgaactaacgcgcaatataaaatcgatactaacgaaccttaaaaaaacaaatta

SEQ ID NO: 23791 - DNA, 834 bp, Artificial Sequence
  chemically treated genomic DNA (Homo sapiens) CpG-island No: 23791
  unsure (27)
ttttttttatcgtttttttaagaatantgcgtgagataatagtgagaagggagtttttttgattgaaataggtcgttttcgtttcgtagtttgattcgttgaggtttgtattagaagcgggttcggtgatcgggtgtgaaaaagattggcgacggtaggttacgcgtagcgggatattcggtagaaggtttacgggtaaacgacgcggcgggacgagaatagagttcgtttgaatgtggtgttcgtcgatattacggatattattatatcggacgggcgggagacgaaattttattataacgacgggaattagttgacggcggtggtgttttcggacgggttggagagtcgtcgggaatatgatgaatcgggtaggttggtatcggagatatcgcgtagcggggagatagtacgttatcgttacgatgacgcgtatagtgagttatcggcgacgataacggatgcgacgggtagtattcggtagatgatttggagtcgttacgggtagttgttggcgtttatcgattgttcgggttattagattcgttatgaatacgatcgtttcggttagatgacggcggtttatcgcgaggaaggtattagtttttatcgtcgttatgataatcgtggtcggttaatttcggtgaaagacgtatagggtcgtgaaacgcggtatgaatataacgtcgtaggcgatttgattgtcgttattatttcggacggtaatcggagcgagatatagtacgatgcgtggggaaaggcggttagtattacgtagggcgggttgacgcgtagtatggagtcgatgttggcggattttagaggaatagattg

SEQ ID NO: 23792 - DNA, 834 bp, Artificial Sequence
  chemically treated genomic DNA (Homo sapiens) CpG-island No: 23792
  unsure (808)
caatctattcctctaaaatccgccaacatcgactccatactacgcgtcaacccgccctacgtaatactaaccgcctttccccacgcatcgtactatatctcgctccgattaccgtccgaaataataacgacaatcaaatcgcctacgacgttatattcataccgcgtttcacgaccctatacgtctttcaccgaaattaaccgaccacgattatcataacgacgataaaaactaataccttcctcgcgataaaccgccgtcatctaaccgaaacgatcgtattcataacgaatctaataacccgaacaatcgataaacgccaacaactacccgtaacgactccaaatcatctaccgaatactacccgtcgcatccgttatcgtcgccgataactcactatacgcgtcatcgtaacgataacgtactatctccccgctacgcgatatctccgataccaacctacccgattcatcatattcccgacgactctccaacccgtccgaaaacaccaccgccgtcaactaattcccgtcgttataataaaatttcgtctcccgcccgtccgatataataatatccgtaatatcgacgaacaccacattcaaacgaactctattctcgtcccgccgcgtcgtttacccgtaaaccttctaccgaatatcccgctacgcgtaacctaccgtcgccaatctttttcacacccgatcaccgaacccgcttctaatacaaacctcaacgaatcaaactacgaaacgaaaacgacctatttcaatcaaaaaaactcccttctcactattatctcacgcantattcttaaaaaaacgataaaaaaaa

SEQ ID NO: 23793 - DNA, 587 bp, Artificial Sequence
  chemically treated genomic DNA (Homo sapiens) CpG-island No: 23793
cgtcgtaatttggtgggtgtcgaagtggcgatgattttttaggattcgatgattagttttaattcgtgttatatcgtgggtttttagattatggaagcgattaaggtgtattagggcggtaataaaagtattcgtcgttagcgagcgattgatttgttgaattaggtcggtattttcgattcggtatcgcgtttggatgtttattcgtattagtttttcggcggtatgagttagcgcgtgatgatcgttatggcgattgtttgtcggttaaaattgttgattgtcgatgaatcgattatcgcgttggacggggattattttagcgttaattatcgaattattgttggagttataatagaaagagaatatggcgttggggtttattatttatgatttggcgttggtggcggtagcggtatattaaattattgggatgtatgtaagttagggggtggaaacggtgatgcgtacgtattttttatgcgcgcgttattcgtataattaggtattgttggtgcggttgtagaatttgttaagataaagaacgttggggtgggttgatggttattttttaagcgacgacgcgt

SEQ ID NO: 23794 - DNA, 587 bp, Artificial Sequence
  chemically treated genomic DNA (Homo sapiens) CpG-island No: 23794
acgcgtcgtcgcttaaaaaataaccatcaacccaccccaacgttctttatcttaacaaattctacaaccgcaccaacaatacctaattatacgaataacgcgcgcataaaaaatacgtacgcatcaccgtttccaccccctaacttacatacatcccaataatttaatataccgctaccgccaccaacgccaaatcataaataataaaccccaacgccatattctctttctattataactccaacaataattcgataattaacgctaaaataatccccgtccaacgcgataatcgattcatcgacaatcaacaattttaaccgacaaacaatcgccataacgatcatcacgcgctaactcataccgccgaaaaactaatacgaataaacatccaaacgcgataccgaatcgaaaataccgacctaattcaacaaatcaatcgctcgctaacgacgaatacttttattaccgccctaatacaccttaatcgcttccataatctaaaaacccacgatataacacgaattaaaactaatcatcgaatcctaaaaaatcatcgccacttcgacacccaccaaattacgacg

SEQ ID NO: 23795 - DNA, 587 bp, Artificial Sequence
  chemically treated genomic DNA (Homo sapiens) CpG-island No: 23795
acgcgtcgtcgtttaaaggatagttattagtttattttagcgttttttgttttaataaattttgtagtcgtattaataatgtttgattatacgggtaacgcgcgtatggaagatgcgtgcgtattatcgtttttattttttggtttgtatatattttaatgatttaatgtgtcgttatcgttattagcgttaggttatgggtaataaattttagcgttatgttttttttttgttgtagttttagtagtagttcgatgattggcgttagaatggttttcgtttagcgcggtggtcggtttatcggtaattagtagttttggtcgataggtaatcgttatggcgattattacgcgttggtttatgtcgtcggaaagttgatgcgggtaaatatttagacgcgatgtcggatcgggaatatcgatttgatttagtaggttaatcgttcgttgacggcgggtatttttgttgtcgttttgatgtattttaatcgtttttataatttggaaatttacggtgtagtacgggttaaggttggttatcgggttttggaagattatcgttatttcggtatttattaggttgcggcg

SEQ ID NO: 23796 - DNA, 587 bp, Artificial Sequence
  chemically treated genomic DNA (Homo sapiens) CpG-island No: 23796
cgccgcaacctaataaataccgaaataacgataatcttccaaaacccgataaccaaccttaacccgtactacaccgtaaatttccaaattataaaaacgattaaaatacatcaaaacgacaacaaaaatacccgccgtcaacgaacgattaacctactaaatcaaatcgatattcccgatccgacatcgcgtctaaatatttacccgcatcaactttccgacgacataaaccaacgcgtaataatcgccataacgattacctatcgaccaaaactactaattaccgataaaccgaccaccgcgctaaacgaaaaccattctaacgccaatcatcgaactactactaaaactacaacaaaaaaaaaacataacgctaaaatttattacccataacctaacgctaataacgataacgacacattaaatcattaaaatatatacaaaccaaaaaataaaaacgataatacgcacgcatcttccatacgcgcgttacccgtataatcaaacattattaatacgactacaaaatttattaaaacaaaaaacgctaaaataaactaataactatcctttaaacgacgacgcgt

SEQ ID NO: 23797 - DNA, 520 bp, Artificial Sequence
  chemically treated genomic DNA (Homo sapiens) CpG-island No: 23797
tattatgtttttttgatttatagttgcggaaaacgtattggtgtaaaacgtagggttatgattattagtttaacgacgtatagcgtatgaaatgtttagtttattaggtaattgtcgttgatattacgtagtacgttagaaaattacggggtaagttcggcgatgataaaatcgattttttgtataaacgttattagtttgttagtaatagtcgggtgtatagagtgatcgagcgttagtagtaaataaacggaaacgcgtcgtttagattttatttatatattatcgtttataatatcggcgaattgtatcggtagttaaataaagtcgtagaattttttcgattgtaatattagcgttagtattaatagtttgcgtcgattttgatggcgagttattataggtattaggtaaagttttgcgggttgttaaacgttattaatgttagtaggaatcgtgtattgtcgttggtttaatttaatatttaatgcgtaaaagtttattgttatttgtggtttat

SEQ ID NO: 23798 - DNA, 520 bp, Artificial Sequence
  chemically treated genomic DNA (Homo sapiens) CpG-island No: 23798
ataaaccacaaataacaataaacttttacgcattaaatattaaattaaaccaacgacaatacacgattcctactaacattaataacgtttaacaacccgcaaaactttacctaatacctataataactcgccatcaaaatcgacgcaaactattaatactaacgctaatattacaatcgaaaaaattctacgactttatttaactaccgatacaattcgccgatattataaacgataatatataaataaaatctaaacgacgcgtttccgtttatttactactaacgctcgatcactctatacacccgactattactaacaaactaataacgtttatacaaaaaatcgattttatcatcgccgaacttaccccgtaattttctaacgtactacgtaatatcaacgacaattacctaataaactaaacatttcatacgctatacgtcgttaaactaataatcataaccctacgttttacaccaatacgttttccgcaactataaatcaaaaaaacataata

SEQ ID NO: 23799 - DNA, 520 bp, Artificial Sequence
  chemically treated genomic DNA (Homo sapiens) CpG-island No: 23799
atgggttataagtggtaatgggtttttgcgtattgaatattagattgggttagcggtagtatacggtttttattggtattgatgacgtttggtaattcgtagagttttgtttgatgtttgtaatggttcgttattaggatcggcgtaaattgttaatgttggcgttggtgttataatcgggggggttttgcggttttatttggttgtcgatgtaattcgtcggtattgtgggcgatggtgtgtgggtaaggtttgggcggcgcgttttcgtttgtttgttgttggcgttcgattattttgtgtattcggttattgttggtaagttggtggcgtttatgtagggaatcggttttattatcgtcgggtttgtttcgtggttttttggcgtgttgcgtagtattagcggtaattatttgatggattgggtattttatgcgttgtgcgtcgttgggttgatgattataattttgcgttttgtattagtacgtttttcgtagttgtgggttaaagaggtatgatg

SEQ ID NO: 23800 - DNA, 520 bp, Artificial Sequence
  chemically treated genomic DNA (Homo sapiens) CpG-island No: 23800
catcatacctctttaacccacaactacgaaaaacgtactaatacaaaacgcaaaattataatcatcaacccaacgacgcacaacgcataaaatacccaatccatcaaataattaccgctaatactacgcaacacgccaaaaaaccacgaaacaaacccgacgataataaaaccgattccctacataaacgccaccaacttaccaacaataaccgaatacacaaaataatcgaacgccaacaacaaacaaacgaaaacgcgccgcccaaaccttacccacacaccatcgcccacaataccgacgaattacatcgacaaccaaataaaaccgcaaaacccccccgattataacaccaacgccaacattaacaatttacgccgatcctaataacgaaccattacaaacatcaaacaaaactctacgaattaccaaacgtcatcaataccaataaaaaccgtatactaccgctaacccaatctaatattcaatacgcaaaaacccattaccacttataacccat

SEQ ID NO: 23801 - DNA, 806 bp, Artificial Sequence
  chemically treated genomic DNA (Homo sapiens) CpG-island No: 23801
  unsure (739)
gtggcggcgcgaagcgaatatgcgttggtgattgtatcgatcggtttcgggaaaacgttggtagtatttttttacgttttcgatcggttttttcgcgaaggcggcgaagatattcgcgaggcgtataagcgtaaaattttacgtattttttatattttatcgataaaagttttgggtatcgacgtttagcgtaatttgtagatttcgttgaagggtattgtcgatgaacggcggcggcgcggcgaaacggaagttaattttcgcgtagggattcgtattggcgatacgtttgtataggaacgtagtaaatttattcgtaattcgtcggatattttgattattatattcgaattattttatttgatgttgatttttcgcgcgcgcgaaacgttacgcggcgtcgaaacggtaattattgatgaagtttacgcggtagcgggtagtaaacgtggtgcgtatttggcgttaagtttggagcggttcgatgcgttgttttatattttagtatagcgaattggtttttttgttattgtgcgtttagttagcgatgtggtagtattttttggtggcgatcgttcggttacggtagttaattcgttcgtaatgcgttattcgtagatacgaattgtcgtatcggtcgttaatatggatgatgttttatcggtcgttagcggtatcggcgaagatagttatgtcggtcgcgaaggttttatttggttatatattgaaacggtatttntgatgagtgttgcgtatcgttcgatattgttttattattcgcggggttggcgaaaattgtagtttat

SEQ ID NO: 23802 - DNA, 806 bp, Artificial Sequence
  chemically treated genomic DNA (Homo sapiens) CpG-island No: 23802
  unsure (68)
ataaactacaattttcgccaaccccgcgaataataaaacaatatcgaacgatacgcaacactcatcanaaataccgtttcaatatataaccaaataaaaccttcgcgaccgacataactatcttcgccgataccgctaacgaccgataaaacatcatccatattaacgaccgatacgacaattcgtatctacgaataacgcattacgaacgaattaactaccgtaaccgaacgatcgccaccaaaaaatactaccacatcgctaactaaacgcacaataacaaaaaaaccaattcgctatactaaaatataaaacaacgcatcgaaccgctccaaacttaacgccaaatacgcaccacgtttactacccgctaccgcgtaaacttcatcaataattaccgtttcgacgccgcgtaacgtttcgcgcgcgcgaaaaatcaacatcaaataaaataattcgaatataataatcaaaatatccgacgaattacgaataaatttactacgttcctatacaaacgtatcgccaatacgaatccctacgcgaaaattaacttccgtttcgccgcgccgccgccgttcatcgacaatacccttcaacgaaatctacaaattacgctaaacgtcgatacccaaaacttttatcgataaaatataaaaaatacgtaaaattttacgcttatacgcctcgcgaatatcttcgccgccttcgcgaaaaaaccgatcgaaaacgtaaaaaaatactaccaacgttttcccgaaaccgatcgatacaatcaccaacgcatattcgcttcgcgccgccac

SEQ ID NO: 23803 - DNA, 806 bp, Artificial Sequence
  chemically treated genomic DNA (Homo sapiens) CpG-island No: 23803
  unsure (68)
atgggttgtagttttcgttagtttcgcgaatagtaagataatgtcgagcgatgcgtaatatttattanggatatcgttttaatatatggttagatggagttttcgcggtcggtatggttgttttcgtcggtgtcgttggcgatcgatgagatattatttatattggcgatcggtacgataattcgtatttgcggatggcgtattgcgggcgggttgattatcgtaatcgggcgatcgttattaagaaatgttgttatatcgttggttgagcgtatagtggtagaaaggttaattcgttgtgttgaggtgtggagtagcgtatcgagtcgttttagatttaacgttagatgcgtattacgtttattgttcgttatcgcgtggattttattaataattatcgtttcgacgtcgcgtagcgtttcgcgcgcgcgggaggttagtattagatagagtgattcgggtgtggtgattagaatattcggcggattacgggtgagtttgttgcgtttttgtgtaggcgtatcgttagtacggatttttacgcgaagattgattttcgtttcgtcgcgtcgtcgtcgtttatcggtaatattttttaacgggatttgtaagttgcgttgaacgtcggtgtttagggtttttatcggtgaaatatagaggatgcgtgaggttttacgtttatgcgtttcgcgggtattttcgtcgttttcgcggaagagtcgatcgagggcgtagagaaatgttgttagcgttttttcggagtcggtcggtgtaattattagcgtatgttcgtttcgcgtcgttat

SEQ ID NO: 23804 - DNA, 806 bp, Artificial Sequence
  chemically treated genomic DNA (Homo sapiens) CpG-island No: 23804
  unsure (739)
ataacgacgcgaaacgaacatacgctaataattacaccgaccgactccgaaaaaacgctaacaacatttctctacgccctcgatcgactcttccgcgaaaacgacgaaaatacccgcgaaacgcataaacgtaaaacctcacgcatcctctatatttcaccgataaaaaccctaaacaccgacgttcaacgcaacttacaaatcccgttaaaaaatattaccgataaacgacgacgacgcgacgaaacgaaaatcaatcttcgcgtaaaaatccgtactaacgatacgcctacacaaaaacgcaacaaactcacccgtaatccgccgaatattctaatcaccacacccgaatcactctatctaatactaacctcccgcgcgcgcgaaacgctacgcgacgtcgaaacgataattattaataaaatccacgcgataacgaacaataaacgtaatacgcatctaacgttaaatctaaaacgactcgatacgctactccacacctcaacacaacgaattaacctttctaccactatacgctcaaccaacgatataacaacatttcttaataacgatcgcccgattacgataatcaacccgcccgcaatacgccatccgcaaatacgaattatcgtaccgatcgccaatataaataatatctcatcgatcgccaacgacaccgacgaaaacaaccataccgaccgcgaaaactccatctaaccatatattaaaacgatatccntaataaatattacgcatcgctcgacattatcttactattcgcgaaactaacgaaaactacaacccat

SEQ ID NO: 23805 - DNA, 663 bp, Artificial Sequence
  chemically treated genomic DNA (Homo sapiens) CpG-island No: 23805
ttgggttttgtcgttagggtgttgtttattatattatagaagttgcgagtgcgttttatgagagtgcgttttaaagtggtagcgatcggtaacggtatagtttttcgcgaaattgagcgtttttatttcgatgtgtagaagtagttttcgaaagtgatcgcgtagaaagtaatcgttagcgaagtaggcgcgtcggtttattcggttttcgagttggttgtataggagttttcggatttcgacgtttcgttgcgtggcgcggtgtttatcgttcgtcgtttgtaggattcgttggcggagttggtgaaaatcgattcgaaatttatcggcgtaggttagtattagtatgacgttagttagacgtaattggttcgtaaattggacgtagtagtagaagattgcgtaaacgtcgttggcgtcgattttaatattgtttttgtttcgttgttaattcgcgtggcgggtttgacgcgtatgatggcgtaaaatatcgttgtttggcgcgatgagaacggttagttttagaatcgttagtaattgttaaaagtgagtcgtttggggtcgttttcgttgaggatttttcgtaatattttagagttgtcgaatttttatgtttttagttgagaaattgaagttatttattcgttatcgattttattaaat

SEQ ID NO: 23806 - DNA, 663 bp, Artificial Sequence
  chemically treated genomic DNA (Homo sapiens) CpG-island No: 23806
atttaataaaatcgataacgaataaataacttcaatttctcaactaaaaacataaaaattcgacaactctaaaatattacgaaaaatcctcaacgaaaacgaccccaaacgactcacttttaacaattactaacgattctaaaactaaccgttctcatcgcgccaaacaacgatattttacgccatcatacgcgtcaaacccgccacgcgaattaacaacgaaacaaaaacaatattaaaatcgacgccaacgacgtttacgcaatcttctactactacgtccaatttacgaaccaattacgtctaactaacgtcatactaatactaacctacgccgataaatttcgaatcgattttcaccaactccgccaacgaatcctacaaacgacgaacgataaacaccgcgccacgcaacgaaacgtcgaaatccgaaaactcctatacaaccaactcgaaaaccgaataaaccgacgcgcctacttcgctaacgattactttctacgcgatcactttcgaaaactacttctacacatcgaaataaaaacgctcaatttcgcgaaaaactataccgttaccgatcgctaccactttaaaacgcactctcataaaacgcactcgcaacttctataatataataaacaacaccctaacgacaaaacccaa

SEQ ID NO: 23807 - DNA, 663 bp, Artificial Sequence
  chemically treated genomic DNA (Homo sapiens) CpG-island No: 23807
atttgatgagatcgatagcgagtaaatggttttagttttttagttgagagtatggaagttcggtagttttagggtgttgcgagaagtttttagcgggggcggttttagacggtttatttttaatagttgttgacggttttggaattgatcgtttttatcgcgttaggtaacgatgttttgcgttattatgcgcgttaggttcgttacgcgggttaatagcggaatagaagtagtgttgagatcgacgttaacggcgtttacgtagttttttattattgcgtttagtttgcgggttagttgcgtttggttgacgttatgttgatattgatttacgtcgatagatttcggatcgatttttattagtttcgttagcggattttgtaaacggcgggcgatagatatcgcgttacgtagcgaaacgtcgagattcgggaatttttgtgtagttagttcggaagtcgagtaaatcgacgcgtttgtttcgttgacgattattttttgcgcggttattttcgggaattgtttttgtatatcgagatagaaacgtttagtttcgcgggaagttgtatcgttatcgatcgttattattttagagcgtatttttatagagcgtattcgtaatttttgtgatgtggtaagtaatattttgacggtagaatttag

SEQ ID NO: 23808 - DNA, 663 bp, Artificial Sequence
  chemically treated genomic DNA (Homo sapiens) CpG-island No: 23808
ctaaattctaccgtcaaaatattacttaccacatcacaaaaattacgaatacgctctataaaaatacgctctaaaataataacgatcgataacgatacaacttcccgcgaaactaaacgtttctatctcgatatacaaaaacaattcccgaaaataaccgcgcaaaaaataatcgtcaacgaaacaaacgcgtcgatttactcgacttccgaactaactacacaaaaattcccgaatctcgacgtttcgctacgtaacgcgatatctatcgcccgccgtttacaaaatccgctaacgaaactaataaaaatcgatccgaaatctatcgacgtaaatcaatatcaacataacgtcaaccaaacgcaactaacccgcaaactaaacgcaataataaaaaactacgtaaacgccgttaacgtcgatctcaacactacttctattccgctattaacccgcgtaacgaacctaacgcgcataataacgcaaaacatcgttacctaacgcgataaaaacgatcaattccaaaaccgtcaacaactattaaaaataaaccgtctaaaaccgcccccgctaaaaacttctcgcaacaccctaaaactaccgaacttccatactctcaactaaaaaactaaaaccatttactcgctatcgatctcatcaaat

SEQ ID NO: 23809 - DNA, 515 bp, Artificial Sequence
  chemically treated genomic DNA (Homo sapiens) CpG-island No: 23809
tggtattacgatggcgtggcgtgacgggttatatagcgttgagaagtacggcgtattttttaggttaacgtcgttataaatttttgatagtagtatattattaaaacgtttcgttagcgcgtttagacgttgatttttagagtcgttaggttggtttaaacgttcgatttttttatcgacggcgtttttgcgcgcgtttattttatcgcgtttaataatcgtttttcgtttacgttttagtaattgttgtagatattcggtgacgttttggttggaggtaaatttttcgtcgtattgttcgtttaattggttgagattgttttgcgttgttagttaaatcggcgtacgttgtattaaattttgaatgcgagattgtagttgtttttgtttttggcgtagtgttatgcgttttttacgggcgttagatacgttatcggaaagagaggtaatgcgtgtttttagtttttgatgtagggtttttagttcgtcgatattaaaatttttgttttgacgta

SEQ ID NO: 23810 - DNA, 515 bp, Artificial Sequence
  chemically treated genomic DNA (Homo sapiens) CpG-island No: 23810
tacgtcaaaacaaaaattttaatatcgacgaactaaaaaccctacatcaaaaactaaaaacacgcattacctctctttccgataacgtatctaacgcccgtaaaaaacgcataacactacgccaaaaacaaaaacaactacaatctcgcattcaaaatttaatacaacgtacgccgatttaactaacaacgcaaaacaatctcaaccaattaaacgaacaatacgacgaaaaatttacctccaaccaaaacgtcaccgaatatctacaacaattactaaaacgtaaacgaaaaacgattattaaacgcgataaaataaacgcgcgcaaaaacgccgtcgataaaaaaatcgaacgtttaaaccaacctaacgactctaaaaatcaacgtctaaacgcgctaacgaaacgttttaataatatactactatcaaaaatttataacgacgttaacctaaaaaatacgccgtacttctcaacgctatataacccgtcacgccacgccatcgtaatacca

SEQ ID NO: 23811 - DNA, 515 bp, Artificial Sequence
  chemically treated genomic DNA (Homo sapiens) CpG-island No: 23811
tacgttagggtaagaattttgatatcgacgaattggaagttttgtattaggaattggaagtacgtattgttttttttttcgatagcgtgtttaacgttcgtgaagagcgtatggtattgcgttaggagtaggaatagttgtagtttcgtatttagagtttgatgtagcgtgcgtcggtttggttggtagcgtaaaatagttttaattagttgagcgaatagtgcggcgaagagtttatttttagttaggacgttatcgaatatttgtaatagttgttggagcgtgagcgagaggcgattgttgaacgcgatgaagtgggcgcgcgtaaaaacgtcgtcgatgaagagatcgaacgtttaagttagtttggcggttttgaagattagcgtttgaacgcgttggcggagcgttttggtggtgtgttgttgttagaaatttatgacgacgttagtttggaagatgcgtcgtattttttagcgttgtatggttcgttacgttacgttatcgtggtgtta

SEQ ID NO: 23812 - DNA, 515 bp, Artificial Sequence
  chemically treated genomic DNA (Homo sapiens) CpG-island No: 23812
taacaccacgataacgtaacgtaacgaaccatacaacgctaaaaaatacgacgcatcttccaaactaacgtcgtcataaatttctaacaacaacacaccaccaaaacgctccgccaacgcgttcaaacgctaatcttcaaaaccgccaaactaacttaaacgttcgatctcttcatcgacgacgtttttacgcgcgcccacttcatcgcgttcaacaatcgcctctcgctcacgctccaacaactattacaaatattcgataacgtcctaactaaaaataaactcttcgccgcactattcgctcaactaattaaaactattttacgctaccaaccaaaccgacgcacgctacatcaaactctaaatacgaaactacaactattcctactcctaacgcaataccatacgctcttcacgaacgttaaacacgctatcgaaaaaaaaaacaatacgtacttccaattcctaatacaaaacttccaattcgtcgatatcaaaattcttaccctaacgta

SEQ ID NO: 23813 - DNA, 724 bp, Artificial Sequence
  chemically treated genomic DNA (Homo sapiens) CpG-island No: 23813
  unsure (121..122, 127, 183..184, 189, 198)
gtgtggggagggtatttgttaaggcgaattttgcgtttgcgcgttgtcgattgttgtacgttgtacgttacgacgttcggtaatttatggataatttttattttcggaagtaattattggnnttcgnatgtatacggcgtgggttcgtattggcggagtatcgtacgatttgtcgcgtttttnnnattntttgttgtntaagtttttcgattggatgtcgaaacgtttggcgttttacgagaaagcggcgttgtaaaatattattttgaaaggtcgtttttagggcgttgtcgtttatggcgcgaaagaggcgttggagtggggtattattggcgcgggtttgcgtgttatcgggatcgatttcgacgtgcgtaaggcgcgtttttattttggttatgaaaatttcgattttgaaatttcggtgggtggtggcgtttttgattgttatattcgcgtaatgtttaaagtggaagagttgcgttagagtttgcgtatttttgagtagtgttttaataatatgtcggaaggttcgtttaaagcggattattcgttggatacgtcgtcgtcgaaagagcgtacgttgtaatatatcgaaattttgattatttattttttgtaagtgtcgcggggttcggtgatgtttggtaatgaatttttttagatgattgagcggatataaggattaatagttattatttgattagcgacggcgtattatgagtta

SEQ ID NO: 23814 - DNA, 724 bp, Artificial Sequence
  chemically treated genomic DNA (Homo sapiens) CpG-island No: 23814
  unsure (527, 536, 540..541, 598, 603..)
taactcataatacgccgtcgctaatcaaataataactattaatccttatatccgctcaatcatctaaaaaaattcattaccaaacatcaccgaaccccgcgacacttacaaaaaataaataatcaaaatttcgatatattacaacgtacgctctttcgacgacgacgtatccaacgaataatccgctttaaacgaaccttccgacatattattaaaacactactcaaaaatacgcaaactctaacgcaactcttccactttaaacattacgcgaatataacaatcaaaaacgccaccacccaccgaaatttcaaaatcgaaattttcataaccaaaataaaaacgcgccttacgcacgtcgaaatcgatcccgataacacgcaaacccgcgccaataataccccactccaacgcctctttcgcgccataaacgacaacgccctaaaaacgacctttcaaaataatattttacaacgccgctttctcgtaaaacgccaaacgtttcgacatccaatcgaaaaacttanacaacaaanaatnnnaaaaacgcgacaaatcgtacgatactccgccaatacgaacccacgccgtatacatncgaannccaataattacttccgaaaataaaaattatccataaattaccgaacgtcgtaacgtacaacgtacaacaatcgacaacgcgcaaacgcaaaattcgccttaacaaataccctccccacac

SEQ ID NO: 23815 - DNA, 724 bp, Artificial Sequence
  chemically treated genomic DNA (Homo sapiens) CpG-island No: 23815
  unsure (527, 536, 540..541, 598, 603..)
taatttatggtgcgtcgtcgttgattaggtagtaattgttgatttttatgttcgtttaattatttgaaaagatttattgttaggtattatcggatttcgcgatatttgtaggaagtgggtgattagggtttcgatatgttgtagcgtgcgttttttcggcggcggcgtgtttagcgggtgattcgttttgaacgggtttttcggtatgttgttgaggtattgtttaagaatgcgtagattttggcgtagtttttttattttaagtattacgcgggtgtagtagttagaaacgttattatttatcgggattttaaagtcgaagtttttatagttagaataaggacgcgttttacgtacgtcgaagtcgatttcggtagtacgtaggttcgcgttagtggtgttttattttagcgtttttttcgcgttataggcggtaacgttttgggaacgattttttagaatggtgttttgtagcgtcgttttttcgtaagacgttagacgtttcggtatttagtcgaggaatttangtagtaggngatnnnaggggcgcggtaggtcgtgcggtatttcgttaatacggatttacgtcgtgtgtatncggannttagtgattgttttcggaagtgaaagttgtttatagattgtcggacgtcgtgacgtataacgtgtagtagtcggtagcgcgtaggcgtagagttcgttttggtaggtgttttttttatat

SEQ ID NO: 23816 - DNA, 724 bp, Artificial Sequence
  chemically treated genomic DNA (Homo sapiens) CpG-island No: 23816
  unsure (121..122, 127, 183..184, 189, 198)
atataaaaaaaacacctaccaaaacgaactctacgcctacgcgctaccgactactacacgttatacgtcacgacgtccgacaatctataaacaactttcacttccgaaaacaatcactaanntccgnatacacacgacgtaaatccgtattaacgaaataccgcacgacctaccgcgcccctnnnatcncctactacntaaattcctcgactaaataccgaaacgtctaacgtcttacgaaaaaacgacgctacaaaacaccattctaaaaaatcgttcccaaaacgttaccgcctataacgcgaaaaaaacgctaaaataaaacaccactaacgcgaacctacgtactaccgaaatcgacttcgacgtacgtaaaacgcgtccttattctaactataaaaacttcgactttaaaatcccgataaataataacgtttctaactactacacccgcgtaatacttaaaataaaaaaactacgccaaaatctacgcattcttaaacaatacctcaacaacataccgaaaaacccgttcaaaacgaatcacccgctaaacacgccgccgccgaaaaaacgcacgctacaacatatcgaaaccctaatcacccacttcctacaaatatcgcgaaatccgataatacctaacaataaatcttttcaaataattaaacgaacataaaaatcaacaattactacctaatcaacgacgacgcaccataaatta

SEQ ID NO: 23817 - DNA, 540 bp, Artificial Sequence
  chemically treated genomic DNA (Homo sapiens) CpG-island No: 23817
ttgttatcgcgttttgtgttttaaagtcgttggattacgaggttttgtaggttttcgagtttcgcgtgggcgttatagatcgcggtttttcggcgttgagtagcgaggcgttggtgcgcgtgttggtgttggacgttaacgataattcgtttttcgtgttgtattcgttgtagaacggtttcgcgttttgtatcgagttggtgtttcgggcggtcgagtcgggttatttggtgattaaggtggtggcggtggacggcgattcgggttagaacgtttggttgtcgtattagttgtttaaggttacggagttcgggttgttcggcgtgtgggcgtataatggcgaggtgcgtatcgttaggttgttgagcgagcgcgacgtggttaagtataggttagtggtgttggttaaggataatggcgagttttcgcgttcggttatcgttacgttgtaagtgtttttggtggacggttttttttagttttatttgtcgtttttaagagcggtttcggtttaagtttaggtcgattcgtttattgttt

SEQ ID NO: 23818 - DNA, 540 bp, Artificial Sequence
  chemically treated genomic DNA (Homo sapiens) CpG-island No: 23818
aaacaataaacgaatcgacctaaacttaaaccgaaaccgctcttaaaaacgacaaataaaactaaaaaaaaccgtccaccaaaaacacttacaacgtaacgataaccgaacgcgaaaactcgccattatccttaaccaacaccactaacctatacttaaccacgtcgcgctcgctcaacaacctaacgatacgcacctcgccattatacgcccacacgccgaacaacccgaactccgtaaccttaaacaactaatacgacaaccaaacgttctaacccgaatcgccgtccaccgccaccaccttaatcaccaaataacccgactcgaccgcccgaaacaccaactcgatacaaaacgcgaaaccgttctacaacgaatacaacacgaaaaacgaattatcgttaacgtccaacaccaacacgcgcaccaacgcctcgctactcaacgccgaaaaaccgcgatctataacgcccacgcgaaactcgaaaacctacaaaacctcgtaatccaacgactttaaaacacaaaacgcgataacaa

SEQ ID NO: 23819 - DNA, 540 bp, Artificial Sequence
  chemically treated genomic DNA (Homo sapiens) CpG-island No: 23819
agatagtgagcgagtcggtttgggtttgggtcggggtcgtttttgggagcggtaggtagggttgagagaagtcgtttattaggagtatttgtagcgtggcggtggtcgagcgcggaggttcgttattgtttttgattagtattattagtttgtgtttggttacgtcgcgttcgtttagtagtttggcggtgcgtatttcgttattgtgcgtttatacgtcgaatagttcgggtttcgtggttttgagtagttggtacgatagttaggcgttttggttcgagtcgtcgtttatcgttattattttggttattaggtagttcggttcggtcgttcggggtattagttcggtgtagggcgcggagtcgttttgtagcgggtatagtacgaagggcgagttgtcgttggcgtttagtattagtacgcgtattagcgtttcgttgtttaacgtcgggaagtcgcggtttgtggcgtttacgcggaattcgaaagtttgtagggtttcgtagtttagcgattttagagtatagggcgcgatagtaa

SEQ ID NO: 23820 - DNA, 540 bp, Artificial Sequence
  chemically treated genomic DNA (Homo sapiens) CpG-island No: 23820
ttactatcgcgccctatactctaaaatcgctaaactacgaaaccctacaaactttcgaattccgcgtaaacgccacaaaccgcgacttcccgacgttaaacaacgaaacgctaatacgcgtactaatactaaacgccaacgacaactcgcccttcgtactatacccgctacaaaacgactccgcgccctacaccgaactaataccccgaacgaccgaaccgaactacctaataaccaaaataataacgataaacgacgactcgaaccaaaacgcctaactatcgtaccaactactcaaaaccacgaaacccgaactattcgacgtataaacgcacaataacgaaatacgcaccgccaaactactaaacgaacgcgacgtaaccaaacacaaactaataatactaatcaaaaacaataacgaacctccgcgctcgaccaccgccacgctacaaatactcctaataaacgacttctctcaaccctacctaccgctcccaaaaacgaccccgacccaaacccaaaccgactcgctcactatct

SEQ ID NO: 23821 - DNA, 576 bp, Artificial Sequence
  chemically treated genomic DNA (Homo sapiens) CpG-island No: 23821
ttatcgcgttgagtgtttgttgtattaacggtagattatcgtttgttagtatcgggatttcgttgtattgtaagttttttatttttagtcggaaattcgggttagcggttttttgcgtattgcgggagttggcgtatagcgttgtatcgttttggttatcgttacgtatggcgattatcggtttgataaaagcgattttattcggcgttgttataatgtatatcgtatcgatacgatcgttattattggtgaattggttatcggttggcgtggtttgtagcgttggattgttggtcgttatgtcggaatcggttgtcgttttgagagtaatcgggttattcgttaaagtaatattagaatcgtcgttaatattcgcgcgtaattcgttggtggaattaaattttgttgtagaacggtgtcggcgtttaggttttgttattttgcgttaacgtattgcgtcgtagacggttaatgaattgcgtggattagtattacggcgtttgttattttggttcgaatttgattttcggagggagttaattttttttttatagttaaagaaattaggtttaaaga

SEQ ID NO: 23822 - DNA, 576 bp, Artificial Sequence
  chemically treated genomic DNA (Homo sapiens) CpG-island No: 23822
tctttaaacctaatttctttaactataaaaaaaaaattaactccctccgaaaatcaaattcgaaccaaaataacaaacgccgtaatactaatccacgcaattcattaaccgtctacgacgcaatacgttaacgcaaaataacaaaacctaaacgccgacaccgttctacaacaaaatttaattccaccaacgaattacgcgcgaatattaacgacgattctaatattactttaacgaataacccgattactctcaaaacgacaaccgattccgacataacgaccaacaatccaacgctacaaaccacgccaaccgataaccaattcaccaataataacgatcgtatcgatacgatatacattataacaacgccgaataaaatcgcttttatcaaaccgataatcgccatacgtaacgataaccaaaacgatacaacgctatacgccaactcccgcaatacgcaaaaaaccgctaacccgaatttccgactaaaaataaaaaacttacaatacaacgaaatcccgatactaacaaacgataatctaccgttaatacaacaaacactcaacgcgataa

SEQ ID NO: 23823 - DNA, 576 bp, Artificial Sequence
  chemically treated genomic DNA (Homo sapiens) CpG-island No: 23823
tttttggatttggtttttttggttgtgaaaagagaattgatttttttcgggggttaaattcgggttagggtaataagcgtcgtggtgttgatttacgtagtttattggtcgtttgcgacgtaatgcgttggcgtagagtggtagaatttgggcgtcggtatcgttttgtaataaaatttggttttattagcgaattacgcgcgggtgttaacggcggttttggtattgttttaacgggtagttcgattatttttagagcgataatcgatttcggtatgacgattaataatttaacgttgtaaattacgttaatcgatgattagtttattaataatggcggtcgtgtcgatgcggtgtatattgtggtaacgtcgggtgaaatcgtttttattaaatcgatgatcgttatgcgtaacggtagttagagcggtgtaacgttgtacgttagttttcgtagtgcgtaagggatcgttggttcggattttcgattggagatggaaggtttgtagtatagcgaaatttcgatgttggtaggcggtaatttatcgttaatgtagtaggtatttagcgcggtga

SEQ ID NO: 23824 - DNA, 576 bp, Artificial Sequence
  chemically treated genomic DNA (Homo sapiens) CpG-island No: 23824
tcaccgcgctaaatacctactacattaacgataaattaccgcctaccaacatcgaaatttcgctatactacaaaccttccatctccaatcgaaaatccgaaccaacgatcccttacgcactacgaaaactaacgtacaacgttacaccgctctaactaccgttacgcataacgatcatcgatttaataaaaacgatttcacccgacgttaccacaatatacaccgcatcgacacgaccgccattattaataaactaatcatcgattaacgtaatttacaacgttaaattattaatcgtcataccgaaatcgattatcgctctaaaaataatcgaactacccgttaaaacaataccaaaaccgccgttaacacccgcgcgtaattcgctaataaaaccaaattttattacaaaacgataccgacgcccaaattctaccactctacgccaacgcattacgtcgcaaacgaccaataaactacgtaaatcaacaccacgacgcttattaccctaacccgaatttaacccccgaaaaaaatcaattctcttttcacaaccaaaaaaaccaaatccaaaaa

SEQ ID NO: 23825 - DNA, 995 bp, Artificial Sequence
  chemically treated genomic DNA (Homo sapiens) CpG-island No: 23825
gcgcgtttggttagttaatttggtcggtggtgagttggaaatagaatcgcgggtagttcggtaatttgtcgtaaagttcggtatttcgtaggttagataagtcgtttacgtcgtattcgatatttaacgttcgagtcggttgtttaatgcgacgttgtcgcgttttattaggtttataattgttgtcgatttgtaagtcggataaggtatttgtgtcgtattcggtaattaatgtttgatgcgacgttgtcgcgttttattaggtttataattattgtcgatttgtaggtcggataaggtatttgtgtcgtattcggtaattaatgtttgatgcgacgttgtcgcgttttattaggtttataattgttgtcgattcgtaggtcggataaggcgttcgcgtcgtattcggtagtgtttattcgcggcgatttaaaattttttttttataagttcgtacgttttttagttattcgttatttgttggcgtatcgtgacgttggtaatatattttttagatcgtttgttacggtaacgatttttgtttttttagtagtgttagacgcgtagtgtaatcgttcgtcgtttttagtttgcgtagtttagcggtaggttttagtaacgtacgtagtagggttttttttatattgcgtgtattaatgatttacgcggtaatgcggttgatagaggtatcgaagaagttaaggtcgatatgtattcggttaaatagatcgtgacgtataattttattggtaattgtttgggttttattatttagtagtattacgtgatcgttgttttagcgaatcggacggttgacgtgtagtagtaattgcggtatatatagtatggcggcggaaattttgtcggaaattattttagtcgggtggaagtgttcggcgtttagtatagcgtagcgtggtgcgtgtgtgtttattttttttgagtttttgggtatatttgtatgtatttgcgatttggaaggggaaattagtttt

SEQ ID NO: 23826 - DNA, 995 bp, Artificial Sequence
  chemically treated genomic DNA (Homo sapiens) CpG-island No: 23826
aaaactaatttccccttccaaatcgcaaatacatacaaatatacccaaaaactcaaaaaaaataaacacacacgcaccacgctacgctatactaaacgccgaacacttccacccgactaaaataatttccgacaaaatttccgccgccatactatatataccgcaattactactacacgtcaaccgtccgattcgctaaaacaacgatcacgtaatactactaaataataaaacccaaacaattaccaataaaattatacgtcacgatctatttaaccgaatacatatcgaccttaacttcttcgatacctctatcaaccgcattaccgcgtaaatcattaatacacgcaatataaaaaaaaccctactacgtacgttactaaaacctaccgctaaactacgcaaactaaaaacgacgaacgattacactacgcgtctaacactactaaaaaaacaaaaatcgttaccgtaacaaacgatctaaaaaatatattaccaacgtcacgatacgccaacaaataacgaataactaaaaaacgtacgaacttataaaaaaaaaattttaaatcgccgcgaataaacactaccgaatacgacgcgaacgccttatccgacctacgaatcgacaacaattataaacctaataaaacgcgacaacgtcgcatcaaacattaattaccgaatacgacacaaataccttatccgacctacaaatcgacaataattataaacctaataaaacgcgacaacgtcgcatcaaacattaattaccgaatacgacacaaataccttatccgacttacaaatcgacaacaattataaacctaataaaacgcgacaacgtcgcattaaacaaccgactcgaacgttaaatatcgaatacgacgtaaacgacttatctaacctacgaaataccgaactttacgacaaattaccgaactacccgcgattctatttccaactcaccaccgaccaaattaactaaccaaacgcgc

SEQ ID NO: 23827 - DNA, 995 bp, Artificial Sequence
  chemically treated genomic DNA (Homo sapiens) CpG-island No: 23827
aaagttgatttttttttttaagtcgtaaatgtatataaatatgtttagaggtttaaaagaaatgggtatatacgtattacgttgcgttgtgttggacgtcgggtatttttattcgattgaagtgattttcgataagattttcgtcgttatgttgtatgtgtcgtagttgttgttgtacgttagtcgttcggttcgttgggatagcgattacgtagtgttgttggatgatgaaatttaggtaattgttagtgagattgtgcgttacgatttgtttgatcgggtgtatatcggttttgattttttcgatgtttttattaatcgtattgtcgcgtgggttattggtatacgtaatatgaaaaaagttttgttgcgtgcgttgttggaatttatcgttgagttgcgtaagttggaagcggcgggcgattatattgcgcgtttggtattgttggaagagtagaaatcgttgtcgtggtaggcggtttgggaaatgtattgttaacgttacgatacgttagtaggtagcgaatggttggagagcgtgcgggtttatgagaaagaaattttgagtcgtcgcgggtaaatattgtcggatgcggcgcgagcgttttattcggtttacgggtcggtaatagttgtaggtttgataagacgcgatagcgtcgtattaggtattgattgtcggatgcggtataagtgttttattcggtttataggtcggtaatagttgtaggtttgataagacgcgatagcgtcgtattaggtattgattgtcggatgcggtataagtgttttattcggtttataggtcggtaatagttgtaggtttgataagacgcgatagcgtcgtattaggtaatcggttcgggcgttggatgtcggatgcggcgtgaacggtttgtttgatttacggggtgtcggattttacggtaagttatcgaattattcgcggttttgtttttagtttattatcgattagattaattggttaggcgcgt

SEQ ID NO: 23828 - DNA, 995 bp, Artificial Sequence
  chemically treated genomic DNA (Homo sapiens) CpG-island No: 23828
acgcgcctaaccaattaatctaatcgataataaactaaaaacaaaaccgcgaataattcgataacttaccgtaaaatccgacaccccgtaaatcaaacaaaccgttcacgccgcatccgacatccaacgcccgaaccgattacctaatacgacgctatcgcgtcttatcaaacctacaactattaccgacctataaaccgaataaaacacttataccgcatccgacaatcaatacctaatacgacgctatcgcgtcttatcaaacctacaactattaccgacctataaaccgaataaaacacttataccgcatccgacaatcaatacctaatacgacgctatcgcgtcttatcaaacctacaactattaccgacccgtaaaccgaataaaacgctcgcgccgcatccgacaatatttacccgcgacgactcaaaatttctttctcataaacccgcacgctctccaaccattcgctacctactaacgtatcgtaacgttaacaatacatttcccaaaccgcctaccacgacaacgatttctactcttccaacaataccaaacgcgcaatataatcgcccgccgcttccaacttacgcaactcaacgataaattccaacaacgcacgcaacaaaacttttttcatattacgtataccaataacccacgcgacaatacgattaataaaaacatcgaaaaaatcaaaaccgatatacacccgatcaaacaaatcgtaacgcacaatctcactaacaattacctaaatttcatcatccaacaacactacgtaatcgctatcccaacgaaccgaacgactaacgtacaacaacaactacgacacatacaacataacgacgaaaatcttatcgaaaatcacttcaatcgaataaaaatacccgacgtccaacacaacgcaacgtaatacgtatatacccatttcttttaaacctctaaacatatttatatacatttacgacttaaaaaaaaaaatcaacttt

SEQ ID NO: 23829 - DNA, 543 bp, Artificial Sequence
  chemically treated genomic DNA (Homo sapiens) CpG-island No: 23829
ttttttttcggtaagcgtaggttcgtttatcgggatcgatagggttcgcgaagcgttggttggcgggttgacgagttggcgggttggcgggttgatttttcgacggcggcgacggtagtttttggttcggagtttttttttttttatttcggatttgtttttagaatcgaacgagttagtgaggtgagcgttttcgtgtttagagcggttttacgtgttttttattaaataatcggacggtattattttatttattcgattcgttcgattcgtttgttttttagagttattttagacgcgcgcgcgcgtttggttacgttcgtttttttttttttgcgcgtttttgcgatttcgtgcgtgttcgttttgtttgtgaggtcgcgggaagtagcgcgtaggagtagaagtaatagggtgtcgtcgaataggtggggagtggaggtttggaagtacgtttgcggaagatgggcggttgcggttatttcgcgtgattagttcgttcgtttaatatattatgatttttattttttatttagtttttta

SEQ ID NO: 23830 - DNA, 543 bp, Artificial Sequence
  chemically treated genomic DNA (Homo sapiens) CpG-island No: 23830
taaaaaactaaataaaaaataaaaatcataatatattaaacgaacgaactaatcacgcgaaataaccgcaaccgcccatcttccgcaaacgtacttccaaacctccactccccacctattcgacgacaccctattacttctactcctacgcgctacttcccgcgacctcacaaacaaaacgaacacgcacgaaatcgcaaaaacgcgcaaaaaaaaaaaaacgaacgtaaccaaacgcgcgcgcgcgtctaaaataactctaaaaaacaaacgaatcgaacgaatcgaataaataaaataataccgtccgattatttaataaaaaacacgtaaaaccgctctaaacacgaaaacgctcacctcactaactcgttcgattctaaaaacaaatccgaaataaaaaaaaaaaaactccgaaccaaaaactaccgtcgccgccgtcgaaaaatcaacccgccaacccgccaactcgtcaacccgccaaccaacgcttcgcgaaccctatcgatcccgataaacgaacctacgcttaccgaaaaaaaa

SEQ ID NO: 23831 - DNA, 543 bp, Artificial Sequence
  chemically treated genomic DNA (Homo sapiens) CpG-island No: 23831
tagaggattaaatggagagtaagaattatgatatattgagcgagcgaattaattacgcgagatgatcgtagtcgtttatttttcgtaagcgtgtttttaggtttttattttttatttattcggcggtattttgttatttttgtttttgcgcgttgtttttcgcgattttataggtagagcgaatacgtacggagtcgtaggggcgcgtaaagggggaggagcgggcgtgattaggcgcgcgcgcgcgtttggagtgattttagagagtaggcgagtcgggcggatcgggtgggtagagtggtgtcgttcggttgtttggtgggaggtacgtaagatcgttttgggtacgggggcgtttattttattggttcgttcggttttaggagtagattcggggtagagggaaaagagtttcgggttaggggttgtcgtcgtcgtcgtcggggagttagttcgttagttcgttagttcgttagttcgttagttagcgtttcgcgggttttgtcggtttcggtaagcgggtttgcgtttatcggaaagagg

SEQ ID NO: 23832 - DNA, 543 bp, Artificial Sequence
  chemically treated genomic DNA (Homo sapiens) CpG-island No: 23832
cctctttccgataaacgcaaacccgcttaccgaaaccgacaaaacccgcgaaacgctaactaacgaactaacgaactaacgaactaacgaactaactccccgacgacgacgacgacaacccctaacccgaaactcttttccctctaccccgaatctactcctaaaaccgaacgaaccaataaaataaacgcccccgtacccaaaacgatcttacgtacctcccaccaaacaaccgaacgacaccactctacccacccgatccgcccgactcgcctactctctaaaatcactccaaacgcgcgcgcgcgcctaatcacgcccgctcctccccctttacgcgcccctacgactccgtacgtattcgctctacctataaaatcgcgaaaaacaacgcgcaaaaacaaaaataacaaaataccgccgaataaataaaaaataaaaacctaaaaacacgcttacgaaaaataaacgactacgatcatctcgcgtaattaattcgctcgctcaatatatcataattcttactctccatttaatcctcta

SEQ ID NO: 23833 - DNA, 780 bp, Artificial Sequence
  chemically treated genomic DNA (Homo sapiens) CpG-island No: 23833
ggcgagtgggttggttggcgggggggtgggggggggggcggcggggcgggcggcggtgttgtcgggggtgttcggggttagggggttggtgggtgggggggcggcggggggggggggcggttgtgtcgtcgcgtgtgggggggggggtcgtcggcgggggggcgcggcgtcgcgggggaggtgacgttacgtgagtgatcggcgttcggttttgggggtaggtcgtttgtgggacgggtgtgtcgtgggttcgcgataggtggttatgtggttgttttgtggtgcgttcggatgggttcgggggattggtatagttgttttcggttgtcgggcgagtaagtgcggtttgcgtgggtttgacgatgtattggtgttttatgggggtgtgggtcgttcgttttgggcgttgaacgtgattatgtgttgggcggggcgagaggcgtggaagtatcggggtgttgcggttatatttgggttggtgtttattttatttttttatagagtgtttcgtagtggtttttgtgtcggtgacgtgatattgttggagcgagcgaggcggggaagtgcgtggttagattgcgtacgtattgtggttgtcggatagcggacggtgatagggtgatatttgtgacgagttgtagtgcgggcgtgcgtcgattgttgcgttcgtattgttttcgttttcgttggtggatgtagttggaggttcggcgtgttttttattggaggagttgtgtattaggtgttgtgagtgagaggtcgttgtggaaaggtgtgttt

SEQ ID NO: 23834 - DNA, 780 bp, Artificial Sequence
  chemically treated genomic DNA (Homo sapiens) CpG-island No: 23834
aaacacacctttccacaacgacctctcactcacaacacctaatacacaactcctccaataaaaaacacgccgaacctccaactacatccaccaacgaaaacgaaaacaatacgaacgcaacaatcgacgcacgcccgcactacaactcgtcacaaatatcaccctatcaccgtccgctatccgacaaccacaatacgtacgcaatctaaccacgcacttccccgcctcgctcgctccaacaatatcacgtcaccgacacaaaaaccactacgaaacactctataaaaaaataaaataaacaccaacccaaatataaccgcaacaccccgatacttccacgcctctcgccccgcccaacacataatcacgttcaacgcccaaaacgaacgacccacacccccataaaacaccaatacatcgtcaaacccacgcaaaccgcacttactcgcccgacaaccgaaaacaactataccaatcccccgaacccatccgaacgcaccacaaaacaaccacataaccacctatcgcgaacccacgacacacccgtcccacaaacgacctacccccaaaaccgaacgccgatcactcacgtaacgtcacctcccccgcgacgccgcgcccccccgccgacgacccccccccccacacgcgacgacacaaccgccccccccccccgccgcccccccacccaccaaccccctaaccccgaacacccccgacaacaccgccgcccgccccgccgcccccccccccacccccccgccaaccaacccactcgcc

SEQ ID NO: 23835 - DNA, 780 bp, Artificial Sequence
  chemically treated genomic DNA (Homo sapiens) CpG-island No: 23835
aggtatatttttttataacgattttttatttataatatttagtatataatttttttagtggaggatacgtcgagtttttaattatatttattaacggaaacgaggataatgcgagcgtaatagtcggcgtacgttcgtattgtaattcgttatagatgttattttgttatcgttcgttgttcgatagttatagtgcgtgcgtagtttaattacgtattttttcgtttcgttcgttttaatagtattacgttatcgatatagaaattattgcgaagtattttgtagggggatagggtgagtattaatttaagtgtggtcgtaatatttcggtatttttacgtttttcgtttcgtttaatatatggttacgtttaacgtttagagcgaacgatttatatttttataagatattagtgtatcgttaagtttacgtaaatcgtatttattcgttcgataatcggagatagttatattaatttttcgaatttattcgggcgtattatagggtaattatatagttatttgtcgcggatttacggtatattcgttttataagcggtttgtttttagaatcgaacgtcggttatttacgtggcgttatttttttcgcggcgtcgcgttttttcgtcgacgatttttttttttatacgcggcgatatagtcgtttttttttttcgtcgtttttttatttattagttttttgatttcgagtattttcggtagtatcgtcgttcgtttcgtcgtttttttttttattttttcgttaattaatttattcgtt

SEQ ID NO: 23836 - DNA, 780 bp, Artificial Sequence
  chemically treated genomic DNA (Homo sapiens) CpG-island No: 23836
aacgaataaattaattaacgaaaaaataaaaaaaaaaacgacgaaacgaacgacgatactaccgaaaatactcgaaatcaaaaaactaataaataaaaaaacgacgaaaaaaaaaaacgactatatcgccgcgtataaaaaaaaaaatcgtcgacgaaaaaacgcgacgccgcgaaaaaaataacgccacgtaaataaccgacgttcgattctaaaaacaaaccgcttataaaacgaatataccgtaaatccgcgacaaataactatataattaccctataatacgcccgaataaattcgaaaaattaatataactatctccgattatcgaacgaataaatacgatttacgtaaacttaacgatacactaatatcttataaaaatataaatcgttcgctctaaacgttaaacgtaaccatatattaaacgaaacgaaaaacgtaaaaataccgaaatattacgaccacacttaaattaatactcaccctatccccctacaaaatacttcgcaataatttctatatcgataacgtaatactattaaaacgaacgaaacgaaaaaatacgtaattaaactacgcacgcactataactatcgaacaacgaacgataacaaaataacatctataacgaattacaatacgaacgtacgccgactattacgctcgcattatcctcgtttccgttaataaatataattaaaaactcgacgtatcctccactaaaaaaattatatactaaatattataaataaaaaatcgttataaaaaaatatacct

SEQ ID NO: 23837 - DNA, 644 bp, Artificial Sequence
  chemically treated genomic DNA (Homo sapiens) CpG-island No: 23837
atgaggcgacggaggtttatatttttacgcggggcgtaattataatcgttatagtaatacgtaattatattttaacgagcgtagcgttatataatattatcgttcgtagacgagatttaggtaagatacgatagagtaggatagacgagtagtagtagagggtatatagaacgtaataattagtgggattatacgtggatatacgatcgaggatcgtatacgtagaggtcgtcgtatacgataggaatatagatttcgggatagatatattcgacgtttatacggacggttttagggcgtacgtatatcgatagatacgatagacggttatttacgcgaagttcgtattcggaaaagtgcgattataagagtattttaatatcgagatgtagatattatataaattatcgattagacggagaatcgtatagaagatacggtaattttacgatagcgtatagaaaagtattataggggagtatacgataattcgtatcgtacgataagaagattacgtgagttcgagaaataagtagataagtttattagcgaggaaaatagaaagcgcggtaatagagaatttataattggtagatatcgatatggacgtagcgatagtaaggagaaaacgaatacgatagaat

SEQ ID NO: 23838 - DNA, 644 bp, Artificial Sequence
  chemically treated genomic DNA (Homo sapiens) CpG-island No: 23838
attctatcgtattcgttttctccttactatcgctacgtccatatcgatatctaccaattataaattctctattaccgcgctttctattttcctcgctaataaacttatctacttatttctcgaactcacgtaatcttcttatcgtacgatacgaattatcgtatactcccctataatacttttctatacgctatcgtaaaattaccgtatcttctatacgattctccgtctaatcgataatttatataatatctacatctcgatattaaaatactcttataatcgcacttttccgaatacgaacttcgcgtaaataaccgtctatcgtatctatcgatatacgtacgccctaaaaccgtccgtataaacgtcgaatatatctatcccgaaatctatattcctatcgtatacgacgacctctacgtatacgatcctcgatcgtatatccacgtataatcccactaattattacgttctatataccctctactactactcgtctatcctactctatcgtatcttacctaaatctcgtctacgaacgataatattatataacgctacgctcgttaaaatataattacgtattactataacgattataattacgccccgcgtaaaaatataaacctccgtcgcctcat

SEQ ID NO: 23839 - DNA, 644 bp, Artificial Sequence
  chemically treated genomic DNA (Homo sapiens) CpG-island No: 23839
gttttgtcgtgttcgttttttttttgttgtcgttgcgtttatgtcggtgtttgttagttgtgggttttttgttgtcgcgttttttgtttttttcgttggtgggtttgtttgtttgtttttcgaatttacgtggtttttttgtcgtgcgatgcgggttgtcgtatgtttttttgtggtgtttttttgtgcgttgtcgtgggattgtcgtgttttttgtacggtttttcgtttggtcggtggtttgtgtggtgtttatatttcggtgttggggtgtttttgtggtcgtattttttcggatgcgagtttcgcgtggatagtcgtttgtcgtgtttatcggtgtgcgtgcgttttggagtcgttcgtgtgagcgtcgggtgtatttatttcgggatttatgtttttatcgtgtacggcggtttttgcgtgtgcggttttcggtcgtgtgtttacgtgtggttttattggttgttgcgttttgtgtgttttttgttgttgttcgtttgttttattttgtcgtgttttgtttgggtttcgtttgcgggcggtggtgttatgtggcgttgcgttcgttgagatgtggttgcgtgttgttgtggcggttgtgattgcgtttcgcgtgggagtgtgagttttcgtcgttttat

SEQ ID NO: 23840 - DNA, 644 bp, Artificial Sequence
  chemically treated genomic DNA (Homo sapiens) CpG-island No: 23840
ataaaacgacgaaaactcacactcccacgcgaaacgcaatcacaaccgccacaacaacacgcaaccacatctcaacgaacgcaacgccacataacaccaccgcccgcaaacgaaacccaaacaaaacacgacaaaataaaacaaacgaacaacaacaaaaaacacacaaaacgcaacaaccaataaaaccacacgtaaacacacgaccgaaaaccgcacacgcaaaaaccgccgtacacgataaaaacataaatcccgaaataaatacacccgacgctcacacgaacgactccaaaacgcacgcacaccgataaacacgacaaacgactatccacgcgaaactcgcatccgaaaaaatacgaccacaaaaacaccccaacaccgaaatataaacaccacacaaaccaccgaccaaacgaaaaaccgtacaaaaaacacgacaatcccacgacaacgcacaaaaaaacaccacaaaaaaacatacgacaacccgcatcgcacgacaaaaaaaccacgtaaattcgaaaaacaaacaaacaaacccaccaacgaaaaaaacaaaaaacgcgacaacaaaaaacccacaactaacaaacaccgacataaacgcaacgacaacaaaaaaaaaacgaacacgacaaaac

SEQ ID NO: 23841 - DNA, 1051 bp, Artificial Sequence
  chemically treated genomic DNA (Homo sapiens) CpG-island No: 23841
gtagtttcgaggtcggaatcgggtcgtaatttataatcgatgggttataataacgatcgttatcgaacgtatacgagcgcgcggtttaagatttaattttgggcgcggtttttatttattattagtatggtagttgcgttatcggaaatgtagaagatgtgttcgtcgttattatatcgtttattggattaaacgtcgacgtagcgtggcgagggtttttacggtggttttcgggcgaattatttttcgtaattaaattgttttaggacgtcgtcggtatcgtgattatcggtcggatgattttatttttaaatgcggtcgattgcgtggcggtttaggcgcggcgtgtgatcgcgcggtaaaggtattttgtattttacggttgatatcgtgatacgcgttagtatttttgtcgttaagtttattatgttcgtcgttttgggatattgcggtttaggtcggggtgaaaatcgacgtcgtgatttatcggttattgtttatatgttttacgtcgttaaatagatatgtttgcgtatcgtcgttatgattattcgtgttgcgttatgtagtgtttgtatggatgaattattaagcgatttaacggtaatcgtcgggatagagtgtggtatttttgttagagcgtcgcgttacgggcgatattaaaattttgttttagcgtttgttgtaataattttagtaaatatcgtcgagggtcgtcgtttttagcgtcgggttagcgttagtaggttacgtattaaatgagcggagagattttttgtacgtatttacgaaaagtatcgtttttcgaacggtttatcggggtgcgaatttgtacgataatgataatttgttttattgtgattttttaagtcgtttttaggttttaatcggacgggttggtttaatcggaggatagtacggttcgttatgatcgttttatttcgtagatttttcggtattttatatagcgggtcgaggtgcgatattgttgtgtttatttaggtatttgcgtttcgcgggtttttagttaggaagtcgtcgcgttgacgga

SEQ ID NO: 23842 - DNA, 1051 bp, Artificial Sequence
  chemically treated genomic DNA (Homo sapiens) CpG-island No: 23842
tccgtcaacgcgacgacttcctaactaaaaacccgcgaaacgcaaatacctaaataaacacaacaatatcgcacctcgacccgctatataaaataccgaaaaatctacgaaataaaacgatcataacgaaccgtactatcctccgattaaaccaacccgtccgattaaaacctaaaaacgacttaaaaaatcacaataaaacaaattatcattatcgtacaaattcgcaccccgataaaccgttcgaaaaacgatacttttcgtaaatacgtacaaaaaatctctccgctcatttaatacgtaacctactaacgctaacccgacgctaaaaacgacgaccctcgacgatatttactaaaattattacaacaaacgctaaaacaaaattttaatatcgcccgtaacgcgacgctctaacaaaaataccacactctatcccgacgattaccgttaaatcgcttaataattcatccatacaaacactacataacgcaacacgaataatcataacgacgatacgcaaacatatctatttaacgacgtaaaacatataaacaataaccgataaatcacgacgtcgattttcaccccgacctaaaccgcaatatcccaaaacgacgaacataataaacttaacgacaaaaatactaacgcgtatcacgatatcaaccgtaaaatacaaaatacctttaccgcgcgatcacacgccgcgcctaaaccgccacgcaatcgaccgcatttaaaaataaaatcatccgaccgataatcacgataccgacgacgtcctaaaacaatttaattacgaaaaataattcgcccgaaaaccaccgtaaaaaccctcgccacgctacgtcgacgtttaatccaataaacgatataataacgacgaacacatcttctacatttccgataacgcaactaccatactaataataaataaaaaccgcgcccaaaattaaatcttaaaccgcgcgctcgtatacgttcgataacgatcgttattataacccatcgattataaattacgacccgattccgacctcgaaactac

SEQ ID NO: 23843 - DNA, 1051 bp, Artificial Sequence
  chemically treated genomic DNA (Homo sapiens) CpG-island No: 23843
ttcgttaacgcggcggttttttggttgggaattcgcggagcgtaaatatttggataggtatagtaatatcgtatttcggttcgttgtatgaagtgtcggaaggtttgcggaataaagcggttataacgaatcgtattatttttcggttgagttagttcgttcggttgggatttgaaaacggtttaaggagttataatggaataggttgttattgtcgtgtaaattcgtatttcgatgggtcgttcgaagggcggtgtttttcgtaagtgcgtgtagaagattttttcgtttatttaatgcgtagtttgttggcgttaattcggcgttggaagcggcggttttcgacgatatttattggggttgttgtagtagacgttggagtagggttttaatatcgttcgtaacgcggcgttttggtagaagtattatattttgtttcggcggttatcgttaaatcgtttggtggtttatttatgtaggtattgtatgacgtagtacgaatgattatgacggcgatgcgtaggtatgtttgtttggcggcgtggagtatatgggtaatggtcgatgagttacggcgtcgatttttatttcggtttgagtcgtaatgttttaaagcggcgggtatgatgggtttaacggtagaaatgttggcgcgtattacggtattagtcgtgaaatgtaggatgtttttgtcgcgcggttatacgtcgcgtttgggtcgttacgtagtcggtcgtatttaaaaatgaaattattcgatcggtggttacgatgtcgacggcgttttgaagtagtttaattacgagaagtgattcgttcggaaattatcgtggaagttttcgttacgttgcgtcggcgtttgatttagtaaacggtatggtaacggcgggtatattttttgtattttcgatggcgtagttgttatgttggtgatgagtgaaagtcgcgtttagaattaggttttaagtcgcgcgttcgtgtgcgttcgatggcggtcgttgttgtgatttatcgattatgggttacggttcggtttcggtttcgaaattgt

SEQ ID NO: 23844 - DNA, 1051 bp, Artificial Sequence
  chemically treated genomic DNA (Homo sapiens) CpG-island No: 23844
acaatttcgaaaccgaaaccgaaccgtaacccataatcgataaatcacaacaacgaccgccatcgaacgcacacgaacgcgcgacttaaaacctaattctaaacgcgactttcactcatcaccaacataacaactacgccatcgaaaatacaaaaaatatacccgccgttaccataccgtttactaaatcaaacgccgacgcaacgtaacgaaaacttccacgataatttccgaacgaatcacttctcgtaattaaactacttcaaaacgccgtcgacatcgtaaccaccgatcgaataatttcatttttaaatacgaccgactacgtaacgacccaaacgcgacgtataaccgcgcgacaaaaacatcctacatttcacgactaataccgtaatacgcgccaacatttctaccgttaaacccatcatacccgccgctttaaaacattacgactcaaaccgaaataaaaatcgacgccgtaactcatcgaccattacccatatactccacgccgccaaacaaacatacctacgcatcgccgtcataatcattcgtactacgtcatacaatacctacataaataaaccaccaaacgatttaacgataaccgccgaaacaaaatataatacttctaccaaaacgccgcgttacgaacgatattaaaaccctactccaacgtctactacaacaaccccaataaatatcgtcgaaaaccgccgcttccaacgccgaattaacgccaacaaactacgcattaaataaacgaaaaaatcttctacacgcacttacgaaaaacaccgcccttcgaacgacccatcgaaatacgaatttacacgacaataacaacctattccattataactccttaaaccgttttcaaatcccaaccgaacgaactaactcaaccgaaaaataatacgattcgttataaccgctttattccgcaaaccttccgacacttcatacaacgaaccgaaatacgatattactatacctatccaaatatttacgctccgcgaattcccaaccaaaaaaccgccgcgttaacgaa

SEQ ID NO: 23845 - DNA, 703 bp, Artificial Sequence
  chemically treated genomic DNA (Homo sapiens) CpG-island No: 23845
attcgcgtattcgtcgttatgaaggagcgtacgttgaattttttttttttttttcgttggtcggtacgtttggcgttgattatatcgttttgttggcgttgattgcgtttattagttagtggtggttgtcgttgatttataggcgattgatttgtcgtcgcgtttgttttcgtcggatgcgagtattggttgggtatcgattatttaggtcgcgatattttttcgcggttatggtagcgattcgcgtgtcgttcggttcggtaatggtttgtttgttgcggtgttgatattagggttggttattggcggtagcgtcgggttgattggcggcgcgttgattaggttattatgcgcgtcgtcgatatgtttatgatttttcgatttcgattttgtcgttttttatggttggcgtgttcggtatcgggcgattaacgtaattatcgttatcgttttgtcgtattgggcgtggtatgtagtatggtgcgtagtttggtgattttattacgttaacgcgagtttgtgttgcgttacggtttttcggtgcgggttatgtgcgggtgtttgtcgattatcggtaggcgcggtgattttttcgttgttggtgttggtaacgttggatatcgttatatgatgttgtacgtcgcggggatgtttttttttggtttcggtgtatcgcgtcgatcgtcgaatggggcgtgatgat

SEQ ID NO: 23846 - DNA, 703 bp, Artificial Sequence
  chemically treated genomic DNA (Homo sapiens) CpG-island No: 23846
atcatcacgccccattcgacgatcgacgcgatacaccgaaaccaaaaaaaaacatccccgcgacgtacaacatcatataacgatatccaacgttaccaacaccaacaacgaaaaaatcaccgcgcctaccgataatcgacaaacacccgcacataacccgcaccgaaaaaccgtaacgcaacacaaactcgcgttaacgtaataaaatcaccaaactacgcaccatactacataccacgcccaatacgacaaaacgataacgataattacgttaatcgcccgataccgaacacgccaaccataaaaaacgacaaaatcgaaatcgaaaaatcataaacatatcgacgacgcgcataataacctaatcaacgcgccgccaatcaacccgacgctaccgccaataaccaaccctaatatcaacaccgcaacaaacaaaccattaccgaaccgaacgacacgcgaatcgctaccataaccgcgaaaaaatatcgcgacctaaataatcgatacccaaccaatactcgcatccgacgaaaacaaacgcgacgacaaatcaatcgcctataaatcaacgacaaccaccactaactaataaacgcaatcaacgccaacaaaacgatataatcaacgccaaacgtaccgaccaacgaaaaaaaaaaaaaaaattcaacgtacgctccttcataacgacgaatacgcgaat

SEQ ID NO: 23847 - DNA, 703 bp, Artificial Sequence
  chemically treated genomic DNA (Homo sapiens) CpG-island No: 23847
attattacgttttattcggcggtcggcgcggtatatcgaggttaaggaaagatattttcgcgacgtgtagtattatatggcgatatttagcgttgttagtattagtagcgaagggattatcgcgtttgtcgatgatcgataaatattcgtatatggttcgtatcggaaagtcgtgacgtagtataaattcgcgttggcgtagtgaaattattaggttgcgtattatgttgtatattacgtttagtgcgatagggcgatggcgataattacgttggtcgttcggtgtcgagtacgttaattataaagaacgatagaatcgaggtcggaaggttataaatatatcggcgacgcgtatggtggtttgattaacgcgtcgttaattaattcggcgttgtcgttaataattagttttaatgttagtatcgtagtaggtaggttattatcgaatcgagcgatacgcgggtcgttgttatagtcgcgagaaaatatcgcgatttaagtgatcggtgtttagttagtgttcgtattcggcgaaagtaggcgcgacggtaaattaatcgtttgtgggttaacggtagttattattggttggtgagcgtaattagcgttagtagggcgatatgattagcgttaggcgtatcgattagcgggaagagaggaaaaagtttagcgtgcgtttttttatgacgacgaatgcgcgggt

SEQ ID NO: 23848 - DNA, 703 bp, Artificial Sequence
  chemically treated genomic DNA (Homo sapiens) CpG-island No: 23848
acccgcgcattcgtcgtcataaaaaaacgcacgctaaactttttcctctcttcccgctaatcgatacgcctaacgctaatcatatcgccctactaacgctaattacgctcaccaaccaataataactaccgttaacccacaaacgattaatttaccgtcgcgcctactttcgccgaatacgaacactaactaaacaccgatcacttaaatcgcgatattttctcgcgactataacaacgacccgcgtatcgctcgattcgataataacctacctactacgatactaacattaaaactaattattaacgacaacgccgaattaattaacgacgcgttaatcaaaccaccatacgcgtcgccgatatatttataaccttccgacctcgattctatcgttctttataattaacgtactcgacaccgaacgaccaacgtaattatcgccatcgccctatcgcactaaacgtaatatacaacataatacgcaacctaataatttcactacgccaacgcgaatttatactacgtcacgactttccgatacgaaccatatacgaatatttatcgatcatcgacaaacgcgataatcccttcgctactaatactaacaacgctaaatatcgccatataatactacacgtcgcgaaaatatctttccttaacctcgatataccgcgccgaccgccgaataaaacgtaataat

SEQ ID NO: 23849 - DNA, 511 bp, Artificial Sequence
  chemically treated genomic DNA (Homo sapiens) CpG-island No: 23849
ttatttgattcgttcggatatgggtcgtcgtttgtgtgtagaagttgttgaagcgttgaaagcgtagtgtgttgttaattcggacgtataggtcgttatttttgatggtttgttaattgatgcgattatcgtgaattacgaagagattttgttatcgttgatggcgggtttgaaataggtcgggttgaaagtcggtatattattttttgttcgttatggtcgcgtgaagattgaagattagatcggtgagattttcggcgcgaaagtagtgattttgttggtgggcgaacgttcggggttgggttagttagaaagttttttttgttacgtcgtttattcgtcgcgtatggcgattatcgttgaggtcgatcgtatttgtatttataatatttattagggcggtacgtcgtcggttgaagtcgtagtcgttattgtggatttggcgaaacgtatgttggagtagaaagtatttcggtattaatatgattcgataaggaagtattatgttagt

SEQ ID NO: 23850 - DNA, 511 bp, Artificial Sequence
  chemically treated genomic DNA (Homo sapiens) CpG-island No: 23850
actaacataatacttccttatcgaatcatattaataccgaaatactttctactccaacatacgtttcgccaaatccacaataacgactacgacttcaaccgacgacgtaccgccctaataaatattataaatacaaatacgatcgacctcaacgataatcgccatacgcgacgaataaacgacgtaacaaaaaaaactttctaactaacccaaccccgaacgttcgcccaccaacaaaatcactactttcgcgccgaaaatctcaccgatctaatcttcaatcttcacgcgaccataacgaacaaaaaataatataccgactttcaacccgacctatttcaaacccgccatcaacgataacaaaatctcttcgtaattcacgataatcgcatcaattaacaaaccatcaaaaataacgacctatacgtccgaattaacaacacactacgctttcaacgcttcaacaacttctacacacaaacgacgacccatatccgaacgaatcaaataa

SEQ ID NO: 23851 - DNA, 511 bp, Artificial Sequence
  chemically treated genomic DNA (Homo sapiens) CpG-island No: 23851
gttggtatgatgtttttttatcgggttatgttgatgtcgaaatgttttttgttttagtatacgtttcgttaaatttataatgacggttgcggttttaatcggcggcgtgtcgttttggtgaatgttatagatataggtgcgatcggttttaacggtggtcgttatacgcggcgagtaaacggcgtagtaggagaggttttttgattgatttaatttcggacgttcgtttattagtaggattattattttcgcgtcgaggattttatcgatttgatttttaatttttacgcgattataacgaataaagaatggtgtatcgatttttagttcggtttgttttaggttcgttattagcggtggtaggattttttcgtagtttacggtgatcgtattagttgataggttattagaaataacgatttgtacgttcggattggtaatatattgcgtttttagcgttttaatagtttttgtatataggcggcggtttatattcgggcgagttaggtag

SEQ ID NO: 23852 - DNA, 511 bp, Artificial Sequence
  chemically treated genomic DNA (Homo sapiens) CpG-island No: 23852
ctacctaactcgcccgaatataaaccgccgcctatatacaaaaactattaaaacgctaaaaacgcaatatattaccaatccgaacgtacaaatcgttatttctaataacctatcaactaatacgatcaccgtaaactacgaaaaaatcctaccaccgctaataacgaacctaaaacaaaccgaactaaaaatcgatacaccattctttattcgttataatcgcgtaaaaattaaaaatcaaatcgataaaatcctcgacgcgaaaataataatcctactaataaacgaacgtccgaaattaaatcaatcaaaaaacctctcctactacgccgtttactcgccgcgtataacgaccaccgttaaaaccgatcgcacctatatctataacattcaccaaaacgacacgccgccgattaaaaccgcaaccgtcattataaatttaacgaaacgtatactaaaacaaaaaacatttcgacatcaacataacccgataaaaaaacatcataccaac

SEQ ID NO: 23853 - DNA, 569 bp, Artificial Sequence
  chemically treated genomic DNA (Homo sapiens) CpG-island No: 23853
  unsure (139..)
gttttatattgttttttatgtagcgtttgtaatttatttcgtacgattttcgtaatatatgttgattgaaataggattacgttaattagcgcgcggattaatttgtcgatattggtgttttttgaggtattcgaatagnntattttagaggattttttttatcgtatagtcgaagttcgtttataggttagcgggatcgtattgaatcgtaattttattgaaggtagcgatgtgtaagtaggttagtttttgtattagatcgatttcgcgatttattaggtaaattatgatagcgcgaaaggcgaattggcgaaaagtgaagtcgtcgtcgttatcgcgtatttgacggtaaaacgttacgtttcgttcgtgggtacgaaatatattagttagtaggagtacgattaggttattgttgatgttcgttaggtcgatgtcgtcgtgattgtcgtaaaagttatagtcgaaagcgttcgtattaattttgtttatattaaagttattgcgttaattagcggacgtatcggtaaatcgattgtgatcgaaggcgtttttgttattaatgggta

SEQ ID NO: 23854 - DNA, 569 bp, Artificial Sequence
  chemically treated genomic DNA (Homo sapiens) CpG-island No: 23854
  unsure (430..)
tacccattaataacaaaaacgccttcgatcacaatcgatttaccgatacgtccgctaattaacgcaataactttaatataaacaaaattaatacgaacgctttcgactataacttttacgacaatcacgacgacatcgacctaacgaacatcaacaataacctaatcgtactcctactaactaatatatttcgtacccacgaacgaaacgtaacgttttaccgtcaaatacgcgataacgacgacgacttcacttttcgccaattcgcctttcgcgctatcataatttacctaataaatcgcgaaatcgatctaatacaaaaactaacctacttacacatcgctaccttcaataaaattacgattcaatacgatcccgctaacctataaacgaacttcgactatacgataaaaaaaatcctctaaaatannctattcgaatacctcaaaaaacaccaatatcgacaaattaatccgcgcgctaattaacgtaatcctatttcaatcaacatatattacgaaaatcgtacgaaataaattacaaacgctacataaaaaacaatataaaac

SEQ ID NO: 23855 - DNA, 569 bp, Artificial Sequence
  chemically treated genomic DNA (Homo sapiens) CpG-island No: 23855
  unsure (430..)
tgtttattagtgataagagcgttttcggttatagtcgatttgtcgatacgttcgttaattggcgtagtgattttggtataagtaagattgatgcgagcgttttcgattgtggtttttgcggtaattacggcggtatcggtttgacgagtattagtaatggtttggtcgtatttttgttggttgatgtatttcgtatttacgagcggaacgtaacgttttatcgttaaatgcgcgatggcggcggcggttttatttttcgttagttcgtttttcgcgttgttataatttgtttgataggtcgcgggatcgatttggtatagggattggtttgtttgtatatcgttgtttttagtgaaattgcgatttagtacgatttcgttaatttgtgggcgaatttcggttatacgataagggggattttttagagtgnnttgttcgagtgttttagaaggtattagtatcgataaattgattcgcgcgttggttggcgtgattttgttttagttagtatatgttgcggaagtcgtgcgaggtggattataggcgttgtataaagggtaatatgaagt

SEQ ID NO: 23856 - DNA, 569 bp, Artificial Sequence
  chemically treated genomic DNA (Homo sapiens) CpG-island No: 23856
  unsure (139..)
acttcatattaccctttatacaacgcctataatccacctcgcacgacttccgcaacatatactaactaaaacaaaatcacgccaaccaacgcgcgaatcaatttatcgatactaataccttctaaaacactcgaacaanncactctaaaaaatcccccttatcgtataaccgaaattcgcccacaaattaacgaaatcgtactaaatcgcaatttcactaaaaacaacgatatacaaacaaaccaatccctataccaaatcgatcccgcgacctatcaaacaaattataacaacgcgaaaaacgaactaacgaaaaataaaaccgccgccgccatcgcgcatttaacgataaaacgttacgttccgctcgtaaatacgaaatacatcaaccaacaaaaatacgaccaaaccattactaatactcgtcaaaccgataccgccgtaattaccgcaaaaaccacaatcgaaaacgctcgcatcaatcttacttataccaaaatcactacgccaattaacgaacgtatcgacaaatcgactataaccgaaaacgctcttatcactaataaaca

SEQ ID NO: 23857 - DNA, 550 bp, Artificial Sequence
  chemically treated genomic DNA (Homo sapiens) CpG-island No: 23857
gtcgatgttagagggatttatttttatggcgcggtgcgcgtggaatattacgcggaacgtattttaaaaggcggtattaatcgcgaatcggagtttcgttttgaggaaatcgggtcgtgttcggtaattttatatgtcgataatgtcgtcggataggtcgcggcgaaaatgggtatggaatatgttattaaaatcgtttagtaaaatggcgttgcggtggtcggtattagtcggatgggttatagcggcgtaattttttattttgtgtagtaggtagttcgcgtcggatttattggtatttcgatgtgttaattcgatttaatggtggtgtcgtttggcggcgcggaaatttattacggtattaattttttggtttttgtcgcgtcgggagaaagcgattaaatttttatttttgatatggcgattatcgtataagtatggggaaaagtgttcgacgttcgttcgcgtaatatgtttatttcggatatttgtggggaattaataattttggacgtatttacgtaggaacgtcgaattttatttttcgaat

SEQ ID NO: 23858 - DNA, 550 bp, Artificial Sequence
  chemically treated genomic DNA (Homo sapiens) CpG-island No: 23858
attcgaaaaataaaattcgacgttcctacgtaaatacgtccaaaattattaattccccacaaatatccgaaataaacatattacgcgaacgaacgtcgaacacttttccccatacttatacgataatcgccatatcaaaaataaaaatttaatcgctttctcccgacgcgacaaaaaccaaaaaattaataccgtaataaatttccgcgccgccaaacgacaccaccattaaatcgaattaacacatcgaaataccaataaatccgacgcgaactacctactacacaaaataaaaaattacgccgctataacccatccgactaataccgaccaccgcaacgccattttactaaacgattttaataacatattccatacccattttcgccgcgacctatccgacgacattatcgacatataaaattaccgaacacgacccgatttcctcaaaacgaaactccgattcgcgattaataccgccttttaaaatacgttccgcgtaatattccacgcgcaccgcgccataaaaataaatccctctaacatcgac

SEQ ID NO: 23859 - DNA, 550 bp, Artificial Sequence
  chemically treated genomic DNA (Homo sapiens) CpG-island No: 23859
gttcggaaggtaaaattcgacgtttttacgtgggtacgtttagggttgttagttttttataggtattcgggatagatatattacgcgagcgggcgtcgagtatttttttttatgtttgtacggtagtcgttatattaaaggtaaggatttggtcgttttttttcggcgcggtaaaggttagggggttagtatcgtagtaaattttcgcgtcgttaaacggtattattattggatcggattggtatatcgaaatgttaatgaattcggcgcgggttgtttgttgtataaaataagagattgcgtcgttgtgatttattcggttgatatcgattatcgtaacgttattttgttgggcggttttgatggtatgttttatatttattttcgtcgcgatttgttcggcggtattgtcggtatgtaaaattgtcgagtacggttcggtttttttaagacgaaatttcggttcgcggttggtgtcgttttttgaaatgcgtttcgcgtagtattttacgcgtatcgcgttatgagagtggatttttttggtatcggt

SEQ ID NO: 23860 - DNA, 550 bp, Artificial Sequence
  chemically treated genomic DNA (Homo sapiens) CpG-island No: 23860
accgataccaaaaaaatccactctcataacgcgatacgcgtaaaatactacgcgaaacgcatttcaaaaaacgacaccaaccgcgaaccgaaatttcgtcttaaaaaaaccgaaccgtactcgacaattttacataccgacaataccgccgaacaaatcgcgacgaaaataaatataaaacataccatcaaaaccgcccaacaaaataacgttacgataatcgatatcaaccgaataaatcacaacgacgcaatctcttattttatacaacaaacaacccgcgccgaattcattaacatttcgatataccaatccgatccaataataataccgtttaacgacgcgaaaatttactacgatactaaccccctaacctttaccgcgccgaaaaaaaacgaccaaatccttacctttaatataacgactaccgtacaaacataaaaaaaaatactcgacgcccgctcgcgtaatatatctatcccgaatacctataaaaaactaacaaccctaaacgtacccacgtaaaaacgtcgaattttaccttccgaac

SEQ ID NO: 23861 - DNA, 768 bp, Artificial Sequence
  chemically treated genomic DNA (Homo sapiens) CpG-island No: 23861
cgttattttagttaggtattcgggcgatatgacgtagtatggcggtagtattgtttagggtttagtcggggtgcgtattggtgtttttatcggcgtggtttgttcggtgtgtttcggcggagtgacgttcggttattcggttaattttttgttcggtgtaaaggtttttttcggtgaaatcgatatcgttttgttcggttcgttgtcgtttattttttttcgtatttatagtagttatcggataaaaacgttcgcgtcggtggggagtttcggtttcggttggaaaatgtttgcggatattcgtttatagttgcgcgataatatattgatatttagtgataacggcggtagaagtttgtattttgagtatttgtttttcggtgaggacggttatagtcgtagcgagttattgtggttggtgcgcggcggcgtggcgaaattggatgaaggttatcggttggtcgtattttggtaggcgttgtcggaagaatttcgtttaagttcgtatcgttatttggcgataaatagttcgtaggggtcgtggtggttgttcggttggtgtgagcgggtgtcggaagcggatgaagtgttgtttgcgtttttgtcggcgtatcgggtattgaacgggttggtggatttaagagtatcgagtcgaagaatacggcggggcggagttcggagagtaacggaatagtttagagtttcgtgaaaacgataaagcgtgattatatgggtattatgtttaaattagacgggttagcggtagta

SEQ ID NO: 23862 - DNA, 768 bp, Artificial Sequence
  chemically treated genomic DNA (Homo sapiens) CpG-island No: 23862
tactaccgctaacccgtctaatttaaacataatacccatataatcacgctttatcgttttcacgaaactctaaactattccgttactctccgaactccgccccgccgtattcttcgactcgatactcttaaatccaccaacccgttcaatacccgatacgccgacaaaaacgcaaacaacacttcatccgcttccgacacccgctcacaccaaccgaacaaccaccacgacccctacgaactatttatcgccaaataacgatacgaacttaaacgaaattcttccgacaacgcctaccaaaatacgaccaaccgataaccttcatccaatttcgccacgccgccgcgcaccaaccacaataactcgctacgactataaccgtcctcaccgaaaaacaaatactcaaaatacaaacttctaccgccgttatcactaaatatcaatatattatcgcgcaactataaacgaatatccgcaaacattttccaaccgaaaccgaaactccccaccgacgcgaacgtttttatccgataactactataaatacgaaaaaaaataaacgacaacgaaccgaacaaaacgatatcgatttcaccgaaaaaaacctttacaccgaacaaaaaattaaccgaataaccgaacgtcactccgccgaaacacaccgaacaaaccacgccgataaaaacaccaatacgcaccccgactaaaccctaaacaatactaccgccatactacgtcatatcgcccgaatacctaactaaaataacg

SEQ ID NO: 23863 - DNA, 768 bp, Artificial Sequence
  chemically treated genomic DNA (Homo sapiens) CpG-island No: 23863
tgttgtcgttaattcgtttggtttgggtatgatatttatgtagttacgttttatcgtttttacgaagttttaagttatttcgttatttttcggatttcgtttcgtcgtgtttttcggttcggtatttttgggtttattagttcgtttagtattcggtacgtcggtaggggcgtaggtagtattttattcgttttcggtattcgtttatattaatcgagtagttattacggtttttgcggattgtttgtcgttagataacgatgcggatttaagcggagttttttcggtagcgtttgttagagtgcggttagtcggtgatttttatttagtttcgttacgtcgtcgcgtattagttatagtgattcgttgcggttgtaatcgtttttatcgggaaataggtgtttaaaatataggtttttgtcgtcgttattattgagtattagtgtgttatcgcgtagttgtaagcggatattcgtaggtattttttagtcggggtcgaggttttttatcggcgcgggcgtttttgttcggtaattgttgtaggtgcgggagaggatgaacggtagcgggtcgggtagggcgatgtcggttttatcgggaaggatttttgtatcgagtaggggattgatcggatggtcggacgttatttcgtcggggtatatcgaataggttacgtcggtgggggtattaatgcgtatttcggttgaattttgaataatgttatcgttatattgcgttatgtcgttcgggtatttagttagggtagcg

SEQ ID NO: 23864 - DNA, 768 bp, Artificial Sequence
  chemically treated genomic DNA (Homo sapiens) CpG-island No: 23864
cgctaccctaactaaatacccgaacgacataacgcaatataacgataacattattcaaaattcaaccgaaatacgcattaatacccccaccgacgtaacctattcgatataccccgacgaaataacgtccgaccatccgatcaatcccctactcgatacaaaaatccttcccgataaaaccgacatcgccctacccgacccgctaccgttcatcctctcccgcacctacaacaattaccgaacaaaaacgcccgcgccgataaaaaacctcgaccccgactaaaaaatacctacgaatatccgcttacaactacgcgataacacactaatactcaataataacgacgacaaaaacctatattttaaacacctatttcccgataaaaacgattacaaccgcaacgaatcactataactaatacgcgacgacgtaacgaaactaaataaaaatcaccgactaaccgcactctaacaaacgctaccgaaaaaactccgcttaaatccgcatcgttatctaacgacaaacaatccgcaaaaaccgtaataactactcgattaatataaacgaataccgaaaacgaataaaatactacctacgcccctaccgacgtaccgaatactaaacgaactaataaacccaaaaataccgaaccgaaaaacacgacgaaacgaaatccgaaaaataacgaaataacttaaaacttcgtaaaaacgataaaacgtaactacataaatatcatacccaaaccaaacgaattaacgacaaca

SEQ ID NO: 23865 - DNA, 735 bp, Artificial Sequence
  chemically treated genomic DNA (Homo sapiens) CpG-island No: 23865
  unsure (635, 644, 677)
acggttttcgattaattgaggatggaattcgtaatattttagcgtcgaggtttcgtcggtaatagtcgcgtttttatttagagcgcgtgttatatagttatgtaatagtttacgaaggaaaaattgcggggttagcgcgtgcgtataagtcgttgcgatcgtttggtatgagtaatggtatttttgtagagttcgtgtacgttttatagtatcgcgtaatggttcgtagagtatttttttcgtgcgcgtggattagtttaacgttattaatcgcgtaagtgttattattatgtaaataagtataatcggtgttatgtattaatatttattgtgcgtcgttatcggtttttagttttgttagtacggaatcggtacgtttattatcgttatgtatagcgttgatttgcggatgattcgttagaggaagttgtgtaaaacggttatcgttaggatttatggtaatgtcgatacgttttatcggggaatgcgttagtagcgtatgtatcgagtgtttaagaatggtttgattatcgattgagagatattgtttaggatatttcgtttgtattcgacggttatattcggtcgtcggaattacggcgtaaatatttaaatgagtggttgcggggagtttnttgcgtagngttttttagtggggtgatgtatttttttggcgnttttcgtttttttagtatttttatcggaggtatagtagggattttttgtttacgtggg

SEQ ID NO: 23866 - DNA, 735 bp, Artificial Sequence
  chemically treated genomic DNA (Homo sapiens) CpG-island No: 23866
  unsure (59, 92, 101)
cccacgtaaacaaaaaatccctactatacctccgataaaaatactaaaaaaacgaaaancgccaaaaaaatacatcaccccactaaaaaacnctacgcaanaaactccccgcaaccactcatttaaatatttacgccgtaattccgacgaccgaatataaccgtcgaatacaaacgaaatatcctaaacaatatctctcaatcgataatcaaaccattcttaaacactcgatacatacgctactaacgcattccccgataaaacgtatcgacattaccataaatcctaacgataaccgttttacacaacttcctctaacgaatcatccgcaaatcaacgctatacataacgataataaacgtaccgattccgtactaacaaaactaaaaaccgataacgacgcacaataaatattaatacataacaccgattatacttatttacataataataacacttacgcgattaataacgttaaactaatccacgcgcacgaaaaaaatactctacgaaccattacgcgatactataaaacgtacacgaactctacaaaaataccattactcataccaaacgatcgcaacgacttatacgcacgcgctaaccccgcaatttttccttcgtaaactattacataactatataacacgcgctctaaataaaaacgcgactattaccgacgaaacctcgacgctaaaatattacgaattccatcctcaattaatcgaaaaccgt

SEQ ID NO: 23867 - DNA, 735 bp, Artificial Sequence
  chemically treated genomic DNA (Homo sapiens) CpG-island No: 23867
  unsure (59, 92, 101)
tttacgtgggtagaaaatttttgttgtattttcgatggggatattaggaaagcgggggncgttaaaaaaatgtattattttattgagaagtnttacgtaanaggtttttcgtaattatttatttggatgtttgcgtcgtggtttcggcggtcggatgtggtcgtcgaatgtaaacggaatgttttaagtaatattttttaatcggtaattaaattatttttgagtattcggtgtatgcgttgttggcgtatttttcggtgaaacgtgtcggtattgttataagttttggcgatagtcgttttgtataattttttttggcgaattattcgtaaattaacgttgtatatggcggtgatgagcgtgtcgatttcgtgttggtagggttgaaagtcggtggcgacgtataatgggtattggtgtatgatatcgattgtgtttgtttgtatgatgatgatatttgcgcgattggtggcgttgagttaatttacgcgtacgggggggatgttttgcggattattgcgcgatattatgaaacgtgtacgaattttgtaaaaatgttattgtttatattagacgatcgtaacggtttatgcgtacgcgttgatttcgtaatttttttttcgtgagttgttatatgattgtgtgatacgcgttttaaatgaaggcgcgattattatcgacgaagtttcggcgttggaatattgcggattttatttttagttggtcgaaggtcgt

SEQ ID NO: 23868 - DNA, 735 bp, Artificial Sequence
  chemically treated genomic DNA (Homo sapiens) CpG-island No: 23868
  unsure (635, 644, 677)
acgaccttcgaccaactaaaaataaaatccgcaatattccaacgccgaaacttcgtcgataataatcgcgccttcatttaaaacgcgtatcacacaatcatataacaactcacgaaaaaaaaattacgaaatcaacgcgtacgcataaaccgttacgatcgtctaatataaacaataacatttttacaaaattcgtacacgtttcataatatcgcgcaataatccgcaaaacatcccccccgtacgcgtaaattaactcaacgccaccaatcgcgcaaatatcatcatcatacaaacaaacacaatcgatatcatacaccaatacccattatacgtcgccaccgactttcaaccctaccaacacgaaatcgacacgctcatcaccgccatatacaacgttaatttacgaataattcgccaaaaaaaattatacaaaacgactatcgccaaaacttataacaataccgacacgtttcaccgaaaaatacgccaacaacgcatacaccgaatactcaaaaataatttaattaccgattaaaaaatattacttaaaacattccgtttacattcgacgaccacatccgaccgccgaaaccacgacgcaaacatccaaataaataattacgaaaaacctnttacgtaanacttctcaataaaataatacatttttttaacgncccccgctttcctaatatccccatcgaaaatacaacaaaaattttctacccacgtaaa

SEQ ID NO: 23869 - DNA, 1114 bp, Artificial Sequence
  chemically treated genomic DNA (Homo sapiens) CpG-island No: 23869
  unsure (1028)
gagatgcgcggtattacggttggtggcggtagcgcgtaaggagaattgcggggttcggggatgatcgcgttagtattcgtgatattgttaggtaaaatttatttattgagaggaggaataattatagtttgcggcgacggagtggattaagagggttgggtgcgggggatttagatgcgcgggcgttgttttaagacgatcgtattgggcggtgggtacgcggggaattcgaagggtcgcggatttttattaatgtttatgggaagaaatttgggaaacgggtagacggtacgagcgtttagggggtgtggttgggcgggatacgggcggcgttacggaaaaataagtatatgcgtattacgtcgcgaggacgaaggtaaagtcgtaaatagttcgcgtttcgtgtgttgggatagttgattatagcgacgggttttatcgcggtaataatagacggtgcgtcggcgaacgtttaaatgggttacgggtttgtttatggtatgtaatgtatggattgggttattagaagaaggaagaggatggcgcggggggtgcggggacggggagcgattggtgacgtttgcgagaagaggaaggagggacgtatagtgtaggtacgtagtgttaacggcgggatcgacggggcgcgaggggtgcggcggggcgaagggggttattaagcgaggaaggttatagtcggggcggatggtatcgggaattgggtacggggtagtggacgtcgcggaaggaggtatgcgacggaaattattgcgaagcggcgtagcggcgagtcgaacgtcgttagttagaggttaggggggagtgaggttaggggtgggtgcgggggcggtacggtagtgtgggagatgaagttattgagatcgttgtggaacgggtaataggggtgtgatagaagaaatcggattacggggcgcggcgcgcggggcggtgcggttgtgaatggcgcgtgggaaatattttttgggggaatttacgggggtgaaagattgcgatgcgcgtatacggtntgggttatttcggaagtagcggttaacgggaggggatttggggggatgggatagttataagttgggaaggtgaggtaggtgagggg

SEQ ID NO: 23870 - DNA, 1114 bp, Artificial Sequence
  chemically treated genomic DNA (Homo sapiens) CpG-island No: 23870
  unsure (87)
cccctcacctacctcaccttcccaacttataactatcccatccccccaaatcccctcccgttaaccgctacttccgaaataacccanaccgtatacgcgcatcgcaatctttcacccccgtaaattcccccaaaaaatatttcccacgcgccattcacaaccgcaccgccccgcgcgccgcgccccgtaatccgatttcttctatcacacccctattacccgttccacaacgatctcaataacttcatctcccacactaccgtaccgcccccgcacccacccctaacctcactcccccctaacctctaactaacgacgttcgactcgccgctacgccgcttcgcaataatttccgtcgcatacctccttccgcgacgtccactaccccgtacccaattcccgataccatccgccccgactataaccttcctcgcttaataacccccttcgccccgccgcacccctcgcgccccgtcgatcccgccgttaacactacgtacctacactatacgtccctccttcctcttctcgcaaacgtcaccaatcgctccccgtccccgcaccccccgcgccatcctcttccttcttctaataacccaatccatacattacataccataaacaaacccgtaacccatttaaacgttcgccgacgcaccgtctattattaccgcgataaaacccgtcgctataatcaactatcccaacacacgaaacgcgaactatttacgactttaccttcgtcctcgcgacgtaatacgcatatacttatttttccgtaacgccgcccgtatcccgcccaaccacaccccctaaacgctcgtaccgtctacccgtttcccaaatttcttcccataaacattaataaaaatccgcgacccttcgaattccccgcgtacccaccgcccaatacgatcgtcttaaaacaacgcccgcgcatctaaatcccccgcacccaaccctcttaatccactccgtcgccgcaaactataattattcctcctctcaataaataaattttacctaacaatatcacgaatactaacgcgatcatccccgaaccccgcaattctccttacgcgctaccgccaccaaccgtaataccgcgcatctc

SEQ ID NO: 23871 - DNA, 1114 bp, Artificial Sequence
  chemically treated genomic DNA (Homo sapiens) CpG-island No: 23871
  unsure (87)
ttttttatttgttttatttttttaatttgtggttattttatttttttaggttttttttcgttgatcgttattttcgaagtggtttanatcgtgtgcgcgtatcgtaattttttattttcgtgggtttttttaaaaaatattttttacgcgttatttatagtcgtatcgtttcgcgcgtcgcgtttcgtagttcggttttttttgttatatttttattgttcgttttataacggttttagtggttttattttttatattgtcgtgtcgttttcgtatttatttttagttttatttttttttagtttttaattagcggcgttcggttcgtcgttgcgtcgtttcgtagtggttttcgtcgtatattttttttcgcggcgtttattgtttcgtatttagttttcggtattattcgtttcgattatagtttttttcgtttagtaatttttttcgtttcgtcgtatttttcgcgtttcgtcggtttcgtcgttggtattacgtatttgtattgtacgtttttttttttttttttcgtaaacgttattaatcgtttttcgttttcgtatttttcgcgttattttttttttttttttagtggtttagtttatgtattgtatattataagtaaattcgtagtttatttaagcgttcgtcggcgtatcgtttgttgttatcgcggtaaaattcgtcgttatagttaattgttttagtatacggggcgcgggttatttacggttttattttcgttttcgcggcgtagtacgtatatgtttgttttttcgtagcgtcgttcgtatttcgtttagttatattttttaggcgttcgtgtcgtttattcgttttttaagtttttttttataaatattagtaggggttcgcggtttttcgggtttttcgcgtgtttatcgtttaatacggtcgttttagggtagcgttcgcgtatttggatttttcgtatttaatttttttggtttatttcgtcgtcgtaggttgtggttatttttttttttagtgggtaaattttatttagtagtattacgaatgttggcgcggttattttcgggtttcgtaattttttttgcgcgttatcgttattagtcgtagtatcgcgtatttt

SEQ ID NO: 23872 - DNA, 1114 bp, Artificial Sequence
  chemically treated genomic DNA (Homo sapiens) CpG-island No: 23872
  unsure (1028)
aaaatacgcgatactacgactaataacgataacgcgcaaaaaaaattacgaaacccgaaaataaccgcgccaacattcgtaatactactaaataaaatttacccactaaaaaaaaaaataaccacaacctacgacgacgaaataaaccaaaaaaattaaatacgaaaaatccaaatacgcgaacgctaccctaaaacgaccgtattaaacgataaacacgcgaaaaacccgaaaaaccgcgaacccctactaatatttataaaaaaaaacttaaaaaacgaataaacgacacgaacgcctaaaaaatataactaaacgaaatacgaacgacgctacgaaaaaacaaacatatacgtactacgccgcgaaaacgaaaataaaaccgtaaataacccgcgccccgtatactaaaacaattaactataacgacgaattttaccgcgataacaacaaacgatacgccgacgaacgcttaaataaactacgaatttacttataatatacaatacataaactaaaccactaaaaaaaaaaaaaaaataacgcgaaaaatacgaaaacgaaaaacgattaataacgtttacgaaaaaaaaaaaaaaaaacgtacaatacaaatacgtaataccaacgacgaaaccgacgaaacgcgaaaaatacgacgaaacgaaaaaaattactaaacgaaaaaaactataatcgaaacgaataataccgaaaactaaatacgaaacaataaacgccgcgaaaaaaaatatacgacgaaaaccactacgaaacgacgcaacgacgaaccgaacgccgctaattaaaaactaaaaaaaaataaaactaaaaataaatacgaaaacgacacgacaatataaaaaataaaaccactaaaaccgttataaaacgaacaataaaaatataacaaaaaaaaccgaactacgaaacgcgacgcgcgaaacgatacgactataaataacgcgtaaaaaatattttttaaaaaaacccacgaaaataaaaaattacgatacgcgcacacgatntaaaccacttcgaaaataacgatcaacgaaaaaaaacctaaaaaaataaaataaccacaaattaaaaaaataaaacaaataaaaaa

SEQ ID NO: 23873 - DNA, 784 bp, Artificial Sequence
  chemically treated genomic DNA (Homo sapiens) CpG-island No: 23873
gtggcggagtcgggagataatcggttcggagtttttatcgttttttaggttgggttcgggttttttcgcggcgttttttttttcggtttagattcggttagttcgggttttttttttcggttttattttatgataatcgtatttttcggatgttttagacgtcgcggaattgatttgaaatgtagttttgttagcggattcgggtgggtatcgagggcgagggcgcgttttttatttcgtacgcggtttttttttcggtcgttttcgtttcggttggtcgttagcggggaggggcgggtttcggagtttcgcggttttatttacgttgttggttttcgtcgcgggttcggttttttacggcggggttatcggggtcgtcgggttgtttgtttcgtttcgtcgtcgtcggtcggagtttgttcgttcgttcgcgtttttttaggtgtcggagtcgcgatgtggagaggttggcgagggggacggacggtaggagggagggagcggagtcgtgagttggagaggaggacgagggaggagcgggaagggcggggaacggcggcggtttgcggcgcgcgagcggcgggcgcggaagtcggaaggaagcgcggaatttaaattgattagatttagcgtagcgagcgtttcgggaattcgagagatgggacgaatatcggattatacggtttttattgtataagcgggatattaaaaatcggataaggataatatacgtttatatttataaaagtacgcgtagtcgataattgaattttattttgatttt

SEQ ID NO: 23874 - DNA, 784 bp, Artificial Sequence
  chemically treated genomic DNA (Homo sapiens) CpG-island No: 23874
aaaatcaaaataaaattcaattatcgactacgcgtacttttataaatataaacgtatattatccttatccgatttttaatatcccgcttatacaataaaaaccgtataatccgatattcgtcccatctctcgaattcccgaaacgctcgctacgctaaatctaatcaatttaaattccgcgcttccttccgacttccgcgcccgccgctcgcgcgccgcaaaccgccgccgttccccgcccttcccgctcctccctcgtcctcctctccaactcacgactccgctccctccctcctaccgtccgtccccctcgccaacctctccacatcgcgactccgacacctaaaaaaacgcgaacgaacgaacaaactccgaccgacgacgacgaaacgaaacaaacaacccgacgaccccgataaccccgccgtaaaaaaccgaacccgcgacgaaaaccaacaacgtaaataaaaccgcgaaactccgaaacccgcccctccccgctaacgaccaaccgaaacgaaaacgaccgaaaaaaaaaccgcgtacgaaataaaaaacgcgccctcgccctcgatacccacccgaatccgctaacaaaactacatttcaaatcaattccgcgacgtctaaaacatccgaaaaatacgattatcataaaataaaaccgaaaaaaaaaacccgaactaaccgaatctaaaccgaaaaaaaaaacgccgcgaaaaaacccgaacccaacctaaaaaacgataaaaactccgaaccgattatctcccgactccgccac

SEQ ID NO: 23875 - DNA, 784 bp, Artificial Sequence
  chemically treated genomic DNA (Homo sapiens) CpG-island No: 23875
agaattagaatggggtttaattgtcggttgcgcgtgtttttgtgggtgtagacgtgtgttgtttttgttcggtttttaatgtttcgtttgtgtagtgggggtcgtgtggttcggtgttcgttttatttttcgggttttcgggacgttcgttgcgttgagtttgattagtttgggtttcgcgttttttttcggttttcgcgttcgtcgttcgcgcgtcgtaggtcgtcgtcgtttttcgtttttttcgtttttttttcgtttttttttttagtttacggtttcgtttttttttttttgtcgttcgtttttttcgttagtttttttatatcgcggtttcggtatttgaagggacgcgggcgggcgggtaagtttcgatcggcggcgacggggcgggatagatagttcggcggtttcgatggtttcgtcgtgagaggtcggattcgcggcggggattagtagcgtgagtggggtcgcggggtttcgggattcgttttttttcgttggcggttagtcggggcgggagcggtcggggagagggtcgcgtgcggggtggggggcgcgttttcgttttcggtgtttattcgggttcgttaataaagttatattttagattaatttcgcggcgtttggagtattcgaaggatacggttgttatgggatggggtcgagagaggaagttcgggttggtcgggtttgggtcggggaggggggcgtcgcgggaaagttcgagtttagtttgagggacggtgggggtttcgggtcgattgtttttcggtttcgttat

SEQ ID NO: 23876 - DNA, 784 bp, Artificial Sequence
  chemically treated genomic DNA (Homo sapiens) CpG-island No: 23876
ataacgaaaccgaaaaacaatcgacccgaaacccccaccgtccctcaaactaaactcgaactttcccgcgacgcccccctccccgacccaaacccgaccaacccgaacttcctctctcgaccccatcccataacaaccgtatccttcgaatactccaaacgccgcgaaattaatctaaaatataactttattaacgaacccgaataaacaccgaaaacgaaaacgcgccccccaccccgcacgcgaccctctccccgaccgctcccgccccgactaaccgccaacgaaaaaaaacgaatcccgaaaccccgcgaccccactcacgctactaatccccgccgcgaatccgacctctcacgacgaaaccatcgaaaccgccgaactatctatcccgccccgtcgccgccgatcgaaacttacccgcccgcccgcgtcccttcaaataccgaaaccgcgatataaaaaaactaacgaaaaaaacgaacgacaaaaaaaaaaaaacgaaaccgtaaactaaaaaaaaaaacgaaaaaaaaacgaaaaaaacgaaaaacgacgacgacctacgacgcgcgaacgacgaacgcgaaaaccgaaaaaaaacgcgaaacccaaactaatcaaactcaacgcaacgaacgtcccgaaaacccgaaaaataaaacgaacaccgaaccacacgacccccactacacaaacgaaacattaaaaaccgaacaaaaacaacacacgtctacacccacaaaaacacgcgcaaccgacaattaaaccccattctaattct

SEQ ID NO: 23877 - DNA, 847 bp, Artificial Sequence
  chemically treated genomic DNA (Homo sapiens) CpG-island No: 23877
gcgcggcggggttttagatggcgtcgagttttgtttggttcgcgggggcggttcgcggttgtgtttgtgttggttcgcgtgttgtggttgtttagtgagtagtaagttttgttgtcgtcgtcgggtatagtggcggcgagttcgagcgtagcgcgtcgtgcgtttacgtaggtttaggaaaggtgtgttttcggtcgttagcgtttcgttcgcgcgttcgcgtcgtcgttcgacgtcgaggttgagtcgtcgttcgagtcgtttttagcgatagcgagtttttcgtcgttcgtgcgcgttgcgtcgttagtcgttgaggcgcgagcggcgttagcgtcggggtttcgtcgacgttttgcggacgtatcgcgcgcgcgcggtcgcggcggcggcgggggcgcgtatttttggtggtttcgtattcgtcgttttcggggatgcggaaggggttggtaggtagttgtttaggttgtcgtcgagcgcgtaggtttcgcgtcgcggttcgggttcggcgcggggtaatagtagttgttatagttgcgttgtatgtttgcgtcggttcgggttcgggttcgggatagggtttaggatcggggggtgtagggttattagaacggatagatgttcggttagtcggtaattgatgggtgtcgtcgagaaatagatacggtgtgcgtcgagttggggtacgtgattttaaagttggtatttgcgtggttagcgagtagtggaagtttacgggcgagaggcgcggggttgtggttaggtttaatacgtatttgcggggagaggtagaggtatggttagggttagttcggttcggcgcgggggagggggggttgggggt

SEQ ID NO: 23878 - DNA, 847 bp, Artificial Sequence
  chemically treated genomic DNA (Homo sapiens) CpG-island No: 23878
acccccaaccccccctcccccgcgccgaaccgaactaaccctaaccatacctctacctctccccgcaaatacgtattaaacctaaccacaaccccgcgcctctcgcccgtaaacttccactactcgctaaccacgcaaataccaactttaaaatcacgtaccccaactcgacgcacaccgtatctatttctcgacgacacccatcaattaccgactaaccgaacatctatccgttctaataaccctacaccccccgatcctaaaccctatcccgaacccgaacccgaaccgacgcaaacatacaacgcaactataacaactactattaccccgcgccgaacccgaaccgcgacgcgaaacctacgcgctcgacgacaacctaaacaactacctaccaaccccttccgcatccccgaaaacgacgaatacgaaaccaccaaaaatacgcgcccccgccgccgccgcgaccgcgcgcgcgcgatacgtccgcaaaacgtcgacgaaaccccgacgctaacgccgctcgcgcctcaacgactaacgacgcaacgcgcacgaacgacgaaaaactcgctatcgctaaaaacgactcgaacgacgactcaacctcgacgtcgaacgacgacgcgaacgcgcgaacgaaacgctaacgaccgaaaacacacctttcctaaacctacgtaaacgcacgacgcgctacgctcgaactcgccgccactatacccgacgacgacaacaaaacttactactcactaaacaaccacaacacgcgaaccaacacaaacacaaccgcgaaccgcccccgcgaaccaaacaaaactcgacgccatctaaaaccccgccgcgc

SEQ ID NO: 23879 - DNA, 847 bp, Artificial Sequence
  chemically treated genomic DNA (Homo sapiens) CpG-island No: 23879
atttttaattttttttttttcgcgtcggatcgggttggttttggttatgtttttgttttttttcgtaagtacgtgttggatttgattatagtttcgcgtttttcgttcgtggatttttattattcgttggttacgtaggtgttaattttgagattacgtattttaattcggcgtatatcgtgtttatttttcggcggtatttattagttatcgattggtcgaatatttattcgttttagtaattttgtatttttcggttttggattttgtttcgggttcgggttcgggtcggcgtagatatgtagcgtagttatgatagttattattatttcgcgtcgggttcggatcgcggcgcgggatttgcgcgttcggcggtagtttggatagttgtttgttagtttttttcgtattttcgaggacgacgagtacgagattattaggagtgcgcgttttcgtcgtcgtcgcggtcgcgcgcgcgcggtgcgttcgtaggacgtcggcggggtttcggcgttggcgtcgttcgcgttttaacggttggcggcgtagcgcgtacgggcggcgagggattcgttgtcgttgagagcggttcgggcggcggtttagtttcggcgtcggacgacgacgcggacgcgcggacggggcgttggcggtcgagagtatattttttttgggtttgcgtgggcgtacgacgcgttgcgttcggattcgtcgttattgtgttcggcggcgatagtaggatttattatttattggatagttatagtacgcgggttagtatagatatagtcgcgggtcgttttcgcgggttaagtaggattcggcgttatttagggtttcgtcgcgt

SEQ ID NO: 23880 - DNA, 847 bp, Artificial Sequence
  chemically treated genomic DNA (Homo sapiens) CpG-island No: 23880
acgcgacgaaaccctaaataacgccgaatcctacttaacccgcgaaaacgacccgcgactatatctatactaacccgcgtactataactatccaataaataataaatcctactatcgccgccgaacacaataacgacgaatccgaacgcaacgcgtcgtacgcccacgcaaacccaaaaaaaatatactctcgaccgccaacgccccgtccgcgcgtccgcgtcgtcgtccgacgccgaaactaaaccgccgcccgaaccgctctcaacgacaacgaatccctcgccgcccgtacgcgctacgccgccaaccgttaaaacgcgaacgacgccaacgccgaaaccccgccgacgtcctacgaacgcaccgcgcgcgcgcgaccgcgacgacgacgaaaacgcgcactcctaataatctcgtactcgtcgtcctcgaaaatacgaaaaaaactaacaaacaactatccaaactaccgccgaacgcgcaaatcccgcgccgcgatccgaacccgacgcgaaataataataactatcataactacgctacatatctacgccgacccgaacccgaacccgaaacaaaatccaaaaccgaaaaatacaaaattactaaaacgaataaatattcgaccaatcgataactaataaataccgccgaaaaataaacacgatatacgccgaattaaaatacgtaatctcaaaattaacacctacgtaaccaacgaataataaaaatccacgaacgaaaaacgcgaaactataatcaaatccaacacgtacttacgaaaaaaaacaaaaacataaccaaaaccaacccgatccgacgcgaaaaaaaaaaaattaaaaat

SEQ ID NO: 23881 - DNA, 762 bp, Artificial Sequence
  chemically treated genomic DNA (Homo sapiens) CpG-island No: 23881
tatacgtttcgcggttcgagtcggtggagggggggcgagggtggagggcgcgggagggaagagttaaggttcgttgtttttttttttcggagggtgtgatcgttataagaaaggcgtcgcgttcgggtattgaggttgtaggcggcgggggcgagcgcggtagcggagagttgaggtcgttttatcgtttgggatttcgtgcgaatgtcggagtttaggaggaggggtcgcggtcgcggtaagaagtattcgaggggaggaagcgggagagggagttcgatttcggggagaaaggtagggattttcgcgcgtttagaaattcggtttttttgggagaaatttgtcgttttttattcgtttttagcgtagcgcgggtgagtttaggttgcgttagcggcgtcgcggtgataggtatcgagggcgcgcgtgtttgcgtgcgagcgggtttcgcggtcgggagagtaaggggttgcgtgttaggagttcgatagtggtttgcgcgttttttttcgggcggtcgcgtttttacgtaggggcgggtaagagcgttgtacgttcggtatcggtttgtaggcgagtagttttgagcgagcgggatggagtcgcggatatcgatagaaaggcggcggttgattagacgttgggttcggtttggtcgtcgagcgtttcgggagttgttattgtttttttttttcggagagatcggagttttcgggtttgtttttatttatgtgttatatttttttcgttttgttcggttat

SEQ ID NO: 23882 - DNA, 762 bp, Artificial Sequence
  chemically treated genomic DNA (Homo sapiens) CpG-island No: 23882
ataaccgaacaaaacgaaaaaaatataacacataaataaaaacaaacccgaaaactccgatctctccgaaaaaaaaaaacaataacaactcccgaaacgctcgacgaccaaaccgaacccaacgtctaatcaaccgccgcctttctatcgatatccgcgactccatcccgctcgctcaaaactactcgcctacaaaccgataccgaacgtacaacgctcttacccgcccctacgtaaaaacgcgaccgcccgaaaaaaaacgcgcaaaccactatcgaactcctaacacgcaaccccttactctcccgaccgcgaaacccgctcgcacgcaaacacgcgcgccctcgatacctatcaccgcgacgccgctaacgcaacctaaactcacccgcgctacgctaaaaacgaataaaaaacgacaaatttctcccaaaaaaaccgaatttctaaacgcgcgaaaatccctacctttctccccgaaatcgaactccctctcccgcttcctcccctcgaatacttcttaccgcgaccgcgacccctcctcctaaactccgacattcgcacgaaatcccaaacgataaaacgacctcaactctccgctaccgcgctcgcccccgccgcctacaacctcaatacccgaacgcgacgcctttcttataacgatcacaccctccgaaaaaaaaaaacaacgaaccttaactcttccctcccgcgccctccaccctcgccccccctccaccgactcgaaccgcgaaacgtata

SEQ ID NO: 23883 - DNA, 762 bp, Artificial Sequence
  chemically treated genomic DNA (Homo sapiens) CpG-island No: 23883
gtggtcgagtagaacggagggggtgtggtatatgggtaggggtaagttcgagggtttcgattttttcgagaagggaaggtagtgatagttttcggagcgttcggcggttaggtcgggtttagcgtttgattagtcgtcgtttttttgtcggtattcgcggttttatttcgttcgtttagggttgttcgtttgtaggtcggtatcgggcgtgtagcgtttttgttcgtttttgcgtggggacgcggtcgttcggggagaggcgcgtaagttattgtcgggtttttggtacgtagttttttgttttttcggtcgcgagattcgttcgtacgtaggtacgcgcgttttcggtgtttgttatcgcggcgtcgttagcgtagtttagatttattcgcgttgcgttgggggcgggtgaggggcggtaggttttttttagggaaatcgggtttttgggcgcgcggaggtttttattttttttttcgggatcgggttttttttttcgtttttttttttcgggtgttttttgtcgcggtcgcggtttttttttttggatttcgatattcgtacggggttttaggcggtgggacggttttagtttttcgttgtcgcgttcgttttcgtcgtttgtagttttagtgttcgagcgcggcgttttttttatggcggttatatttttcgggggaggggagtagcgagttttaatttttttttttcgcgttttttattttcgttttttttttatcggttcgggtcgcggggcgtgtg

SEQ ID NO: 23884 - DNA, 762 bp, Artificial Sequence
  chemically treated genomic DNA (Homo sapiens) CpG-island No: 23884
cacacgccccgcgacccgaaccgataaaaaaaaaacgaaaataaaaaacgcgaaaaaaaaaaattaaaactcgctactcccctcccccgaaaaatataaccgccataaaaaaaacgccgcgctcgaacactaaaactacaaacgacgaaaacgaacgcgacaacgaaaaactaaaaccgtcccaccgcctaaaaccccgtacgaatatcgaaatccaaaaaaaaaaaccgcgaccgcgacaaaaaacacccgaaaaaaaaaaacgaaaaaaaaaacccgatcccgaaaaaaaaaataaaaacctccgcgcgcccaaaaacccgatttccctaaaaaaaacctaccgcccctcacccgcccccaacgcaacgcgaataaatctaaactacgctaacgacgccgcgataacaaacaccgaaaacgcgcgtacctacgtacgaacgaatctcgcgaccgaaaaaacaaaaaactacgtaccaaaaacccgacaataacttacgcgcctctccccgaacgaccgcgtccccacgcaaaaacgaacaaaaacgctacacgcccgataccgacctacaaacgaacaaccctaaacgaacgaaataaaaccgcgaataccgacaaaaaaacgacgactaatcaaacgctaaacccgacctaaccgccgaacgctccgaaaactatcactaccttcccttctcgaaaaaatcgaaaccctcgaacttacccctacccatataccacaccccctccgttctactcgaccac

SEQ ID NO: 23885 - DNA, 571 bp, Artificial Sequence
  chemically treated genomic DNA (Homo sapiens) CpG-island No: 23885
  unsure (48, 407)
gcgaatggcgtttttaggtcggggattttttagaatcgatcgtcgatntgtagtttaacgtttttttcgtttttttcggttgtcgtattttatttattcgacgcgcgttcgttacgattttttcgtatttgtttatcgtgtcgattttttattttcgatttttttcgggacgtaggttatcggtttttaacgtaatattcgttaagttaattttttttatttacgtagtttaaggattttattttatagtcgtattttttttatcgtttcgtgcgtacgttttttgtcgttttttacgtttttatcgcggtttgacgtatttttacgtattaaattttgggattatacggtattattatagttttaaggttttacgcgttttaaggtagggttgcgtgcgttttcgngtcgacgcgatttttttaggggttcggattttgtaaaatcgttttttttacgcggagggaagatattcggatttttagaagttttttttaagcgatttttttagtaatggttttttgtttttttcggatttttatcggggtaagagcgttttataaatttagat

SEQ ID NO: 23886 - DNA, 571 bp, Artificial Sequence
  chemically treated genomic DNA (Homo sapiens) CpG-island No: 23886
  unsure (165, 524)
atctaaatttataaaacgctcttaccccgataaaaatccgaaaaaaacaaaaaaccattactaaaaaaatcgcttaaaaaaaacttctaaaaatccgaatatcttccctccgcgtaaaaaaaacgattttacaaaatccgaacccctaaaaaaatcgcgtcgacncgaaaacgcacgcaaccctaccttaaaacgcgtaaaaccttaaaactataataataccgtataatcccaaaatttaatacgtaaaaatacgtcaaaccgcgataaaaacgtaaaaaacgacaaaaaacgtacgcacgaaacgataaaaaaaatacgactataaaataaaatccttaaactacgtaaataaaaaaaattaacttaacgaatattacgttaaaaaccgataacctacgtcccgaaaaaaatcgaaaataaaaaatcgacacgataaacaaatacgaaaaaatcgtaacgaacgcgcgtcgaataaataaaatacgacaaccgaaaaaaacgaaaaaaacgttaaactacanatcgacgatcgattctaaaaaatccccgacctaaaaacgccattcgc

SEQ ID NO: 23887 - DNA, 571 bp, Artificial Sequence
  chemically treated genomic DNA (Homo sapiens) CpG-island No: 23887
  unsure (165, 524)
atttgggtttgtaaggcgtttttatttcggtagaagttcggggagggtaggggattattgttggggaggtcgtttgaagaggatttttggaaattcgagtatttttttttcgcgtgggaggaacgattttgtagggttcgggtttttaagggggtcgcgtcggtncggggacgtacgtagttttgttttggggcgcgtgaggttttggagttgtggtagtatcgtatgattttaaagtttggtacgtgagggtacgttaggtcgcgataggggcgtgggaaacgataggaagcgtacgtacggaacggtggggagggtgcgattgtgaggtaagatttttaggttgcgtaggtgaagggagttaatttaacgaatgttgcgttagggatcggtagtttacgtttcggggggaatcgaaggtgaagggtcggtacggtaggtaagtacgaggaagtcgtagcggacgcgcgtcgggtaggtgaagtgcggtaatcgaagggagcgggagggacgttgaattatangtcgacggtcgattttagaggattttcgatttgaagacgttattcgt

SEQ ID NO: 23888 - DNA, 571 bp, Artificial Sequence
  chemically treated genomic DNA (Homo sapiens) CpG-island No: 23888
  unsure (48, 407)
acgaataacgtcttcaaatcgaaaatcctctaaaatcgaccgtcgacntataattcaacgtccctcccgctcccttcgattaccgcacttcacctacccgacgcgcgtccgctacgacttcctcgtacttacctaccgtaccgacccttcaccttcgattccccccgaaacgtaaactaccgatccctaacgcaacattcgttaaattaactcccttcacctacgcaacctaaaaatcttacctcacaatcgcaccctccccaccgttccgtacgtacgcttcctatcgtttcccacgcccctatcgcgacctaacgtaccctcacgtaccaaactttaaaatcatacgatactaccacaactccaaaacctcacgcgccccaaaacaaaactacgtacgtccccgnaccgacgcgacccccttaaaaacccgaaccctacaaaatcgttcctcccacgcgaaaaaaaaatactcgaatttccaaaaatcctcttcaaacgacctccccaacaataatcccctaccctccccgaacttctaccgaaataaaaacgccttacaaacccaaat

SEQ ID NO: 23889 - DNA, 636 bp, Artificial Sequence
  chemically treated genomic DNA (Homo sapiens) CpG-island No: 23889
cggtcgaggggtacggggaaggggattcggggagggagagagggaggagcggcgaggttaaggtaggtggtacgtcgttcgttttttcggtcgttcgtatttcggaggttagttttagttggtagcgagtttttttttttttcgttgggtttggagcgcggcgcgggttcggtttttggggacgcgttaagagtaggtcggatagtagggcgggggtcgggtcgcgagttagcgcgcggcgagcggatttagtttcgaggttgatgacgtttttttttttggttcggcggcgtttggtttggtagggcgggtgacgttatcgtttcgttacgtgattattatttaataaatattttttttttttttgcgcgcgggtttggttcgtttcgttttttagaggtcgtatataaacgcgtttttcgggttaggttcgttgcgaaggatatttgggttgtgtgtgcgacgcgggtcggacgggtagtcgggggaatcgcgaagaagtcgagggattcggattttcgcgtgacgtttttttgttagtttaaaagcggtttttggttcggcgtagagagattcgggggtttagttttttttcgaaaagcgtcgttttgtttttggttagggtttttgttttat

SEQ ID NO: 23890 - DNA, 636 bp, Artificial Sequence
  chemically treated genomic DNA (Homo sapiens) CpG-island No: 23890
ataaaacaaaaaccctaaccaaaaacaaaacgacgcttttcgaaaaaaaactaaacccccgaatctctctacgccgaaccaaaaaccgcttttaaactaacaaaaaaacgtcacgcgaaaatccgaatccctcgacttcttcgcgattcccccgactacccgtccgacccgcgtcgcacacacaacccaaatatccttcgcaacgaacctaacccgaaaaacgcgtttatatacgacctctaaaaaacgaaacgaaccaaacccgcgcgcaaaaaaaaaaaaaatatttattaaataataatcacgtaacgaaacgataacgtcacccgccctaccaaaccaaacgccgccgaaccaaaaaaaaaaacgtcatcaacctcgaaactaaatccgctcgccgcgcgctaactcgcgacccgacccccgccctactatccgacctactcttaacgcgtccccaaaaaccgaacccgcgccgcgctccaaacccaacgaaaaaaaaaaaaactcgctaccaactaaaactaacctccgaaatacgaacgaccgaaaaaacgaacgacgtaccacctaccttaacctcgccgctcctccctctctccctccccgaatccccttccccgtacccctcgaccg

SEQ ID NO: 23891 - DNA, 636 bp, Artificial Sequence
  chemically treated genomic DNA (Homo sapiens) CpG-island No: 23891
gtgaagtaagaattttggttaagggtagggcggcgtttttcgaggaaaagttagattttcgggtttttttgcgtcgaattaaaagtcgtttttggattgatagaggagcgttacgcggggattcgggtttttcggttttttcgcggttttttcgattgttcgttcgattcgcgtcgtatatatagtttaaatgtttttcgtagcgagtttggttcggggagcgcgtttatatgcggtttttgggggacggggcgggttagattcgcgcgtagggggagggggggtgtttgttgaatggtgattacgtgacggggcggtgacgttattcgttttgttaggttaggcgtcgtcgagttagagggggagacgttattagtttcggagttgggttcgttcgtcgcgcgttggttcgcggttcggttttcgttttgttgttcggtttgtttttggcgcgtttttagggatcggattcgcgtcgcgttttaggtttagcggggaggaggagggttcgttgttagttgaggttgattttcgggatgcgagcggtcgggagaacgggcgacgtgttatttgttttggtttcgtcgttttttttttttttttttttcgagttttttttttcgtgtttttcggtcg

SEQ ID NO: 23892 - DNA, 636 bp, Artificial Sequence
  chemically treated genomic DNA (Homo sapiens) CpG-island No: 23892
cgaccgaaaaacacgaaaaaaaaaactcgaaaaaaaaaaaaaaaaaaaacgacgaaaccaaaacaaataacacgtcgcccgttctcccgaccgctcgcatcccgaaaatcaacctcaactaacaacgaaccctcctcctccccgctaaacctaaaacgcgacgcgaatccgatccctaaaaacgcgccaaaaacaaaccgaacaacaaaacgaaaaccgaaccgcgaaccaacgcgcgacgaacgaacccaactccgaaactaataacgtctccccctctaactcgacgacgcctaacctaacaaaacgaataacgtcaccgccccgtcacgtaatcaccattcaacaaacaccccccctccccctacgcgcgaatctaacccgccccgtcccccaaaaaccgcatataaacgcgctccccgaaccaaactcgctacgaaaaacatttaaactatatatacgacgcgaatcgaacgaacaatcgaaaaaaccgcgaaaaaaccgaaaaacccgaatccccgcgtaacgctcctctatcaatccaaaaacgacttttaattcgacgcaaaaaaacccgaaaatctaacttttcctcgaaaaacgccgccctacccttaaccaaaattcttacttcac

SEQ ID NO: 23893 - DNA, 1030 bp, Artificial Sequence
  chemically treated genomic DNA (Homo sapiens) CpG-island No: 23893
taatttcgtcggtttttttttcggtgtgttcgtttttgcgttttcgtattttttcgtttcgtttttcgtttaatgttgagtttagtttgcgtttcgttttttcgcgggcgttagggggttagtaagtagtagtcggcgttatcgtcgtagtcgttcgaggttttcgtcgtcgtttatcgtatgtacgcgcgttagatagtaagtagtttgcgtagttcggtttcgtcgcgtttcggcgggtttttcggtatttcgcgggttcggggatcggcgcgtcgagttatgtttcgggttgtcggcggcggttatggggcggtacggcggcggcggtggcgatagcggtaagatcgtgattaacgtgggcggcgtgcgttatgagacgtatcgttcgacgttgcgtattttgtcggggacgcggttggtcggtttgacggagttcgaggcggcggtacgtttcgattacgattcgggcgtcgacgagtttttttttgatcggtattcgggagttttcgcgtacgtgtttaattattatcgtatcggtaagttgtattgtttagtcgacgtgtgcgggtttttgtttgaggaggagttcggtttttggggtatcgacgagatcgacgtggaggtttgttgttggatgatttatcggtagtatcgcgacgttgaggaggcgttcgattttttcgaggcgttcgatttcgcgggcgtcgttaacgtcgttaacgtcgtaggcgtttacgacggaggtttggacgacgaggcgggcgcgggcggcggcggtttggacggagcgggcggcgagtttaagcgtttttgtttttaggacgcgggcggcggcgtcggggggtcgttagggggcgcgggcggcgcgggcggtatatggtggcgtcgttggtagtttcgcgtgtgggcgtttttcgaggatttttattcgtcgcgggttgttagggtgagcgcgttttcggggtttttatttattttattttcgtttttttaggcgtttttagttttttaggagcgttttagtttt

SEQ ID NO: 23894 - DNA, 1030 bp, Artificial Sequence
  chemically treated genomic DNA (Homo sapiens) CpG-island No: 23894
aaaactaaaacgctcctaaaaaactaaaaacgcctaaaaaaacgaaaataaaataaataaaaaccccgaaaacgcgctcaccctaacaacccgcgacgaataaaaatcctcgaaaaacgcccacacgcgaaactaccaacgacgccaccatataccgcccgcgccgcccgcgccccctaacgaccccccgacgccgccgcccgcgtcctaaaaacaaaaacgcttaaactcgccgcccgctccgtccaaaccgccgccgcccgcgcccgcctcgtcgtccaaacctccgtcgtaaacgcctacgacgttaacgacgttaacgacgcccgcgaaatcgaacgcctcgaaaaaatcgaacgcctcctcaacgtcgcgatactaccgataaatcatccaacaacaaacctccacgtcgatctcgtcgataccccaaaaaccgaactcctcctcaaacaaaaacccgcacacgtcgactaaacaatacaacttaccgatacgataataattaaacacgtacgcgaaaactcccgaataccgatcaaaaaaaaactcgtcgacgcccgaatcgtaatcgaaacgtaccgccgcctcgaactccgtcaaaccgaccaaccgcgtccccgacaaaatacgcaacgtcgaacgatacgtctcataacgcacgccgcccacgttaatcacgatcttaccgctatcgccaccgccgccgccgtaccgccccataaccgccgccgacaacccgaaacataactcgacgcgccgatccccgaacccgcgaaataccgaaaaacccgccgaaacgcgacgaaaccgaactacgcaaactacttactatctaacgcgcgtacatacgataaacgacgacgaaaacctcgaacgactacgacgataacgccgactactacttactaaccccctaacgcccgcgaaaaaacgaaacgcaaactaaactcaacattaaacgaaaaacgaaacgaaaaaatacgaaaacgcaaaaacgaacacaccgaaaaaaaaaccgacgaaatta

SEQ ID NO: 23895 - DNA, 1030 bp, Artificial Sequence
  chemically treated genomic DNA (Homo sapiens) CpG-island No: 23895
ggagttggggcgtttttgggagattgggggcgtttggagaggcgggggtggggtggatgggggtttcgagagcgcgtttattttggtagttcgcgacgagtaggggttttcgaagagcgtttatacgcggggttgttagcggcgttattatgtgtcgttcgcgtcgttcgcgttttttggcggtttttcggcgtcgtcgttcgcgttttggaagtagaggcgtttgagttcgtcgttcgtttcgtttaggtcgtcgtcgttcgcgttcgtttcgtcgtttaggttttcgtcgtgggcgtttgcggcgttggcggcgttggcggcgttcgcggggtcgggcgtttcgaaggagtcgagcgtttttttagcgtcgcgatgttgtcggtaggttatttagtagtaggtttttacgtcggtttcgtcgatgttttagaagtcgagtttttttttaaataggggttcgtatacgtcggttgggtagtgtagtttgtcggtgcggtagtagttgagtacgtacgcgaagattttcgggtgtcggttaaagaagaattcgtcggcgttcgggtcgtagtcgaagcgtgtcgtcgtttcgggtttcgttaggtcggttagtcgcgttttcggtagggtgcgtagcgtcgagcggtacgttttatggcgtacgtcgtttacgttgattacgattttgtcgttgtcgttatcgtcgtcgtcgtgtcgttttatggtcgtcgtcggtagttcggggtatggttcggcgcgtcggttttcgggttcgcggggtgtcggggggttcgtcgggacgcggcggggtcgggttgcgtaggttgtttgttgtttagcgcgcgtgtatgcggtaggcggcggcggggatttcgggcggttgcggcggtggcgtcggttgttgtttgttggttttttggcgttcgcggaaggacgagacgtagattgagtttagtattggacggggggcggggcgggagggtgcggagacgtaagggcgggtatatcgggggagagatcgacgggattg

SEQ ID NO: 23896 - DNA, 1030 bp, Artificial Sequence
  chemically treated genomic DNA (Homo sapiens) CpG-island No: 23896
caatcccgtcgatctctcccccgatatacccgcccttacgtctccgcaccctcccgccccgccccccgtccaatactaaactcaatctacgtctcgtccttccgcgaacgccaaaaaaccaacaaacaacaaccgacgccaccgccgcaaccgcccgaaatccccgccgccgcctaccgcatacacgcgcgctaaacaacaaacaacctacgcaacccgaccccgccgcgtcccgacgaaccccccgacaccccgcgaacccgaaaaccgacgcgccgaaccataccccgaactaccgacgacgaccataaaacgacacgacgacgacgataacgacaacgacaaaatcgtaatcaacgtaaacgacgtacgccataaaacgtaccgctcgacgctacgcaccctaccgaaaacgcgactaaccgacctaacgaaacccgaaacgacgacacgcttcgactacgacccgaacgccgacgaattcttctttaaccgacacccgaaaatcttcgcgtacgtactcaactactaccgcaccgacaaactacactacccaaccgacgtatacgaacccctatttaaaaaaaaactcgacttctaaaacatcgacgaaaccgacgtaaaaacctactactaaataacctaccgacaacatcgcgacgctaaaaaaacgctcgactccttcgaaacgcccgaccccgcgaacgccgccaacgccgccaacgccgcaaacgcccacgacgaaaacctaaacgacgaaacgaacgcgaacgacgacgacctaaacgaaacgaacgacgaactcaaacgcctctacttccaaaacgcgaacgacgacgccgaaaaaccgccaaaaaacgcgaacgacgcgaacgacacataataacgccgctaacaaccccgcgtataaacgctcttcgaaaacccctactcgtcgcgaactaccaaaataaacgcgctctcgaaacccccatccaccccacccccgcctctccaaacgcccccaatctcccaaaaacgccccaactcc

SEQ ID NO: 23897 - DNA, 595 bp, Artificial Sequence
  chemically treated genomic DNA (Homo sapiens) CpG-island No: 23897
gtcggaattaagtttggacgtttggagttgagagtcgaatgtttagagcgtttgttcgtcggggagagattttcggaggatagtcggggtcggaattaagtttggacgtttggagttgagagtcgaatgtttagagcgtttgttcgtcggggagagattttcggaggatagtcggggtcggaattaagtttggacgtttggagttgagagtcgaatgtttagagcgtttgttcgtcggggagagattttcggaggacggtcggggtcggaattaagtttggacgtttggagttgagagtcgaatgtttagagcgtttgttcgtcggggagagattttcggaggacggtcggggtcggaattaagtttggacgtttggagttgagagtcgaatgtttagagcgtttgttcgtcggggagagattttcggaggacggtcggggtcggaattaagtttggacgtttggagttgagagtcgaatgtttagagcgtttgttcgtcggggagagattttcggaggatagtcggggtcggaattaagtttggaggtttggaggtgagagtcgaatgttgtttagtatgattaattagtttaa

SEQ ID NO: 23898 - DNA, 595 bp, Artificial Sequence
  chemically treated genomic DNA (Homo sapiens) CpG-island No: 23898
ttaaactaattaatcatactaaacaacattcgactctcacctccaaacctccaaacttaattccgaccccgactatcctccgaaaatctctccccgacgaacaaacgctctaaacattcgactctcaactccaaacgtccaaacttaattccgaccccgaccgtcctccgaaaatctctccccgacgaacaaacgctctaaacattcgactctcaactccaaacgtccaaacttaattccgaccccgaccgtcctccgaaaatctctccccgacgaacaaacgctctaaacattcgactctcaactccaaacgtccaaacttaattccgaccccgaccgtcctccgaaaatctctccccgacgaacaaacgctctaaacattcgactctcaactccaaacgtccaaacttaattccgaccccgactatcctccgaaaatctctccccgacgaacaaacgctctaaacattcgactctcaactccaaacgtccaaacttaattccgaccccgactatcctccgaaaatctctccccgacgaacaaacgctctaaacattcgactctcaactccaaacgtccaaacttaattccgac

SEQ ID NO: 23899 - DNA, 595 bp, Artificial Sequence
  chemically treated genomic DNA (Homo sapiens) CpG-island No: 23899
ttgagttaattagttatgttaagtagtattcggtttttatttttaaatttttaggtttggtttcggtttcggttgtttttcgagagttttttttcggcgggtaggcgttttgggtattcggtttttagttttaaacgtttaggtttggtttcggtttcggtcgtttttcgagagttttttttcggcgggtaggcgttttgggtattcggtttttagttttaaacgtttaggtttggtttcggtttcggtcgtttttcgagagttttttttcggcgggtaggcgttttgggtattcggtttttagttttaaacgtttaggtttggtttcggtttcggtcgtttttcgagagttttttttcggcgggtaggcgttttgggtattcggtttttagttttaaacgtttaggtttggtttcggtttcggttgtttttcgagagttttttttcggcgggtaggcgttttgggtattcggtttttagttttaaacgtttaggtttggtttcggtttcggttgtttttcgagagttttttttcggcgggtaggcgttttgggtattcggtttttagttttaaacgtttaggtttggtttcggt

SEQ ID NO: 23900 - DNA, 595 bp, Artificial Sequence
  chemically treated genomic DNA (Homo sapiens) CpG-island No: 23900
accgaaaccaaacctaaacgtttaaaactaaaaaccgaatacccaaaacgcctacccgccgaaaaaaaactctcgaaaaacaaccgaaaccgaaaccaaacctaaacgtttaaaactaaaaaccgaatacccaaaacgcctacccgccgaaaaaaaactctcgaaaaacaaccgaaaccgaaaccaaacctaaacgtttaaaactaaaaaccgaatacccaaaacgcctacccgccgaaaaaaaactctcgaaaaacgaccgaaaccgaaaccaaacctaaacgtttaaaactaaaaaccgaatacccaaaacgcctacccgccgaaaaaaaactctcgaaaaacgaccgaaaccgaaaccaaacctaaacgtttaaaactaaaaaccgaatacccaaaacgcctacccgccgaaaaaaaactctcgaaaaacgaccgaaaccgaaaccaaacctaaacgtttaaaactaaaaaccgaatacccaaaacgcctacccgccgaaaaaaaactctcgaaaaacaaccgaaaccgaaaccaaacctaaaaatttaaaaataaaaaccgaatactacttaacataactaattaactcaa

SEQ ID NO: 23901 - DNA, 708 bp, Artificial Sequence
  chemically treated genomic DNA (Homo sapiens) CpG-island No: 23901
gcgacggagagaaatagtgagttcgaggggcgcgggtatagaattgtttagtttcgagaattggggttcgttagtcggcggggaaagtagttgagcgcggaggcgagtgagcggacgcgtttcggggtttttgtagttttcgtcggttttaaggtatcgattttcggttagttgggcgcggtagggcgggaggggcgcgttatggaggcgtcgggtcgcgttagtatgttttaggttaagtgaagcggttcggttggggtcggcgggattcgcgggttatgtacggcgatatatttaacgttacgggcggtttcgaggcggcggtaggtagcgcgttggttttaggagttacggttaaggtagaaggcgttttgtcgttggagttggttattgcgcgcggtatgagggacggcgcggttataaagttcgatttgtttatttatttgttgtttttttttttgttgttgttttcggtggcgttcgtcgttttttttatcggttgttagttgcgttattcggttttcgtcgcgttgttttacgatcgttcgttgcgcgacgttcgcgcgttttggaagacgcggtcggtgtagtttgggattgagttacggtcgtcgggcgtttcgtttcgatttagttaagagtagttagtttgagtttggtagggagggtacgatatcggggatcgttggtttttgggaatacggtgtt

SEQ ID NO: 23902 - DNA, 708 bp, Artificial Sequence
  chemically treated genomic DNA (Homo sapiens) CpG-island No: 23902
aacaccgtattcccaaaaaccaacgatccccgatatcgtaccctccctaccaaactcaaactaactactcttaactaaatcgaaacgaaacgcccgacgaccgtaactcaatcccaaactacaccgaccgcgtcttccaaaacgcgcgaacgtcgcgcaacgaacgatcgtaaaacaacgcgacgaaaaccgaataacgcaactaacaaccgataaaaaaaacgacgaacgccaccgaaaacaacaacaaaaaaaaaaacaacaaataaataaacaaatcgaactttataaccgcgccgtccctcataccgcgcgcaataaccaactccaacgacaaaacgccttctaccttaaccgtaactcctaaaaccaacgcgctacctaccgccgcctcgaaaccgcccgtaacgttaaatatatcgccgtacataacccgcgaatcccgccgaccccaaccgaaccgcttcacttaacctaaaacatactaacgcgacccgacgcctccataacgcgcccctcccgccctaccgcgcccaactaaccgaaaatcgataccttaaaaccgacgaaaactacaaaaaccccgaaacgcgtccgctcactcgcctccgcgctcaactactttccccgccgactaacgaaccccaattctcgaaactaaacaattctatacccgcgcccctcgaactcactatttctctccgtcgc

SEQ ID NO: 23903 - DNA, 708 bp, Artificial Sequence
  chemically treated genomic DNA (Homo sapiens) CpG-island No: 23903
ggtatcgtgtttttaggggttagcgattttcggtgtcgtgttttttttattaggtttaagttggttgtttttggttaggtcgggacggggcgttcggcggtcgtggtttagttttaagttatatcggtcgcgttttttagggcgcgcgggcgtcgcgtagcgagcggtcgtggggtagcgcggcgaaggtcgaatggcgtagttggtaatcgatgaagaggacgacgagcgttatcgagagtagtagtaggaagaagagtagtaggtaggtgggtaggtcgggttttgtggtcgcgtcgttttttatatcgcgcgtagtggttagttttagcggtaaagcgttttttgttttgatcgtggtttttggggttagcgcgttgtttatcgtcgtttcggggtcgttcgtggcgttgaatatgtcgtcgtatatggttcgcgggtttcgtcgattttagtcggatcgttttatttggtttggagtatattggcgcgattcggcgtttttatggcgcgtttttttcgttttgtcgcgtttaattgatcgagagtcggtgttttggggtcggcggggattgtaaagatttcgggacgcgttcgtttattcgttttcgcgtttagttgtttttttcgtcggttggcggattttagttttcggagttggatagttttgtgttcgcgtttttcgggtttattgttttttttcgtcgt

SEQ ID NO: 23904 - DNA, 708 bp, Artificial Sequence
  chemically treated genomic DNA (Homo sapiens) CpG-island No: 23904
acgacgaaaaaaaacaataaacccgaaaaacgcgaacacaaaactatccaactccgaaaactaaaatccgccaaccgacgaaaaaaacaactaaacgcgaaaacgaataaacgaacgcgtcccgaaatctttacaatccccgccgaccccaaaacaccgactctcgatcaattaaacgcgacaaaacgaaaaaaacgcgccataaaaacgccgaatcgcgccaatatactccaaaccaaataaaacgatccgactaaaatcgacgaaacccgcgaaccatatacgacgacatattcaacgccacgaacgaccccgaaacgacgataaacaacgcgctaaccccaaaaaccacgatcaaaacaaaaaacgctttaccgctaaaactaaccactacgcgcgatataaaaaacgacgcgaccacaaaacccgacctacccacctacctactactcttcttcctactactactctcgataacgctcgtcgtcctcttcatcgattaccaactacgccattcgaccttcgccgcgctaccccacgaccgctcgctacgcgacgcccgcgcgccctaaaaaacgcgaccgatataacttaaaactaaaccacgaccgccgaacgccccgtcccgacctaaccaaaaacaaccaacttaaacctaataaaaaaaacacgacaccgaaaatcgctaacccctaaaaacacgatacc

SEQ ID NO: 23905 - DNA, 578 bp, Artificial Sequence
  chemically treated genomic DNA (Homo sapiens) CpG-island No: 23905
gggttgtataagcgtatcgcgatttgcgcgatggcgattattacgttacgttgaatacggcgtagaagaaagcggttgataacgtattgcgcgattttgaattttttggtataggtttgtcgaaagagaaatagtagcgttacggcgaaattgcgattcgtttttttgaattgggtaattagtatagtaataacgttttcgatgcgataatgggttggattaaattcgttatcgacgaagcggagttggcggggatgttagaaagcgcgttggttgcggtaaaagtttaggtcgaagcgaaagagttggaaggttatttgttgacgttggatattttaagttatttgtcggtaatgatttattgcgataattaggttttgcgtgaagagatgtatcgcgtttatagtattcgcgttttcgattaaggtttaaacgtcggtaaatgggataatagtaaggtgatggaagagattttcgcgttgcgttacgaattggcgtaattgttgggttttgaaaattacgtttttaaattttttgttattaaaatggtagaaaattcgtagtaggtgttggatttt

SEQ ID NO: 23906 - DNA, 578 bp, Artificial Sequence
  chemically treated genomic DNA (Homo sapiens) CpG-island No: 23906
aaaatccaacacctactacgaattttctaccattttaataacaaaaaatttaaaaacgtaattttcaaaacccaacaattacgccaattcgtaacgcaacgcgaaaatctcttccatcaccttactattatcccatttaccgacgtttaaaccttaatcgaaaacgcgaatactataaacgcgatacatctcttcacgcaaaacctaattatcgcaataaatcattaccgacaaataacttaaaatatccaacgtcaacaaataaccttccaactctttcgcttcgacctaaacttttaccgcaaccaacgcgctttctaacatccccgccaactccgcttcgtcgataacgaatttaatccaacccattatcgcatcgaaaacgttattactatactaattacccaattcaaaaaaacgaatcgcaatttcgccgtaacgctactatttctctttcgacaaacctataccaaaaaattcaaaatcgcgcaatacgttatcaaccgctttcttctacgccgtattcaacgtaacgtaataatcgccatcgcgcaaatcgcgatacgcttatacaaccc

SEQ ID NO: 23907 - DNA, 578 bp, Artificial Sequence
  chemically treated genomic DNA (Homo sapiens) CpG-island No: 23907
gaaatttagtatttgttgcgggttttttgttattttagtggtaagggatttaaaggcgtagtttttaaagtttagtagttgcgttagttcgtgacgtagcgcgaggattttttttattattttgttgttattttatttatcggcgtttgggttttgatcggaggcgcgggtgttgtaagcgcgatatatttttttacgtagagtttggttgtcgtagtaggttattatcggtaagtagtttgggatatttagcgttagtaaataattttttagttttttcgtttcggtttgggtttttgtcgtagttagcgcgttttttggtattttcgttagtttcgtttcgtcggtaacgagtttggtttagtttattgtcgtatcgaggacgttgttgttgtattggttgtttagtttagaaagacgggtcgtaatttcgtcgtaacgttgttgtttttttttcggtagatttatgttagagagtttaaagtcgcgtagtgcgttattaatcgtttttttttgcgtcgtgtttagcgtggcgtaatgatcgttatcgcgtaggtcgcgatacgtttatatagttt

SEQ ID NO: 23908 - DNA, 578 bp, Artificial Sequence
  chemically treated genomic DNA (Homo sapiens) CpG-island No: 23908
aaactatataaacgtatcgcgacctacgcgataacgatcattacgccacgctaaacacgacgcaaaaaaaaacgattaataacgcactacgcgactttaaactctctaacataaatctaccgaaaaaaaaacaacaacgttacgacgaaattacgacccgtctttctaaactaaacaaccaatacaacaacaacgtcctcgatacgacaataaactaaaccaaactcgttaccgacgaaacgaaactaacgaaaataccaaaaaacgcgctaactacgacaaaaacccaaaccgaaacgaaaaaactaaaaaattatttactaacgctaaatatcccaaactacttaccgataataacctactacgacaaccaaactctacgtaaaaaaatatatcgcgcttacaacacccgcgcctccgatcaaaacccaaacgccgataaataaaataacaacaaaataataaaaaaaatcctcgcgctacgtcacgaactaacgcaactactaaactttaaaaactacgcctttaaatcccttaccactaaaataacaaaaaacccgcaacaaatactaaatttc

SEQ ID NO: 23909 - DNA, 937 bp, Artificial Sequence
  chemically treated genomic DNA (Homo sapiens) CpG-island No: 23909
aattagtcgttgcgtgagggtttgtcggtttggttagtgtcgtttcgtcggaaggatggttatgcgcgagtattatcgtcgtcgtttgaagtgtagagtacgtttgattatttttcggggatgtatttcggtgcgttaatcgtgtcggtgaagagcgttttatgggtaattaattgattttggtgtttagatataatattcggaatttttttcgtttaagcgcggttatatgagtcgtagttatttacgtacggcgtgggtagaggtgaaggttacgtcggtttatgtaggtggcggtttagagttttgagcgttcgttgaatgagacgcggttttgtggcgttatttcgtcgggtaaaaaggaaagttgttttatttgtgttttttcggttagtcgataatacgtagaatggcgtgagtttttggatttgtatggtatattttcgtaggcggtaatagtgtgcggttatcgcgttaattttgtacggtaggtatggtggttatacgtaattaggtagatagtaattttgttgtttttgtatttatttgggtatcgttatcgtttaggtagttaatagacgttatgttttatcgtcgttaggttcgggggatattaatgcgtcgtattgttgagggtgtagaacgattagatatcgacgttgtagtttttataagcggtttatttaggcgaaatattcggattaggagttgttatcgggggatacgttaaagtttgtgggtcgaaatgaatatcggttatcgcggattagcgagggtaatttattcggatggttacggtttagaatacgttttagattacggatttatcgtaaaaatatcggatggtgattggcgaatcgcgtcggaggtaaaattagtcggttttatcggtagtgtagtatatattttttgcgtatttttatattgtaattagtat

SEQ ID NO: 23910 - DNA, 937 bp, Artificial Sequence
  chemically treated genomic DNA (Homo sapiens) CpG-island No: 23910
atactaattacaatataaaaatacgcaaaaaatatatactacactaccgataaaaccgactaattttacctccgacgcgattcgccaatcaccatccgatatttttacgataaatccgtaatctaaaacgtattctaaaccgtaaccatccgaataaattaccctcgctaatccgcgataaccgatattcatttcgacccacaaactttaacgtatcccccgataacaactcctaatccgaatatttcgcctaaataaaccgcttataaaaactacaacgtcgatatctaatcgttctacaccctcaacaatacgacgcattaatatcccccgaacctaacgacgataaaacataacgtctattaactacctaaacgataacgatacccaaataaatacaaaaacaacaaaattactatctacctaattacgtataaccaccatacctaccgtacaaaattaacgcgataaccgcacactattaccgcctacgaaaatataccatacaaatccaaaaactcacgccattctacgtattatcgactaaccgaaaaaacacaaataaaacaactttcctttttacccgacgaaataacgccacaaaaccgcgtctcattcaacgaacgctcaaaactctaaaccgccacctacataaaccgacgtaaccttcacctctacccacgccgtacgtaaataactacgactcatataaccgcgcttaaacgaaaaaaattccgaatattatatctaaacaccaaaatcaattaattacccataaaacgctcttcaccgacacgattaacgcaccgaaatacatccccgaaaaataatcaaacgtactctacacttcaaacgacgacgataatactcgcgcataaccatccttccgacgaaacgacactaaccaaaccgacaaaccctcacgcaacgactaatt

SEQ ID NO: 23911 - DNA, 937 bp, Artificial Sequence
  chemically treated genomic DNA (Homo sapiens) CpG-island No: 23911
atattggttataatataagagtacgtagagagtatatattatattgtcggtaggatcggttgattttattttcggcgcggttcgttagttattattcggtgtttttgcggtgaattcgtgatttgaggcgtgttttggatcgtgattattcgagtggattgttttcgttggttcgcgataatcggtatttatttcggtttatagattttggcgtatttttcggtggtaatttttggttcggatatttcgtttggatggatcgtttgtgagggttatagcgtcggtatttggtcgttttatatttttagtaatgcggcgtattgatgtttttcgagtttgacgacgatgagatatggcgtttgttaattgtttgaacggtaacgatgtttaaatgagtgtagaagtagtaggattgttgtttgtttgattgcgtatagttattatgtttgtcgtatagaattgacgcgatgatcgtatattattatcgtttgcgggagtatgttatgtaaatttagaggtttacgttattttgcgtattatcgattgatcgaaggagtatagatgaaatagtttttttttttattcggcgagatgacgttataggatcgcgttttatttagcgggcgtttagggttttggatcgttatttgtatgagtcggcgtagtttttatttttatttacgtcgtacgtgaatggttgcgatttatatggtcgcgtttgagcgggaagagtttcgggtgttgtatttggatattagaattagttgattgtttatgaaacgttttttatcggtacgattaacgtatcgaggtgtattttcgggaggtggttaaacgtgttttgtattttaagcggcggcggtgatattcgcgtataattattttttcggcgagacgatattagttaggtcgataaatttttacgtagcgattggtt

SEQ ID NO: 23912 - DNA, 937 bp, Artificial Sequence
  chemically treated genomic DNA (Homo sapiens) CpG-island No: 23912
aaccaatcgctacgtaaaaatttatcgacctaactaatatcgtctcgccgaaaaaataattatacgcgaatatcaccgccgccgcttaaaatacaaaacacgtttaaccacctcccgaaaatacacctcgatacgttaatcgtaccgataaaaaacgtttcataaacaatcaactaattctaatatccaaatacaacacccgaaactcttcccgctcaaacgcgaccatataaatcgcaaccattcacgtacgacgtaaataaaaataaaaactacgccgactcatacaaataacgatccaaaaccctaaacgcccgctaaataaaacgcgatcctataacgtcatctcgccgaataaaaaaaaaaactatttcatctatactccttcgatcaatcgataatacgcaaaataacgtaaacctctaaatttacataacatactcccgcaaacgataataatatacgatcatcgcgtcaattctatacgacaaacataataactatacgcaatcaaacaaacaacaatcctactacttctacactcatttaaacatcgttaccgttcaaacaattaacaaacgccatatctcatcgtcgtcaaactcgaaaaacatcaatacgccgcattactaaaaatataaaacgaccaaataccgacgctataaccctcacaaacgatccatccaaacgaaatatccgaaccaaaaattaccaccgaaaaatacgccaaaatctataaaccgaaataaataccgattatcgcgaaccaacgaaaacaatccactcgaataatcacgatccaaaacacgcctcaaatcacgaattcaccgcaaaaacaccgaataataactaacgaaccgcgccgaaaataaaatcaaccgatcctaccgacaatataatatatactctctacgtactcttatattataaccaatat

SEQ ID NO: 23913 - DNA, 578 bp, Artificial Sequence
  chemically treated genomic DNA (Homo sapiens) CpG-island No: 23913
gtgattcgcggtgcgggagatatcgttagtggtgtggcgttacgtttgattatgcgggttttaaagtgattatgttggaagtggaaaaatcgatagtattcgttgtatcgtggcgtttgtttaggtcgtgttcgatggcgaaatgaggtcgaaggcgttattgttcgtttggtaattagttttgcggaagcgatgaatttatcgaacgcggatttatttttgtgatggtagatttcgtttgtttttgtttgatgaattgaaatcgttttgcgtggtggacgttattttggcgaatagaatttgggaacgcgggtagatatggtattagtaataatcgcgtttggtcgggttttattgttgggaaggattgttatgcggtaattgaaataaacgcgggtattggttcggttaggtgatttattttggttgtgcgtaggagatatcggtgtttttggtaatattatggggtatattattcgacgggtgatcgtgtttttgttgtaggtattatgcgatttaacgtgaaattaggcgatttgtgaaagagggcgatgtgattgtttggattggtgagtatg

SEQ ID NO: 23914 - DNA, 578 bp, Artificial Sequence
  chemically treated genomic DNA (Homo sapiens) CpG-island No: 23914
catactcaccaatccaaacaatcacatcgccctctttcacaaatcgcctaatttcacgttaaatcgcataatacctacaacaaaaacacgatcacccgtcgaataatataccccataatattaccaaaaacaccgatatctcctacgcacaaccaaaataaatcacctaaccgaaccaatacccgcgtttatttcaattaccgcataacaatccttcccaacaataaaacccgaccaaacgcgattattactaataccatatctacccgcgttcccaaattctattcgccaaaataacgtccaccacgcaaaacgatttcaattcatcaaacaaaaacaaacgaaatctaccatcacaaaaataaatccgcgttcgataaattcatcgcttccgcaaaactaattaccaaacgaacaataacgccttcgacctcatttcgccatcgaacacgacctaaacaaacgccacgatacaacgaatactatcgatttttccacttccaacataatcactttaaaacccgcataatcaaacgtaacgccacaccactaacgatatctcccgcaccgcgaatcac

SEQ ID NO: 23915 - DNA, 578 bp, Artificial Sequence
  chemically treated genomic DNA (Homo sapiens) CpG-island No: 23915
tatgtttattaatttaggtaattatatcgtttttttttatagatcgtttaattttacgttggatcgtataatgtttgtagtaggagtacgattattcgtcgggtggtatgttttataatattgttaggaatatcggtattttttgcgtataattagagtaaattatttgatcgagttagtgttcgcgtttgttttaattatcgtatgataattttttttagtagtaaagttcggttaagcgcgattgttattggtgttatatttgttcgcgtttttaaattttgttcgttagaatagcgtttattacgtaaagcggttttagtttattaagtaagaataggcgggatttattattataggaatgaattcgcgttcggtaagtttatcgttttcgtagagttggttgttaggcgagtagtgacgttttcgattttatttcgttatcgaatacggtttgggtaaacgttacggtataacgaatattgtcggtttttttatttttagtatgattattttaaaattcgtatgattagacgtagcgttatattattggcgatatttttcgtatcgcgaattat

SEQ ID NO: 23916 - DNA, 578 bp, Artificial Sequence
  chemically treated genomic DNA (Homo sapiens) CpG-island No: 23916
ataattcgcgatacgaaaaatatcgccaataatataacgctacgtctaatcatacgaattttaaaataatcatactaaaaataaaaaaaccgacaatattcgttataccgtaacgtttacccaaaccgtattcgataacgaaataaaatcgaaaacgtcactactcgcctaacaaccaactctacgaaaacgataaacttaccgaacgcgaattcattcctataataataaatcccgcctattcttacttaataaactaaaaccgctttacgtaataaacgctattctaacgaacaaaatttaaaaacgcgaacaaatataacaccaataacaatcgcgcttaaccgaactttactactaaaaaaaattatcatacgataattaaaacaaacgcgaacactaactcgatcaaataatttactctaattatacgcaaaaaataccgatattcctaacaatattataaaacataccacccgacgaataatcgtactcctactacaaacattatacgatccaacgtaaaattaaacgatctataaaaaaaaacgatataattacctaaattaataaacata

SEQ ID NO: 23917 - DNA, 502 bp, Artificial Sequence
  chemically treated genomic DNA (Homo sapiens) CpG-island No: 23917
atggcggaatttcgacgggcgatcggtttgttcgtcgcgattaatatgatcgttattaattggcgcgaaatgggttatgcggtgatgtttaatgcggtagatattttatttgtcgattcgtatttttggacgtttttcggtgtagttcgtgtggcgtagttttgcgacgattgggggttgatttggggcgttatatttttgtcgatgtggttttttatcgtttgaaataagggtcgattcgtattttttcggtttgtggttttttggtggtggtggcgttttattttatcgtttagatggtgggcgtaggtaaattgatcgagttgttgtttggttttaattattatattgcggtggtgttggtcggcgtgttgatgatgatgtacgttttgttcggcggtatgttggcgattatttgggtgtaaattattaaagtcgtgttgttgttgttcggtgttagttttatggtttttatggtgatgaaatacgtcggttttagttt

SEQ ID NO: 23918 - DNA, 502 bp, Artificial Sequence
  chemically treated genomic DNA (Homo sapiens) CpG-island No: 23918
aaactaaaaccgacgtatttcatcaccataaaaaccataaaactaacaccgaacaacaacaacacgactttaataatttacacccaaataatcgccaacataccgccgaacaaaacgtacatcatcatcaacacgccgaccaacaccaccgcaatataataattaaaaccaaacaacaactcgatcaatttacctacgcccaccatctaaacgataaaataaaacgccaccaccaccaaaaaaccacaaaccgaaaaaatacgaatcgacccttatttcaaacgataaaaaaccacatcgacaaaaatataacgccccaaatcaacccccaatcgtcgcaaaactacgccacacgaactacaccgaaaaacgtccaaaaatacgaatcgacaaataaaatatctaccgcattaaacatcaccgcataacccatttcgcgccaattaataacgatcatattaatcgcgacgaacaaaccgatcgcccgtcgaaattccgccat

SEQ ID NO: 23919 - DNA, 502 bp, Artificial Sequence
  chemically treated genomic DNA (Homo sapiens) CpG-island No: 23919
aagttaaagtcgacgtgttttattattataaaggttataaagttggtatcgaatagtaatagtacggttttgataatttgtatttaggtggtcgttagtatgtcgtcgaataggacgtatattattattagtacgtcgattagtattatcgtaatgtgatagttaaggttaaatagtagttcgattagtttatttgcgtttattatttgggcgataaggtaaagcgttattattattagagaattataggtcgaaagaatacgaatcggtttttgttttagacggtaagaggttatatcggtaaaggtgtagcgttttaggttagtttttagtcgtcgtaaagttgcgttatacggattgtatcggaaagcgtttagaagtgcggatcggtaagtggaatatttatcgtattgagtattatcgtatgatttatttcgcgttagttggtggcgattatgttagtcgcgacgggtaagtcggtcgttcgtcgaaatttcgttat

SEQ ID NO: 23920 - DNA, 502 bp, Artificial Sequence
  chemically treated genomic DNA (Homo sapiens) CpG-island No: 23920
ataacgaaatttcgacgaacgaccgacttacccgtcgcgactaacataatcgccaccaactaacgcgaaataaatcatacgataatactcaatacgataaatattccacttaccgatccgcacttctaaacgctttccgatacaatccgtataacgcaactttacgacgactaaaaactaacctaaaacgctacacctttaccgatataacctcttaccgtctaaaacaaaaaccgattcgtattctttcgacctataattctctaataataataacgctttaccttatcgcccaaataataaacgcaaataaactaatcgaactactatttaaccttaactatcacattacgataatactaatcgacgtactaataataatatacgtcctattcgacgacatactaacgaccacctaaatacaaattatcaaaaccgtactattactattcgataccaactttataacctttataataataaaacacgtcgactttaactt

SEQ ID NO: 23921 - DNA, 662 bp, Artificial Sequence
  chemically treated genomic DNA (Homo sapiens) CpG-island No: 23921
gcggtgtagttttttttttattagtattgttattattgttcggagttataatgtcgcgaaattgtcgtatcggcgtacgtttggtttgattaataagttgatatagcgtttttattagcggttgtataaagttttgatagcgatattgtttttcgttgatttgcgttagtatcgatttttagtgcgcggttatgttcggtcgcgtcgttattttcggtagcgaatggaatagcgttttttcggcgtcggtggagtggatatagcgtttttttttggttaggaaattacgtttgaataatagtttaataatttcggtacgcgttgtttttgtttttagattatcggtcgtacggaggattttttttagatttttattttgtataaagcgcgcgatttcggttatcgtcgaaagtagtgttgtatcggtaaaatggcgcggcggttgggtttgtcgttttattattttattttttttatatagtaatttatcgtttttcgttattataggtagtggcgtgtcgtcgttttttttatcgcgttttttgttgtttaatagcgtgcgttagtttgttttagtaagaaaacgcgttttagcgataaatttgtttttggtaatgtttagttcgataatatatttgcggaatatcgtattcgggtagaat

SEQ ID NO: 23922 - DNA, 662 bp, Artificial Sequence
  chemically treated genomic DNA (Homo sapiens) CpG-island No: 23922
attctacccgaatacgatattccgcaaatatattatcgaactaaacattaccaaaaacaaatttatcgctaaaacgcgttttcttactaaaacaaactaacgcacgctattaaacaacaaaaaacgcgataaaaaaaacgacgacacgccactacctataataacgaaaaacgataaattactatataaaaaaaataaaataataaaacgacaaacccaaccgccgcgccattttaccgatacaacactactttcgacgataaccgaaatcgcgcgctttatacaaaataaaaatctaaaaaaaatcctccgtacgaccgataatctaaaaacaaaaacaacgcgtaccgaaattattaaactattattcaaacgtaatttcctaaccaaaaaaaaacgctatatccactccaccgacgccgaaaaaacgctattccattcgctaccgaaaataacgacgcgaccgaacataaccgcgcactaaaaatcgatactaacgcaaatcaacgaaaaacaatatcgctatcaaaactttatacaaccgctaataaaaacgctatatcaacttattaatcaaaccaaacgtacgccgatacgacaatttcgcgacattataactccgaacaataataacaatactaataaaaaaaaaactacaccgc

SEQ ID NO: 23923 - DNA, 662 bp, Artificial Sequence
  chemically treated genomic DNA (Homo sapiens) CpG-island No: 23923
attttgttcggatgcggtgtttcgtaagtgtgttatcgaattggatattgttaaaggtaaatttgtcgttaaagcgcgtttttttgttgaagtaggttggcgtacgttgttaggtagtaaagagcgcgatgaagaaaacgacggtacgttattgtttgtggtggcgaaaggcgatgagttgttgtgtgaaaaaggtgaagtggtagagcggtaaatttagtcgtcgcgttattttatcgatgtaatattgttttcggcgatgatcgggatcgcgcgttttgtgtaggataaagatttgaaaaagatttttcgtgcgatcgatggtttggggatagaggtaacgcgtgtcgggattattgaattgttgtttaagcgtggttttttgattaaaaaagggcgttatatttattttatcgacgtcggaaaagcgttattttattcgttgtcggagatggcgacgcgatcggatatgatcgcgtattgggaatcggtgttgacgtaaattagcgaaaagtagtgtcgttattaggattttatgtagtcgttggtggggacgttatattagtttattgattaagttaaacgtacgtcggtgcggtagtttcgcggtattgtggtttcgggtagtggtggtagtgttgataagaaaaaggttgtatcgt

SEQ ID NO: 23924 - DNA, 662 bp, Artificial Sequence
  chemically treated genomic DNA (Homo sapiens) CpG-island No: 23924
acgatacaacctttttcttatcaacactaccaccactacccgaaaccacaataccgcgaaactaccgcaccgacgtacgtttaacttaatcaataaactaatataacgtccccaccaacgactacataaaatcctaataacgacactacttttcgctaatttacgtcaacaccgattcccaatacgcgatcatatccgatcgcgtcgccatctccgacaacgaataaaataacgcttttccgacgtcgataaaataaatataacgcccttttttaatcaaaaaaccacgcttaaacaacaattcaataatcccgacacgcgttacctctatccccaaaccatcgatcgcacgaaaaatctttttcaaatctttatcctacacaaaacgcgcgatcccgatcatcgccgaaaacaatattacatcgataaaataacgcgacgactaaatttaccgctctaccacttcacctttttcacacaacaactcatcgcctttcgccaccacaaacaataacgtaccgtcgttttcttcatcgcgctctttactacctaacaacgtacgccaacctacttcaacaaaaaaacgcgctttaacgacaaatttacctttaacaatatccaattcgataacacacttacgaaacaccgcatccgaacaaaat

SEQ ID NO: 23925 - DNA, 643 bp, Artificial Sequence
  chemically treated genomic DNA (Homo sapiens) CpG-island No: 23925
agttggtgttgcgtacgtcgtgtatttttagtatatttagcgataacggatgcgtttttggtaatatgtttagcgttattaaagttatggtggtaggtagttgcgtttttttcgttagtttacgtattcgtgcgggcgtattgattatatcgtcgtttagataaagtatcgggcgtttggtagcgttaattatcgtcgttgcgttacgaatgtttttttcgttaaaggcgggggcggcggttttttttgttatagcgggttgtgttttaattttaaaaattgtcgtttgtatatttttaggaatgtttatttatatcgggtttgggcggtttgattgcgtaatgcggaaggtatcgtttatgatttgcgggagtttttcgatatgtttgattagatagttgtgtttggtgatggggatagagatgtcgtaggtgtttattttttggaaggcgtcggtgtcgattatcgaggcgggaatttgattagtgatgtaaattagcgggatggagtttagtcgcgtatcggtaatggcggttattaggttagtcgtattcggtttttacggtagtttacgttataaataagtaatagttattggatgattaatgtttagttattgggcgattttagtatcgataattat

SEQ ID NO: 23926 - DNA, 643 bp, Artificial Sequence
  chemically treated genomic DNA (Homo sapiens) CpG-island No: 23926
ataattatcgatactaaaatcgcccaataactaaacattaatcatccaataactattacttatttataacgtaaactaccgtaaaaaccgaatacgactaacctaataaccgccattaccgatacgcgactaaactccatcccgctaatttacatcactaatcaaattcccgcctcgataatcgacaccgacgccttccaaaaaataaacacctacgacatctctatccccatcaccaaacacaactatctaatcaaacatatcgaaaaactcccgcaaatcataaacgataccttccgcattacgcaatcaaaccgcccaaacccgatataaataaacattcctaaaaatatacaaacgacaatttttaaaattaaaacacaacccgctataacaaaaaaaaccgccgcccccgcctttaacgaaaaaaacattcgtaacgcaacgacgataattaacgctaccaaacgcccgatactttatctaaacgacgatataatcaatacgcccgcacgaatacgtaaactaacgaaaaaaacgcaactacctaccaccataactttaataacgctaaacatattaccaaaaacgcatccgttatcgctaaatatactaaaaatacacgacgtacgcaacaccaact

SEQ ID NO: 23927 - DNA, 643 bp, Artificial Sequence
  chemically treated genomic DNA (Homo sapiens) CpG-island No: 23927
gtagttatcgatattgaaatcgtttagtaattgggtattggttatttagtgattgttgtttgtttgtggcgtaaattgtcgtagagatcgggtgcgattaatttggtgatcgttattgtcgatgcgcggttggattttatttcgttgatttgtattattggttaggttttcgtttcgatgatcggtatcgacgttttttaggaagtggatatttacggtatttttatttttattattaaatataattatttggttagatatatcgaagaattttcgtaggttatgagcgatgtttttcgtattgcgtaattaggtcgtttaggttcggtgtggatagatatttttaaggatgtgtaaacggtagtttttgagattgaaatatagttcgttatggtagaaaaagtcgtcgttttcgtttttagcgaagaaagtattcgtgacgtagcggcgatgattaacgttgttaaacgttcggtgttttatttgggcggcggtgtgattaatgcgttcgtacgggtgcgtgaattggcggagaaagcgtaattgtttattattatgattttaatggcgttgggtatgttgttaaaagcgtattcgttgtcgttgggtatgttggggatgtacggcgtgcgtagtattaatt

SEQ ID NO: 23928 - DNA, 643 bp, Artificial Sequence
  chemically treated genomic DNA (Homo sapiens) CpG-island No: 23928
aattaatactacgcacgccgtacatccccaacatacccaacgacaacgaatacgcttttaacaacatacccaacgccattaaaatcataataataaacaattacgctttctccgccaattcacgcacccgtacgaacgcattaatcacaccgccgcccaaataaaacaccgaacgtttaacaacgttaatcatcgccgctacgtcacgaatactttcttcgctaaaaacgaaaacgacgactttttctaccataacgaactatatttcaatctcaaaaactaccgtttacacatccttaaaaatatctatccacaccgaacctaaacgacctaattacgcaatacgaaaaacatcgctcataacctacgaaaattcttcgatatatctaaccaaataattatatttaataataaaaataaaaataccgtaaatatccacttcctaaaaaacgtcgataccgatcatcgaaacgaaaacctaaccaataatacaaatcaacgaaataaaatccaaccgcgcatcgacaataacgatcaccaaattaatcgcacccgatctctacgacaatttacgccacaaacaaacaacaatcactaaataaccaatacccaattactaaacgatttcaatatcgataactac

SEQ ID NO: 23929 - DNA, 698 bp, Artificial Sequence
  chemically treated genomic DNA (Homo sapiens) CpG-island No: 23929
aattacgatcgtcggaatgtttttcggtgcgttggtgggcggtattattggcgataaaatcggtcgtagaaatgcgtttattttttatgaggttatttatattgtttcgatggttgtcggtgtttttttatcgaatatggcgtttattggtggaaattattgtcgtcgttggatagattttttcgttcgtcgtagtgttggcgatcgtcgtttcggtgatcggttttggtttgtaattagcgattatcgttttgattttttacggtgtgttgttcgttttgtaggcgatatttgtcgggttgggagcgattgatgttagcgtgatagaagttgcgaaaggtatgggaatgagtcgtggttagcgagtgcgtaaggtcgagttatcgttggcggtttcggtgattttggcgggcgtgcgaatttcggtgattattaatattggtacggcgacgatcgttttaacggtaggggttagtacgttgggtacgtttattattatcgggtttagcggatttaatatcgcgtatgtgatttagggggcgttattggtggtattggcggcgattatcgtagatcgtttgtttgaaaggttggtgtaggcgtttagttagtacgtaaaataaaggtataatttgcgagtatgacgttattaatttcgtttaacgttataaataggaatagggcgatgattttaattt

SEQ ID NO: 23930 - DNA, 698 bp, Artificial Sequence
  chemically treated genomic DNA (Homo sapiens) CpG-island No: 23930
aaattaaaatcatcgccctattcctatttataacgttaaacgaaattaataacgtcatactcgcaaattatacctttattttacgtactaactaaacgcctacaccaacctttcaaacaaacgatctacgataatcgccgccaataccaccaataacgccccctaaatcacatacgcgatattaaatccgctaaacccgataataataaacgtacccaacgtactaacccctaccgttaaaacgatcgtcgccgtaccaatattaataatcaccgaaattcgcacgcccgccaaaatcaccgaaaccgccaacgataactcgaccttacgcactcgctaaccacgactcattcccatacctttcgcaacttctatcacgctaacatcaatcgctcccaacccgacaaatatcgcctacaaaacgaacaacacaccgtaaaaaatcaaaacgataatcgctaattacaaaccaaaaccgatcaccgaaacgacgatcgccaacactacgacgaacgaaaaaatctatccaacgacgacaataatttccaccaataaacgccatattcgataaaaaaacaccgacaaccatcgaaacaatataaataacctcataaaaaataaacgcatttctacgaccgattttatcgccaataataccgcccaccaacgcaccgaaaaacattccgacgatcgtaatt

SEQ ID NO: 23931 - DNA, 698 bp, Artificial Sequence
  chemically treated genomic DNA (Homo sapiens) CpG-island No: 23931
aaattggggttatcgttttgtttttgtttatggcgttaggcggaattggtggcgttatgttcgtaggttatatttttattttgcgtgttggttaagcgtttgtattagttttttaaataggcggtttgcgatgatcgtcgttagtgttattagtaacgttttttggattatatacgcggtattaaattcgttaagttcgatgatgatgggcgtatttagcgtgttggtttttatcgttgaggcgatcgtcgtcgtattaatgttgataattatcgaagttcgtacgttcgttagaattatcggagtcgttagcggtagttcgattttacgtattcgttgattacgatttatttttatatttttcgtaatttttgttacgttggtattaatcgtttttagttcggtaagtgtcgtttgtaggacgggtagtatatcgtaaaggattaaggcgataatcgttggttgtagattaaagtcgattatcggaacggcgatcgttagtattgcgacgggcggaaaagtttgtttaacggcggtaatagtttttattagtgggcgttatattcggtgagaaagtatcgataattatcgaggtaatatgaatggttttatagaggatgaacgtatttttgcgatcggttttgtcgttaatgatgtcgtttattagcgtatcgagaaatatttcggcggtcgtgatt

SEQ ID NO: 23932 - DNA, 698 bp, Artificial Sequence
  chemically treated genomic DNA (Homo sapiens) CpG-island No: 23932
aatcacgaccgccgaaatatttctcgatacgctaataaacgacatcattaacgacaaaaccgatcgcaaaaatacgttcatcctctataaaaccattcatattacctcgataattatcgatactttctcaccgaatataacgcccactaataaaaactattaccgccgttaaacaaacttttccgcccgtcgcaatactaacgatcgccgttccgataatcgactttaatctacaaccaacgattatcgccttaatcctttacgatatactacccgtcctacaaacgacacttaccgaactaaaaacgattaataccaacgtaacaaaaattacgaaaaatataaaaataaatcgtaatcaacgaatacgtaaaatcgaactaccgctaacgactccgataattctaacgaacgtacgaacttcgataattatcaacattaatacgacgacgatcgcctcaacgataaaaaccaacacgctaaatacgcccatcatcatcgaacttaacgaatttaataccgcgtatataatccaaaaaacgttactaataacactaacgacgatcatcgcaaaccgcctatttaaaaaactaatacaaacgcttaaccaacacgcaaaataaaaatataacctacgaacataacgccaccaattccgcctaacgccataaacaaaaacaaaacgataaccccaattt

SEQ ID NO: 23933 - DNA, 1146 bp, Artificial Sequence
  chemically treated genomic DNA (Homo sapiens) CpG-island No: 23933
agtcggatgaagtgtataatttgggcgtaatgagttacgttgcggttttttttgagttattagaatatatcgttgacgtcgacgcgatgggtacgttgcgtttgttggaggcgattcgttttttcggtttggaaaagaaaattcgtttttattaggtttttatttttgaattgtatggtttggtgtaggaaatttcgtagaaagagattacgtcgttttattcgcgattttcgtatgcggtcgttaaattgtacgtttattggattatcgttaattatcgtgaattttacggtatgtacgtttgtaacggaattttttttaattatgaattttcgcgtcgcggcgaaattttcgttattcgtaaaattattcgcgtaatcgttaatatcgtttaggggttggagtcgtgtttgtatttcggtaatatggattttttgcgtgattgggcgcgtagaaaaacgtatcggtttggtattgttcggtaagggtaatatcggttttcggtggttggaattgttcgttcgtgagtagagtacgttttcggtacgtatcggttttgagtttgtgttggtaggtgtggtggatagtcgtcgtagtttgttgagttatgacgggttggacgttagtcgcgcgttagttttttttaacgatgaagcggttgagtaggatgaagagtcgttgtttttgtggatgcgcgtttattcgtatgatgatttagtggtgttggacgttatcgttagttagtagtttgttgattagtattttgatttcgttagttacggtttttacgttattagcgttaataaattggcgggagttagcgatagtaataaatatcgttagatttacgacgttttcgaaaaaatcgggcgttattggttgtataatgttatcgtcggtgcgggtttgtcgattaattatatcgtgcgcgatttgatcgatagcggcgatattattttgtcgattagcgggatttttttcggtacgtttttttggttgtttttgtaattcgacggtagcgtgtcgtttatcgagttggtggattaggcgtggtagtagggtttaatcgaatttaagcgttagtattgttagtttgtaggatgaaaagtatgtcggtttttagtttatggtcgaggatattttgta

SEQ ID NO: 23934 - DNA, 1146 bp, Artificial Sequence
  chemically treated genomic DNA (Homo sapiens) CpG-island No: 23934
tacaaaatatcctcgaccataaactaaaaaccgacatacttttcatcctacaaactaacaatactaacgcttaaattcgattaaaccctactaccacgcctaatccaccaactcgataaacgacacgctaccgtcgaattacaaaaacaaccaaaaaaacgtaccgaaaaaaatcccgctaatcgacaaaataatatcgccgctatcgatcaaatcgcgcacgatataattaatcgacaaacccgcaccgacgataacattatacaaccaataacgcccgattttttcgaaaacgtcgtaaatctaacgatatttattactatcgctaactcccgccaatttattaacgctaataacgtaaaaaccgtaactaacgaaatcaaaatactaatcaacaaactactaactaacgataacgtccaacaccactaaatcatcatacgaataaacgcgcatccacaaaaacaacgactcttcatcctactcaaccgcttcatcgttaaaaaaaactaacgcgcgactaacgtccaacccgtcataactcaacaaactacgacgactatccaccacacctaccaacacaaactcaaaaccgatacgtaccgaaaacgtactctactcacgaacgaacaattccaaccaccgaaaaccgatattacccttaccgaacaataccaaaccgatacgtttttctacgcgcccaatcacgcaaaaaatccatattaccgaaatacaaacacgactccaacccctaaacgatattaacgattacgcgaataattttacgaataacgaaaatttcgccgcgacgcgaaaattcataattaaaaaaaattccgttacaaacgtacataccgtaaaattcacgataattaacgataatccaataaacgtacaatttaacgaccgcatacgaaaatcgcgaataaaacgacgtaatctctttctacgaaatttcctacaccaaaccatacaattcaaaaataaaaacctaataaaaacgaattttcttttccaaaccgaaaaaacgaatcgcctccaacaaacgcaacgtacccatcgcgtcgacgtcaacgatatattctaataactcaaaaaaaaccgcaacgtaactcattacgcccaaattatacacttcatccgact

SEQ ID NO: 23935 - DNA, 1146 bp, Artificial Sequence
  chemically treated genomic DNA (Homo sapiens) CpG-island No: 23935
tgtaaaatattttcgattatggattgaaaatcgatatgttttttattttgtaaattgataatgttggcgtttaggttcggttaagttttgttgttacgtttgatttattagttcggtaaacggtacgttatcgtcgaattgtaggaatagttaggagagcgtgtcggagaagatttcgttgatcgataaaatagtatcgtcgttgtcgattagatcgcgtacggtgtggttgatcggtaagttcgtatcgacggtggtattgtatagttagtgacgttcggttttttcgaaggcgtcgtggatttggcgatatttattgttgtcgttggttttcgttagtttgttggcgttgataacgtggaaatcgtggttggcgaaattaagatattgattagtaagttgttggttggcggtaacgtttagtattattaaattattatacggatgggcgcgtatttataggaataacgattttttattttgtttaatcgttttatcgttgaagaaggttaacgcgcggttggcgtttagttcgttatagtttaataggttgcggcggttgtttattatatttgttagtataaatttaaagtcggtacgtgtcgaaagcgtgttttgtttacgggcgaatagttttagttatcgggaatcgatattgtttttatcgaataatattaggtcgatgcgtttttttgcgcgtttagttacgtagggaatttatattgtcgaggtataggtacgattttagtttttgggcgatgttggcgattgcgcgggtgattttgcgggtaacgaaggtttcgtcgcggcgcggggatttatggttgaagagaatttcgttataggcgtatatgtcgtaggatttacggtagttaacggtgatttagtaggcgtatagtttggcgatcgtatacggagatcgcgggtagaacggcgtggtttttttttgcggaattttttgtattagattatatagtttagaggtggaagtttgatagaaacgagtttttttttttagatcgaggaagcggatcgtttttagtaggcgtagcgtatttatcgcgtcgacgttagcggtatattttggtgatttaaaagagatcgtaacgtggtttattgcgtttaggttgtatattttattcggtt

SEQ ID NO: 23936 - DNA, 1146 bp, Artificial Sequence
  chemically treated genomic DNA (Homo sapiens) CpG-island No: 23936
aaccgaataaaatatacaacctaaacgcaataaaccacgttacgatctcttttaaatcaccaaaatataccgctaacgtcgacgcgataaatacgctacgcctactaaaaacgatccgcttcctcgatctaaaaaaaaaaactcgtttctatcaaacttccacctctaaactatataatctaatacaaaaaattccgcaaaaaaaaaccacgccgttctacccgcgatctccgtatacgatcgccaaactatacgcctactaaatcaccgttaactaccgtaaatcctacgacatatacgcctataacgaaattctcttcaaccataaatccccgcgccgcgacgaaaccttcgttacccgcaaaatcacccgcgcaatcgccaacatcgcccaaaaactaaaatcgtacctatacctcgacaatataaattccctacgtaactaaacgcgcaaaaaaacgcatcgacctaatattattcgataaaaacaatatcgattcccgataactaaaactattcgcccgtaaacaaaacacgctttcgacacgtaccgactttaaatttatactaacaaatataataaacaaccgccgcaacctattaaactataacgaactaaacgccaaccgcgcgttaaccttcttcaacgataaaacgattaaacaaaataaaaaatcgttattcctataaatacgcgcccatccgtataataatttaataatactaaacgttaccgccaaccaacaacttactaatcaatatcttaatttcgccaaccacgatttccacgttatcaacgccaacaaactaacgaaaaccaacgacaacaataaatatcgccaaatccacgacgccttcgaaaaaaccgaacgtcactaactatacaataccaccgtcgatacgaacttaccgatcaaccacaccgtacgcgatctaatcgacaacgacgatactattttatcgatcaacgaaatcttctccgacacgctctcctaactattcctacaattcgacgataacgtaccgtttaccgaactaataaatcaaacgtaacaacaaaacttaaccgaacctaaacgccaacattatcaatttacaaaataaaaaacatatcgattttcaatccataatcgaaaatattttaca

SEQ ID NO: 23937 - DNA, 879 bp, Artificial Sequence
  chemically treated genomic DNA (Homo sapiens) CpG-island No: 23937
gttttagaattggtcgttggtatgtagtgcggtggtagcgatgcgttttttggtgtaacggtaaattcggcggttggttatgcgtttgatttattggtgcgttgcggcgtaacggtgatgtttttagaagtaacggaagtgcgtgacgcgatttatttgttgatattacgcgtagtgaacgaagaggtcggtaaacggttgttggaggagatggagtggtacgataattattttaatatgggaaaaatcgatcgtagcgttaatttttcgtcgggtaataagaaaggcggtttggtaaacgtggtagagaaggtattcggttttattgttaaatcgggtaaaagcgtaattgttgaagtgttgtcgttcggttaacgttcgattaaacgcggattaatttacgtcgcgacgttagttagcgattttgtttgtggtacgtaataggtggtttcgggtattatagtgtaagtgtttacgatcggtcgtggtacgtcgtacggtttgatggcggtattcgttattaaaatggtaattcgtatcgagttggcgaaaatgttcgttgtcgatggtgtcggttatgcgtaaatgatcgcgtagttagcgtattagcggtttgtcgttaatgtttgatttatttttatgggcgagcgttatttttacgtcggtaaatagtaggaaggtatcgaagatatataggatttagtcgaattgcgaaattagttagttgttagtgaagattatgatggtacgtagaataatcgtttcgagtacgttatatattagtacgcggcgttgtaatgtcgtcggaatagagaaatagttgaataatattagttagataaagacgttatcgatcgttagcgattttttaattagata

SEQ ID NO: 23938 - DNA, 879 bp, Artificial Sequence
  chemically treated genomic DNA (Homo sapiens) CpG-island No: 23938
tatctaattaaaaaatcgctaacgatcgataacgtctttatctaactaatattattcaactatttctctattccgacgacattacaacgccgcgtactaatatataacgtactcgaaacgattattctacgtaccatcataatcttcactaacaactaactaatttcgcaattcgactaaatcctatatatcttcgataccttcctactatttaccgacgtaaaaataacgctcgcccataaaaataaatcaaacattaacgacaaaccgctaatacgctaactacgcgatcatttacgcataaccgacaccatcgacaacgaacattttcgccaactcgatacgaattaccattttaataacgaataccgccatcaaaccgtacgacgtaccacgaccgatcgtaaacacttacactataatacccgaaaccacctattacgtaccacaaacaaaatcgctaactaacgtcgcgacgtaaattaatccgcgtttaatcgaacgttaaccgaacgacaacacttcaacaattacgcttttacccgatttaacaataaaaccgaataccttctctaccacgtttaccaaaccgcctttcttattacccgacgaaaaattaacgctacgatcgatttttcccatattaaaataattatcgtaccactccatctcctccaacaaccgtttaccgacctcttcgttcactacgcgtaatatcaacaaataaatcgcgtcacgcacttccgttacttctaaaaacatcaccgttacgccgcaacgcaccaataaatcaaacgcataaccaaccgccgaatttaccgttacaccaaaaaacgcatcgctaccaccgcactacataccaacgaccaattctaaaac

SEQ ID NO: 23939 - DNA, 879 bp, Artificial Sequence
  chemically treated genomic DNA (Homo sapiens) CpG-island No: 23939
tatttgattgagaaatcgttggcggtcgataacgtttttgtttggttgatgttgtttagttatttttttgtttcggcggtattataacgtcgcgtgttggtgtatggcgtgttcggggcgattgttttgcgtattattatgatttttattggtagttggttaatttcgtagttcgattggattttgtatattttcggtgtttttttgttgtttatcggcgtgaagatggcgttcgtttatgaagatgaattaggtattggcgataagtcgttggtgcgttggttacgcggttatttgcgtatgatcgatattatcgataacgagtattttcgttagttcggtgcgggttgttattttaatgacgggtatcgttattaggtcgtacggcgtattacgatcggtcgtaaatatttgtattgtgatattcgaagttatttgttgcgtgttatagataaaatcgttggttggcgtcgcggcgtaaattaattcgcgtttagtcgggcgttgatcgggcgatagtattttaataattgcgtttttattcgatttagtaatggagtcgagtgttttttttattacgtttgttagatcgttttttttgttgttcggcgaagggttggcgttgcggtcggttttttttatattgagatagttatcgtattattttattttttttagtagtcgtttgtcgattttttcgtttattgcgcgtggtgttagtagatggatcgcgttacgtattttcgttatttttgaaaatattatcgttgcgtcgtagcgtattagtagattagacgtatagttaatcgtcgggtttgtcgttatattagaaaacgtatcgttgttatcgtattgtatattaacgattagttttgaagt

SEQ ID NO: 23940 - DNA, 879 bp, Artificial Sequence
  chemically treated genomic DNA (Homo sapiens) CpG-island No: 23940
acttcaaaactaatcgttaatatacaatacgataacaacgatacgttttctaatataacgacaaacccgacgattaactatacgtctaatctactaatacgctacgacgcaacgataatattttcaaaaataacgaaaatacgtaacgcgatccatctactaacaccacgcgcaataaacgaaaaaatcgacaaacgactactaaaaaaaataaaataatacgataactatctcaatataaaaaaaaccgaccgcaacgccaacccttcgccgaacaacaaaaaaaacgatctaacaaacgtaataaaaaaaacactcgactccattactaaatcgaataaaaacgcaattattaaaatactatcgcccgatcaacgcccgactaaacgcgaattaatttacgccgcgacgccaaccaacgattttatctataacacgcaacaaataacttcgaatatcacaatacaaatatttacgaccgatcgtaatacgccgtacgacctaataacgatacccgtcattaaaataacaacccgcaccgaactaacgaaaatactcgttatcgataatatcgatcatacgcaaataaccgcgtaaccaacgcaccaacgacttatcgccaatacctaattcatcttcataaacgaacgccatcttcacgccgataaacaacaaaaaaacaccgaaaatatacaaaatccaatcgaactacgaaattaaccaactaccaataaaaatcataataatacgcaaaacaatcgccccgaacacgccatacaccaacacgcgacgttataataccgccgaaacaaaaaaataactaaacaacatcaaccaaacaaaaacgttatcgaccgccaacgatttctcaatcaaata

SEQ ID NO: 23941 - DNA, 825 bp, Artificial Sequence
  chemically treated genomic DNA (Homo sapiens) CpG-island No: 23941
tgtgtgtacgtggttgatttatttacgtattatcgtgcgtcgtagtttttagggcgtagttttttatgttgattatcgaaggcgtaaattacgcgttgtaataacgttgttaaataagtaattcgttaaataatttcgattattcgagtggtcgatttcggtattttttatggttcgcgattatgtttatttttaagttttcgagtatgttcgagatgtttttatattgtgtcgttgatgttcgggcgcgattacgttgatattgcgtcggtagttttttaggaaattgtggattaggtcgtgttggaagttcgtgcgttacgttataagtttaagttggaggatattagttttacgttacgtcgtggcgaagtgttcggtattgttggtttgttgggggtagggcgtagtgaattgttgaaggcgattgttgggttggaggagtatgaatagggcgaaattgttattaacggcgagaaaattacgcgtttcgattacggcgatatgttgaaacgcggtattggttatacgttagaaaatcgtaaagaagcggggattattttttggttgggcgttgacgaaaatatagtgttgattaatcggtaaaaaattagcgttaacggtgtgttgtaatggtttattattcgtcgtttgatcgaagaggtgatgtagcggatgacggttaaggtcgttagtagcgaaatatttatcggtacgttttttggtggtaattagtaaaaagtggtgatcggtcgttgggtttatgttgttagttagatttattttgcgttcgaataatagattgttagatatgtaggtaataat

SEQ ID NO: 23942 - DNA, 825 bp, Artificial Sequence
  chemically treated genomic DNA (Homo sapiens) CpG-island No: 23942
attattacctacatatctaacaatctattattcgaacgcaaaataaatctaactaacaacataaacccaacgaccgatcaccactttttactaattaccaccaaaaaacgtaccgataaatatttcgctactaacgaccttaaccgtcatccgctacatcacctcttcgatcaaacgacgaataataaaccattacaacacaccgttaacgctaattttttaccgattaatcaacactatattttcgtcaacgcccaaccaaaaaataatccccgcttctttacgattttctaacgtataaccaataccgcgtttcaacatatcgccgtaatcgaaacgcgtaattttctcgccgttaataacaatttcgccctattcatactcctccaacccaacaatcgccttcaacaattcactacgccctacccccaacaaaccaacaataccgaacacttcgccacgacgtaacgtaaaactaatatcctccaacttaaacttataacgtaacgcacgaacttccaacacgacctaatccacaatttcctaaaaaactaccgacgcaatatcaacgtaatcgcgcccgaacatcaacgacacaatataaaaacatctcgaacatactcgaaaacttaaaaataaacataatcgcgaaccataaaaaataccgaaatcgaccactcgaataatcgaaattatttaacgaattacttatttaacaacgttattacaacgcgtaatttacgccttcgataatcaacataaaaaactacgccctaaaaactacgacgcacgataatacgtaaataaatcaaccacgtacacaca

SEQ ID NO: 23943 - DNA, 825 bp, Artificial Sequence
  chemically treated genomic DNA (Homo sapiens) CpG-island No: 23943
attgttgtttgtatatttgataatttgttattcgggcgtagggtgaatttggttggtagtatagatttaacgatcgattattattttttgttgattgttattagaaagcgtgtcgatgggtgtttcgttattggcggttttgatcgttattcgttgtattattttttcggttaggcggcggatggtggattattgtagtatatcgttggcgttgattttttgtcgattggttagtattgtattttcgttaacgtttaattagggaatgattttcgtttttttgcggttttttggcgtatagttaatgtcgcgttttagtatgtcgtcgtaatcggggcgcgtgattttttcgtcgttgataataatttcgttttgtttatatttttttagtttaataatcgtttttagtaatttattgcgttttgtttttagtagattagtaatgtcgagtatttcgttacgacgtagcgtaaaattgatattttttagtttgggtttatggcgtaacgtacggatttttagtacggtttgatttataattttttgaggggttatcggcgtaatattaacgtgatcgcgttcgagtattagcgatataatataggggtatttcggatatgttcgggaatttggggataggtatgatcgcgagttatggaaagtatcgaagtcgattattcgggtggtcggggttatttggcgagttgtttgtttggtaacgttgttgtaacgcgtggtttgcgttttcggtggttagtatgggaaattacgttttgagaattgcggcgtacggtggtacgtggataagttaattacgtgtatata

SEQ ID NO: 23944 - DNA, 825 bp, Artificial Sequence
  chemically treated genomic DNA (Homo sapiens) CpG-island No: 23944
tatatacacgtaattaacttatccacgtaccaccgtacgccgcaattctcaaaacgtaatttcccatactaaccaccgaaaacgcaaaccacgcgttacaacaacgttaccaaacaaacaactcgccaaataaccccgaccacccgaataatcgacttcgatactttccataactcgcgatcatacctatccccaaattcccgaacatatccgaaatacccctatattatatcgctaatactcgaacgcgatcacgttaatattacgccgataacccctcaaaaaattataaatcaaaccgtactaaaaatccgtacgttacgccataaacccaaactaaaaaatatcaattttacgctacgtcgtaacgaaatactcgacattactaatctactaaaaacaaaacgcaataaattactaaaaacgattattaaactaaaaaaatataaacaaaacgaaattattatcaacgacgaaaaaatcacgcgccccgattacgacgacatactaaaacgcgacattaactatacgccaaaaaaccgcaaaaaaacgaaaatcattccctaattaaacgttaacgaaaatacaatactaaccaatcgacaaaaaatcaacgccaacgatatactacaataatccaccatccgccgcctaaccgaaaaaataatacaacgaataacgatcaaaaccgccaataacgaaacacccatcgacacgctttctaataacaatcaacaaaaaataataatcgatcgttaaatctatactaccaaccaaattcaccctacgcccgaataacaaattatcaaatatacaaacaacaat

SEQ ID NO: 23945 - DNA, 682 bp, Artificial Sequence
  chemically treated genomic DNA (Homo sapiens) CpG-island No: 23945
tcgaaggtcggcgttattacgtttattacgatgtggtcggcgttttggatcgttgcgaagggtatattggtattcgtatttttcgcggttatcgatttttttttaagagtgtgttatttgtttaggttattttttaaggtcgtattatcggtaaaagcggtgaatcgttgattcgtaaaggtgtggatatggcgatgcgtttgatgggtgagtagttcgttattggcgaaattatcgcggaagcgttagttaatgttcgtaagttggaagagaaaggttttcgttatttttacgatatgttgggcgaagtcgcgttgatcgtcgtagatgtataggcgtatatggttttttattagtaggcgatttacgttatcggtaaagcgtttaacggtcgtggtatttatgaagggtcgggtattttaattaaattgtcggcgttgtattcgcgttatagtcgcgtttagtatgatcgggtaatggaagagttttattcgcgtttgaaattatttattttgttggcgcgttagtacgatattggtattaatattgacgtcgaagagttcgatcgtttggagatttttttcgatttgttggaaaaattttgtttcgagtcggaattggtaggttggaacggtatcggttttgttatttaggtttattaaaaacgttgttcgttggtgat

SEQ ID NO: 23946 - DNA, 682 bp, Artificial Sequence
  chemically treated genomic DNA (Homo sapiens) CpG-island No: 23946
atcaccaacgaacaacgtttttaataaacctaaataacaaaaccgataccgttccaacctaccaattccgactcgaaacaaaatttttccaacaaatcgaaaaaaatctccaaacgatcgaactcttcgacgtcaatattaataccaatatcgtactaacgcgccaacaaaataaataatttcaaacgcgaataaaactcttccattacccgatcatactaaacgcgactataacgcgaatacaacgccgacaatttaattaaaatacccgacccttcataaataccacgaccgttaaacgctttaccgataacgtaaatcgcctactaataaaaaaccatatacgcctatacatctacgacgatcaacgcgacttcgcccaacatatcgtaaaaataacgaaaacctttctcttccaacttacgaacattaactaacgcttccgcgataatttcgccaataacgaactactcacccatcaaacgcatcgccatatccacacctttacgaatcaacgattcaccgcttttaccgataatacgaccttaaaaaataacctaaacaaataacacactcttaaaaaaaaatcgataaccgcgaaaaatacgaataccaatatacccttcgcaacgatccaaaacgccgaccacatcgtaataaacgtaataacgccgaccttcga

SEQ ID NO: 23947 - DNA, 682 bp, Artificial Sequence
  chemically treated genomic DNA (Homo sapiens) CpG-island No: 23947
attattaacgggtagcgtttttgataagtttgaataataaaatcgatgtcgttttagtttgttagtttcggttcgaaatagagtttttttagtagatcgagggagatttttaggcgatcggatttttcggcgttaatgttgatattaatatcgtattgacgcgttagtagggtgagtgattttagacgcgggtaaagtttttttattattcggttatattgggcgcggttataacgcggatgtagcgtcgatagtttgattgaaatgttcggttttttatagatgttacgatcgttagacgttttatcgatggcgtgaatcgtttgttgataggaaattatatacgtttgtgtatttgcggcggttagcgcggtttcgtttagtatatcgtaagagtaacggaaattttttttttttagtttgcgggtattggttaacgttttcgcgatggtttcgttagtgacgaattgtttatttattaggcgtatcgttatatttatatttttgcggattagcggtttatcgtttttatcgataatgcggttttggaggatggtttaagtaggtggtatatttttgggggaaaatcggtgatcgcggggaatgcgggtattagtgtgtttttcgtaacggtttaggacgtcgattatatcgtgataggcgtaataacgtcgattttcga

SEQ ID NO: 23948 - DNA, 682 bp, Artificial Sequence
  chemically treated genomic DNA (Homo sapiens) CpG-island No: 23948
tcgaaaatcgacgttattacgcctatcacgatataatcgacgtcctaaaccgttacgaaaaacacactaatacccgcattccccgcgatcaccgattttcccccaaaaatataccacctacttaaaccatcctccaaaaccgcattatcgataaaaacgataaaccgctaatccgcaaaaatataaatataacgatacgcctaataaataaacaattcgtcactaacgaaaccatcgcgaaaacgttaaccaatacccgcaaactaaaaaaaaaaaatttccgttactcttacgatatactaaacgaaaccgcgctaaccgccgcaaatacacaaacgtatataatttcctatcaacaaacgattcacgccatcgataaaacgtctaacgatcgtaacatctataaaaaaccgaacatttcaatcaaactatcgacgctacatccgcgttataaccgcgcccaatataaccgaataataaaaaaactttacccgcgtctaaaatcactcaccctactaacgcgtcaatacgatattaatatcaacattaacgccgaaaaatccgatcgcctaaaaatctccctcgatctactaaaaaaactctatttcgaaccgaaactaacaaactaaaacgacatcgattttattattcaaacttatcaaaaacgctacccgttaataat

SEQ ID NO: 23949 - DNA, 672 bp, Artificial Sequence
  chemically treated genomic DNA (Homo sapiens) CpG-island No: 23949
acgcgttagcgttttatagcgtatgtattcgttcggtaatcgttatcgtttagggtttatgtattcgttttttatagggagagtgtaaaataatacgttagttattaattttattacggtatcgttcgaggattagatggcgatttttcggaacgatgttcgtcgcgttgcgttgttttttaattaatttttgaatattggcgatcgtatttttttttgttagttacgggggaatagtttcggaaaagaacgcgttattcgttagtaaatgaagaaaatcgtcgattatttcgtttaatttagtcggacgttcgttatttttattacgttagaaggggagtcgggtagaacgattcggagtaggagttataattatttgatcgcgggtgatttgttggattcgttatgaggtagcgtcgagagtgataatgtcgtttattcgcgatttatatattatttttttatttagttgatttattcgtcgcgaatcggtttttttttaattttcgggtaataatacgttagtatatgttacgatgtcggaatggtgtacgtcgttggtaatcgttaataattgagcgttaggtcgggcggttaatatttcggtttttttgttttagattagtttggggtagaaaagtagaaaaatcgttagagggatagcgttcggaa

SEQ ID NO: 23950 - DNA, 672 bp, Artificial Sequence
  chemically treated genomic DNA (Homo sapiens) CpG-island No: 23950
ttccgaacgctatccctctaacgatttttctacttttctaccccaaactaatctaaaacaaaaaaaccgaaatattaaccgcccgacctaacgctcaattattaacgattaccaacgacgtacaccattccgacatcgtaacatatactaacgtattattacccgaaaattaaaaaaaaaccgattcgcgacgaataaatcaactaaataaaaaaataatatataaatcgcgaataaacgacattatcactctcgacgctacctcataacgaatccaacaaatcacccgcgatcaaataattataactcctactccgaatcgttctacccgactccccttctaacgtaataaaaataacgaacgtccgactaaattaaacgaaataatcgacgattttcttcatttactaacgaataacgcgttcttttccgaaactattcccccgtaactaacaaaaaaaaatacgatcgccaatattcaaaaattaattaaaaaacaacgcaacgcgacgaacatcgttccgaaaaatcgccatctaatcctcgaacgataccgtaataaaattaataactaacgtattattttacactctccctataaaaaacgaatacataaaccctaaacgataacgattaccgaacgaatacatacgctataaaacgctaacgcgt

SEQ ID NO: 23951 - DNA, 672 bp, Artificial Sequence
  chemically treated genomic DNA (Homo sapiens) CpG-island No: 23951
tttcgggcgttatttttttggcgatttttttgtttttttgttttaaattggtttggaatagggagatcgggatattgatcgttcgatttggcgtttaattgttggcggttattagcggcgtgtattatttcggtatcgtggtatgtattagcgtgttattattcgaaggttaagaaaaggtcggttcgcggcgggtgggttaattggatgaggagatggtatatgagtcgcgggtgaacgatattattattttcggcgttattttatggcggatttagtaaattattcgcgattaggtgattgtgatttttgtttcgggtcgttttgttcggttttttttttggcgtggtgaaggtaacggacgttcggttgaattaggcgagatgatcggcgattttttttatttgttggcggatggcgcgttttttttcgggattattttttcgtggttggtagaagaaaatacgatcgttaatatttaggggttgattgaggagtagcgtaacgcgacgggtatcgtttcggggagtcgttatttggttttcgaacggtgtcgtgatgaaattggtgattggcgtattattttgtattttttttatggaagacgggtgtatgaattttgggcggtggcgattgtcgggcgaatatatgcgttatggggcgttgacgcgt

SEQ ID NO: 23952 - DNA, 672 bp, Artificial Sequence
  chemically treated genomic DNA (Homo sapiens) CpG-island No: 23952
acgcgtcaacgccccataacgcatatattcgcccgacaatcgccaccgcccaaaattcatacacccgtcttccataaaaaaaatacaaaataatacgccaatcaccaatttcatcacgacaccgttcgaaaaccaaataacgactccccgaaacgatacccgtcgcgttacgctactcctcaatcaacccctaaatattaacgatcgtattttcttctaccaaccacgaaaaaataatcccgaaaaaaaacgcgccatccgccaacaaataaaaaaaatcgccgatcatctcgcctaattcaaccgaacgtccgttaccttcaccacgccaaaaaaaaaaccgaacaaaacgacccgaaacaaaaatcacaatcacctaatcgcgaataatttactaaatccgccataaaataacgccgaaaataataatatcgttcacccgcgactcatataccatctcctcatccaattaacccacccgccgcgaaccgaccttttcttaaccttcgaataataacacgctaatacataccacgataccgaaataatacacgccgctaataaccgccaacaattaaacgccaaatcgaacgatcaatatcccgatctccctattccaaaccaatttaaaacaaaaaaacaaaaaaatcgccaaaaaaataacgcccgaaa

SEQ ID NO: 23953 - DNA, 560 bp, Artificial Sequence
  chemically treated genomic DNA (Homo sapiens) CpG-island No: 23953
  unsure (284, 312, 318..319, 329..330, 345..346, 359, 407..)
tatcgtaacgttgatgacgacgtattttttttagttgtgttgttagtcgggttgttagtttcggtagcgttttttgcgtcgtaatgtgaatatttaacggtaaaacgttgagtacgggttcggtagtcgttagcgtcgtcgagtttagtcgacgtataaagataaattcggcggcgtagtttatacgattgtataatcgttttagttataaggttgttagcgtaagggttaaatcggtacgttgtatatttgaaagttgcgtagttagttggcggaattttttngtcggtaaattttagttttaggcgtagnaatatnnttgtcgaggnnncgttgcgtttcggnntaaaggtgtcggnagaaagtgacgcgggcggcggtagttgaacgaacgttgttttttgggnntatagaatgtcgtatttacgttgttaggtttcgttttcgcggtattgttggtatttttttattatattaggcgaaagggcgttaaatggcgaagtaggcgttggttcgtacgtagttatgtgtagtaaatattcgggtcgaattttgggcga

SEQ ID NO: 23954 - DNA, 560 bp, Artificial Sequence
  chemically treated genomic DNA (Homo sapiens) CpG-island No: 23954
  unsure (153..154, 202, 215..216, 230..231, 242..243, 249, 277)
tcgcccaaaattcgacccgaatatttactacacataactacgtacgaaccaacgcctacttcgccatttaacgccctttcgcctaatataataaaaaaataccaacaataccgcgaaaacgaaacctaacaacgtaaatacgacattctatanncccaaaaaacaacgttcgttcaactaccgccgcccgcgtcactttctnccgacacctttannccgaaacgcaacgnnncctcgacaannatattnctacgcctaaaactaaaatttaccgacnaaaaaattccgccaactaactacgcaactttcaaatatacaacgtaccgatttaacccttacgctaacaaccttataactaaaacgattatacaatcgtataaactacgccgccgaatttatctttatacgtcgactaaactcgacgacgctaacgactaccgaacccgtactcaacgttttaccgttaaatattcacattacgacgcaaaaaacgctaccgaaactaacaacccgactaacaacacaactaaaaaaaatacgtcgtcatcaacgttacgata

SEQ ID NO: 23955 - DNA, 560 bp, Artificial Sequence
  chemically treated genomic DNA (Homo sapiens) CpG-island No: 23955
  unsure (153..154, 202, 215..216, 230..231, 242..243, 249, 277)
tcgtttaggattcggttcgaatatttattgtatatggttgcgtgcgaattaacgtttgtttcgttatttaacgttttttcgtttgatgtagtggaagagtattagtaatatcgcgaaagcgaagtttggtagcgtgaatgcggtattttgtgnntttaaggaatagcgttcgtttaattgtcgtcgttcgcgttattttttntcggtatttttanntcggggcgtagcgnnntttcggtagnnatattnttgcgtttgaaattggaatttatcgatnggggaatttcgttagttggttacgtaatttttaggtgtgtagcgtatcgatttagtttttgcgttggtagttttgtggttggggcgattgtgtaatcgtatggattacgtcgtcggatttatttttatgcgtcgattgggttcggcggcgttgacggttatcggattcgtgtttaacgttttgtcgttgggtatttatattgcggcgtaagaaacgttgtcggaattggtaattcgattggtagtataattgaaaaaaatgcgtcgttattaacgttacgatg

SEQ ID NO: 23956 - DNA, 560 bp, Artificial Sequence
  chemically treated genomic DNA (Homo sapiens) CpG-island No: 23956
  unsure (284, 312, 318..319, 329..330, 345..346, 359, 407..)
catcgtaacgttaataacgacgcatttttttcaattatactaccaatcgaattaccaattccgacaacgtttcttacgccgcaatataaatacccaacgacaaaacgttaaacacgaatccgataaccgtcaacgccgccgaacccaatcgacgcataaaaataaatccgacgacgtaatccatacgattacacaatcgccccaaccacaaaactaccaacgcaaaaactaaatcgatacgctacacacctaaaaattacgtaaccaactaacgaaattccccnatcgataaattccaatttcaaacgcaanaatatnnctaccgaaannncgctacgccccganntaaaaataccganaaaaaataacgcgaacgacgacaattaaacgaacgctattccttaaanncacaaaataccgcattcacgctaccaaacttcgctttcgcgatattactaatactcttccactacatcaaacgaaaaaacgttaaataacgaaacaaacgttaattcgcacgcaaccatatacaataaatattcgaaccgaatcctaaacga

SEQ ID NO: 23957 - DNA, 894 bp, Artificial Sequence
  chemically treated genomic DNA (Homo sapiens) CpG-island No: 23957
tttgatttgtttttttaggttgaatacggttcggatttataggtgattttattgacgttcgttgttgatatggcgcgtcgcgttgtcgaggtcgtcgaacgttaattggtagaattgtcgcgtgtcgaaatcgttcgttaggtattgaacgttagtcgtttgatcgtgattaaagatttagcgtagtgcgtggagatttttaattagtacggttcggagtatttgattatttagattcgtaacgttcgtgaattggtcgatagtattattagcgtcggttcggtattttttggtgattggttatcggaatcggtaggtgattacgttttcggtatataattacgttttatcgatttacggttatatcgttatttgttttagtttcgggttggtagatttttagaagcgtatgatcgtataggaattgtcgaaagaggggtttttcgcgttggttttaattatagaaatattggtcgtcgtcgagcgtttgatcgtttataaaaatgtcgcgatttcgcgtgttaacgtttttatagatttagtatgattatcgcgatttatatcgattatcgcgataaatcgttagatatcgacgtcgtatacgtttcgtttttttgttttttacgcggagattgattgacgtacgaatttttacgttacgttttatataatacgtaacgataatcgttttttattttatttcgatttcgacgatattttttttattatttttaatttttatttttttagtatatatttttaaagggattttagttatcgtttacgtttttttttttcgttttatacgcgttttattcgttattcgtaatcgttatttttttcgatttcgatacgtttttagcgatacgtttttttcgacgtttttacgttttt

SEQ ID NO: 23958 - DNA, 894 bp, Artificial Sequence
  chemically treated genomic DNA (Homo sapiens) CpG-island No: 23958
aaaaacgtaaaaacgtcgaaaaaaacgtatcgctaaaaacgtatcgaaatcgaaaaaaataacgattacgaataacgaataaaacgcgtataaaacgaaaaaaaaaaacgtaaacgataactaaaatccctttaaaaatatatactaaaaaaataaaaattaaaaataataaaaaaaatatcgtcgaaatcgaaataaaataaaaaacgattatcgttacgtattatataaaacgtaacgtaaaaattcgtacgtcaatcaatctccgcgtaaaaaacaaaaaaacgaaacgtatacgacgtcgatatctaacgatttatcgcgataatcgatataaatcgcgataatcatactaaatctataaaaacgttaacacgcgaaatcgcgacatttttataaacgatcaaacgctcgacgacgaccaatatttctataattaaaaccaacgcgaaaaacccctctttcgacaattcctatacgatcatacgcttctaaaaatctaccaacccgaaactaaaacaaataacgatataaccgtaaatcgataaaacgtaattatataccgaaaacgtaatcacctaccgattccgataaccaatcaccaaaaaataccgaaccgacgctaataatactatcgaccaattcacgaacgttacgaatctaaataatcaaatactccgaaccgtactaattaaaaatctccacgcactacgctaaatctttaatcacgatcaaacgactaacgttcaatacctaacgaacgatttcgacacgcgacaattctaccaattaacgttcgacgacctcgacaacgcgacgcgccatatcaacaacgaacgtcaataaaatcacctataaatccgaaccgtattcaacctaaaaaaacaaatcaaa

SEQ ID NO: 23959 - DNA, 894 bp, Artificial Sequence
  chemically treated genomic DNA (Homo sapiens) CpG-island No: 23959
gggggcgtaggggcgtcggggggggcgtgtcgttggggacgtgtcggggtcggggggggtggcggttgcgggtagcgggtggggcgcgtgtggggcgggggaggggggcgtgggcggtggttggggtttttttgggggtgtgtgttgggggggtgggggttgggggtgatgggggaggtgtcgtcggggtcggggtgaggtggggagcggttgtcgttgcgtgttgtgtggggcgtggcgtggggattcgtgcgttagttagttttcgcgtggggggtagagaggcggggcgtgtgcggcgtcggtgtttgacggtttatcgcggtgatcggtatgagtcgcggtggttatgttgggtttgtaggggcgttagtacgcgaggtcgcggtatttttgtgggcggttaggcgttcggcggcggttagtgtttttatggttgaagttagcgcggagaatttttttttcgatagtttttgtacggttatgcgtttttggaaatttgttagttcgaggttggaataggtggcggtgtaatcgtaagtcggtagaacgtggttgtgtgtcggaggcgtaattatttgtcgatttcggtgattagttattaagaaatatcgaatcggcgttggtgatgttatcgattagtttacgggcgttgcgggtttgaatgattaggtgtttcgggtcgtattggttggagatttttacgtattgcgttaaatttttagttacgattaggcggttggcgtttagtgtttggcgggcggtttcggtacgcggtagttttgttagttggcgttcgacggtttcggtaacgcgacgcgttatattagtagcgggcgttagtaaaattatttgtgagttcgggtcgtgtttagtttgagagagtaaattaga

SEQ ID NO: 23960 - DNA, 894 bp, Artificial Sequence
  chemically treated genomic DNA (Homo sapiens) CpG-island No: 23960
tctaatttactctctcaaactaaacacgacccgaactcacaaataattttactaacgcccgctactaatataacgcgtcgcgttaccgaaaccgtcgaacgccaactaacaaaactaccgcgtaccgaaaccgcccgccaaacactaaacgccaaccgcctaatcgtaactaaaaatttaacgcaatacgtaaaaatctccaaccaatacgacccgaaacacctaatcattcaaacccgcaacgcccgtaaactaatcgataacatcaccaacgccgattcgatatttcttaataactaatcaccgaaatcgacaaataattacgcctccgacacacaaccacgttctaccgacttacgattacaccgccacctattccaacctcgaactaacaaatttccaaaaacgcataaccgtacaaaaactatcgaaaaaaaaattctccgcgctaacttcaaccataaaaacactaaccgccgccgaacgcctaaccgcccacaaaaataccgcgacctcgcgtactaacgcccctacaaacccaacataaccaccgcgactcataccgatcaccgcgataaaccgtcaaacaccgacgccgcacacgccccgcctctctaccccccacgcgaaaactaactaacgcacgaatccccacgccacgccccacacaacacgcaacgacaaccgctccccacctcaccccgaccccgacgacacctcccccatcacccccaacccccacccccccaacacacacccccaaaaaaaccccaaccaccgcccacgcccccctcccccgccccacacgcgccccacccgctacccgcaaccgccaccccccccgaccccgacacgtccccaacgacacgccccccccgacgcccctacgccccc

SEQ ID NO: 23961 - DNA, 644 bp, Artificial Sequence
  chemically treated genomic DNA (Homo sapiens) CpG-island No: 23961
tcgatggcgaattttgggcgtaaagtatgttcgtttggttagtgttgatttcgttgattagtcgttagtaattttttttcgtcgtgtatgtgttgatcgacgttatcgatattacgtatcgcgtttacgaattgtcgtgtaatgcggatttttggttcgtagtatagtaagagttattatttttggtgaaagttattgttttttttagcgatcgtgtcgatcgtatcgtggttgtcgggtagagttttggtgggtttttcgcgttgtatgtcggattgtattggtttgaacgttttggttgtgtattaagttagttaggatcgtattggtggtcgtatcggggcgggtagtaagagggcgtgttatttgaaaagttaaaagttggtgaagttagcgtcgaaggtttgcgtattgtgttggaagcgggtattcgcgagtcgatgattatgcgggttaattaggcgttgtatgcgtaattatattttataaaagaatttattttttggcgttaggttgacggcggatatgatgcgtttgttggcgcggtggtttgatgtaggggttaatcgatttttggtaattatttttttatgataggagttgaatatggtatttagtaattttttcgatgattcgtagggagt

SEQ ID NO: 23962 - DNA, 644 bp, Artificial Sequence
  chemically treated genomic DNA (Homo sapiens) CpG-island No: 23962
actccctacgaatcatcgaaaaaattactaaataccatattcaactcctatcataaaaaaataattaccaaaaatcgattaacccctacatcaaaccaccgcgccaacaaacgcatcatatccgccgtcaacctaacgccaaaaaataaattcttttataaaatataattacgcatacaacgcctaattaacccgcataatcatcgactcgcgaatacccgcttccaacacaatacgcaaaccttcgacgctaacttcaccaacttttaacttttcaaataacacgccctcttactacccgccccgatacgaccaccaatacgatcctaactaacttaatacacaaccaaaacgttcaaaccaatacaatccgacatacaacgcgaaaaacccaccaaaactctacccgacaaccacgatacgatcgacacgatcgctaaaaaaaacaataactttcaccaaaaataataactcttactatactacgaaccaaaaatccgcattacacgacaattcgtaaacgcgatacgtaatatcgataacgtcgatcaacacatacacgacgaaaaaaaattactaacgactaatcaacgaaatcaacactaaccaaacgaacatactttacgcccaaaattcgccatcga

SEQ ID NO: 23963 - DNA, 644 bp, Artificial Sequence
  chemically treated genomic DNA (Homo sapiens) CpG-island No: 23963
gttttttgcggattatcgaagggattattgaatgttatatttaatttttgttatggaaaagtggttgttagaggtcgattagtttttgtattaagttatcgcgttaataagcgtattatgttcgtcgttaatttgacgttagaaaatggatttttttatggggtgtaattgcgtatatagcgtttgattggttcgtatgattatcggttcgcgaatattcgtttttagtataatgcgtagattttcggcgttaattttattagtttttagttttttaagtaatacgtttttttgttgttcgtttcgatgcggttattagtacgattttgattggtttaatatatagttaaagcgtttaggttagtgtagttcggtatatagcgcggaaagtttattaaaattttgttcggtaattacggtgcgatcggtacgatcgttaaaaggggtaatagtttttattaggggtaataatttttgttgtattgcgagttagaaattcgtattatacggtagttcgtgggcgcggtgcgtggtgtcgatagcgtcgattaatatatatacggcgggaggaagttgttgacgattggttagcgaagttagtattggttagacgggtatattttgcgtttaaaattcgttatcga

SEQ ID NO: 23964 - DNA, 644 bp, Artificial Sequence
  chemically treated genomic DNA (Homo sapiens) CpG-island No: 23964
tcgataacgaattttaaacgcaaaatatacccgtctaaccaatactaacttcgctaaccaatcgtcaacaacttcctcccgccgtatatatattaatcgacgctatcgacaccacgcaccgcgcccacgaactaccgtataatacgaatttctaactcgcaatacaacaaaaattattacccctaataaaaactattaccccttttaacgatcgtaccgatcgcaccgtaattaccgaacaaaattttaataaactttccgcgctatataccgaactacactaacctaaacgctttaactatatattaaaccaatcaaaatcgtactaataaccgcatcgaaacgaacaacaaaaaaacgtattacttaaaaaactaaaaactaataaaattaacgccgaaaatctacgcattatactaaaaacgaatattcgcgaaccgataatcatacgaaccaatcaaacgctatatacgcaattacaccccataaaaaaatccattttctaacgtcaaattaacgacgaacataatacgcttattaacgcgataacttaatacaaaaactaatcgacctctaacaaccacttttccataacaaaaattaaatataacattcaataatcccttcgataatccgcaaaaaac

SEQ ID NO: 23965 - DNA, 571 bp, Artificial Sequence
  chemically treated genomic DNA (Homo sapiens) CpG-island No: 23965
ttcgagtaggtggcggaaatttatgatggtggtgcgattcggtagggcgttatttagggataatcgggtaaataggcgtatggaggcgatttcgtatagggtattttttatggtatcgtcgtttaggttgtattaatgttgtatgtagtgaatacgtagtatggtttttagcggatagggtcgtcggttattgttcgttttgggataaaacggttcgatgatagcggttatattttgttatggtagaatttgttttatgcgggagaggaaaattttttttcgggtttgacggcgtttagtgttgaatttattatcggcgaaggtgagttgatggtttatgatgtttttttgggatgcgtttcggatgatttgatgatttttattagattggtcgttttttttagggaaaagtcgattgttatcgaattagcggttttagaatttttggttgggatcggtgattatttcgtttttggtgatagtttaagttcgtttaggtttaagtatcggacgaatcgtattaaatgtaattcgagattcgggattattgaacgcgattttaaaattttcg

SEQ ID NO: 23966 - DNA, 571 bp, Artificial Sequence
  chemically treated genomic DNA (Homo sapiens) CpG-island No: 23966
cgaaaattttaaaatcgcgttcaataatcccgaatctcgaattacatttaatacgattcgtccgatacttaaacctaaacgaacttaaactatcaccaaaaacgaaataatcaccgatcccaaccaaaaattctaaaaccgctaattcgataacaatcgacttttccctaaaaaaaacgaccaatctaataaaaatcatcaaatcatccgaaacgcatcccaaaaaaacatcataaaccatcaactcaccttcgccgataataaattcaacactaaacgccgtcaaacccgaaaaaaaattttcctctcccgcataaaacaaattctaccataacaaaatataaccgctatcatcgaaccgttttatcccaaaacgaacaataaccgacgaccctatccgctaaaaaccatactacgtattcactacatacaacattaatacaacctaaacgacgataccataaaaaataccctatacgaaatcgcctccatacgcctatttacccgattatccctaaataacgccctaccgaatcgcaccaccatcataaatttccgccacctactcgaa

SEQ ID NO: 23967 - DNA, 571 bp, Artificial Sequence
  chemically treated genomic DNA (Homo sapiens) CpG-island No: 23967
cgaaggttttggagtcgcgtttaatggtttcggatttcgggttatatttggtacgattcgttcggtatttgggtttaaacgggtttaaattattattaggaacggggtaattatcggttttagttaaaggttttggggtcgttaattcggtagtagtcggtttttttttgggaagggcgattagtttgatagagattattaaattattcggagcgtattttagagggatattatgagttattaatttattttcgtcgatagtgaatttagtattaagcgtcgttagattcgaaaagagatttttttttttcgtatggagtagattttgttatggtagaatatgatcgttgttatcgagtcgttttattttaaggcgggtaatggtcgacggttttattcgttggagattatgttgcgtatttattgtatgtagtattggtataatttgagcgacggtgttatggaagatgttttgtacgaaatcgtttttatgcgtttgtttgttcgattatttttggatagcgttttgtcggatcgtattattattatgaattttcgttatttgttcgag

SEQ ID NO: 23968 - DNA, 571 bp, Artificial Sequence
  chemically treated genomic DNA (Homo sapiens) CpG-island No: 23968
ctcgaacaaataacgaaaattcataataataatacgatccgacaaaacgctatccaaaaataatcgaacaaacaaacgcataaaaacgatttcgtacaaaacatcttccataacaccgtcgctcaaattataccaatactacatacaataaatacgcaacataatctccaacgaataaaaccgtcgaccattacccgccttaaaataaaacgactcgataacaacgatcatattctaccataacaaaatctactccatacgaaaaaaaaaaatctcttttcgaatctaacgacgcttaatactaaattcactatcgacgaaaataaattaataactcataatatccctctaaaatacgctccgaataatttaataatctctatcaaactaatcgcccttcccaaaaaaaaaccgactactaccgaattaacgaccccaaaacctttaactaaaaccgataattaccccgttcctaataataatttaaacccgtttaaacccaaataccgaacgaatcgtaccaaatataacccgaaatccgaaaccattaaacgcgactccaaaaccttcg

SEQ ID NO: 23969 - DNA, 640 bp, Artificial Sequence
  chemically treated genomic DNA (Homo sapiens) CpG-island No: 23969
agaaacgcgttcgtatttatttgattttagcggagcgtgaaaagaagacggtaagaaaaagtcgtcgttttggacgcgtattgcgttgattttttcgttatcggcgtggcgttttcgtacggcgcgaacgatggttagaaagtattggtttggttatgttggtattgattggcgtcgcgttagtaggtttttggtgaatatgaatgttattggttacgaaattattcgtattcgtgatgtattaataacgtcgaagtttattttgagtagtattttgcgtagtttaaacggattagtaaatatagttgatcgtttttcgttaatatattcgtaattttatttcgttagtataatggtgatgaagaagttgtcgttttgggcgcgattattcgttttacgtcgttggattaggtataacgtttttttcgttagtattcggaatattcgatttacgtatttgggggttgaatgtttttgattcgtcgtagggtaattatttttatttcgtttggaatggcgacgttgtggcggtaaagttacgcgcggttgacgttatttagcgaaagttttttttagtacgatgcgatttagtaaaagaatttatcgttatattggtgagtattaagtttttgtttgggtt

SEQ ID NO: 23970 - DNA, 640 bp, Artificial Sequence
  chemically treated genomic DNA (Homo sapiens) CpG-island No: 23970
aacccaaacaaaaacttaatactcaccaatataacgataaattcttttactaaatcgcatcgtactaaaaaaaactttcgctaaataacgtcaaccgcgcgtaactttaccgccacaacgtcgccattccaaacgaaataaaaataattaccctacgacgaatcaaaaacattcaacccccaaatacgtaaatcgaatattccgaatactaacgaaaaaaacgttatacctaatccaacgacgtaaaacgaataatcgcgcccaaaacgacaacttcttcatcaccattatactaacgaaataaaattacgaatatattaacgaaaaacgatcaactatatttactaatccgtttaaactacgcaaaatactactcaaaataaacttcgacgttattaatacatcacgaatacgaataatttcgtaaccaataacattcatattcaccaaaaacctactaacgcgacgccaatcaataccaacataaccaaaccaatactttctaaccatcgttcgcgccgtacgaaaacgccacgccgataacgaaaaaatcaacgcaatacgcgtccaaaacgacgactttttcttaccgtcttcttttcacgctccgctaaaatcaaataaatacgaacgcgtttct

SEQ ID NO: 23971 - DNA, 640 bp, Artificial Sequence
  chemically treated genomic DNA (Homo sapiens) CpG-island No: 23971
aatttaggtaagggtttgatatttattagtgtggcgataaatttttttgttgaatcgtatcgtgttgaagggagttttcgttgaatagcgttagtcgcgcgtggttttatcgttatagcgtcgttattttaggcggggtaaaagtaattgttttgcgacgggttaaaagtatttagtttttaaatgcgtaagtcgggtgtttcgggtgttggcgaagaaaacgttgtgtttggtttaacgacgtaaagcgggtaatcgcgtttaggacgatagtttttttattattattatattggcggagtagaattgcgggtatgttaacggggggcggttagttatatttgttggttcgtttgagttgcgtaggatgttgtttaaagtaagtttcgacgttgttgatgtattacgggtacgggtgatttcgtagttagtggtatttatgtttattagaagtttgttggcgcgacgttaattaatattaatataattagattaatgttttttgattatcgttcgcgtcgtgcgaaaacgttacgtcgatagcggaaggattagcgtaatacgcgtttagaacggcggtttttttttgtcgttttttttttacgtttcgttggggttaggtggatacgggcgcgttttt

SEQ ID NO: 23972 - DNA, 640 bp, Artificial Sequence
  chemically treated genomic DNA (Homo sapiens) CpG-island No: 23972
aaaaacgcgcccgtatccacctaaccccaacgaaacgtaaaaaaaaaacgacaaaaaaaaaccgccgttctaaacgcgtattacgctaatccttccgctatcgacgtaacgttttcgcacgacgcgaacgataatcaaaaaacattaatctaattatattaatattaattaacgtcgcgccaacaaacttctaataaacataaataccactaactacgaaatcacccgtacccgtaatacatcaacaacgtcgaaacttactttaaacaacatcctacgcaactcaaacgaaccaacaaatataactaaccgccccccgttaacatacccgcaattctactccgccaatataataataataaaaaaactatcgtcctaaacgcgattacccgctttacgtcgttaaaccaaacacaacgttttcttcgccaacacccgaaacacccgacttacgcatttaaaaactaaatacttttaacccgtcgcaaaacaattacttttaccccgcctaaaataacgacgctataacgataaaaccacgcgcgactaacgctattcaacgaaaactcccttcaacacgatacgattcaacaaaaaaatttatcgccacactaataaatatcaaacccttacctaaatt

SEQ ID NO: 23973 - DNA, 610 bp, Artificial Sequence
  chemically treated genomic DNA (Homo sapiens) CpG-island No: 23973
  unsure (549)
acgtttcgtagaaatttgcgtttgtcgttcgcgtcgtttacgataatgaattggtggaagcgttaaacgtttttaggtatggtaaggattgggggtagatggtgttattgttcggtaatacgtgattggttaaacgtaacgttcgtttagcgtgttgggtgttggtttttaatatttagcgattgcgtttgttgttaatagagtttttatcgggattatggttaatatttcggtttattcgttggtttattattagacggtaattaggtgttggattcgcgagttattgtcggtcgtttcgatcgaaaacgtcgatgatgagtagtgtttttaataacgtagtggtaaattcgcgtggaacgtatttttaattttggtacgtaaagatattttgttaaaagtggtaacgattcgggatatttcgaaagttatggttatacggtgatgcgcggtggaatagtagagaagcgattgatttatggtaggttgattggtttataatacggtttcgaatttatcgtttcgtttttagtaggttttaggtttatngaattcgtatgggcggtaggtatcgattttgggaggggtttggggattttagaatattttg

SEQ ID NO: 23974 - DNA, 610 bp, Artificial Sequence
  chemically treated genomic DNA (Homo sapiens) CpG-island No: 23974
  unsure (62)
caaaatattctaaaatccccaaacccctcccaaaatcgatacctaccgcccatacgaattcnataaacctaaaacctactaaaaacgaaacgataaattcgaaaccgtattataaaccaatcaacctaccataaatcaatcgcttctctactattccaccgcgcatcaccgtataaccataactttcgaaatatcccgaatcgttaccacttttaacaaaatatctttacgtaccaaaattaaaaatacgttccacgcgaatttaccactacgttattaaaaacactactcatcatcgacgttttcgatcgaaacgaccgacaataactcgcgaatccaacacctaattaccgtctaataataaaccaacgaataaaccgaaatattaaccataatcccgataaaaactctattaacaacaaacgcaatcgctaaatattaaaaaccaacacccaacacgctaaacgaacgttacgtttaaccaatcacgtattaccgaacaataacaccatctacccccaatccttaccatacctaaaaacgtttaacgcttccaccaattcattatcgtaaacgacgcgaacgacaaacgcaaatttctacgaaacgt

SEQ ID NO: 23975 - DNA, 610 bp, Artificial Sequence
  chemically treated genomic DNA (Homo sapiens) CpG-island No: 23975
  unsure (62)
tagaatattttagagtttttagattttttttaaagtcggtatttatcgtttatgcgagtttngtgggtttggagtttgttggaagcggaacggtaaattcgaggtcgtgttgtagattagttaatttgttatgggttaatcgtttttttgttgttttatcgcgtattatcgtatagttatggttttcgagatatttcggatcgttgttatttttggtagaatatttttgcgtgttagagttggaggtacgttttacgcgggtttattattacgttgttaagggtattgtttattatcggcgttttcgatcggggcgatcgataatgattcgcgaatttagtatttgattgtcgtttgatagtagattagcgaataggtcggaatgttaattatgatttcggtaaaagttttgttggtagtaagcgtaatcgttggatgttgagagttaatatttagtacgttgggcgggcgttacgtttaattagttacgtgttgtcgggtaatagtattatttgtttttaatttttgttatgtttgaaaacgtttaacgtttttattagtttattatcgtaggcggcgcgaacggtaggcgtaggtttttacgagacgt

SEQ ID NO: 23976 - DNA, 610 bp, Artificial Sequence
  chemically treated genomic DNA (Homo sapiens) CpG-island No: 23976
  unsure (549)
acgtctcgtaaaaacctacgcctaccgttcgcgccgcctacgataataaactaataaaaacgttaaacgttttcaaacataacaaaaattaaaaacaaataatactattacccgacaacacgtaactaattaaacgtaacgcccgcccaacgtactaaatattaactctcaacatccaacgattacgcttactaccaacaaaacttttaccgaaatcataattaacattccgacctattcgctaatctactatcaaacgacaatcaaatactaaattcgcgaatcattatcgatcgccccgatcgaaaacgccgataataaacaatacccttaacaacgtaataataaacccgcgtaaaacgtacctccaactctaacacgcaaaaatattctaccaaaaataacaacgatccgaaatatctcgaaaaccataactatacgataatacgcgataaaacaacaaaaaaacgattaacccataacaaattaactaatctacaacacgacctcgaatttaccgttccgcttccaacaaactccaaacccacnaaactcgcataaacgataaataccgactttaaaaaaaatctaaaaactctaaaatattcta

SEQ ID NO: 23977 - DNA, 690 bp, Artificial Sequence
  chemically treated genomic DNA (Homo sapiens) CpG-island No: 23977
ttcggagcgttagaggtcgtttcggacgttaaggttgagtgggagtgagttttcgattggagttagaggttagcgttgggtttgggggttcggagcggcgtgagggatttgtggacggggttgggggcgttgttttggtgtagcgggtcgcggtggtcggcgttcgggtttcggttttttcggggaacgtaggaggaggaaagatagacggacggtttgaggttaatcggtttcgttatacgcgtatcgtttcgtttttcgaggagtcgattaattggtaaggtacgagtttcgagacgttatgggttatcggtagattttattcggttttagggttttttttttttacgtatttcgaatggtttttaaggcgttatttgggcgttttttaattggcggggaagggattggtcgcgggggaattggtttttcgggaatttttcggcgggaattggttcggtaggggggttacgtcggggtttcgggggaagcgggtggtaggacgggtcgaggtgagggagggatgcgtgggtgttggggtgcgggagggggcgggagtgtttagaagcgtgtagtatacggaggattttgagttagcgggggattgggagatgtgcggagttacgggagtagggagattaaagagggtttcgaagggtaatgttagtaattaaaataatatttttatgg

SEQ ID NO: 23978 - DNA, 690 bp, Artificial Sequence
  chemically treated genomic DNA (Homo sapiens) CpG-island No: 23978
ccataaaaatattattttaattactaacattacccttcgaaaccctctttaatctccctactcccgtaactccgcacatctcccaatcccccgctaactcaaaatcctccgtatactacacgcttctaaacactcccgccccctcccgcaccccaacacccacgcatccctccctcacctcgacccgtcctaccacccgcttcccccgaaaccccgacgtaacccccctaccgaaccaattcccgccgaaaaattcccgaaaaaccaattcccccgcgaccaatcccttccccgccaattaaaaaacgcccaaataacgccttaaaaaccattcgaaatacgtaaaaaaaaaaaaccctaaaaccgaataaaatctaccgataacccataacgtctcgaaactcgtaccttaccaattaatcgactcctcgaaaaacgaaacgatacgcgtataacgaaaccgattaacctcaaaccgtccgtctatctttcctcctcctacgttccccgaaaaaaccgaaacccgaacgccgaccaccgcgacccgctacaccaaaacaacgcccccaaccccgtccacaaatccctcacgccgctccgaacccccaaacccaacgctaacctctaactccaatcgaaaactcactcccactcaaccttaacgtccgaaacgacctctaacgctccgaa

SEQ ID NO: 23979 - DNA, 690 bp, Artificial Sequence
  chemically treated genomic DNA (Homo sapiens) CpG-island No: 23979
ttataaaagtattattttgattattaatattatttttcggagttttttttggtttttttgttttcgtggtttcgtatattttttagtttttcgttggtttagaatttttcgtatgttgtacgtttttgagtattttcgttttttttcgtattttagtatttacgtattttttttttatttcgattcgttttgttattcgtttttttcgaaatttcggcgtggtttttttgtcgggttaattttcgtcggaaggttttcgggaagttaattttttcgcggttaatttttttttcgttagttggaggacgtttaggtggcgttttggaagttattcggagtacgtaagggaggagggttttagggtcgggtgaagtttgtcggtgatttatgacgtttcgaggttcgtgttttgttagttggtcggtttttcgaggggcggggcggtacgcgtgtggcggagtcggttgattttagatcgttcgtttgttttttttttttttgcgtttttcgaggaaatcggggttcgagcgtcggttatcgcggttcgttgtattaggatagcgtttttaatttcgtttataggttttttacgtcgtttcggatttttaggtttagcgttgatttttgattttagtcgagagtttatttttatttagttttgacgttcgaggcgatttttgacgtttcgga

SEQ ID NO: 23980 - DNA, 690 bp, Artificial Sequence
  chemically treated genomic DNA (Homo sapiens) CpG-island No: 23980
tccgaaacgtcaaaaatcgcctcgaacgtcaaaactaaataaaaataaactctcgactaaaatcaaaaatcaacgctaaacctaaaaatccgaaacgacgtaaaaaacctataaacgaaattaaaaacgctatcctaatacaacgaaccgcgataaccgacgctcgaaccccgatttcctcgaaaaacgcaaaaaaaaaaaaaacaaacgaacgatctaaaatcaaccgactccgccacacgcgtaccgccccgcccctcgaaaaaccgaccaactaacaaaacacgaacctcgaaacgtcataaatcaccgacaaacttcacccgaccctaaaaccctcctcccttacgtactccgaataacttccaaaacgccacctaaacgtcctccaactaacgaaaaaaaaattaaccgcgaaaaaattaacttcccgaaaaccttccgacgaaaattaacccgacaaaaaaaccacgccgaaatttcgaaaaaaacgaataacaaaacgaatcgaaataaaaaaaaaatacgtaaatactaaaatacgaaaaaaaacgaaaatactcaaaaacgtacaacatacgaaaaattctaaaccaacgaaaaactaaaaaatatacgaaaccacgaaaacaaaaaaaccaaaaaaaactccgaaaaataatattaataatcaaaataatacttttataa

SEQ ID NO: 23981 - DNA, 810 bp, Artificial Sequence
  chemically treated genomic DNA (Homo sapiens) CpG-island No: 23981
  unsure (498)
tcgtcggaataatcgttcggcgaaaatcgtgtttcgtcgttttagagatcgtttttgatcgttgggtatcgggcggattttttttgttagttcgatttattaaatattattagattttgcggtagcggtttgtcgcgtaggttggaattatcgttagtagtaacgttaagtcggtattggtttcggttatttttagtcgtcgattacgtttataaatatattttgatcggttatttgtagattacgtgacggtgtaatatagttagtaggattgttagacggttttgttttagtttattgttacgcggcgtgggttcgttattatcgagtgatcgattagcgttgaatttttattagtagtggacgcgtttttttttatattattattattagttatcggaggttattttatcgtcgcgatttaagaaaattgtcgaaggttgttgattttacgtagtttttgttcggttatcgcgaagacgtttagttagtgtttantcgcggtcgaagcgggtttttatggttgcgtaaggtgcgaaacgggagtttcggtatcgttatttaaaagtatcgaatagtcgatataggttttagtatttcgttagttagcgatattttgtattgtttatatgatatgttatatcgcgcgttttggcgaagcgtgttaaataagtcgtcgttttattatttgcgttacgttattaggcgatgattgtatattcgttatatgtatttttggatcgagttaattattattagtttcggttgttttttttcggtatcgtagattgttcgatgttgttttcgata

SEQ ID NO: 23982 - DNA, 810 bp, Artificial Sequence
  chemically treated genomic DNA (Homo sapiens) CpG-island No: 23982
  unsure (313)
tatcgaaaacaacatcgaacaatctacgataccgaaaaaaaacaaccgaaactaataataattaactcgatccaaaaatacatataacgaatatacaatcatcgcctaataacgtaacgcaaataataaaacgacgacttatttaacacgcttcgccaaaacgcgcgatataacatatcatataaacaatacaaaatatcgctaactaacgaaatactaaaacctatatcgactattcgatacttttaaataacgataccgaaactcccgtttcgcaccttacgcaaccataaaaacccgcttcgaccgcgantaaacactaactaaacgtcttcgcgataaccgaacaaaaactacgtaaaatcaacaaccttcgacaattttcttaaatcgcgacgataaaataacctccgataactaataataataatataaaaaaaaacgcgtccactactaataaaaattcaacgctaatcgatcactcgataataacgaacccacgccgcgtaacaataaactaaaacaaaaccgtctaacaatcctactaactatattacaccgtcacgtaatctacaaataaccgatcaaaatatatttataaacgtaatcgacgactaaaaataaccgaaaccaataccgacttaacgttactactaacgataattccaacctacgcgacaaaccgctaccgcaaaatctaataatatttaataaatcgaactaacaaaaaaaatccgcccgatacccaacgatcaaaaacgatctctaaaacgacgaaacacgattttcgccgaacgattattccgacga

SEQ ID NO: 23983 - DNA, 810 bp, Artificial Sequence
  chemically treated genomic DNA (Homo sapiens) CpG-island No: 23983
  unsure (313)
tgtcggaaatagtatcgaatagtttgcgatgtcgaagaagagtaatcgaagttgatggtaattgattcgatttagggatgtatatggcggatgtatagttatcgtttggtagcgtggcgtaggtggtgaaacggcggtttatttgatacgtttcgttaaaacgcgcggtgtggtatgttatgtgggtagtataagatgtcgttggttggcgaagtgttggaatttgtatcgattgttcggtgtttttggatggcgatgtcggaattttcgtttcgtattttgcgtagttataaaaattcgtttcggtcgcggntggatattagttgggcgttttcgcgatgatcgaataggggttgcgtgaagttagtaattttcggtaatttttttaagtcgcggcgatgaagtgattttcggtagttagtgatggtggtatgggaaggaacgcgtttattgttggtggagatttagcgttggtcgattattcgatgatggcgaatttacgtcgcgtggtagtgggttggaataaaatcgtttggtaattttgttggttgtgttgtatcgttacgtggtttgtaaatggtcgattaggatgtgtttgtgaacgtggtcggcggttgaaggtaatcgaaattagtgtcgatttagcgttattgttggcgatggttttagtttgcgcgatagatcgttgtcgtaggatttggtggtgtttggtgagtcgggttggtaggggagattcgttcggtgtttagcggttaggaacgatttttgaagcggcgaaatacggttttcgtcgggcgattgtttcggcgg

SEQ ID NO: 23984 - DNA, 810 bp, Artificial Sequence
  chemically treated genomic DNA (Homo sapiens) CpG-island No: 23984
  unsure (498)
ccgccgaaacaatcgcccgacgaaaaccgtatttcgccgcttcaaaaatcgttcctaaccgctaaacaccgaacgaatctcccctaccaacccgactcaccaaacaccaccaaatcctacgacaacgatctatcgcgcaaactaaaaccatcgccaacaataacgctaaatcgacactaatttcgattaccttcaaccgccgaccacgttcacaaacacatcctaatcgaccatttacaaaccacgtaacgatacaacacaaccaacaaaattaccaaacgattttattccaacccactaccacgcgacgtaaattcgccatcatcgaataatcgaccaacgctaaatctccaccaacaataaacgcgttccttcccataccaccatcactaactaccgaaaatcacttcatcgccgcgacttaaaaaaattaccgaaaattactaacttcacgcaacccctattcgatcatcgcgaaaacgcccaactaatatccanccgcgaccgaaacgaatttttataactacgcaaaatacgaaacgaaaattccgacatcgccatccaaaaacaccgaacaatcgatacaaattccaacacttcgccaaccaacgacatcttatactacccacataacataccacaccgcgcgttttaacgaaacgtatcaaataaaccgccgtttcaccacctacgccacgctaccaaacgataactatacatccgccatatacatccctaaatcgaatcaattaccatcaacttcgattactcttcttcgacatcgcaaactattcgatactatttccgaca

SEQ ID NO: 23985 - DNA, 1643 bp, Artificial Sequence
  chemically treated genomic DNA (Homo sapiens) CpG-island No: 23985
  unsure (115)
ggcggttaaggcgatgagcgcgtattgttatttgttgtagcgatttttcgtcgtgatatatagcgtttttatttgttgggttagtttgtatagcgtttgtaagtagcgtggggtntaggtttattatttttatttacgaagggttcggtttcggcgcggatttcgttttcggcgagtttatttcgacgggtacgattacgtttttttcggcgacggtaaagacgatcgttcgattatttaaaagggaaagagcgtttcgtcgagtcgttcgcgtcgttttttcgcgcgagcgcgtcggcgtgaaggtttatttcgaagacgtcgacgtatttttaaagagttgaacgcgtttatgacgatgtcgagcgtcggcgagtcgcgaagttttcgtttcgcgcgtttatagttacgcgttgggcgttttttcggttcgcgcgtttatcgagtattacgttttcgattcgcgtttgcgttcgtgttcggcgcgtaagtaggcgattacgggttttcgttttcgaaagtttcgcggttatttacgcgttcgtgtaagcgtattatttcggcggcggttttattcgcgcggcgggggcgcgtcgttgtcgcgcgcgtttattcgttcgtgaagcgcgtcggcggcgcgattaaggtgcgtatcgaggtgtcgaagattttatcgagaacgggcgcgttatcggcgttcgtttcgtcgacggtatcgggttcgcgcgcgtattgtgatttcgaacgtcgatttcgtcgttacgttcgtcggttcgtcggttacgagtatttttcgtcgttcgagcgtattcgtttgcgcgggcgaagtggtcggtttcggttattagtttgtttatggcgacggtttcgatttgcgcgcgttcgggttcgatagcggtaattattggtatttcgaaacggcgacgtcgaggggatttacgcgataggtttcgaagtttggggtcgagcgtaggttcgattttcggcggtttcgttattgcgattacgtttaagattcgagtaagtattacggcggaaagtatacgttcgagtcgttcgcgtcgtcggatacgacgtttttaaggcgtgggcggattcgaagacgggcgtcgttcggaaggttacgtcgcgatgaagtaggagtttatgggtcggatgtcgagatggcggggtacgtcgtgtcgggtttcgagaagtacgtcgcgttttcgagttcgggagttcgtttacgaacgtcgattattgcgcgtcgacgcgggtaatttttacggtatcgataagagtttgttttaatcggttcgttcgttagtcgttgaagacgtcgatcggcgggttttatatgtgcggcgcgagtagtttagttacggcgttatggcgcgtcggtattatttattatttttcgatgggttttattacgcgtaaagatagcgttaatttcggcgttaaatagtgatatttttttagtagacgtatcgttttcgttattatatttagcgtatttcgttcgtttttagtattttttgttcggttttaataatggtagataacgttcgatgtagcgtaatttttgttgtagatttatttgcgcgcggttaatttatttgcgttattatgaattgtaatgattgttttgtttatagtat

SEQ ID NO: 23986 - DNA, 1643 bp, Artificial Sequence
  chemically treated genomic DNA (Homo sapiens) CpG-island No: 23986
  unsure (1529)
atactataaacaaaacaatcattacaattcataataacgcaaataaattaaccgcgcgcaaataaatctacaacaaaaattacgctacatcgaacgttatctaccattattaaaaccgaacaaaaaatactaaaaacgaacgaaatacgctaaatataataacgaaaacgatacgtctactaaaaaaatatcactatttaacgccgaaattaacgctatctttacgcgtaataaaacccatcgaaaaataataaataataccgacgcgccataacgccgtaactaaactactcgcgccgcacatataaaacccgccgatcgacgtcttcaacgactaacgaacgaaccgattaaaacaaactcttatcgataccgtaaaaattacccgcgtcgacgcgcaataatcgacgttcgtaaacgaactcccgaactcgaaaacgcgacgtacttctcgaaacccgacacgacgtaccccgccatctcgacatccgacccataaactcctacttcatcgcgacgtaaccttccgaacgacgcccgtcttcgaatccgcccacgccttaaaaacgtcgtatccgacgacgcgaacgactcgaacgtatactttccgccgtaatacttactcgaatcttaaacgtaatcgcaataacgaaaccgccgaaaatcgaacctacgctcgaccccaaacttcgaaacctatcgcgtaaatcccctcgacgtcgccgtttcgaaataccaataattaccgctatcgaacccgaacgcgcgcaaatcgaaaccgtcgccataaacaaactaataaccgaaaccgaccacttcgcccgcgcaaacgaatacgctcgaacgacgaaaaatactcgtaaccgacgaaccgacgaacgtaacgacgaaatcgacgttcgaaatcacaatacgcgcgcgaacccgataccgtcgacgaaacgaacgccgataacgcgcccgttctcgataaaatcttcgacacctcgatacgcaccttaatcgcgccgccgacgcgcttcacgaacgaataaacgcgcgcgacaacgacgcgcccccgccgcgcgaataaaaccgccgccgaaataatacgcttacacgaacgcgtaaataaccgcgaaactttcgaaaacgaaaacccgtaatcgcctacttacgcgccgaacacgaacgcaaacgcgaatcgaaaacgtaatactcgataaacgcgcgaaccgaaaaaacgcccaacgcgtaactataaacgcgcgaaacgaaaacttcgcgactcgccgacgctcgacatcgtcataaacgcgttcaactctttaaaaatacgtcgacgtcttcgaaataaaccttcacgccgacgcgctcgcgcgaaaaaacgacgcgaacgactcgacgaaacgctctttcccttttaaataatcgaacgatcgtctttaccgtcgccgaaaaaaacgtaatcgtacccgtcgaaataaactcgccgaaaacgaaatccgcgccgaaaccgaacccttcgtaaataaaaataataaacctanaccccacgctacttacaaacgctatacaaactaacccaacaaataaaaacgctatatatcacgacgaaaaatcgctacaacaaataacaatacgcgctcatcgccttaaccgcc

SEQ ID NO: 23987 - DNA, 1643 bp, Artificial Sequence
  chemically treated genomic DNA (Homo sapiens) CpG-island No: 23987
  unsure (1529)
atattatgggtaaagtagttattgtaatttatggtggcgtaggtgaattagtcgcgcgtagatgagtttgtaataggaattacgttatatcgagcgttgtttgttattgttgaaatcgggtagaaaatgttggaagcgggcgaagtgcgttggatgtggtgacggaagcggtgcgtttgttggaagagtgttattgtttaacgtcggaattggcgttgtttttacgcgtgatgaaatttatcggggagtgatgagtggtatcggcgcgttatgacgtcgtggttgagttgttcgcgtcgtatatgtagagttcgtcgatcgacgtttttagcggttggcgaacggatcgattggaataggtttttgtcggtgtcgtagaggttgttcgcgtcgacgcgtagtagtcgacgttcgtgagcgggttttcgagttcgggaacgcgacgtgtttttcgaggttcggtacggcgtgtttcgttatttcggtattcggtttatgagtttttgttttatcgcggcgtagtttttcgggcggcgttcgttttcgagttcgtttacgttttgaaagcgtcgtattcgacgacgcgaacgattcgagcgtgtgtttttcgtcgtagtgtttgttcgggttttgagcgtggtcgtagtgacgaagtcgtcggggatcgggtttgcgttcggttttaggtttcgaggtttgtcgcgtaggttttttcgacgtcgtcgtttcgaagtattagtagttgtcgttgtcgagttcgagcgcgcgtaaatcgaggtcgtcgttatgaataggttgatggtcgaaatcgattatttcgttcgcgtaggcgaatgcgttcgaacggcgagaggtgttcgtggtcgacgagtcggcgagcgtgacggcgggatcggcgttcgagattatagtgcgcgcgcggattcggtgtcgtcggcgaggcggacgtcgatggcgcgttcgttttcgatgagattttcgatatttcggtgcgtattttgatcgcgtcgtcggcgcgttttacgagcggatgaacgcgcgcggtagcgacgcgttttcgtcgcgcgggtagagtcgtcgtcgaagtagtgcgtttgtacggacgcgtggatgatcgcggggttttcgagggcgggagttcgtgatcgtttgtttgcgcgtcgagtacgggcgtaggcgcggatcggagacgtggtgttcgatgagcgcgcgggtcgagggagcgtttagcgcgtgattgtgggcgcgcgaaacgggagtttcgcgattcgtcgacgttcgatatcgttatgagcgcgtttagttttttggagatgcgtcgacgttttcgaagtaggtttttacgtcggcgcgttcgcgcgggaaggcgacgcgagcgattcgacgaggcgtttttttttttttgggtagtcgaacgatcgtttttgtcgtcgtcgaggaggacgtgatcgtattcgtcggggtgagttcgtcgaaaacgagattcgcgtcgaggtcgagtttttcgtagatggaaataatgagtttgnattttacgttgtttgtaaacgttgtgtaaattggtttagtagatgaaaacgttgtatgttacggcgaagagtcgttgtaataggtggtaatgcgcgtttatcgttttggtcgtt

SEQ ID NO: 23988 - DNA, 1643 bp, Artificial Sequence
  chemically treated genomic DNA (Homo sapiens) CpG-island No: 23988
  unsure (115)
aacgaccaaaacgataaacgcgcattaccacctattacaacgactcttcgccgtaacatacaacgttttcatctactaaaccaatttacacaacgtttacaaacaacgtaaaatncaaactcattatttccatctacgaaaaactcgacctcgacgcgaatctcgttttcgacgaactcaccccgacgaatacgatcacgtcctcctcgacgacgacaaaaacgatcgttcgactacccaaaaaaaaaaaaacgcctcgtcgaatcgctcgcgtcgccttcccgcgcgaacgcgccgacgtaaaaacctacttcgaaaacgtcgacgcatctccaaaaaactaaacgcgctcataacgatatcgaacgtcgacgaatcgcgaaactcccgtttcgcgcgcccacaatcacgcgctaaacgctccctcgacccgcgcgctcatcgaacaccacgtctccgatccgcgcctacgcccgtactcgacgcgcaaacaaacgatcacgaactcccgccctcgaaaaccccgcgatcatccacgcgtccgtacaaacgcactacttcgacgacgactctacccgcgcgacgaaaacgcgtcgctaccgcgcgcgttcatccgctcgtaaaacgcgccgacgacgcgatcaaaatacgcaccgaaatatcgaaaatctcatcgaaaacgaacgcgccatcgacgtccgcctcgccgacgacaccgaatccgcgcgcgcactataatctcgaacgccgatcccgccgtcacgctcgccgactcgtcgaccacgaacacctctcgccgttcgaacgcattcgcctacgcgaacgaaataatcgatttcgaccatcaacctattcataacgacgacctcgatttacgcgcgctcgaactcgacaacgacaactactaatacttcgaaacgacgacgtcgaaaaaacctacgcgacaaacctcgaaacctaaaaccgaacgcaaacccgatccccgacgacttcgtcactacgaccacgctcaaaacccgaacaaacactacgacgaaaaacacacgctcgaatcgttcgcgtcgtcgaatacgacgctttcaaaacgtaaacgaactcgaaaacgaacgccgcccgaaaaactacgccgcgataaaacaaaaactcataaaccgaataccgaaataacgaaacacgccgtaccgaacctcgaaaaacacgtcgcgttcccgaactcgaaaacccgctcacgaacgtcgactactacgcgtcgacgcgaacaacctctacgacaccgacaaaaacctattccaatcgatccgttcgccaaccgctaaaaacgtcgatcgacgaactctacatatacgacgcgaacaactcaaccacgacgtcataacgcgccgataccactcatcactccccgataaatttcatcacgcgtaaaaacaacgccaattccgacgttaaacaataacactcttccaacaaacgcaccgcttccgtcaccacatccaacgcacttcgcccgcttccaacattttctacccgatttcaacaataacaaacaacgctcgatataacgtaattcctattacaaactcatctacgcgcgactaattcacctacgccaccataaattacaataactactttacccataatat

SEQ ID NO: 23989 - DNA, 888 bp, Artificial Sequence
  chemically treated genomic DNA (Homo sapiens) CpG-island No: 23989
ttattttattgtcgtttaggaaacgttgttattggtatagtgttttggtcgtattttggtagcgatgtcgtttcgtcgtttgatgtttcggggtttgataatttcgtaaggacggttacgcggtgcgtttagtcgatattgttttcgggtaatcgttgtcgttgtcggtaaattttttgtcggttagttatattatggtgaatggtcgcgggtatttgtattcgtattatgatcggtgcgtcggtgtcggaaggttcgaagcggtggtgatgtaggagtagattgaataaatggataatggcgtggttttattgttgaagtgcgtagcgggtaaaatattcgtcgtcgcggtgagatatttttgtaggtgcggttgttttttcggcgggaattcgtttgattacgtagagttgttagtaattgttttattggggattggcgaagtttcggtgttcgtatagtgcgtgtagcgtttttttttatcggtgatgaattttagttttcggttagacggtgggcgaagggtaaatttacgatattaaacgttttgcgtttatttgatgtttgattagtttggattagtaatattcggtagacgtggcgatattaagtttttacggacgtcgatgttgaaaatcgagaatgcgcgttcgacgagttggattttatcgatgttcgcgatcgtgatatggtgtcggtggtttacgatttgtaaaagcgatagttgaaaaagtgtagttaaaatcgggtattagcgtggtattttcgggtagttcgagttattggagcgcgttaattataagtttaaatttaggtgtcgatgacgttgatgattattttcgtgttgttgtatttggcgttcgtcgggtgggcgaagcgttgttgatt

SEQ ID NO: 23990 - DNA, 888 bp, Artificial Sequence
  chemically treated genomic DNA (Homo sapiens) CpG-island No: 23990
aatcaacaacgcttcgcccacccgacgaacgccaaatacaacaacacgaaaataatcatcaacgtcatcgacacctaaatttaaacttataattaacgcgctccaataactcgaactacccgaaaataccacgctaatacccgattttaactacactttttcaactatcgcttttacaaatcgtaaaccaccgacaccatatcacgatcgcgaacatcgataaaatccaactcgtcgaacgcgcattctcgattttcaacatcgacgtccgtaaaaacttaatatcgccacgtctaccgaatattactaatccaaactaatcaaacatcaaataaacgcaaaacgtttaatatcgtaaatttacccttcgcccaccgtctaaccgaaaactaaaattcatcaccgataaaaaaaaacgctacacgcactatacgaacaccgaaacttcgccaatccccaataaaacaattactaacaactctacgtaatcaaacgaattcccgccgaaaaaacaaccgcacctacaaaaatatctcaccgcgacgacgaatattttacccgctacgcacttcaacaataaaaccacgccattatccatttattcaatctactcctacatcaccaccgcttcgaaccttccgacaccgacgcaccgatcataatacgaatacaaatacccgcgaccattcaccataatataactaaccgacaaaaaatttaccgacaacgacaacgattacccgaaaacaatatcgactaaacgcaccgcgtaaccgtccttacgaaattatcaaaccccgaaacatcaaacgacgaaacgacatcgctaccaaaatacgaccaaaacactataccaataacaacgtttcctaaacgacaataaaataa

SEQ ID NO: 23991 - DNA, 888 bp, Artificial Sequence
  chemically treated genomic DNA (Homo sapiens) CpG-island No: 23991
aattagtaacgtttcgtttattcgacgaacgttagatataatagtacgaagataattattaacgttatcggtatttgagtttaagtttatggttggcgcgttttagtagttcgaattgttcggaaatgttacgttggtgttcggttttaattgtatttttttagttatcgtttttgtaaatcgtgaattatcgatattatgttacgatcgcgggtatcgataaaatttagttcgtcgggcgcgtattttcggtttttagtatcgacgttcgtagagatttaatgtcgttacgtttgtcgggtattgttggtttaggttagttaaatattaggtgaacgtaagacgtttggtatcgtagatttgtttttcgtttatcgtttgatcgggaattggagtttattatcggtagaaaaaagcgttatacgtattgtacgaatatcggaatttcgttaatttttagtgaagtaattattggtagttttgcgtagttaggcgagttttcgtcgggaaaataatcgtatttgtagagatattttatcgcgacggcgaatattttgttcgttacgtattttagtagtaaaattacgttattgtttatttgtttagtttgtttttgtattattatcgtttcgagtttttcggtatcggcgtatcggttataatacgaatgtaggtattcgcggttatttattatggtatggttgatcggtaaaggatttatcggtaacggtagcggttgttcggaggtaatatcggttaaacgtatcgcgtagtcgtttttgcggagttattaaatttcggaatattaagcggcgaaacgatatcgttgttagaatacgattaaaatattgtattagtggtagcgttttttgggcggtagtggggtga

SEQ ID NO: 23992 - DNA, 888 bp, Artificial Sequence
  chemically treated genomic DNA (Homo sapiens) CpG-island No: 23992
tcaccccactaccgcccaaaaaacgctaccactaatacaatattttaatcgtattctaacaacgatatcgtttcgccgcttaatattccgaaatttaataactccgcaaaaacgactacgcgatacgtttaaccgatattacctccgaacaaccgctaccgttaccgataaatcctttaccgatcaaccataccataataaataaccgcgaatacctacattcgtattataaccgatacgccgataccgaaaaactcgaaacgataataatacaaaaacaaactaaacaaataaacaataacgtaattttactactaaaatacgtaacgaacaaaatattcgccgtcgcgataaaatatctctacaaatacgattattttcccgacgaaaactcgcctaactacgcaaaactaccaataattacttcactaaaaattaacgaaattccgatattcgtacaatacgtataacgcttttttctaccgataataaactccaattcccgatcaaacgataaacgaaaaacaaatctacgataccaaacgtcttacgttcacctaatatttaactaacctaaaccaacaatacccgacaaacgtaacgacattaaatctctacgaacgtcgatactaaaaaccgaaaatacgcgcccgacgaactaaattttatcgatacccgcgatcgtaacataatatcgataattcacgatttacaaaaacgataactaaaaaaatacaattaaaaccgaacaccaacgtaacatttccgaacaattcgaactactaaaacgcgccaaccataaacttaaactcaaataccgataacgttaataattatcttcgtactattatatctaacgttcgtcgaataaacgaaacgttactaatt

SEQ ID NO: 23993 - DNA, 548 bp, Artificial Sequence
  chemically treated genomic DNA (Homo sapiens) CpG-island No: 23993
tacgtttcgttcgttgtcgttgggaggcgtttaaggacggggcggtttcggtttcgtagttttcgtttattttttttcgggttcgtattttttgtttttcgatttttttattatagataggagaaggcggcggcggtcgcggcggcggtggtgtacggcgttgtgttcgttcgtttttgggcgtttattcgttgttgttcggcggcgcggggattagcgggcgggaggttcgggcgttagcgttttaggaaagacgttttgttgcggatttgcgggcgcggtttcgggcgtcgcgagattttgaagcgttatgagttatttatacgggcgagaagttttattagtgtttcgtgtgtgggaagcgtttcgcgaatttttttatttgagtaagtattacgtggtgtatacgcgcgacggttttataagtgcgagttttgcggtaaggttttcggttattcgtagattttattcgttatcgttaggtgtatcggttttagttgttttgcgttttgtcggggtagtcggttttttttttatttaaggtatat

SEQ ID NO: 23994 - DNA, 548 bp, Artificial Sequence
  chemically treated genomic DNA (Homo sapiens) CpG-island No: 23994
atataccttaaataaaaaaaaaaccgactaccccgacaaaacgcaaaacaactaaaaccgatacacctaacgataacgaataaaatctacgaataaccgaaaaccttaccgcaaaactcgcacttataaaaccgtcgcgcgtatacaccacgtaatacttactcaaataaaaaaattcgcgaaacgcttcccacacacgaaacactaataaaacttctcgcccgtataaataactcataacgcttcaaaatctcgcgacgcccgaaaccgcgcccgcaaatccgcaacaaaacgtctttcctaaaacgctaacgcccgaacctcccgcccgctaatccccgcgccgccgaacaacaacgaataaacgcccaaaaacgaacgaacacaacgccgtacaccaccgccgccgcgaccgccgccgccttctcctatctataataaaaaaatcgaaaaacaaaaaatacgaacccgaaaaaaaataaacgaaaactacgaaaccgaaaccgccccgtccttaaacgcctcccaacgacaacgaacgaaacgta

SEQ ID NO: 23995 - DNA, 548 bp, Artificial Sequence
  chemically treated genomic DNA (Homo sapiens) CpG-island No: 23995
gtgtgttttgggtggaggggaggtcggttgtttcggtagggcgtagggtagttggagtcggtgtatttggcggtggcgggtgaggtttgcgggtagtcgaagattttgtcgtagagttcgtatttgtagggtcgtcgcgcgtgtgtattacgtgatgtttgtttaagtggaaggattcgcggagcgttttttatatacggggtattggtggggtttttcgttcgtgtggatggtttatggcgttttagggtttcgcggcgttcgaagtcgcgttcgtagattcgtagtagaacgttttttttgggacgttggcgttcgagtttttcgttcgttggttttcgcgtcgtcgagtagtagcgggtgggcgtttaggagcgggcgggtatagcgtcgtatattatcgtcgtcgcggtcgtcgtcgtttttttttgtttgtggtgggagggtcggggggtaggaggtacgggttcggggggaggtgggcgggggttgcggggtcgaggtcgtttcgtttttgggcgttttttagcggtagcgggcggggcgtg

SEQ ID NO: 23996 - DNA, 548 bp, Artificial Sequence
  chemically treated genomic DNA (Homo sapiens) CpG-island No: 23996
cacgccccgcccgctaccgctaaaaaacgcccaaaaacgaaacgacctcgaccccgcaacccccgcccacctccccccgaacccgtacctcctaccccccgaccctcccaccacaaacaaaaaaaaacgacgacgaccgcgacgacgataatatacgacgctatacccgcccgctcctaaacgcccacccgctactactcgacgacgcgaaaaccaacgaacgaaaaactcgaacgccaacgtcccaaaaaaaacgttctactacgaatctacgaacgcgacttcgaacgccgcgaaaccctaaaacgccataaaccatccacacgaacgaaaaaccccaccaataccccgtatataaaaaacgctccgcgaatccttccacttaaacaaacatcacgtaatacacacgcgcgacgaccctacaaatacgaactctacgacaaaatcttcgactacccgcaaacctcacccgccaccgccaaatacaccgactccaactaccctacgccctaccgaaacaaccgacctcccctccacccaaaacacac

SEQ ID NO: 23997 - DNA, 519 bp, Artificial Sequence
  chemically treated genomic DNA (Homo sapiens) CpG-island No: 23997
ttggatttcggtttttatatttgtttagtcggcggaatattttttttttcgttttttatttcggtgggtggttacggtcgagaggtagcgacggtttagtggaaagaggataaatttttgtgggttttaggcgaagacgtaattttgtttagtttcggtttattggtcgattttttgttagcggcggaatcgtttcgttcgggaggtgggaggggagcggggtcgtcggggcgggcgtttttagtggattttacgttttcggtttttttttcgtaggggtttcgtagaggcgaggggtgggagcgtcggttttaggcggcggaatttcgtattgggttcgcgcgttttcggtcggcgtttttttttagggatttcgtaatttttcgtattttcgcgtttttagttttcgcgttttcggcgtcgtcgttcggagttgttcggaagtttcggtttcgtttgtcggcgttttgttaggtgaagttttggggtttgttcgggatttttggttttgtttttttt

SEQ ID NO: 23998 - DNA, 519 bp, Artificial Sequence
  chemically treated genomic DNA (Homo sapiens) CpG-island No: 23998
aaaaaaaacaaaaccaaaaatcccgaacaaaccccaaaacttcacctaacaaaacgccgacaaacgaaaccgaaacttccgaacaactccgaacgacgacgccgaaaacgcgaaaactaaaaacgcgaaaatacgaaaaattacgaaatccctaaaaaaaaacgccgaccgaaaacgcgcgaacccaatacgaaattccgccgcctaaaaccgacgctcccacccctcgcctctacgaaacccctacgaaaaaaaaaccgaaaacgtaaaatccactaaaaacgcccgccccgacgaccccgctcccctcccacctcccgaacgaaacgattccgccgctaacaaaaaatcgaccaataaaccgaaactaaacaaaattacgtcttcgcctaaaacccacaaaaatttatcctctttccactaaaccgtcgctacctctcgaccgtaaccacccaccgaaataaaaaacgaaaaaaaaaatattccgccgactaaacaaatataaaaaccgaaatccaa

SEQ ID NO: 23999 - DNA, 519 bp, Artificial Sequence
  chemically treated genomic DNA (Homo sapiens) CpG-island No: 23999
aggaggaatagggttagaggtttcgggtaggttttagggttttatttggtagagcgtcggtaggcggaatcgagattttcgggtagtttcgggcggcggcgtcggggacgcggggattgggggcgcgggggtgcgaggggttgcggagtttttgggaaaaggcgtcggtcggaagcgcgcgagtttagtgcgaggtttcgtcgtttggagtcggcgtttttatttttcgtttttgcggagtttttgcggggaggggatcggaggcgtggggtttattgaagacgttcgtttcggcggtttcgttttttttttatttttcgaacggaacgatttcgtcgttgataagagatcggttaataaatcgagattaagtaaagttacgttttcgtttaaggtttataagggtttgttttttttttattgggtcgtcgttgtttttcggtcgtggttatttatcgaggtagagggcgggagaagggatgtttcgtcggttgagtaaatgtggagatcgaggtttag

SEQ ID NO: 24000 - DNA, 519 bp, Artificial Sequence
  chemically treated genomic DNA (Homo sapiens) CpG-island No: 24000
ctaaacctcgatctccacatttactcaaccgacgaaacatcccttctcccgccctctacctcgataaataaccacgaccgaaaaacaacgacgacccaataaaaaaaaaacaaacccttataaaccttaaacgaaaacgtaactttacttaatctcgatttattaaccgatctcttatcaacgacgaaatcgttccgttcgaaaaataaaaaaaaaacgaaaccgccgaaacgaacgtcttcaataaaccccacgcctccgatcccctccccgcaaaaactccgcaaaaacgaaaaataaaaacgccgactccaaacgacgaaacctcgcactaaactcgcgcgcttccgaccgacgccttttcccaaaaactccgcaacccctcgcacccccgcgcccccaatccccgcgtccccgacgccgccgcccgaaactacccgaaaatctcgattccgcctaccgacgctctaccaaataaaaccctaaaacctacccgaaacctctaaccctattcctcct

SEQ ID NO: 24001 - DNA, 577 bp, Artificial Sequence
  chemically treated genomic DNA (Homo sapiens) CpG-island No: 24001
cgtgttaagttcggggggttgtttttcgagggcggtggggaggcgtttgtatttgggcggtcgtcgagttttcggaagatattttgtattagtgcgattgcgggttttttttgcgtcggtcgcggttttggttagttatttggaggtttattcggttcggttatttacggttgcggttattgcggggttttgtacgcggcgcggtcgttttggaggagtatcggcgggttagttacggtgagggcggcgggaggaggcggcgatcgtcgttcgggaaagggaatcggcgttcggggaatttcgtttggtttcggtcgcggtaagaagattttcggttgtttcgagtgcggaagttgtttcgtttatcgcgagatttggagcggtacgtgttggtgtatttggcgagaagtcgttttcgtgtttggagtgcggtaagttttttcgttagagtgttattttaagcgttatcggttgttgtacggtatcgagcggtttttttttgttatatttgcggtaagggttttattacgtttagtaattttttcggtatttgaagttgtatcggggtatggattga

SEQ ID NO: 24002 - DNA, 577 bp, Artificial Sequence
  chemically treated genomic DNA (Homo sapiens) CpG-island No: 24002
tcaatccataccccgatacaacttcaaataccgaaaaaattactaaacgtaataaaacccttaccgcaaatataacaaaaaaaaaccgctcgataccgtacaacaaccgataacgcttaaaataacactctaacgaaaaaacttaccgcactccaaacacgaaaacgacttctcgccaaatacaccaacacgtaccgctccaaatctcgcgataaacgaaacaacttccgcactcgaaacaaccgaaaatcttcttaccgcgaccgaaaccaaacgaaattccccgaacgccgattccctttcccgaacgacgatcgccgcctcctcccgccgccctcaccgtaactaacccgccgatactcctccaaaacgaccgcgccgcgtacaaaaccccgcaataaccgcaaccgtaaataaccgaaccgaataaacctccaaataactaaccaaaaccgcgaccgacgcaaaaaaaacccgcaatcgcactaatacaaaatatcttccgaaaactcgacgaccgcccaaatacaaacgcctccccaccgccctcgaaaaacaaccccccgaacttaacacg

SEQ ID NO: 24003 - DNA, 577 bp, Artificial Sequence
  chemically treated genomic DNA (Homo sapiens) CpG-island No: 24003
ttagtttatgtttcggtgtagttttaggtgtcggagaggttgttgagcgtgatgaagtttttgtcgtagatgtggtaagggagggtcgttcggtgtcgtgtagtagtcggtggcgtttgaggtagtattttggcggaagaatttgtcgtattttaggtacgggaacggtttttcgttaggtgtattagtacgtgtcgttttaggtttcgcggtgagcggaatagttttcgtattcggagtagtcgaagatttttttgtcgcggtcggagttagacggggtttttcggacgtcggttttttttttcgggcggcggtcgtcgttttttttcgtcgtttttatcgtggttgattcgtcggtgtttttttaaggcggtcgcgtcgcgtatagagtttcgtagtggtcgtagtcgtaggtggtcgggtcgagtgggtttttaggtgattggttagggtcgcggtcgacgtaaagaaggttcgtagtcgtattggtatagggtgtttttcgagggttcggcggtcgtttaggtgtaggcgtttttttatcgttttcggggagtagtttttcgagtttggtacg

SEQ ID NO: 24004 - DNA, 577 bp, Artificial Sequence
  chemically treated genomic DNA (Homo sapiens) CpG-island No: 24004
cgtaccaaactcgaaaaactactccccgaaaacgataaaaaaacgcctacacctaaacgaccgccgaaccctcgaaaaacaccctataccaatacgactacgaaccttctttacgtcgaccgcgaccctaaccaatcacctaaaaacccactcgacccgaccacctacgactacgaccactacgaaactctatacgcgacgcgaccgccttaaaaaaacaccgacgaatcaaccacgataaaaacgacgaaaaaaaacgacgaccgccgcccgaaaaaaaaaaccgacgtccgaaaaaccccgtctaactccgaccgcgacaaaaaaatcttcgactactccgaatacgaaaactattccgctcaccgcgaaacctaaaacgacacgtactaatacacctaacgaaaaaccgttcccgtacctaaaatacgacaaattcttccgccaaaatactacctcaaacgccaccgactactacacgacaccgaacgaccctcccttaccacatctacgacaaaaacttcatcacgctcaacaacctctccgacacctaaaactacaccgaaacataaactaa

SEQ ID NO: 24005 - DNA, 1208 bp, Artificial Sequence
  chemically treated genomic DNA (Homo sapiens) CpG-island No: 24005
cgagaattaggatttcgttttttttttatttttttttttgatttatttcgtttttgtttttttttttttttcgttttcgaagtcggaaggagtcgaggtatttacggaaaaagtcgagttgttttcggagagtgaggtttttacgaagcggtggcggaaggagttaagttttttgatcggaggcgtgagtaagtggtattttcggaaagagtcgaatacggattcgagtttaattttaggaggggttcgagggcgagattcggaattttcggaaagagtcgaaggtcgggacggttaggattgtcggaagtgtcgattgtttggatagggtcggcggagaagatcggagtaagttcgtggagaagttaaagattgggacggattgaattgttggaagaattcgaattcgcgaggggattgggcgtagtggtatacgaggatatacggaaattttcgaatttgaggagataatttcggaaaagttacggaaatttgggaagtcggcgaattttacgttcgggtgttttcggaagtagtcgaagcggtcgtttgtttcgtttcgtttagtattcggagatagtcgaggcgtttcggagttaggttcgggggaggggtaagttcgcgggcgggcgggcgggtgagggggcggagttcggcggggcggggagggttgtcggaggtttgattaggtaggaggtggcgaacgtcggcggcggtcggaagtagtcgaagttagcggcggaagtagtcgaacggttggagcgggcggtaaggcgaggcgaaagttgtatagggttttacgggtcgttttagtatgtcggatttcgacgagttcgagcggtagtttaacggaataaataaggtgagggtatcggggtcgcggggcggaggtgtgggcggttttcgcgtcgttttttgttttttcgttattttttttttcgttttttttattttacggtcgcgcggcgttttttaattttggtttcgtggcgcgcgttcgtttacgtgacgtttttagcgtttcgtcgcgcgttaggcgaggggaaggggcggcggggcgcgggttcgtgacgtatgcgtacggcggttgtttttggttttacgtggttttggcggaggtggcgcgggggacgcggtacgagcgtttagatgtttcgacgtgaatttttgttttttaaaatttttttggttttttgaaaaggagatta

SEQ ID NO: 24006 - DNA, 1208 bp, Artificial Sequence
  chemically treated genomic DNA (Homo sapiens) CpG-island No: 24006
taatctccttttcaaaaaaccaaaaaaattttaaaaaacaaaaattcacgtcgaaacatctaaacgctcgtaccgcgtcccccgcgccacctccgccaaaaccacgtaaaaccaaaaacaaccgccgtacgcatacgtcacgaacccgcgccccgccgccccttcccctcgcctaacgcgcgacgaaacgctaaaaacgtcacgtaaacgaacgcgcgccacgaaaccaaaattaaaaaacgccgcgcgaccgtaaaataaaaaaaacgaaaaaaaaaataacgaaaaaacaaaaaacgacgcgaaaaccgcccacacctccgccccgcgaccccgataccctcaccttatttattccgttaaactaccgctcgaactcgtcgaaatccgacatactaaaacgacccgtaaaaccctatacaactttcgcctcgccttaccgcccgctccaaccgttcgactacttccgccgctaacttcgactacttccgaccgccgccgacgttcgccacctcctacctaatcaaacctccgacaaccctccccgccccgccgaactccgccccctcacccgcccgcccgcccgcgaacttacccctcccccgaacctaactccgaaacgcctcgactatctccgaatactaaacgaaacgaaacaaacgaccgcttcgactacttccgaaaacacccgaacgtaaaattcgccgacttcccaaatttccgtaacttttccgaaattatctcctcaaattcgaaaatttccgtatatcctcgtataccactacgcccaatcccctcgcgaattcgaattcttccaacaattcaatccgtcccaatctttaacttctccacgaacttactccgatcttctccgccgaccctatccaaacaatcgacacttccgacaatcctaaccgtcccgaccttcgactctttccgaaaattccgaatctcgccctcgaacccctcctaaaattaaactcgaatccgtattcgactctttccgaaaataccacttactcacgcctccgatcaaaaaacttaactccttccgccaccgcttcgtaaaaacctcactctccgaaaacaactcgactttttccgtaaatacctcgactccttccgacttcgaaaacgaaaaaaaaaaaaaaacaaaaacgaaataaatcaaaaaaaaaaataaaaaaaaaacgaaatcctaattctcg

SEQ ID NO: 24007 - DNA, 1208 bp, Artificial Sequence
  chemically treated genomic DNA (Homo sapiens) CpG-island No: 24007
taattttttttttaagaaattaaaaagattttaaaaaataaaagtttacgtcgaggtatttgggcgttcgtgtcgcgtttttcgcgttattttcgttaggattacgtggggttagggatagtcgtcgtgcgtatgcgttacgggttcgcgtttcgtcgtttttttttttcgtttagcgcgcggcggaacgttggggacgttacgtgaacgggcgcgcgttacggaattagggttggggggcgtcgcgcggtcgtgaagtgggggaagcgagggagaaaatggcgggggggtaaagagcgacgcgaggatcgtttatattttcgtttcgcgatttcggtgtttttattttgtttatttcgttgagttgtcgttcgaattcgtcgaagttcgatatgttgaggcggttcgtagggttttgtgtagttttcgtttcgttttgtcgttcgttttagtcgttcggttattttcgtcgttggtttcggttattttcggtcgtcgtcggcgttcgttattttttatttaattaagttttcggtagtttttttcgtttcgtcgggtttcgtttttttattcgttcgttcgttcgcgagtttgtttttttttcgagtttggtttcgaagcgtttcggttattttcggatattggacgaagcgaagtaggcggtcgtttcggttgttttcgaaaatattcgaacgtagggttcgtcgattttttaggttttcgtaattttttcgagattatttttttaagttcggaggttttcgtgtgttttcgtgtgttattgcgtttagttttttcgcgagttcgggtttttttaataatttaattcgttttagtttttggtttttttacggatttgtttcgatttttttcgtcggttttgtttaagtaatcggtattttcgataattttaatcgtttcggttttcggtttttttcggagatttcggatttcgttttcgggttttttttgggattaagttcgagttcgtgttcggtttttttcggagatgttatttgtttacgttttcgattagagaatttggtttttttcgttatcgtttcgtgaaggttttatttttcggggatagttcgatttttttcgtgggtatttcggtttttttcggtttcgggaacggaaagggaaggagaatagagacgagatggattaggggaagggatagagaagggacgaggttttagttttcg

SEQ ID NO: 24008 - DNA, 1208 bp, Artificial Sequence
  chemically treated genomic DNA (Homo sapiens) CpG-island No: 24008
cgaaaactaaaacctcgtcccttctctatcccttcccctaatccatctcgtctctattctccttccctttccgttcccgaaaccgaaaaaaaccgaaatacccacgaaaaaaatcgaactatccccgaaaaataaaaccttcacgaaacgataacgaaaaaaaccaaattctctaatcgaaaacgtaaacaaataacatctccgaaaaaaaccgaacacgaactcgaacttaatcccaaaaaaaacccgaaaacgaaatccgaaatctccgaaaaaaaccgaaaaccgaaacgattaaaattatcgaaaataccgattacttaaacaaaaccgacgaaaaaaatcgaaacaaatccgtaaaaaaaccaaaaactaaaacgaattaaattattaaaaaaacccgaactcgcgaaaaaactaaacgcaataacacacgaaaacacacgaaaacctccgaacttaaaaaaataatctcgaaaaaattacgaaaacctaaaaaatcgacgaaccctacgttcgaatattttcgaaaacaaccgaaacgaccgcctacttcgcttcgtccaatatccgaaaataaccgaaacgcttcgaaaccaaactcgaaaaaaaaacaaactcgcgaacgaacgaacgaataaaaaaacgaaacccgacgaaacgaaaaaaactaccgaaaacttaattaaataaaaaataacgaacgccgacgacgaccgaaaataaccgaaaccaacgacgaaaataaccgaacgactaaaacgaacgacaaaacgaaacgaaaactacacaaaaccctacgaaccgcctcaacatatcgaacttcgacgaattcgaacgacaactcaacgaaataaacaaaataaaaacaccgaaatcgcgaaacgaaaatataaacgatcctcgcgtcgctctttacccccccgccattttctccctcgcttcccccacttcacgaccgcgcgacgccccccaaccctaattccgtaacgcgcgcccgttcacgtaacgtccccaacgttccgccgcgcgctaaacgaaaaaaaaaaacgacgaaacgcgaacccgtaacgcatacgcacgacgactatccctaaccccacgtaatcctaacgaaaataacgcgaaaaacgcgacacgaacgcccaaatacctcgacgtaaacttttattttttaaaatctttttaatttcttaaaaaaaaaatta

SEQ ID NO: 24009 - DNA, 563 bp, Artificial Sequence
  chemically treated genomic DNA (Homo sapiens) CpG-island No: 24009
ttgtcgtaaacggcgggttttatttggattcgggattttttaacgaggggcgttagtttggttcgattgggcgagttttcgcgttttgttcgtttcgtcgtttagttttacgatacgtttttttgtcgtttttttgttcgcgggtgggtgggcgtttttttcggtttttcgtgatattttgagacgtttttcggcgtcgggtatgggcgtcgtcgtcgtcggttttcgagcggatttcgcgagcgggtgggtgagcgcggggggtttcggtttttcggattcgggtattcgcgggcgggggatggtggtcgcgtttgtattttcgtttagtgtatgttttcgttggaatcgttttacgatcgtttttttttttatttcgggataaagggcgggggcggggggggcgtatttttacgcgtgatttttttcgtattgcgtacgcgtttagtttttattatcgggggacggttcgtttttatacgcgagtgcgggggaggggtgtgggggtttacgaaggtagaggagtagcgcgtatagggttgatttttttttatattgggaag

SEQ ID NO: 24010 - DNA, 563 bp, Artificial Sequence
  chemically treated genomic DNA (Homo sapiens) CpG-island No: 24010
cttcccaatataaaaaaaaatcaaccctatacgcgctactcctctaccttcgtaaacccccacacccctcccccgcactcgcgtataaaaacgaaccgtcccccgataataaaaactaaacgcgtacgcaatacgaaaaaaatcacgcgtaaaaatacgccccccccgcccccgccctttatcccgaaataaaaaaaaaaacgatcgtaaaacgattccaacgaaaacatacactaaacgaaaatacaaacgcgaccaccatcccccgcccgcgaatacccgaatccgaaaaaccgaaaccccccgcgctcacccacccgctcgcgaaatccgctcgaaaaccgacgacgacgacgcccatacccgacgccgaaaaacgtctcaaaatatcacgaaaaaccgaaaaaaacgcccacccacccgcgaacaaaaaaacgacaaaaaaacgtatcgtaaaactaaacgacgaaacgaacaaaacgcgaaaactcgcccaatcgaaccaaactaacgcccctcgttaaaaaatcccgaatccaaataaaacccgccgtttacgacaa

SEQ ID NO: 24011 - DNA, 563 bp, Artificial Sequence
  chemically treated genomic DNA (Homo sapiens) CpG-island No: 24011
ttttttagtgtaggaggaggttagttttgtgcgcgttgtttttttattttcgtgggtttttatatttttttttcgtattcgcgtgtgggggcggatcgtttttcggtggtgggggttgggcgcgtgcgtagtacgggaaaggttacgcgtgggggtgcgtttttttcgttttcgttttttgtttcggggtgggagggggagcggtcgtggaacgattttagcgggaatatgtattgggcgggggtgtaaacgcggttattatttttcgttcgcgggtgttcgggttcgaggggtcgaggtttttcgcgtttatttattcgttcgcggaattcgttcggggatcgacggcggcggcgtttatgttcggcgtcggggagcgttttaaagtgttacggggagtcgagggaagcgtttatttattcgcgaataggggggcggtaggggagcgtgtcgtggaattgagcgacggaacgggtagggcgcggggattcgtttagtcgggttaggttagcgtttttcgttgaagagtttcgggtttaggtgaggttcgtcgtttgcggtag

SEQ ID NO: 24012 - DNA, 563 bp, Artificial Sequence
  chemically treated genomic DNA (Homo sapiens) CpG-island No: 24012
ctaccgcaaacgacgaacctcacctaaacccgaaactcttcaacgaaaaacgctaacctaacccgactaaacgaatccccgcgccctacccgttccgtcgctcaattccacgacacgctcccctaccgcccccctattcgcgaataaataaacgcttccctcgactccccgtaacactttaaaacgctccccgacgccgaacataaacgccgccgccgtcgatccccgaacgaattccgcgaacgaataaataaacgcgaaaaacctcgacccctcgaacccgaacacccgcgaacgaaaaataataaccgcgtttacacccccgcccaatacatattcccgctaaaatcgttccacgaccgctccccctcccaccccgaaacaaaaaacgaaaacgaaaaaaacgcacccccacgcgtaacctttcccgtactacgcacgcgcccaacccccaccaccgaaaaacgatccgcccccacacgcgaatacgaaaaaaaaatataaaaacccacgaaaataaaaaaacaacgcgcacaaaactaacctcctcctacactaaaaaa

SEQ ID NO: 24013 - DNA, 692 bp, Artificial Sequence
  chemically treated genomic DNA (Homo sapiens) CpG-island No: 24013
attcgtgtgtgtgcgcgtatatgtttgttaatgtgtagttagggtggaaggttacgtaggcgtcgcgggcgggcgtcgtttgggtttttttttttcgtatttttttttttttttcgtttgttggagtgtcgttgtaatatgttttttttcggtttttggttcggtcgagtagtatatcgatggatcggtttagttttgttcggtttcggggggggtgaggtgggcgtgtcgatgtgtgggggtgttattgcgtcgtggggtgggagtttttttgggtggtaatgcgtggttgttgggggtttgggtgggtatttcggcgtgggtgtatttcggcgtgggagcggtgttttgggggggtgcgtatatttgtgggacgtcggcggtgggtgttattggttgtgcggcggtagggtttgaagggttggtgagtgggtgtaatttaggtgggcgcgtggtcgggttggagcggcggcggggtaggggtttggggggggggttatgtgttgtgggtagtcgacgagtaggtgttagtagtggtcggtaagcggtttcggttggtgttatttttttgggtcgttggttaagttttgtcgcgaggtcgcgagtggggttaaggtgtaagaaggggttagatgggagaagggtatattaggggtgtgtggttgttttgtttgcgatgtattgtataatag

SEQ ID NO: 24014 - DNA, 692 bp, Artificial Sequence
  chemically treated genomic DNA (Homo sapiens) CpG-island No: 24014
ctattatacaatacatcgcaaacaaaacaaccacacacccctaatatacccttctcccatctaaccccttcttacaccttaaccccactcgcgacctcgcgacaaaacttaaccaacgacccaaaaaaataacaccaaccgaaaccgcttaccgaccactactaacacctactcgtcgactacccacaacacataaccccccccccaaacccctaccccgccgccgctccaacccgaccacgcgcccacctaaattacacccactcaccaacccttcaaaccctaccgccgcacaaccaataacacccaccgccgacgtcccacaaatatacgcacccccccaaaacaccgctcccacgccgaaatacacccacgccgaaatacccacccaaacccccaacaaccacgcattaccacccaaaaaaactcccaccccacgacgcaataacacccccacacatcgacacgcccacctcaccccccccgaaaccgaacaaaactaaaccgatccatcgatatactactcgaccgaaccaaaaaccgaaaaaaaacatattacaacgacactccaacaaacgaaaaaaaaaaaaaaatacgaaaaaaaaaaacccaaacgacgcccgcccgcgacgcctacgtaaccttccaccctaactacacattaacaaacatatacgcgcacacacacgaat

SEQ ID NO: 24015 - DNA, 692 bp, Artificial Sequence
  chemically treated genomic DNA (Homo sapiens) CpG-island No: 24015
ttattatataatatatcgtagataagataattatatatttttagtatgttttttttttatttggtttttttttgtattttagttttattcgcgatttcgcggtaaggtttaattagcgatttagaaaaatagtattaatcgaggtcgtttatcgattattattgatatttgttcgtcggttatttataatatatagttttttttttaagtttttgtttcgtcgtcgttttaattcgattacgcgtttatttgggttatatttatttattaattttttaagttttgtcgtcgtataattagtaatatttatcgtcggcgttttataggtgtgcgtatttttttaaaatatcgtttttacgtcgggatgtatttacgtcggggtgtttatttaagtttttaatagttacgtattgttatttagggagatttttattttacgacgtagtaatatttttatatatcgatacgtttattttatttttttcggaatcgggtaggattaaatcgatttatcgatgtattgttcggtcgagttagaggtcgagagagaatatgttgtaacggtattttaataggcggggagagaggagaagtgcgaggagagaaggtttaggcggcgttcgttcgcggcgtttgcgtgattttttattttggttatatattgataggtatatgcgcgtatatatacggat

SEQ ID NO: 24016 - DNA, 692 bp, Artificial Sequence
  chemically treated genomic DNA (Homo sapiens) CpG-island No: 24016
atccgtatatatacgcgcatatacctatcaatatataaccaaaataaaaaatcacgcaaacgccgcgaacgaacgccgcctaaaccttctctcctcgcacttctcctctctccccgcctattaaaataccgttacaacatattctctctcgacctctaactcgaccgaacaatacatcgataaatcgatttaatcctacccgattccgaaaaaaataaaataaacgtatcgatatataaaaatattactacgtcgtaaaataaaaatctccctaaataacaatacgtaactattaaaaacttaaataaacaccccgacgtaaatacatcccgacgtaaaaacgatattttaaaaaaatacgcacacctataaaacgccgacgataaatattactaattatacgacgacaaaacttaaaaaattaataaataaatataacccaaataaacgcgtaatcgaattaaaacgacgacgaaacaaaaacttaaaaaaaaaactatatattataaataaccgacgaacaaatatcaataataatcgataaacgacctcgattaatactatttttctaaatcgctaattaaaccttaccgcgaaatcgcgaataaaactaaaatacaaaaaaaaaccaaataaaaaaaaaacatactaaaaatatataattatcttatctacgatatattatataataa

SEQ ID NO: 24017 - DNA, 720 bp, Artificial Sequence
  chemically treated genomic DNA (Homo sapiens) CpG-island No: 24017
tttttttcgtattatttagcgatttatatttttaaacgtttgcggacgttaatattgtagtacggggtttttttttaggtattggggttacgaatattttttttatatgttagagaacggattacgttcgttttattcggtttttagcgtttttttttttatagtcgttttcgtttcgcgttataaaataaggattagtaagtatttgtatcggtcgtttttggtttttcgataagtttcgggagcgggtttggaagggggtcgcgggcggaagtgacgttagacgcgcgcggtggggcggggcggcgttcgtttcgggtcgtagtaatcgttttaagtttttcggagggcgggttgggaggaatcgagttgtgattttgcgagggtcgggaagcgattttttttatttttagagaaggagtaacggggaaggggatttggggaagaacgggagcggaagtcggtaggagacgggcggcggttggggattagcgcgagttttcgttttacgttttttcgttgttgagtatttgagcgtcgggcggcgacgttagcgcgtggatttttattcgtgtcgggttttcgcgggaggagtcggttacgtttagtattttggcgttcgattttttatttttagggattttattttatttacggggcgttcggggtcgtagaatttttcgtataaggatttttttattttttatacgaggggggtag

SEQ ID NO: 24018 - DNA, 720 bp, Artificial Sequence
  chemically treated genomic DNA (Homo sapiens) CpG-island No: 24018
ctacccccctcgtataaaaaataaaaaaatccttatacgaaaaattctacgaccccgaacgccccgtaaataaaataaaatccctaaaaataaaaaatcgaacgccaaaatactaaacgtaaccgactcctcccgcgaaaacccgacacgaataaaaatccacgcgctaacgtcgccgcccgacgctcaaatactcaacaacgaaaaaacgtaaaacgaaaactcgcgctaatccccaaccgccgcccgtctcctaccgacttccgctcccgttcttccccaaatccccttccccgttactccttctctaaaaataaaaaaaatcgcttcccgaccctcgcaaaatcacaactcgattcctcccaacccgccctccgaaaaacttaaaacgattactacgacccgaaacgaacgccgccccgccccaccgcgcgcgtctaacgtcacttccgcccgcgacccccttccaaacccgctcccgaaacttatcgaaaaaccaaaaacgaccgatacaaatacttactaatccttattttataacgcgaaacgaaaacgactataaaaaaaaaaacgctaaaaaccgaataaaacgaacgtaatccgttctctaacatataaaaaaaatattcgtaaccccaatacctaaaaaaaaaccccgtactacaatattaacgtccgcaaacgtttaaaaatataaatcgctaaataatacgaaaaaaa

SEQ ID NO: 24019 - DNA, 720 bp, Artificial Sequence
  chemically treated genomic DNA (Homo sapiens) CpG-island No: 24019
ttgtttttttcgtgtgagaagtagggggatttttatgcggaaggttttgcgatttcgggcgtttcgtgggtggagtggggtttttggggatggggagtcgggcgttaggatgttgagcgtggtcggtttttttcgcgaaggttcggtacggatgagaatttacgcgttggcgtcgtcgttcggcgtttaggtgtttagtaacgagggaacgtggggcgggagttcgcgttggtttttagtcgtcgttcgttttttgtcggttttcgttttcgtttttttttaggttttttttttcgttgttttttttttagggataggagaggtcgtttttcggttttcgtagggttatagttcggttttttttagttcgtttttcggggagtttagaacggttgttacggttcggagcgggcgtcgtttcgttttatcgcgcgcgtttgacgttattttcgttcgcgatttttttttagattcgttttcgaaatttgtcgaaggattaaaggcgatcggtgtaggtgtttgttggtttttgttttgtggcgcgggacggggacgattgtgggggagggggcgttggggatcgggtggagcgagcgtggttcgttttttggtatgtggggagggtgttcgtgattttagtgtttgggagggagtttcgtgttgtagtgttggcgttcgtaggcgtttgggagtgtagatcgttgaataatacgggggagg

SEQ ID NO: 24020 - DNA, 720 bp, Artificial Sequence
  chemically treated genomic DNA (Homo sapiens) CpG-island No: 24020
cctcccccgtattattcaacgatctacactcccaaacgcctacgaacgccaacactacaacacgaaactccctcccaaacactaaaatcacgaacaccctccccacataccaaaaaacgaaccacgctcgctccacccgatccccaacgccccctcccccacaatcgtccccgtcccgcgccacaaaacaaaaaccaacaaacacctacaccgatcgcctttaatccttcgacaaatttcgaaaacgaatctaaaaaaaaatcgcgaacgaaaataacgtcaaacgcgcgcgataaaacgaaacgacgcccgctccgaaccgtaacaaccgttctaaactccccgaaaaacgaactaaaaaaaaccgaactataaccctacgaaaaccgaaaaacgacctctcctatccctaaaaaaaaaacaacgaaaaaaaaaacctaaaaaaaaacgaaaacgaaaaccgacaaaaaacgaacgacgactaaaaaccaacgcgaactcccgccccacgttccctcgttactaaacacctaaacgccgaacgacgacgccaacgcgtaaattctcatccgtaccgaaccttcgcgaaaaaaaccgaccacgctcaacatcctaacgcccgactccccatccccaaaaaccccactccacccacgaaacgcccgaaatcgcaaaaccttccgcataaaaatccccctacttctcacacgaaaaaaacaa

SEQ ID NO: 24021 - DNA, 764 bp, Artificial Sequence
  chemically treated genomic DNA (Homo sapiens) CpG-island No: 24021
ttgttcgtgtggtttcgtaggtggtagcgtagttcggaggagtttttgaagatttgtcgtattcggtatatttgtagggtcgtttcgtagaagcgggggcgacgggggtggcggcgggacgggggcggtaggcgttagcggtttttggggtaggttattttcgtagttttagtttgcgggggcgggcgttcggtcgcgttttttttacgtggtattgttgatgcgttaggaggttggttagttgcggaaggagtcgtcgtagttgtcgtagcggaacgtttgttcgtcggtagttcgtggttgtgttggtggcgggagagtttagttatcgttcggaaggatttgcgtagggtagataggtaaagttaggcgcgggggcggcggcgggaggaggggttgcggtagaggggacggtggttggtcggttttgggcgtttcggcggtgttttttggggttggggcgtcgtatcgggttcggggtacggttggtgtttaggagtagtttttcgttgttgaattttgttcgtagttatcgtagcggaattaggtttatcgtgttttcgcgtcgttaaaaggagtttggttttcggcgggggcggtgtcggggtgggaagttcgggggtagtggtttgaggatttttggttggtttattaagaatttcgggttcggattggggaggtcgcggggttcggcggtgggtttttttttatgttatacgggtgagtggtggtagtttgaggacgagaggagttttatatatttt

SEQ ID NO: 24022 - DNA, 764 bp, Artificial Sequence
  chemically treated genomic DNA (Homo sapiens) CpG-island No: 24022
aaaatatataaaactcctctcgtcctcaaactaccaccactcacccgtataacataaaaaaaaacccaccgccgaaccccgcgacctccccaatccgaacccgaaattcttaataaaccaaccaaaaatcctcaaaccactacccccgaacttcccaccccgacaccgcccccgccgaaaaccaaactccttttaacgacgcgaaaacacgataaacctaattccgctacgataactacgaacaaaattcaacaacgaaaaactactcctaaacaccaaccgtaccccgaacccgatacgacgccccaaccccaaaaaacaccgccgaaacgcccaaaaccgaccaaccaccgtcccctctaccgcaacccctcctcccgccgccgcccccgcgcctaactttacctatctaccctacgcaaatccttccgaacgataactaaactctcccgccaccaacacaaccacgaactaccgacgaacaaacgttccgctacgacaactacgacgactccttccgcaactaaccaacctcctaacgcatcaacaataccacgtaaaaaaaacgcgaccgaacgcccgcccccgcaaactaaaactacgaaaataacctaccccaaaaaccgctaacgcctaccgcccccgtcccgccgccacccccgtcgcccccgcttctacgaaacgaccctacaaatataccgaatacgacaaatcttcaaaaactcctccgaactacgctaccacctacgaaaccacacgaacaa

SEQ ID NO: 24023 - DNA, 764 bp, Artificial Sequence
  chemically treated genomic DNA (Homo sapiens) CpG-island No: 24023
ggagtgtgtggggtttttttcgtttttaagttattattatttattcgtgtgatatgaaaaggggtttatcgtcgggtttcgcggtttttttaattcggattcgaagtttttggtagattaattagggatttttaagttattgttttcgggttttttatttcggtatcgttttcgtcgggggttagattttttttggcggcgcggagatacggtggatttggtttcgttgcgatggttgcgagtaggatttagtagcgaggagttgtttttgggtattagtcgtgtttcgggttcgatgcggcgttttagttttaggaggtatcgtcgaggcgtttaaggtcgattagttatcgttttttttgtcgtagttttttttttcgtcgtcgttttcgcgtttggttttgtttgtttgttttgcgtaagttttttcggacggtggttgggttttttcgttattagtatagttacgggttgtcggcgggtaagcgtttcgttgcggtagttgcgacggtttttttcgtagttggttagttttttggcgtattagtagtgttacgtggaagaggcgcggtcgggcgttcgttttcgtaggttgaggttgcggaggtgatttgttttaggaatcgttggcgtttgtcgttttcgtttcgtcgttattttcgtcgttttcgtttttgcggagcggttttataaatgtgtcgagtgcggtaagtttttaagggttttttcgggttgcgttattatttgcgggattatacgggtag

SEQ ID NO: 24024 - DNA, 764 bp, Artificial Sequence
  chemically treated genomic DNA (Homo sapiens) CpG-island No: 24024
ctacccgtataatcccgcaaataataacgcaacccgaaaaaacccttaaaaacttaccgcactcgacacatttataaaaccgctccgcaaaaacgaaaacgacgaaaataacgacgaaacgaaaacgacaaacgccaacgattcctaaaacaaatcacctccgcaacctcaacctacgaaaacgaacgcccgaccgcgcctcttccacgtaacactactaatacgccaaaaaactaaccaactacgaaaaaaaccgtcgcaactaccgcaacgaaacgcttacccgccgacaacccgtaactatactaataacgaaaaaacccaaccaccgtccgaaaaaacttacgcaaaacaaacaaacaaaaccaaacgcgaaaacgacgacgaaaaaaaaaactacgacaaaaaaaacgataactaatcgaccttaaacgcctcgacgatacctcctaaaactaaaacgccgcatcgaacccgaaacacgactaatacccaaaaacaactcctcgctactaaatcctactcgcaaccatcgcaacgaaaccaaatccaccgtatctccgcgccgccaaaaaaaatctaacccccgacgaaaacgataccgaaataaaaaacccgaaaacaataacttaaaaatccctaattaatctaccaaaaacttcgaatccgaattaaaaaaaccgcgaaacccgacgataaaccccttttcatatcacacgaataaataataataacttaaaaacgaaaaaaaccccacacactcc

SEQ ID NO: 24025 - DNA, 774 bp, Artificial Sequence
  chemically treated genomic DNA (Homo sapiens) CpG-island No: 24025
ttagacgcgagttcgcgcgcgtcgcggtttagttcgaatattcggagtaggcgggttagcgtttttcgcgtttcgtttcgttttatttcggtttttttacgtcgggttttggggggttatggcggttagtttttgtttcgttcggtttcggtgtcgcgggacgtgcgtcgggttacggggtacgtacgaacgtaaggagggtcgtacgtcgacggtttcgtcgtttcgcgtttagaaggggcgcggagagtcgggcgggggaggggagtcgtcgagggacgggaagtaatagaaggaggcgacggatcggaagcggaaattgtcgttttttcgttttttcgtgtcgtatttcgttttggtaggagtcgttttcgcgttaagttaatttggaaggtattattttcggcgcgttgggtttcgttgtaggcgtttttacgttattttcgttcgttgtagcgggggattcgcgcggttttacggaacgtcgagagttagttttagttcgtttggcggtaatcgcgggtttttggtatatttacgttacgttcgtttcggttcgttcggttattatttttttgtcggcggggtgggagagtattcgggaattttacgtttttcgggttgtgtttgtgtcgatttcgagaagggtatcgcgtaagtagggaaggttcgaggttgtcggcgtcggtagtaggggcgttttagttaggggttcgtatttgttaagggaatttttattcgagtttagaatcgaggaagagggtcggtatattg

SEQ ID NO: 24026 - DNA, 774 bp, Artificial Sequence
  chemically treated genomic DNA (Homo sapiens) CpG-island No: 24026
caatataccgaccctcttcctcgattctaaactcgaataaaaattcccttaacaaatacgaacccctaactaaaacgcccctactaccgacgccgacaacctcgaaccttccctacttacgcgatacccttctcgaaatcgacacaaacacaacccgaaaaacgtaaaattcccgaatactctcccaccccgccgacaaaaaaataataaccgaacgaaccgaaacgaacgtaacgtaaatataccaaaaacccgcgattaccgccaaacgaactaaaactaactctcgacgttccgtaaaaccgcgcgaatcccccgctacaacgaacgaaaataacgtaaaaacgcctacaacgaaacccaacgcgccgaaaataataccttccaaattaacttaacgcgaaaacgactcctaccaaaacgaaatacgacacgaaaaaacgaaaaaacgacaatttccgcttccgatccgtcgcctccttctattacttcccgtccctcgacgactcccctcccccgcccgactctccgcgccccttctaaacgcgaaacgacgaaaccgtcgacgtacgaccctccttacgttcgtacgtaccccgtaacccgacgcacgtcccgcgacaccgaaaccgaacgaaacaaaaactaaccgccataaccccccaaaacccgacgtaaaaaaaccgaaataaaacgaaacgaaacgcgaaaaacgctaacccgcctactccgaatattcgaactaaaccgcgacgcgcgcgaactcgcgtctaa

SEQ ID NO: 24027 - DNA, 774 bp, Artificial Sequence
  chemically treated genomic DNA (Homo sapiens) CpG-island No: 24027
tagtatgtcgattttttttttcggttttgggttcgggtgggggtttttttggtaaatgcgggtttttggttgggacgtttttgttgtcggcgtcggtagtttcgagttttttttgtttgcgcggtgtttttttcggggtcggtataggtatagttcgggggacgtgaggttttcgagtgtttttttatttcgtcgataggaggatggtggtcgagcgggtcggggcgggcgtggcgtgggtgtgttaggagttcgcggttgtcgttaagcgagttggagttgattttcggcgtttcgtgagatcgcgcggatttttcgttgtagcgggcggaagtgacgtagaggcgtttgtaacggggtttagcgcgtcggaagtgatgttttttaggttggtttggcgcggaagcgatttttgttagggcggggtgcggtacgggagggcggggaggcggtaattttcgttttcggttcgtcgtttttttttgttgtttttcgtttttcggcggtttttttttttcgttcggtttttcgcgttttttttgggcgcggggcggcggagtcgtcggcgtgcggttttttttgcgttcgtgcgtgtttcgtggttcggcgtacgtttcgcgatatcgaggtcgagcggggtaggggttgatcgttatgattttttagagttcggcgtgagggggtcgaggtgaggcggggcggagcgcgggggacgttggttcgtttgtttcgggtgttcgggttgggtcgcggcgcgcgcgggttcgcgtttgg

SEQ ID NO: 24028 - DNA, 774 bp, Artificial Sequence
  chemically treated genomic DNA (Homo sapiens) CpG-island No: 24028
ccaaacgcgaacccgcgcgcgccgcgacccaacccgaacacccgaaacaaacgaaccaacgtcccccgcgctccgccccgcctcacctcgaccccctcacgccgaactctaaaaaatcataacgatcaacccctaccccgctcgacctcgatatcgcgaaacgtacgccgaaccacgaaacacgcacgaacgcaaaaaaaaccgcacgccgacgactccgccgccccgcgcccaaaaaaaacgcgaaaaaccgaacgaaaaaaaaaaaccgccgaaaaacgaaaaacaacaaaaaaaaacgacgaaccgaaaacgaaaattaccgcctccccgccctcccgtaccgcaccccgccctaacaaaaatcgcttccgcgccaaaccaacctaaaaaacatcacttccgacgcgctaaaccccgttacaaacgcctctacgtcacttccgcccgctacaacgaaaaatccgcgcgatctcacgaaacgccgaaaatcaactccaactcgcttaacgacaaccgcgaactcctaacacacccacgccacgcccgccccgacccgctcgaccaccatcctcctatcgacgaaataaaaaaacactcgaaaacctcacgtcccccgaactatacctataccgaccccgaaaaaaacaccgcgcaaacaaaaaaaactcgaaactaccgacgccgacaacaaaaacgtcccaaccaaaaacccgcatttaccaaaaaaacccccacccgaacccaaaaccgaaaaaaaaaatcgacatacta

SEQ ID NO: 24029 - DNA, 760 bp, Artificial Sequence
  chemically treated genomic DNA (Homo sapiens) CpG-island No: 24029
ttgcgcgcgtattatagtttgttacgggggagcggttttatcgttgcgcgttttgttttcgcgtttttaagttttggcgtttttgtttcggtattagtatcggtacggggtggagtcgggatttttcggaggttttcggatatagcggtcgttgtagaatagaggttcgggtggtttcggagagggcggaggtggtgatggcggcggcggcggcgggttagcggtggggaagttttttgtttgtaggttttgcgttaagttttttcgcgttttttagatatgcgagattacgagcgcgtgtatattggcgagcggtatattattgcggtatttgcggtaagggttttatttagttttcggtgtttgcggttacgttcgtatttatattggcgaagcgttcgtttcgtttgtacgtttgcgatcgtatttttaataatttttttaattttcgtaagtattagcgatttatttttacgggtcggggtcggggttgggagattttggaggttagcgggttcgtcggcggttgaggggtcggggagcgggtgtggggtaggggatttgcggaggaggggcggggggagatcgcgaaggtgaaggtggaggtcgatagtaggttgtagattagggatatgggttagttaaggcggaggtacgagtcgattcggggagggggacggggtggggaaacggaggtaggggatagaaaggggagattgggggagagatgatagttgtagggatggttgtgagtcgtagt

SEQ ID NO: 24030 - DNA, 760 bp, Artificial Sequence
  chemically treated genomic DNA (Homo sapiens) CpG-island No: 24030
actacgactcacaaccatccctacaactatcatctctcccccaatctcccctttctatcccctacctccgtttccccaccccgtccccctccccgaatcgactcgtacctccgccttaactaacccatatccctaatctacaacctactatcgacctccaccttcaccttcgcgatctccccccgcccctcctccgcaaatcccctaccccacacccgctccccgacccctcaaccgccgacgaacccgctaacctccaaaatctcccaaccccgaccccgacccgtaaaaataaatcgctaatacttacgaaaattaaaaaaattattaaaaatacgatcgcaaacgtacaaacgaaacgaacgcttcgccaatataaatacgaacgtaaccgcaaacaccgaaaactaaataaaacccttaccgcaaataccgcaataatataccgctcgccaatatacacgcgctcgtaatctcgcatatctaaaaaacgcgaaaaaacttaacgcaaaacctacaaacaaaaaacttccccaccgctaacccgccgccgccgccgccatcaccacctccgccctctccgaaaccacccgaacctctattctacaacgaccgctatatccgaaaacctccgaaaaatcccgactccaccccgtaccgatactaataccgaaacaaaaacgccaaaacttaaaaacgcgaaaacaaaacgcgcaacgataaaaccgctcccccgtaacaaactataatacgcgcgcaa

SEQ ID NO: 24031 - DNA, 760 bp, Artificial Sequence
  chemically treated genomic DNA (Homo sapiens) CpG-island No: 24031
attgcggtttataattatttttgtagttgttattttttttttaattttttttttttgttttttgttttcgtttttttatttcgttttttttttcgggtcggttcgtattttcgttttaattaatttatgtttttggtttgtagtttattgtcggtttttatttttattttcgcggttttttttcgtttttttttcgtaggttttttattttatattcgtttttcgattttttagtcgtcgacgagttcgttggtttttagagttttttagtttcggtttcggttcgtggaagtgggtcgttggtgtttgcggaagttggaggagttgttgaaggtgcggtcgtagacgtgtaagcggaacgggcgtttcgttagtgtggatgcgggcgtggtcgtaagtatcgaggattgggtgaagtttttgtcgtagatgtcgtaatggtatgtcgttcgttagtgtgtacgcgttcgtggtttcgtatgtttgaggagcgcggaagggtttggcgtagaatttgtaggtaaaaggtttttttatcgttggttcgtcgtcgtcgtcgttattattattttcgtttttttcggggttattcgggtttttgttttgtaacggtcgttgtgttcggaggttttcgagaggtttcggttttatttcgtgtcggtgttggtgtcggagtaggggcgttaaggtttgaaggcgcgggggtagagcgcgtagcggtagggtcgttttttcgtggtaagttgtagtgcgcgcgtag

SEQ ID NO: 24032 - DNA, 760 bp, Artificial Sequence
  chemically treated genomic DNA (Homo sapiens) CpG-island No: 24032
ctacgcgcgcactacaacttaccacgaaaaaacgaccctaccgctacgcgctctacccccgcgccttcaaaccttaacgcccctactccgacaccaacaccgacacgaaataaaaccgaaacctctcgaaaacctccgaacacaacgaccgttacaaaacaaaaacccgaataaccccgaaaaaaacgaaaataataataacgacgacgacgacgaaccaacgataaaaaaaccttttacctacaaattctacgccaaacccttccgcgctcctcaaacatacgaaaccacgaacgcgtacacactaacgaacgacataccattacgacatctacgacaaaaacttcacccaatcctcgatacttacgaccacgcccgcatccacactaacgaaacgcccgttccgcttacacgtctacgaccgcaccttcaacaactcctccaacttccgcaaacaccaacgacccacttccacgaaccgaaaccgaaactaaaaaactctaaaaaccaacgaactcgtcgacgactaaaaaatcgaaaaacgaatataaaataaaaaacctacgaaaaaaaaacgaaaaaaaaccgcgaaaataaaaataaaaaccgacaataaactacaaaccaaaaacataaattaattaaaacgaaaatacgaaccgacccgaaaaaaaaaacgaaataaaaaaacgaaaacaaaaaacaaaaaaaaaaaattaaaaaaaaaataacaactacaaaaataattataaaccgcaat

SEQ ID NO: 24033 - DNA, 515 bp, Artificial Sequence
  chemically treated genomic DNA (Homo sapiens) CpG-island No: 24033
atacggcgtaatgtatcgttgttgtaacgattgacgtcgtgggcgatatcgcggttttcgaggttgtaaatgcggatgattttattacgcgagaaattgttagttacgtttttaatgtttttcggtaatagggagttgtcgcgttttagaatggcggtagttgtttttttatttatcgtgattttattcgtcggcggcgtatcgaaaatttagcgtttacggtttttaagcggagtcgtttgggtatggaatagcgtatcgacggaaatgttttttattatattattaataacgttcggtttgttgttcgcggtaataatggtgtcgatattcgtacggtaagttacgttagcggtttgtaatttggtatttatgtcgttagtttcgaggtttgaaacgttgttatcggtaatcgcgcgtagtgcgttattaatgtcgtaaatatttttaattagttttgtttgcggattgttgcgcgggttagcggtatataaatttttttgatcggttagtag

SEQ ID NO: 24034 - DNA, 515 bp, Artificial Sequence
  chemically treated genomic DNA (Homo sapiens) CpG-island No: 24034
ctactaaccgatcaaaaaaatttatataccgctaacccgcgcaacaatccgcaaacaaaactaattaaaaatatttacgacattaataacgcactacgcgcgattaccgataacaacgtttcaaacctcgaaactaacgacataaataccaaattacaaaccgctaacgtaacttaccgtacgaatatcgacaccattattaccgcgaacaacaaaccgaacgttattaataatataataaaaaacatttccgtcgatacgctattccatacccaaacgactccgcttaaaaaccgtaaacgctaaattttcgatacgccgccgacgaataaaatcacgataaataaaaaaacaactaccgccattctaaaacgcgacaactccctattaccgaaaaacattaaaaacgtaactaacaatttctcgcgtaataaaatcatccgcatttacaacctcgaaaaccgcgatatcgcccacgacgtcaatcgttacaacaacgatacattacgccgtat

SEQ ID NO: 24035 - DNA, 515 bp, Artificial Sequence
  chemically treated genomic DNA (Homo sapiens) CpG-island No: 24035
ttgttgatcgattaaaaaggtttgtatatcgttgattcgcgtagtaattcgtaggtagaattgattaaagatgtttacggtattgatgacgtattgcgcgcgattgtcggtgatagcgttttaggtttcggaattggcggtatgagtattaaattgtaggtcgttgacgtggtttgtcgtgcgggtatcgatattattattgtcgcgggtagtaagtcgggcgttattggtgatgtgatggaaggtattttcgtcggtacgttgttttatgtttaggcgatttcgtttgaaaatcgtaaacgttggattttcggtgcgtcgtcggcgggtgaaattacggtagatgaaggggtaattgtcgttattttggaacgcggtagttttttgttgtcgaaaggtattaaaagcgtgattggtaatttttcgcgtggtgaagttattcgtatttgtaatttcgaaggtcgcgatatcgtttacggcgttagtcgttataatagcgatgtattacgtcgtat

SEQ ID NO: 24036 - DNA, 515 bp, Artificial Sequence
  chemically treated genomic DNA (Homo sapiens) CpG-island No: 24036
atacgacgtaatacatcgctattataacgactaacgccgtaaacgatatcgcgaccttcgaaattacaaatacgaataacttcaccacgcgaaaaattaccaatcacgcttttaatacctttcgacaacaaaaaactaccgcgttccaaaataacgacaattaccccttcatctaccgtaatttcacccgccgacgacgcaccgaaaatccaacgtttacgattttcaaacgaaatcgcctaaacataaaacaacgtaccgacgaaaataccttccatcacatcaccaataacgcccgacttactacccgcgacaataataatatcgatacccgcacgacaaaccacgtcaacgacctacaatttaatactcataccgccaattccgaaacctaaaacgctatcaccgacaatcgcgcgcaatacgtcatcaataccgtaaacatctttaatcaattctacctacgaattactacgcgaatcaacgatatacaaacctttttaatcgatcaacaa

SEQ ID NO: 24037 - DNA, 519 bp, Artificial Sequence
  chemically treated genomic DNA (Homo sapiens) CpG-island No: 24037
tgtcgtggagtttaggtcgcgttagaatcggattcgggaagttgcgcgttatgagtagttttttgcggtcgggttttagtcgttggcggcgggcggttagtatcgttttggcggttggttggtcgcgttcggagatcgttatttcgtcgtcgcgttcgtcgtcggtcgagggttttcggttgttgttgttgtagcgtttttcgtattaaggttttatgtcgggcgcgtacgtttttttcggcggagtgttggatgcggtcgatcgttcggcggattggttgggttttttcgcgtcgtattacgggtcgtcgcgtttcggtttgggttcggcgttatttagtcgtatcgttttttcgtcgttgttcgatatcgatgattataagatcgataatattgggacgttgtttgaggacgtagtttttcgtatttgcgtcgtgcgggaggtttttgaggaggcgggcgtgttgttgttgcggtttaggatttttttattaggtttagtattcgggtttggtttcg

SEQ ID NO: 24038 - DNA, 519 bp, Artificial Sequence
  chemically treated genomic DNA (Homo sapiens) CpG-island No: 24038
cgaaaccaaacccgaatactaaacctaataaaaaaatcctaaaccgcaacaacaacacgcccgcctcctcaaaaacctcccgcacgacgcaaatacgaaaaactacgtcctcaaacaacgtcccaatattatcgatcttataatcatcgatatcgaacaacgacgaaaaaacgatacgactaaataacgccgaacccaaaccgaaacgcgacgacccgtaatacgacgcgaaaaaacccaaccaatccgccgaacgatcgaccgcatccaacactccgccgaaaaaaacgtacgcgcccgacataaaaccttaatacgaaaaacgctacaacaacaacaaccgaaaaccctcgaccgacgacgaacgcgacgacgaaataacgatctccgaacgcgaccaaccaaccgccaaaacgatactaaccgcccgccgccaacgactaaaacccgaccgcaaaaaactactcataacgcgcaacttcccgaatccgattctaacgcgacctaaactccacgaca

SEQ ID NO: 24039 - DNA, 519 bp, Artificial Sequence
  chemically treated genomic DNA (Homo sapiens) CpG-island No: 24039
cgaggttaggttcgggtgttgggtttggtggggaagttttgggtcgtagtagtagtacgttcgtttttttaaaggtttttcgtacggcgtagatgcggaaggttacgtttttaggtagcgttttagtgttgtcggttttgtggttatcggtgtcgggtagcgacgggaaagcggtgcggttgaatggcgtcgggtttaggtcgaagcgcggcggttcgtggtgcggcgcgaagaggtttagttagttcgtcgagcggtcggtcgtatttagtatttcgtcggagaagacgtgcgcgttcggtatgaagttttggtgcggggagcgttgtagtagtagtagtcggaagttttcggtcggcggcgggcgcgacggcggggtggcggttttcgggcgcgattagttagtcgttaggacgatgttggtcgttcgtcgttagcggttggggttcggtcgtagggagttgtttatggcgcgtagtttttcggattcgattttggcgcggtttgagttttacggta

SEQ ID NO: 24040 - DNA, 519 bp, Artificial Sequence
  chemically treated genomic DNA (Homo sapiens) CpG-island No: 24040
taccgtaaaactcaaaccgcgccaaaatcgaatccgaaaaactacgcgccataaacaactccctacgaccgaaccccaaccgctaacgacgaacgaccaacatcgtcctaacgactaactaatcgcgcccgaaaaccgccaccccgccgtcgcgcccgccgccgaccgaaaacttccgactactactactacaacgctccccgcaccaaaacttcataccgaacgcgcacgtcttctccgacgaaatactaaatacgaccgaccgctcgacgaactaactaaacctcttcgcgccgcaccacgaaccgccgcgcttcgacctaaacccgacgccattcaaccgcaccgctttcccgtcgctacccgacaccgataaccacaaaaccgacaacactaaaacgctacctaaaaacgtaaccttccgcatctacgccgtacgaaaaacctttaaaaaaacgaacgtactactactacgacccaaaacttccccaccaaacccaacacccgaacctaacctcg

SEQ ID NO: 24041 - DNA, 505 bp, Artificial Sequence
  chemically treated genomic DNA (Homo sapiens) CpG-island No: 24041
agtagtgattggtaattcgaggggttgggcgtcgtcggggttaggtgtttttgtcgcgttgcgtttacgttggtcggtgtttttaagcgttaattttatttttagtgttagttcggtttttagtttcgttttttacgttttgggtacgcgtagttgcgggcgtggggcggggttagttggagtaggaagcgtagggagtcgtttgagtttcgttttcggttgggttggattttatgattgttttgcgtatacgttattttgggaaacgacggttttttattgggttagttgtggcgcggtttcgttttacggcggagtaaggggtgggttatagggttagatcgtcgcgcgagggtggtgggtatcgaggttttagtagcggacgagggaggtgtcgtcgtcgtttaggatgggttgggaatgaagcgatgtagttttttaagtaagtgttttcgcgttggtttttttttgcgttttttttttcgcgggatggttgcgtttcggg

SEQ ID NO: 24042 - DNA, 505 bp, Artificial Sequence
  chemically treated genomic DNA (Homo sapiens) CpG-island No: 24042
cccgaaacgcaaccatcccgcgaaaaaaaaaacgcaaaaaaaaaccaacgcgaaaacacttacttaaaaaactacatcgcttcattcccaacccatcctaaacgacgacgacacctccctcgtccgctactaaaacctcgatacccaccaccctcgcgcgacgatctaaccctataacccaccccttactccgccgtaaaacgaaaccgcgccacaactaacccaataaaaaaccgtcgtttcccaaaataacgtatacgcaaaacaatcataaaatccaacccaaccgaaaacgaaactcaaacgactccctacgcttcctactccaactaaccccgccccacgcccgcaactacgcgtacccaaaacgtaaaaaacgaaactaaaaaccgaactaacactaaaaataaaattaacgcttaaaaacaccgaccaacgtaaacgcaacgcgacaaaaacacctaaccccgacgacgcccaacccctcgaattaccaatcactact

SEQ ID NO: 24043 - DNA, 505 bp, Artificial Sequence
  chemically treated genomic DNA (Homo sapiens) CpG-island No: 24043
ttcgaggcgtagttatttcgcgggaggggaggcgtaggaggaggttagcgcgaggatatttatttaaaaggttatatcgttttatttttagtttattttgggcgacggcggtatttttttcgttcgttgttgggatttcgatgtttattattttcgcgcggcgatttggttttatagtttattttttatttcgtcgtggggcggagtcgcgttatagttgatttaatgagaaatcgtcgttttttagagtgacgtgtacgtagagtaattatggagtttagtttagtcgggggcggggtttaggcggttttttacgttttttattttagttggtttcgttttacgttcgtaattgcgcgtgtttagaacgtgaggggcggggttgggagtcgggttgatattagaggtggggttagcgtttggaagtatcgattaacgtgagcgtaacgcggtagggatatttgatttcggcggcgtttagtttttcggattgttagttattgtt

SEQ ID NO: 24044 - DNA, 505 bp, Artificial Sequence
  chemically treated genomic DNA (Homo sapiens) CpG-island No: 24044
aacaataactaacaatccgaaaaactaaacgccgccgaaatcaaatatccctaccgcgttacgctcacgttaatcgatacttccaaacgctaaccccacctctaatatcaacccgactcccaaccccgcccctcacgttctaaacacgcgcaattacgaacgtaaaacgaaaccaactaaaataaaaaacgtaaaaaaccgcctaaaccccgcccccgactaaactaaactccataattactctacgtacacgtcactctaaaaaacgacgatttctcattaaatcaactataacgcgactccgccccacgacgaaataaaaaataaactataaaaccaaatcgccgcgcgaaaataataaacatcgaaatcccaacaacgaacgaaaaaaataccgccgtcgcccaaaataaactaaaaataaaacgatataaccttttaaataaatatcctcgcgctaacctcctcctacgcctcccctcccgcgaaataactacgcctcgaa

SEQ ID NO: 24045 - DNA, 578 bp, Artificial Sequence
  chemically treated genomic DNA (Homo sapiens) CpG-island No: 24045
atttttatgtcgtagttatggtcgtgttgagcgtagtaaaacgttgttcgttaaaatttcggtaggggtggatattggagatcgtattcgttttgcgggcgaaggtgaagcgggcgagtatggcgtatcggtaggcgatttgtacgtttaggtttaggttaaatagtattcgattttcgagcgtgaaggtaataatttgtattgcgaagtttcgattaatttcgttatggcggcgttgggtggcgaaatcgaagtatcgatttttgatggtcgcgttaaattgaaagtgtttggcgaaatttagatcggtaagttatttcgtatgcgcggtaaaggcgttaagtttgttcgcggtggcgtatagggtgatttgttgtgtcgcgttgtcgtcgaaatatcggtaggtttgaacgaaaggtagaaatagttgttgtaagagttgtaagaaagtttcggtggtttaatcggcgagtataatagttcgcgtttaaagagtttttttgatggtgtgaagaagttttttgacgatttgattcgttaatttttttaaaagtttgttcgtgggtaggtttgggtaa

SEQ ID NO: 24046 - DNA, 578 bp, Artificial Sequence
  chemically treated genomic DNA (Homo sapiens) CpG-island No: 24046
ttacccaaacctacccacgaacaaacttttaaaaaaattaacgaatcaaatcgtcaaaaaacttcttcacaccatcaaaaaaactctttaaacgcgaactattatactcgccgattaaaccaccgaaactttcttacaactcttacaacaactatttctacctttcgttcaaacctaccgatatttcgacgacaacgcgacacaacaaatcaccctatacgccaccgcgaacaaacttaacgcctttaccgcgcatacgaaataacttaccgatctaaatttcgccaaacactttcaatttaacgcgaccatcaaaaatcgatacttcgatttcgccacccaacgccgccataacgaaattaatcgaaacttcgcaatacaaattattaccttcacgctcgaaaatcgaatactatttaacctaaacctaaacgtacaaatcgcctaccgatacgccatactcgcccgcttcaccttcgcccgcaaaacgaatacgatctccaatatccacccctaccgaaattttaacgaacaacgttttactacgctcaacacgaccataactacgacataaaaat

SEQ ID NO: 24047 - DNA, 578 bp, Artificial Sequence
  chemically treated genomic DNA (Homo sapiens) CpG-island No: 24047
ttatttaggtttgtttacgggtaggtttttggggaggttagcgggttaggtcgttaaaaaatttttttatattattaaagaagttttttgagcgcgggttgttgtgttcgtcggttgggttatcgaagtttttttgtagtttttgtagtagttgtttttgtttttcgtttaggtttatcggtgtttcgacgataacgcggtatagtaaattattttgtgcgttatcgcggatagatttgacgtttttatcgcgtatacggaatagtttatcggtttgggtttcgttaggtatttttagtttgacgcgattattaagggtcggtatttcgatttcgttatttagcgtcgttatagcgaagttgatcgggatttcgtaatataggttgttgtttttacgttcgaaaatcgggtgttgtttaatttgaatttgaacgtatagatcgtttgtcggtgcgttatgttcgttcgttttattttcgttcgtaagacggatgcggtttttagtgtttatttttgtcgggattttaacggatagcgttttgttgcgtttaatacgattatgattgcggtatgggagt

SEQ ID NO: 24048 - DNA, 578 bp, Artificial Sequence
  chemically treated genomic DNA (Homo sapiens) CpG-island No: 24048
actcccataccgcaatcataatcgtattaaacgcaacaaaacgctatccgttaaaatcccgacaaaaataaacactaaaaaccgcatccgtcttacgaacgaaaataaaacgaacgaacataacgcaccgacaaacgatctatacgttcaaattcaaattaaacaacacccgattttcgaacgtaaaaacaacaacctatattacgaaatcccgatcaacttcgctataacgacgctaaataacgaaatcgaaataccgacccttaataatcgcgtcaaactaaaaatacctaacgaaacccaaaccgataaactattccgtatacgcgataaaaacgtcaaatctatccgcgataacgcacaaaataatttactataccgcgttatcgtcgaaacaccgataaacctaaacgaaaaacaaaaacaactactacaaaaactacaaaaaaacttcgataacccaaccgacgaacacaacaacccgcgctcaaaaaacttctttaataatataaaaaaattttttaacgacctaacccgctaacctccccaaaaacctacccgtaaacaaacctaaataa

SEQ ID NO: 24049 - DNA, 618 bp, Artificial Sequence
  chemically treated genomic DNA (Homo sapiens) CpG-island No: 24049
cgcgcgtggtaagttatagtgaggcggttttgggcggtttttaggtttacgggtcggtggttgttgcggtaggatagcgtttgtagtaggcggttttcgcgttcgtttaggttttcgtatatttgtacgtagtcgttatagtttagtcgtagttttagttgtagtagtattcgtcgggagttttgtgtgtttattagttacgtgtagtgaatgtttgagggttcgcgagcggcgtcgaataggtttggggaggtaaaggagtcgtagaagttgtttagtcgtcggtcgtacgttaagtcggggtagttcgttttattcgagtcgtcgtcgtagttttgtaagtcgttatatgcgtcgttttataggtaggtagcgcgtggagcgcgtttcgttgtatgggaaggttttttcggggtatatgttgtttggaggttcggaggcgggcgtcgagtagttgtttttattatagtcgtttttatatttcgttatcgtgttgtattgttacgggtcggggtaggtatttgtcggttgttatagcggaatttatttttttggtagggtgttggtttaacgcgggggcgagttttttgttgatagcgattttagaggatttttttg

SEQ ID NO: 24050 - DNA, 618 bp, Artificial Sequence
  chemically treated genomic DNA (Homo sapiens) CpG-island No: 24050
caaaaaaatcctctaaaatcgctatcaacaaaaaactcgcccccgcgttaaaccaacaccctaccaaaaaaataaattccgctataacaaccgacaaatacctaccccgacccgtaacaatacaacacgataacgaaatataaaaacgactataataaaaacaactactcgacgcccgcctccgaacctccaaacaacatataccccgaaaaaaccttcccatacaacgaaacgcgctccacgcgctacctacctataaaacgacgcatataacgacttacaaaactacgacgacgactcgaataaaacgaactaccccgacttaacgtacgaccgacgactaaacaacttctacgactcctttacctccccaaacctattcgacgccgctcgcgaaccctcaaacattcactacacgtaactaataaacacacaaaactcccgacgaatactactacaactaaaactacgactaaactataacgactacgtacaaatatacgaaaacctaaacgaacgcgaaaaccgcctactacaaacgctatcctaccgcaacaaccaccgacccgtaaacctaaaaaccgcccaaaaccgcctcactataacttaccacgcgcg

SEQ ID NO: 24051 - DNA, 618 bp, Artificial Sequence
  chemically treated genomic DNA (Homo sapiens) CpG-island No: 24051
tagggggattttttagagtcgttgttagtaaaaagttcgttttcgcgttgggttagtattttgttaggaagatgagtttcgttgtgataatcggtaagtgtttgtttcggttcgtggtagtgtaatacggtgacgaagtgtggagacggttgtgatgagggtaattgttcggcgttcgttttcgagtttttaggtagtatgtgtttcggggggatttttttatgtagcggggcgcgttttacgcgttgtttgtttgtggagcggcgtatgtgacggtttgtaggattgcggcgacggttcggatgaggcgggttgtttcgatttggcgtgcggtcggcggttgggtagtttttacggtttttttgtttttttagatttgttcggcgtcgttcgcgggtttttagatatttattgtacgtggttggtggatatataggattttcggcgggtgttgttgtagttggaattgcggttgggttatgacgattacgtgtaggtatacgagggtttgggcgagcgcggggatcgtttgttgtagacgttgttttatcgtagtaattatcggttcgtgagtttggaggtcgtttagggtcgttttattgtggtttattacgcgcg

SEQ ID NO: 24052 - DNA, 618 bp, Artificial Sequence
  chemically treated genomic DNA (Homo sapiens) CpG-island No: 24052
cgcgcgtaataaaccacaataaaacgaccctaaacgacctccaaactcacgaaccgataattactacgataaaacaacgtctacaacaaacgatccccgcgctcgcccaaaccctcgtatacctacacgtaatcgtcataacccaaccgcaattccaactacaacaacacccgccgaaaatcctatatatccaccaaccacgtacaataaatatctaaaaacccgcgaacgacgccgaacaaatctaaaaaaacaaaaaaaccgtaaaaactacccaaccgccgaccgcacgccaaatcgaaacaacccgcctcatccgaaccgtcgccgcaatcctacaaaccgtcacatacgccgctccacaaacaaacaacgcgtaaaacgcgccccgctacataaaaaaatccccccgaaacacatactacctaaaaactcgaaaacgaacgccgaacaattaccctcatcacaaccgtctccacacttcgtcaccgtattacactaccacgaaccgaaacaaacacttaccgattatcacaacgaaactcatcttcctaacaaaatactaacccaacgcgaaaacgaactttttactaacaacgactctaaaaaatcccccta

SEQ ID NO: 24053 - DNA, 1245 bp, Artificial Sequence
  chemically treated genomic DNA (Homo sapiens) CpG-island No: 24053
ggtcgttttggtttttttttgttgtcggttgtgttggaataggtcggttaggaattcgtcgttgaaggcggtcgggtcgatgtaggcgttgatgtcgatggacgtttcgtgttcgtagatgtcgtttagcggtttcggggcggtaggtggggcgggatgttgcgcggggttcgcgtttcggggaaagtcgaaggcggcgttgttgggcgcgtgcggggggttttgtaggtggttgtttatcgggggtcgttgtttcgtttcgtagaagtcggtcgattttatgggggagttagagttttttcgggtatggcgagtttcggcggtttttagtttgcgcggggcgtcgtttttatttattcggagattttgtttgttcgcgttcgcgtattttcgggtcgcgaatggttcggttcgcgtcggtttaatttttatattcggtaggtcgttttcgttattttataagttcggaggcggtttttttttttcggagttgatacggtttcggtttttttttggggttttagcgcgcggtcgggatgtgggtggcgaaatatgggcggtatatggttcgcgtttattaggtaagtttcggtttaatgtttaagttttttattgcggttaattatagtttcggtttttgttttaattttcggttcgcggtaggtcgtttttttttcggtaaagttgtcgggcgtttagtgtcgtcggtttgtcgggttttggtagcgcgtttaaggggttgggcgtcgcgtatttcgattttcgcgcgagtggcggtagcggcgcgggtaaggttaagaagtcggtggataagaatagtaacgagtatcgggtgcggcgcgagcgtaataatatcgcggtgcgtaagagtcgcgataaggttaagtagcgtaacgtggagacgtagtagaaggtgttggagttgattagtgataatgatcgtttgcgtaagcgggtggaatagttgagtcgcgaattggatacgttgcggggtatttttcgttagttgttagagagttttttggttaaggttatgggtaattgcgcgtgaggcgcgcggttgtgggatcgttttgggttagttttcggcgggggatttagggagtggtttggggtcgtcggatttcgaggtttgttcgagtcgtgcgagttaggattaggagatttcggtgttttttgaaagtttggtttgtttcgcgtgttttttttttttttttgcgtcgggattggtgcgtttaagatgag

SEQ ID NO: 24054 - DNA, 1245 bp, Artificial Sequence
  chemically treated genomic DNA (Homo sapiens) CpG-island No: 24054
ctcatcttaaacgcaccaatcccgacgcaaaaaaaaaaaaaaaacacgcgaaacaaaccaaactttcaaaaaacaccgaaatctcctaatcctaactcgcacgactcgaacaaacctcgaaatccgacgaccccaaaccactccctaaatcccccgccgaaaactaacccaaaacgatcccacaaccgcgcgcctcacgcgcaattacccataaccttaaccaaaaaactctctaacaactaacgaaaaataccccgcaacgtatccaattcgcgactcaactattccacccgcttacgcaaacgatcattatcactaatcaactccaacaccttctactacgtctccacgttacgctacttaaccttatcgcgactcttacgcaccgcgatattattacgctcgcgccgcacccgatactcgttactattcttatccaccgacttcttaaccttacccgcgccgctaccgccactcgcgcgaaaatcgaaatacgcgacgcccaaccccttaaacgcgctaccaaaacccgacaaaccgacgacactaaacgcccgacaactttaccgaaaaaaaaacgacctaccgcgaaccgaaaattaaaacaaaaaccgaaactataattaaccgcaataaaaaacttaaacattaaaccgaaacttacctaataaacgcgaaccatataccgcccatatttcgccacccacatcccgaccgcgcgctaaaaccccaaaaaaaaaccgaaaccgtatcaactccgaaaaaaaaaaaccgcctccgaacttataaaataacgaaaacgacctaccgaatataaaaattaaaccgacgcgaaccgaaccattcgcgacccgaaaatacgcgaacgcgaacaaacaaaatctccgaataaataaaaacgacgccccgcgcaaactaaaaaccgccgaaactcgccatacccgaaaaaactctaactcccccataaaatcgaccgacttctacgaaacgaaacaacgacccccgataaacaaccacctacaaaaccccccgcacgcgcccaacaacgccgccttcgactttccccgaaacgcgaaccccgcgcaacatcccgccccacctaccgccccgaaaccgctaaacgacatctacgaacacgaaacgtccatcgacatcaacgcctacatcgacccgaccgccttcaacgacgaattcctaaccgacctattccaacacaaccgacaacaaaaaaaaaccaaaacgacc

SEQ ID NO: 24055 - DNA, 1245 bp, Artificial Sequence
  chemically treated genomic DNA (Homo sapiens) CpG-island No: 24055
tttattttagacgtattaatttcggcgtagaggaagggaggggatacgcggagtaggttaggtttttaggaggtatcggaattttttagttttggttcgtacggttcgggtaagtttcgagattcggcgattttaaattattttttgggtttttcgtcggaggttggtttagggcggttttatagtcgcgcgttttacgcgtagttgtttatggttttgattaaggagttttttggtagttggcggaagatgtttcgtagcgtgtttagttcgcggtttagttgttttattcgtttgcgtaggcggttattgttattggttagttttagtattttttgttgcgtttttacgttgcgttgtttggttttgtcgcggtttttgcgtatcgcgatgttgttgcgttcgcgtcgtattcggtattcgttgttgtttttgtttatcgattttttggttttgttcgcgtcgttgtcgttattcgcgcggaggtcggggtgcgcggcgtttagttttttgagcgcgttgttagggttcggtaggtcggcggtattgagcgttcgataattttgtcgaaggggaaacggtttgtcgcggatcgaagattaaaataagagtcggggttatgattggtcgtaatggagaatttgggtattgagtcgaggtttgtttggtaagcgcgggttatgtgtcgtttatgtttcgttatttatatttcggtcgcgcgttaggattttagaagggggtcggggtcgtgttagtttcggaaaaagaaggtcgttttcgggtttataggatggcgaaagcggtttgtcgggtataaaagttgggtcggcgcgggtcgggttattcgcgattcggaggtgcgcgggcgcgggtaagtagggttttcgggtgggtggaggcgacgtttcgcgtaggttggaggtcgtcgaggttcgttatgttcgggagaattttaatttttttatggagtcggtcgatttttacgaggcggagtagcggttttcgatgagtagttatttgtagagtttttcgtacgcgtttagtagcgtcgttttcggtttttttcggggcgcgggtttcgcgtagtatttcgttttatttgtcgtttcggagtcgttgggcggtatttgcgagtacgagacgtttatcgatattagcgtttatatcgattcggtcgtttttaacgacgagtttttggtcgatttgttttagtatagtcggtagtaggagaaggttaaggcggtt

SEQ ID NO: 24056 - DNA, 1245 bp, Artificial Sequence
  chemically treated genomic DNA (Homo sapiens) CpG-island No: 24056
aaccgccttaaccttctcctactaccgactatactaaaacaaatcgaccaaaaactcgtcgttaaaaacgaccgaatcgatataaacgctaatatcgataaacgtctcgtactcgcaaataccgcccaacgactccgaaacgacaaataaaacgaaatactacgcgaaacccgcgccccgaaaaaaaccgaaaacgacgctactaaacgcgtacgaaaaactctacaaataactactcatcgaaaaccgctactccgcctcgtaaaaatcgaccgactccataaaaaaattaaaattctcccgaacataacgaacctcgacgacctccaacctacgcgaaacgtcgcctccacccacccgaaaaccctacttacccgcgcccgcgcacctccgaatcgcgaataacccgacccgcgccgacccaacttttatacccgacaaaccgctttcgccatcctataaacccgaaaacgaccttctttttccgaaactaacacgaccccgacccccttctaaaatcctaacgcgcgaccgaaatataaataacgaaacataaacgacacataacccgcgcttaccaaacaaacctcgactcaatacccaaattctccattacgaccaatcataaccccgactcttattttaatcttcgatccgcgacaaaccgtttccccttcgacaaaattatcgaacgctcaataccgccgacctaccgaaccctaacaacgcgctcaaaaaactaaacgccgcgcaccccgacctccgcgcgaataacgacaacgacgcgaacaaaaccaaaaaatcgataaacaaaaacaacaacgaataccgaatacgacgcgaacgcaacaacatcgcgatacgcaaaaaccgcgacaaaaccaaacaacgcaacgtaaaaacgcaacaaaaaatactaaaactaaccaataacaataaccgcctacgcaaacgaataaaacaactaaaccgcgaactaaacacgctacgaaacatcttccgccaactaccaaaaaactccttaatcaaaaccataaacaactacgcgtaaaacgcgcgactataaaaccgccctaaaccaacctccgacgaaaaacccaaaaaataatttaaaatcgccgaatctcgaaacttacccgaaccgtacgaaccaaaactaaaaaattccgatacctcctaaaaacctaacctactccgcgtatcccctcccttcctctacgccgaaattaatacgtctaaaataaa

SEQ ID NO: 24057 - DNA, 521 bp, Artificial Sequence
  chemically treated genomic DNA (Homo sapiens) CpG-island No: 24057
atgcggatcgtgatcgtcggcggttatagtgagtggcgatcgcggtaagtaggaggacggtgtcggggtgaggggtaagtgatagtattaattcgtttcgggagttttagatggttagatatatttgattgcgagcgggcgatttatataatttaggattatcgtaatgtgggatatcgtttaggcgaaagataagatggacgtttggttgtttggttcgaacgttaataaaatcgaagtggttatcgttaataacgatgcgatggtaatgggcgcggttgaagcgttgaaagtatataataagtttagtatttcggtgtttggcgtcgatgcgttgttagaagcgttggcgttggtgaaattcggtgtattggcgggtatcgtattgaacgatgttaataattaggcgaaagcgatttttgatttggcgaaaaatttggtcgatggtaaaggtgcggttgatggtattaattggaaaatcgataataaagtggttcgcgtattttatgttggcgtagata

SEQ ID NO: 24058 - DNA, 521 bp, Artificial Sequence
  chemically treated genomic DNA (Homo sapiens) CpG-island No: 24058
tatctacgccaacataaaatacgcgaaccactttattatcgattttccaattaataccatcaaccgcacctttaccatcgaccaaatttttcgccaaatcaaaaatcgctttcgcctaattattaacatcgttcaatacgatacccgccaatacaccgaatttcaccaacgccaacgcttctaacaacgcatcgacgccaaacaccgaaatactaaacttattatatactttcaacgcttcaaccgcgcccattaccatcgcatcgttattaacgataaccacttcgattttattaacgttcgaaccaaacaaccaaacgtccatcttatctttcgcctaaacgatatcccacattacgataatcctaaattatataaatcgcccgctcgcaatcaaatatatctaaccatctaaaactcccgaaacgaattaatactatcacttacccctcaccccgacaccgtcctcctacttaccgcgatcgccactcactataaccgccgacgatcacgatccgcat

SEQ ID NO: 24059 - DNA, 521 bp, Artificial Sequence
  chemically treated genomic DNA (Homo sapiens) CpG-island No: 24059
tatttacgttaatataaggtacgcggattattttgttgtcgattttttagttggtgttattagtcgtatttttattatcggttaggtttttcgttagattaaaggtcgttttcgtttggttgttagtatcgtttagtacggtgttcgttagtgtatcggattttattagcgttagcgtttttggtagcgtatcgacgttaaatatcggaatgttggatttgttgtgtgtttttagcgttttaatcgcgtttattgttatcgtatcgttgttggcgataattatttcgattttgttggcgttcgggttagatagttaggcgtttattttatttttcgtttgagcggtgttttatattgcggtggttttggattatatggatcgttcgttcgtagttaaatgtgtttagttatttagagttttcgggacgagttaatgttattatttattttttatttcgatatcgtttttttatttgtcgcggtcgttatttattgtagtcgtcgacggttacggttcgtat

SEQ ID NO: 24060 - DNA, 521 bp, Artificial Sequence
  chemically treated genomic DNA (Homo sapiens) CpG-island No: 24060
atacgaaccgtaaccgtcgacgactacaataaataacgaccgcgacaaataaaaaaacgatatcgaaataaaaaataaataataacattaactcgtcccgaaaactctaaataactaaacacatttaactacgaacgaacgatccatataatccaaaaccaccgcaatataaaacaccgctcaaacgaaaaataaaataaacgcctaactatctaacccgaacgccaacaaaatcgaaataattatcgccaacaacgatacgataacaataaacgcgattaaaacgctaaaaacacacaacaaatccaacattccgatatttaacgtcgatacgctaccaaaaacgctaacgctaataaaatccgatacactaacgaacaccgtactaaacgatactaacaaccaaacgaaaacgacctttaatctaacgaaaaacctaaccgataataaaaatacgactaataacaccaactaaaaaatcgacaacaaaataatccgcgtaccttatattaacgtaaata

SEQ ID NO: 24061 - DNA, 575 bp, Artificial Sequence
  chemically treated genomic DNA (Homo sapiens) CpG-island No: 24061
acggcgttcgttttttgtttggtaacgttttttatttcgtttgttttttcgttttatcgagttaggggttttcgtattttttttttgggcggcggttttgggtttcgagtgcggggcgggtaatatcgcgttgattgggtaggcgggacggattatagttttcggtgattttcgcgcgtcggattacgattttcgtggggtttcgcgggatttttgttttatacggaacgttcgggtcgcgtggttttgaagtcggtcgtcgggtttaggaaatgtcgtattataattttcgtcgggtttcgcggtaggtttcggaagtgcgttttagaggtttttttttcgtatacggtcgcgtttattattgtttagagattttaggaaatttagtaggtaggttttcgcgatagttttttggcgtcgcgtttttatgggtgttcgttttcggcgatggcgttatgcgcggtgcgtagacgtagcgtgacgttatataagggaaagggattagagacgttaggcggtgcggggggaggtagcggtgatttttattgagttagaagggagattttggggaagtg

SEQ ID NO: 24062 - DNA, 575 bp, Artificial Sequence
  chemically treated genomic DNA (Homo sapiens) CpG-island No: 24062
cacttccccaaaatctcccttctaactcaataaaaatcaccgctacctccccccgcaccgcctaacgtctctaatccctttcccttatataacgtcacgctacgtctacgcaccgcgcataacgccatcgccgaaaacgaacacccataaaaacgcgacgccaaaaaactatcgcgaaaacctacctactaaatttcctaaaatctctaaacaataataaacgcgaccgtatacgaaaaaaaaacctctaaaacgcacttccgaaacctaccgcgaaacccgacgaaaattataatacgacatttcctaaacccgacgaccgacttcaaaaccacgcgacccgaacgttccgtataaaacaaaaatcccgcgaaaccccacgaaaatcgtaatccgacgcgcgaaaatcaccgaaaactataatccgtcccgcctacccaatcaacgcgatattacccgccccgcactcgaaacccaaaaccgccgcccaaaaaaaaaatacgaaaacccctaactcgataaaacgaaaaaacaaacgaaataaaaaacgttaccaaacaaaaaacgaacgccgt

SEQ ID NO: 24063 - DNA, 575 bp, Artificial Sequence
  chemically treated genomic DNA (Homo sapiens) CpG-island No: 24063
tatttttttagggttttttttttgatttagtaaagattatcgttgttttttttcgtatcgtttggcgtttttgattttttttttttgtgtgacgttacgttgcgtttgcgtatcgcgtatgacgttatcgtcgggggcgagtatttatgagagcgcggcgttaggaagttatcgcgagagtttatttattaagttttttagaatttttgagtagtagtgggcgcggtcgtatgcgaaagaagggtttttgaggcgtattttcgggatttgtcgcggagttcgacggaagttgtagtgcggtattttttaggttcgacggtcgattttagggttacgcggttcgggcgtttcgtgtggagtaggagtttcgcggggttttacgggagtcgtagttcggcgcgcggggattatcgggagttgtagttcgtttcgtttgtttagttagcgcggtgttgttcgtttcgtattcggagtttagagtcgtcgtttaggaaggggatgcggaaatttttggttcggtggagcggagaggtaggcggggtgaggggcgttgttaggtaaagggcgagcgtcgt

SEQ ID NO: 24064 - DNA, 575 bp, Artificial Sequence
  chemically treated genomic DNA (Homo sapiens) CpG-island No: 24064
acgacgctcgccctttacctaacaacgcccctcaccccgcctacctctccgctccaccgaaccaaaaatttccgcatccccttcctaaacgacgactctaaactccgaatacgaaacgaacaacaccgcgctaactaaacaaacgaaacgaactacaactcccgataatccccgcgcgccgaactacgactcccgtaaaaccccgcgaaactcctactccacacgaaacgcccgaaccgcgtaaccctaaaatcgaccgtcgaacctaaaaaataccgcactacaacttccgtcgaactccgcgacaaatcccgaaaatacgcctcaaaaacccttctttcgcatacgaccgcgcccactactactcaaaaattctaaaaaacttaataaataaactctcgcgataacttcctaacgccgcgctctcataaatactcgcccccgacgataacgtcatacgcgatacgcaaacgcaacgtaacgtcacacaaaaaaaaaaaatcaaaaacgccaaacgatacgaaaaaaaacaacgataatctttactaaatcaaaaaaaaaaccctaaaaaaata

SEQ ID NO: 24065 - DNA, 678 bp, Artificial Sequence
  chemically treated genomic DNA (Homo sapiens) CpG-island No: 24065
ttttcggtcgttacggggtttacggtcgagacgttgagcgtggtcgaggcggtggtgttgtcggttgagttcgttattatgtacgtgtattggttcgtgttttgtacggtgacgttggtgaagttaagcgtgtcgttatgtaggacggagatgcgtacgcggtaggagtcgtgggttatgagggtgtcgttgggcgttagttagttgacggaggttatggaggtgttcgtgcggtatttgagttcggtagttatgttttcggtgacgttgaggttcgtgggcggttttacgatgacgggcgtatagtaggtgaaatgcgattggtttagttttttaatgtagcgttttttgaggtcggcgggcgtatgatagcgggcgtagtacgtcgtgttgttgggtatcgtttttttgagttattagtttagttagagtacgtcgtagttgtaatgttaggggttgtggttgaggtgtacgcgttcgaggcggtgtaggggcgtgaagaggtcgtggggtagcgatattaggttgttgtgggataggttgagtttttttagcgatttgaggtcgtcgaaggcgttgcgttcgatggtggttatttgggcgtgtatgagttatagtttgcgtaggttggtgagattttggaaggagttcgggcggattaggtttagtcggttgttt

SEQ ID NO: 24066 - DNA, 678 bp, Artificial Sequence
  chemically treated genomic DNA (Homo sapiens) CpG-island No: 24066
aaacaaccgactaaacctaatccgcccgaactccttccaaaatctcaccaacctacgcaaactataactcatacacgcccaaataaccaccatcgaacgcaacgccttcgacgacctcaaatcgctaaaaaaactcaacctatcccacaacaacctaatatcgctaccccacgacctcttcacgcccctacaccgcctcgaacgcgtacacctcaaccacaacccctaacattacaactacgacgtactctaactaaactaataactcaaaaaaacgatacccaacaacacgacgtactacgcccgctatcatacgcccgccgacctcaaaaaacgctacattaaaaaactaaaccaatcgcatttcacctactatacgcccgtcatcgtaaaaccgcccacgaacctcaacgtcaccgaaaacataactaccgaactcaaataccgcacgaacacctccataacctccgtcaactaactaacgcccaacgacaccctcataacccacgactcctaccgcgtacgcatctccgtcctacataacgacacgcttaacttcaccaacgtcaccgtacaaaacacgaaccaatacacgtacataataacgaactcaaccgacaacaccaccgcctcgaccacgctcaacgtctcgaccgtaaaccccgtaacgaccgaaaa

SEQ ID NO: 24067 - DNA, 678 bp, Artificial Sequence
  chemically treated genomic DNA (Homo sapiens) CpG-island No: 24067
gggtaatcggttggatttgattcgttcgggttttttttagggttttattagtttgcgtaagttgtggtttatgtacgtttaggtagttattatcgagcgtaacgttttcgacgattttaagtcgttggaggagtttaatttgttttataataatttgatgtcgttgttttacgatttttttacgtttttgtatcgtttcgagcgcgtgtattttaattataatttttggtattgtaattgcgacgtgttttggttgagttggtggtttaaggagacggtgtttagtaatacgacgtgttgcgttcgttgttatgcgttcgtcggttttaaggggcgttatattggggagttggattagtcgtattttatttgttatgcgttcgttatcgtggagtcgtttacggattttaacgttatcgagggtatggttgtcgagtttaaatgtcgtacgggtatttttatgattttcgttaattggttgacgtttaacggtatttttatgatttacggtttttatcgcgtgcgtattttcgttttgtatgacggtacgtttaattttattaacgttatcgtgtaggatacgggttagtatacgtgtatggtgacgaatttagtcggtaatattatcgtttcggttacgtttaacgtttcggtcgtggatttcgtggcggtcggggg

SEQ ID NO: 24068 - DNA, 678 bp, Artificial Sequence
  chemically treated genomic DNA (Homo sapiens) CpG-island No: 24068
cccccgaccgccacgaaatccacgaccgaaacgttaaacgtaaccgaaacgataatattaccgactaaattcgtcaccatacacgtatactaacccgtatcctacacgataacgttaataaaattaaacgtaccgtcatacaaaacgaaaatacgcacgcgataaaaaccgtaaatcataaaaataccgttaaacgtcaaccaattaacgaaaatcataaaaatacccgtacgacatttaaactcgacaaccataccctcgataacgttaaaatccgtaaacgactccacgataacgaacgcataacaaataaaatacgactaatccaactccccaatataacgccccttaaaaccgacgaacgcataacaacgaacgcaacacgtcgtattactaaacaccgtctccttaaaccaccaactcaaccaaaacacgtcgcaattacaataccaaaaattataattaaaatacacgcgctcgaaacgatacaaaaacgtaaaaaaatcgtaaaacaacgacatcaaattattataaaacaaattaaactcctccaacgacttaaaatcgtcgaaaacgttacgctcgataataactacctaaacgtacataaaccacaacttacgcaaactaataaaaccctaaaaaaaacccgaacgaatcaaatccaaccgattaccc

SEQ ID NO: 24069 - DNA, 644 bp, Artificial Sequence
  chemically treated genomic DNA (Homo sapiens) CpG-island No: 24069
tattggcggttttattgttgggcgatttgttgcgcgaagtggtatggtcgatagatgtgtttacgttggatgttgatgtaatggtggtacgcgaaattatttatcgttttagtcgtttatttttttatcgggtaatggtcgggcgacgtttgtcgtttttgaaaatcgtttcgggtttgatttggttggttttttgttcggaataagatcgtaaggaattaatcgaaatgttagtttttcgtttcggtgatgattattaattggtacgggaatcgttaaagttggaagttattttggcgcgcgcgcgtaaagagggttacggatagaattatcgcggttgggatttaggaggagaagatcgtttttatcgtcgtatcgttgcgtagtgaataacgggtgattggttgtttgaatttggtgtatatggcgagcgtaatgattattgaataggtagcggaaaagtatttttcggcgttataacgggtagtaaaatagatcgaagaaggggttgaatcgtaggttattttggtggtcggaaggcgaagcggtatgtatttacgttgatattatcgaatggcgtaaaatttttcgcggtatggtatgatagcgttcggaagagagttaatttagggtggtgaatgtga

SEQ ID NO: 24070 - DNA, 644 bp, Artificial Sequence
  chemically treated genomic DNA (Homo sapiens) CpG-island No: 24070
tcacattcaccaccctaaattaactctcttccgaacgctatcataccataccgcgaaaaattttacgccattcgataatatcaacgtaaatacataccgcttcgccttccgaccaccaaaataacctacgattcaaccccttcttcgatctattttactacccgttataacgccgaaaaatacttttccgctacctattcaataatcattacgctcgccatatacaccaaattcaaacaaccaatcacccgttattcactacgcaacgatacgacgataaaaacgatcttctcctcctaaatcccaaccgcgataattctatccgtaaccctctttacgcgcgcgcgccaaaataacttccaactttaacgattcccgtaccaattaataatcatcaccgaaacgaaaaactaacatttcgattaattccttacgatcttattccgaacaaaaaaccaaccaaatcaaacccgaaacgattttcaaaaacgacaaacgtcgcccgaccattacccgataaaaaaataaacgactaaaacgataaataatttcgcgtaccaccattacatcaacatccaacgtaaacacatctatcgaccataccacttcgcgcaacaaatcgcccaacaataaaaccgccaata

SEQ ID NO: 24071 - DNA, 644 bp, Artificial Sequence
  chemically treated genomic DNA (Homo sapiens) CpG-island No: 24071
ttatatttattattttgaattgattttttttcgggcgttattatgttatatcgcgaaaggttttgcgttattcgatggtgttaacgtaaatgtatgtcgtttcgtttttcggttattagaatagtttgcgatttaatttttttttcgatttgttttgttattcgttgtagcgtcggaagatgttttttcgttgtttgtttaatggttattgcgttcgttatatatattagatttagatagttaattattcgttgtttattgcgtagcggtacggcgatagaggcgattttttttttttggattttagtcgcggtagttttgttcgtaattttttttgcgcgcgcgcgttagaatggtttttagttttaacggttttcgtgttagttgatagttattatcggggcgggaggttaatatttcgattaattttttgcggttttgtttcgggtaaaaggttagttaggttaggttcgaggcggtttttagaagcggtaaacgtcgttcgattattgttcggtgaaaggataagcggttgaaacggtgagtggtttcgcgtattattattgtattaatatttagcgtggatatatttgtcggttatattatttcgcgtaatagatcgtttagtagtggggtcgttagtg

SEQ ID NO: 24072 - DNA, 644 bp, Artificial Sequence
  chemically treated genomic DNA (Homo sapiens) CpG-island No: 24072
cactaacgaccccactactaaacgatctattacgcgaaataatataaccgacaaatatatccacgctaaatattaatacaataataatacgcgaaaccactcaccgtttcaaccgcttatcctttcaccgaacaataatcgaacgacgtttaccgcttctaaaaaccgcctcgaacctaacctaactaaccttttacccgaaacaaaaccgcaaaaaattaatcgaaatattaacctcccgccccgataataactatcaactaacacgaaaaccgttaaaactaaaaaccattctaacgcgcgcgcgcaaaaaaaattacgaacaaaactaccgcgactaaaatccaaaaaaaaaaaatcgcctctatcgccgtaccgctacgcaataaacaacgaataattaactatctaaatctaatatatataacgaacgcaataaccattaaacaaacaacgaaaaaacatcttccgacgctacaacgaataacaaaacaaatcgaaaaaaaaattaaatcgcaaactattctaataaccgaaaaacgaaacgacatacatttacgttaacaccatcgaataacgcaaaacctttcgcgatataacataataacgcccgaaaaaaaatcaattcaaaataataaatataa

SEQ ID NO: 24073 - DNA, 1005 bp, Artificial Sequence
  chemically treated genomic DNA (Homo sapiens) CpG-island No: 24073
gggtatgtattaggatattaattgggataacgataacggtattaagtggtggatcgtcggtattcgttcgatgtataagtggacgttaattatgagtatcgtgatggaaatcggttacgataacgtcgaattttagcgtatcggcgataagaataattagtataaaattattttcgtataataatggtaggttggcgatagtatttggttacgttcggttattcgtgttttcgtaatttacgttaagtgggatgagaaatggggttacgattatatcggtaacgttgataataacgcgaatttcggtaaagtcgtttttgttgattttaacggcggtagtttcggtcgtggcgatagcgacgagtggattttcggtgtttagatggaaatttggtggtaatagtaaaattgaggtcggataaggcgtttacgtcgtattcggtaattaatgtttgatgcgacgttgtcgcgttttattaggttataaatcgtatcgaattcgtatcgggtaattgtgggttacgatggtatcgcgatagtttgtttttttttaagtagtttttcgattacgttaggatcggtaagcgtcgaggtatcgtttaggttgttggtatcgttcgtcgtaattttgcgtagaatacggcgtataattttgtcggagcgggttttaggtagggagtcggtttagtgtagtacgtttggcgtcgttagcgggttaatttttttacgtatttagttgcggatttttgcgtatagttttggtgacggttttttttcgtgattaagcgtgacgtaggcgtagatcgtttgatttttaatattgtgcggaatatttattacggcggtttcggtaattttcggatgcgttattagcgtcgatttaatttttgtcgtttttagacggtgatcggagacgtttagtacgtcgtttatacgttcggttatttagtaatagttatttttatcgcgacgcgcgtcgtcgtcgttgaaatatatatttttgaa

SEQ ID NO: 24074 - DNA, 1005 bp, Artificial Sequence
  chemically treated genomic DNA (Homo sapiens) CpG-island No: 24074
ttcaaaaatatatatttcaacgacgacgacgcgcgtcgcgataaaaataactattactaaataaccgaacgtataaacgacgtactaaacgtctccgatcaccgtctaaaaacgacaaaaattaaatcgacgctaataacgcatccgaaaattaccgaaaccgccgtaataaatattccgcacaatattaaaaatcaaacgatctacgcctacgtcacgcttaatcacgaaaaaaaaccgtcaccaaaactatacgcaaaaatccgcaactaaatacgtaaaaaaattaacccgctaacgacgccaaacgtactacactaaaccgactccctacctaaaacccgctccgacaaaattatacgccgtattctacgcaaaattacgacgaacgataccaacaacctaaacgatacctcgacgcttaccgatcctaacgtaatcgaaaaactacttaaaaaaaaacaaactatcgcgataccatcgtaacccacaattacccgatacgaattcgatacgatttataacctaataaaacgcgacaacgtcgcatcaaacattaattaccgaatacgacgtaaacgccttatccgacctcaattttactattaccaccaaatttccatctaaacaccgaaaatccactcgtcgctatcgccacgaccgaaactaccgccgttaaaatcaacaaaaacgactttaccgaaattcgcgttattatcaacgttaccgatataatcgtaaccccatttctcatcccacttaacgtaaattacgaaaacacgaataaccgaacgtaaccaaatactatcgccaacctaccattattatacgaaaataattttatactaattattcttatcgccgatacgctaaaattcgacgttatcgtaaccgatttccatcacgatactcataattaacgtccacttatacatcgaacgaataccgacgatccaccacttaataccgttatcgttatcccaattaatatcctaatacataccc

SEQ ID NO: 24075 - DNA, 1005 bp, Artificial Sequence
  chemically treated genomic DNA (Homo sapiens) CpG-island No: 24075
tttaaaaatatgtattttagcggcgacggcgcgcgtcgcgatgaagatggttattattggataatcgggcgtgtggacgacgtgttgaacgttttcggttatcgtttggggacggtagagattgagtcggcgttggtggcgtattcgaagattgtcgaagtcgtcgtagtaggtatttcgtataatattaaaggttaggcgatttacgtttacgttacgtttaattacggggaggaatcgttattagaattgtacgtagaagttcgtaattgggtgcgtaaagagattggttcgttggcgacgttagacgtgttgtattggatcgattttttgtttaaaattcgtttcggtaaaattatgcgtcgtattttgcgtaaaattgcggcgggcgatattagtaatttgggcgatatttcgacgtttgtcgattttggcgtagtcgagaagttgtttgaagagaagtaggttatcgcgatgttatcgtaatttataattgttcgatgcgagttcggtacggtttgtagtttgataagacgcgatagcgtcgtattaggtattgattgtcggatgcggcgtaaacgttttattcggttttagttttgttattattattagatttttatttgggtatcgaaggtttattcgtcgttgtcgttacgatcgaagttgtcgtcgttgaaattagtaggaacggttttgtcgaagttcgcgttgttattagcgttatcggtgtagtcgtaattttattttttattttatttggcgtaggttgcgaagatacgaatagtcgggcgtgattagatgttgtcgttagtttgttattgttgtgcgagggtaattttgtattgattgtttttgtcgtcggtgcgttgggattcgacgttgtcgtagtcgatttttattacggtgtttatgattggcgtttatttgtatatcgggcgaatatcgacggtttattatttggtgtcgttgtcgttattttagttgatattttggtatatattt

SEQ ID NO: 24076 - DNA, 1005 bp, Artificial Sequence
  chemically treated genomic DNA (Homo sapiens) CpG-island No: 24076
aaatatataccaaaatatcaactaaaataacgacaacgacaccaaataataaaccgtcgatattcgcccgatatacaaataaacgccaatcataaacaccgtaataaaaatcgactacgacaacgtcgaatcccaacgcaccgacgacaaaaacaatcaatacaaaattaccctcgcacaacaataacaaactaacgacaacatctaatcacgcccgactattcgtatcttcgcaacctacgccaaataaaataaaaaataaaattacgactacaccgataacgctaataacaacgcgaacttcgacaaaaccgttcctactaatttcaacgacgacaacttcgatcgtaacgacaacgacgaataaaccttcgatacccaaataaaaatctaataataataacaaaactaaaaccgaataaaacgtttacgccgcatccgacaatcaatacctaatacgacgctatcgcgtcttatcaaactacaaaccgtaccgaactcgcatcgaacaattataaattacgataacatcgcgataacctacttctcttcaaacaacttctcgactacgccaaaatcgacaaacgtcgaaatatcgcccaaattactaatatcgcccgccgcaattttacgcaaaatacgacgcataattttaccgaaacgaattttaaacaaaaaatcgatccaatacaacacgtctaacgtcgccaacgaaccaatctctttacgcacccaattacgaacttctacgtacaattctaataacgattcctccccgtaattaaacgtaacgtaaacgtaaatcgcctaacctttaatattatacgaaatacctactacgacgacttcgacaatcttcgaatacgccaccaacgccgactcaatctctaccgtccccaaacgataaccgaaaacgttcaacacgtcgtccacacgcccgattatccaataataaccatcttcatcgcgacgcgcgccgtcgccgctaaaatacatatttttaaa

SEQ ID NO: 24077 - DNA, 544 bp, Artificial Sequence
  chemically treated genomic DNA (Homo sapiens) CpG-island No: 24077
tagcggcgtacgcggcgttgcgtggttatggttataagagtaaaaaacgtaggtaattggcgtattatgtttgatgcgacgtttgtcgcgttttattaggtttataaaaggtgttagaatcgtaggtcggataaggcgtttacgtcgtattcggtaataagtgtttcgatgtttgatgcgacgtttgtcgcgttttattaggtttgtaaaatgtgttagaatcgcgtagggcggataaggcgtttacgtcgtattcggtaataagtaatgagtatcgagattataagttaatttagtggtttcgttagtatcggagtattcggcgattgttggcgtttatagcgaatataaagtagtaagaagatatcgtagtaaagaaagtagggggagggatcgtagttatatttgtagttcgggtcggtgataattcggaaatggggagggtattaggtacgttattgttcgtggttaatttttattttgtttgggtagtaatcgtcggggtatgtgggtgttcggcgtatataaaagaagggtttgcggg

SEQ ID NO: 24078 - DNA, 544 bp, Artificial Sequence
  chemically treated genomic DNA (Homo sapiens) CpG-island No: 24078
cccgcaaacccttcttttatatacgccgaacacccacataccccgacgattactacccaaacaaaataaaaattaaccacgaacaataacgtacctaataccctccccatttccgaattatcaccgacccgaactacaaatataactacgatccctccccctactttctttactacgatatcttcttactactttatattcgctataaacgccaacaatcgccgaatactccgatactaacgaaaccactaaattaacttataatctcgatactcattacttattaccgaatacgacgtaaacgccttatccgccctacgcgattctaacacattttacaaacctaataaaacgcgacaaacgtcgcatcaaacatcgaaacacttattaccgaatacgacgtaaacgccttatccgacctacgattctaacaccttttataaacctaataaaacgcgacaaacgtcgcatcaaacataatacgccaattacctacgttttttactcttataaccataaccacgcaacgccgcgtacgccgcta

SEQ ID NO: 24079 - DNA, 544 bp, Artificial Sequence
  chemically treated genomic DNA (Homo sapiens) CpG-island No: 24079
ttcgtaaattttttttttatatgcgtcggatatttatatgtttcgacggttgttatttaaataaggtagaagttggttacgggtaatagcgtatttggtgttttttttattttcgagttattatcgattcgggttgtaaatataattgcggtttttttttttgttttttttgttgcgatgtttttttgttgttttatgttcgttataagcgttagtaatcgtcggatatttcggtgttggcgaaattattgggttagtttatagtttcggtgtttattatttattgtcggatgcggcgtgaacgttttattcgttttacgcggttttggtatattttgtaggtttgataagacgcggtaagcgtcgtattaggtatcggagtatttattgtcggatgcggcgtgaacgttttattcggtttacggttttggtattttttgtaggtttgataagacgcggtaagcgtcgtattaggtatgatgcgttaattgtttacgttttttatttttgtggttataattacgtagcgtcgcgtacgtcgttg

SEQ ID NO: 24080 - DNA, 544 bp, Artificial Sequence
  chemically treated genomic DNA (Homo sapiens) CpG-island No: 24080
caacgacgtacgcgacgctacgtaattataaccacaaaaataaaaaacgtaaacaattaacgcatcatacctaatacgacgcttaccgcgtcttatcaaacctacaaaaaataccaaaaccgtaaaccgaataaaacgttcacgccgcatccgacaataaatactccgatacctaatacgacgcttaccgcgtcttatcaaacctacaaaatataccaaaaccgcgtaaaacgaataaaacgttcacgccgcatccgacaataaataataaacaccgaaactataaactaacccaataatttcgccaacaccgaaatatccgacgattactaacgcttataacgaacataaaacaacaaaaaaacatcgcaacaaaaaaaacaaaaaaaaaaaccgcaattatatttacaacccgaatcgataataactcgaaaataaaaaaaacaccaaatacgctattacccgtaaccaacttctaccttatttaaataacaaccgtcgaaacatataaatatccgacgcatataaaaaaaaaatttacgaa

SEQ ID NO: 24081 - DNA, 901 bp, Artificial Sequence
  chemically treated genomic DNA (Homo sapiens) CpG-island No: 24081
atttacgtttgtgtgattaattaggcggttgttatcggtggtgatgcgcgttaattggtgggttatttggtgtcgtaatcgggtttgtcgttggatattagcgtattgtaggcgtagtttcgtgaaatattgttattatatatggtatcggtggttttgttgtaatttttatagttattatttagcgttaacggtaagttggatcgtaaagttttatcgttgtttgaattgaaggtataagcgttagggcgtgcgtcgaaagcgggtagtgaaacgattatcgtcgcggtattttcgtcgttgttggggtgtgacgtgtaggatgtcgatgttgattttttcgcgtttggcggttattcgttattggtaatgaaattggtagcgtagttaagtcggtaggttgttcgttaggtgacgtcggggtaagtgatggtcgcgttaattgtcgttaaattggtaacgattattgatgttgaagaagatagtattcggcgtatgggattcgaaattattttgtcgttgcgtgaaggtaatggttcgacgttgttttgtttttattttgcgttcggttttgtttggtagtttagcgtgttttcgcgttatttcgatttataatggtcgattatcggtatttagttatcgcgttttaatggttttatgtagacggcggtaaatttggatgaagtttgcgaagcgtatttggtaacgttatttgaataataatcgtatggtttttattatttgttggggtatttttttggcggtacgttggcgtagggtattgcggcgcgattgcgtgttcgtggcgaataggtggtattttttggtttgttggatatttggtcgttagaaacgtaaaattggtaggaaaaagaagttaatggtttggattcggaagtgt

SEQ ID NO: 24082 - DNA, 901 bp, Artificial Sequence
  chemically treated genomic DNA (Homo sapiens) CpG-island No: 24082
acacttccgaatccaaaccattaacttctttttcctaccaattttacgtttctaacgaccaaatatccaacaaaccaaaaaataccacctattcgccacgaacacgcaatcgcgccgcaataccctacgccaacgtaccgccaaaaaaataccccaacaaataataaaaaccatacgattattattcaaataacgttaccaaatacgcttcgcaaacttcatccaaatttaccgccgtctacataaaaccattaaaacgcgataactaaataccgataatcgaccattataaatcgaaataacgcgaaaacacgctaaactaccaaacaaaaccgaacgcaaaataaaaacaaaacaacgtcgaaccattaccttcacgcaacgacaaaataatttcgaatcccatacgccgaatactatcttcttcaacatcaataatcgttaccaatttaacgacaattaacgcgaccatcacttaccccgacgtcacctaacgaacaacctaccgacttaactacgctaccaatttcattaccaataacgaataaccgccaaacgcgaaaaaatcaacatcgacatcctacacgtcacaccccaacaacgacgaaaataccgcgacgataatcgtttcactacccgctttcgacgcacgccctaacgcttataccttcaattcaaacaacgataaaactttacgatccaacttaccgttaacgctaaataataactataaaaattacaacaaaaccaccgataccatatataataacaatatttcacgaaactacgcctacaatacgctaatatccaacgacaaacccgattacgacaccaaataacccaccaattaacgcgcatcaccaccgataacaaccgcctaattaatcacacaaacgtaaat

SEQ ID NO: 24083 - DNA, 901 bp, Artificial Sequence
  chemically treated genomic DNA (Homo sapiens) CpG-island No: 24083
gtattttcgggtttagattattagttttttttttttgttagttttgcgtttttggcggttaggtatttagtaagttaagaaatgttatttgttcgttacgggtacgtagtcgcgtcgtaatattttgcgttagcgtatcgttaagggaatattttagtaggtaataagggttatgcggttgttgtttaagtaacgttgttagatgcgtttcgtagattttatttaggtttgtcgtcgtttgtatggggttattggggcgcggtgattgaatgtcgataatcgattattgtggatcgagataacgcgagagtacgttgaattgttaggtaaaatcggacgtaggatggaaataaaatagcgtcgggttattatttttacgtaacggtagaatggtttcgaattttatacgtcgggtgttgttttttttagtattaataatcgttgttagtttggcgatagttgacgcgattattatttgtttcggcgttatttggcgggtaatttgtcgatttaattgcgttgttagttttattgttagtagcgaatgatcgttaagcgcgaagaaattagtatcggtattttgtacgttatattttagtaacgacgagaatgtcgcggcgataatcgttttattgttcgttttcggcgtacgttttggcgtttgtgtttttagtttaggtaacggtaaggttttgcgatttagtttgtcgttggcgttaagtggtaattgtggaagttgtagtagaattatcggtattatatgtggtggtaatgttttacgaagttgcgtttgtaatgcgttggtatttaacggtaggttcgattgcgatattagatagtttattaattgacgcgtattattatcggtggtagtcgtttggttaattatataggcgtgggt

SEQ ID NO: 24084 - DNA, 901 bp, Artificial Sequence
  chemically treated genomic DNA (Homo sapiens) CpG-island No: 24084
acccacgcctatataattaaccaaacgactaccaccgataataatacgcgtcaattaataaactatctaatatcgcaatcgaacctaccgttaaataccaacgcattacaaacgcaacttcgtaaaacattaccaccacatataataccgataattctactacaacttccacaattaccacttaacgccaacgacaaactaaatcgcaaaaccttaccgttacctaaactaaaaacacaaacgccaaaacgtacgccgaaaacgaacaataaaacgattatcgccgcgacattctcgtcgttactaaaatataacgtacaaaataccgatactaatttcttcgcgcttaacgatcattcgctactaacaataaaactaacaacgcaattaaatcgacaaattacccgccaaataacgccgaaacaaataataatcgcgtcaactatcgccaaactaacaacgattattaatactaaaaaaaacaacacccgacgtataaaattcgaaaccattctaccgttacgtaaaaataataacccgacgctattttatttccatcctacgtccgattttacctaacaattcaacgtactctcgcgttatctcgatccacaataatcgattatcgacattcaatcaccgcgccccaataaccccatacaaacgacgacaaacctaaataaaatctacgaaacgcatctaacaacgttacttaaacaacaaccgcataacccttattacctactaaaatattcccttaacgatacgctaacgcaaaatattacgacgcgactacgtacccgtaacgaacaaataacatttcttaacttactaaatacctaaccgccaaaaacgcaaaactaacaaaaaaaaaaaactaataatctaaacccgaaaatac

SEQ ID NO: 24085 - DNA, 727 bp, Artificial Sequence
  chemically treated genomic DNA (Homo sapiens) CpG-island No: 24085
tttggaaggacgtcgtgttaatttacgttcgaagttatttttttcggtaattttcggcgtatggggtaaatcgatttgtgttaataacgtcgaaattttgtgtacgtttcggcgattttcgttaacggcgtggagtggtattagaatatttcgaaaagtaaagatgttggtattaagttgatgggttttttcggtcgggtgaaaaattcgggattgtgggaattgtcgttcggtattatcgtacgcgagattttcgaagattacgtcggtggtatgcgtgatggtttgaaatttaaagtttggtagttaggcggcgcggggattgattttttgatcgaagcgtattttgatttgtcgatggaattcgaaagtatcggtaaagcgggtagtcgtttgggtacggcgttggcgatggcggttgattatgagattaatatggtgtcgttggtgcgtaatttggaagagtttttcgttcgtgagttttgcggttggtgtacgtcgtgtcgcgacggtttgtcgtggagcgtgaaaattttgcgtgcgttggagcgtggtgaaggttagtcgggcgatatcgaaatatttgagtaattgtgtcgatttttaggttcgggtaaaattttttgtgtttacgtatttggtgtagtggagtcgttatagagcgttattaaatattttcgcgaagaatttgaggcgggaattaaatagtcgtttagtaatatttatt

SEQ ID NO: 24086 - DNA, 727 bp, Artificial Sequence
  chemically treated genomic DNA (Homo sapiens) CpG-island No: 24086
aataaatattactaaacgactatttaattcccgcctcaaattcttcgcgaaaatatttaataacgctctataacgactccactacaccaaatacgtaaacacaaaaaattttacccgaacctaaaaatcgacacaattactcaaatatttcgatatcgcccgactaaccttcaccacgctccaacgcacgcaaaattttcacgctccacgacaaaccgtcgcgacacgacgtacaccaaccgcaaaactcacgaacgaaaaactcttccaaattacgcaccaacgacaccatattaatctcataatcaaccgccatcgccaacgccgtacccaaacgactacccgctttaccgatactttcgaattccatcgacaaatcaaaatacgcttcgatcaaaaaatcaatccccgcgccgcctaactaccaaactttaaatttcaaaccatcacgcataccaccgacgtaatcttcgaaaatctcgcgtacgataataccgaacgacaattcccacaatcccgaatttttcacccgaccgaaaaaacccatcaacttaataccaacatctttacttttcgaaatattctaataccactccacgccgttaacgaaaatcgccgaaacgtacacaaaatttcgacgttattaacacaaatcgatttaccccatacgccgaaaattaccgaaaaaaataacttcgaacgtaaattaacacgacgtccttccaaa

SEQ ID NO: 24087 - DNA, 727 bp, Artificial Sequence
  chemically treated genomic DNA (Homo sapiens) CpG-island No: 24087
aatgggtattgttgaacggttgtttgattttcgttttaaatttttcgcggaaatatttgatggcgttttgtaacggttttattgtattaggtgcgtgggtatagaaagttttattcgggtttaagaatcgatatagttgtttaagtgtttcgatatcgttcggttgatttttattacgttttagcgtacgtagaatttttacgttttacggtagatcgtcgcggtacggcgtatattagtcgtaggatttacgggcgaaaaatttttttaggttacgtattagcgatattatgttgattttatggttaatcgttatcgttagcgtcgtatttagacggttgttcgttttatcgatattttcgaattttatcggtagattaaggtgcgtttcggttaggaagttagttttcgcgtcgtttggttgttaggttttaaattttagattattacgtatattatcggcgtaattttcgaggatttcgcgtgcggtggtgtcgaacggtagtttttatagtttcggattttttattcgatcggagaagtttattagtttggtgttagtatttttatttttcgagatgttttgatattattttacgtcgttagcgaggatcgtcggaacgtatatagggtttcgacgttgttgatataggtcggtttattttatgcgtcggaggttgtcgggaagggtggtttcgagcgtgggttagtacgacgtttttttagg

SEQ ID NO: 24088 - DNA, 727 bp, Artificial Sequence
  chemically treated genomic DNA (Homo sapiens) CpG-island No: 24088
cctaaaaaaacgtcgtactaacccacgctcgaaaccacccttcccgacaacctccgacgcataaaataaaccgacctatatcaacaacgtcgaaaccctatatacgttccgacgatcctcgctaacgacgtaaaataatatcaaaacatctcgaaaaataaaaatactaacaccaaactaataaacttctccgatcgaataaaaaatccgaaactataaaaactaccgttcgacaccaccgcacgcgaaatcctcgaaaattacgccgataatatacgtaataatctaaaatttaaaacctaacaaccaaacgacgcgaaaactaacttcctaaccgaaacgcaccttaatctaccgataaaattcgaaaatatcgataaaacgaacaaccgtctaaatacgacgctaacgataacgattaaccataaaatcaacataatatcgctaatacgtaacctaaaaaaatttttcgcccgtaaatcctacgactaatatacgccgtaccgcgacgatctaccgtaaaacgtaaaaattctacgtacgctaaaacgtaataaaaatcaaccgaacgatatcgaaacacttaaacaactatatcgattcttaaacccgaataaaactttctatacccacgcacctaatacaataaaaccgttacaaaacgccatcaaatatttccgcgaaaaatttaaaacgaaaatcaaacaaccgttcaacaatacccatt

SEQ ID NO: 24089 - DNA, 576 bp, Artificial Sequence
  chemically treated genomic DNA (Homo sapiens) CpG-island No: 24089
tatcggttagattttcgaaatttatttgggtatggttgcgaaaggtatcggcgataagattaacgttatgttgaaatagtagtaagaagtcgcgaaattgcgcgaatttatttagcgtgcgtacgatttgggcgttgacgttcgttagaaagttgatttgagtatttttagcgatgaagaagttatgcgtttggttgaaaatttgcgtaaaggtatgtttatcgtaacgtcggtgttcgacggtgcgaaagaagtagaaattaaagagttgttgaaatttggcgatttgtcgattttcggttagattcgtttgtacgatggtcgtattggtgaatagttcgagcgttcggtaatcgttggttatatgtatatgttgaaattgaattatttggtcgacgataagatgtacgcgcgttttatcggtttttatagtttggttatttagtagtcgttgggtggtaaggtatagttcggtggttagcgtttcggggagatggaagtgtgggcgttggaagtatacggcgtagtatatattttgtaggaaatgtttatcgttaagtttgatgacgtgaacgg

SEQ ID NO: 24090 - DNA, 576 bp, Artificial Sequence
  chemically treated genomic DNA (Homo sapiens) CpG-island No: 24090
ccgttcacgtcatcaaacttaacgataaacatttcctacaaaatatatactacgccgtatacttccaacgcccacacttccatctccccgaaacgctaaccaccgaactataccttaccacccaacgactactaaataaccaaactataaaaaccgataaaacgcgcgtacatcttatcgtcgaccaaataattcaatttcaacatatacatataaccaacgattaccgaacgctcgaactattcaccaatacgaccatcgtacaaacgaatctaaccgaaaatcgacaaatcgccaaatttcaacaactctttaatttctacttctttcgcaccgtcgaacaccgacgttacgataaacatacctttacgcaaattttcaaccaaacgcataacttcttcatcgctaaaaatactcaaatcaactttctaacgaacgtcaacgcccaaatcgtacgcacgctaaataaattcgcgcaatttcgcgacttcttactactatttcaacataacgttaatcttatcgccgatacctttcgcaaccatacccaaataaatttcgaaaatctaaccgata

SEQ ID NO: 24091 - DNA, 576 bp, Artificial Sequence
  chemically treated genomic DNA (Homo sapiens) CpG-island No: 24091
tcgtttacgttattagatttaacggtgagtattttttgtagggtgtatgttgcgtcgtatgtttttagcgtttatatttttattttttcgaaacgttgattatcgaattgtgttttattatttagcggttgttgagtaattaggttgtaagaatcggtggaacgcgcgtgtattttgtcgtcgattaggtggtttagttttagtatgtatatgtaattaacggttatcggacgttcgaattgtttattagtgcgattatcgtataggcggatttgatcggaagtcggtaggtcgttaagttttagtagttttttaatttttgtttttttcgtatcgtcgaatatcggcgttgcgatgggtatatttttgcgtaggtttttagttagacgtataatttttttatcgttgaaggtatttaggttaattttttgacgaacgttagcgtttagatcgtacgtacgttggatgaattcgcgtagtttcgcgattttttgttgttgttttagtatggcgttgattttgtcgtcgatatttttcgtagttatatttaggtgggtttcgaggatttgatcgatg

SEQ ID NO: 24092 - DNA, 576 bp, Artificial Sequence
  chemically treated genomic DNA (Homo sapiens) CpG-island No: 24092
catcgatcaaatcctcgaaacccacctaaatataactacgaaaaatatcgacgacaaaatcaacgccatactaaaacaacaacaaaaaatcgcgaaactacgcgaattcatccaacgtacgtacgatctaaacgctaacgttcgtcaaaaaattaacctaaataccttcaacgataaaaaaattatacgtctaactaaaaacctacgcaaaaatatacccatcgcaacgccgatattcgacgatacgaaaaaaacaaaaattaaaaaactactaaaacttaacgacctaccgacttccgatcaaatccgcctatacgataatcgcactaataaacaattcgaacgtccgataaccgttaattacatatacatactaaaactaaaccacctaatcgacgacaaaatacacgcgcgttccaccgattcttacaacctaattactcaacaaccgctaaataataaaacacaattcgataatcaacgtttcgaaaaaataaaaatataaacgctaaaaacatacgacgcaacatacaccctacaaaaaatactcaccgttaaatctaataacgtaaacga

SEQ ID NO: 24093 - DNA, 791 bp, Artificial Sequence
  chemically treated genomic DNA (Homo sapiens) CpG-island No: 24093
  unsure (714)
attttggtcgtagcgcgcgggcgatgtacgttagtttatttacgtttttacggtagatttagcgtttggaagaagatttcggttagtcgttgtttgtgcgcgataatcgtacggtgacgttgattgaagcgggcgaagagttgcgcgttttcgtttagtaaacgttgttgtagtattagtagttgcgttatattatcgattagtaagggtcgtcgttttttggcgaattatatattttttgttcggtgatcgttgtttatagttatttgtcgtcgattttggatcgttttcgcgcggaatattcgtcggtggagattaaatttattattggtgatgcggtagatgcgatggaaaaggtggttattggtgaagcggatttggcgattgcgggtaaatcggaaattttgttcggcgtagtggcgttttcgatgttggagaatttggtagtagtgttgattgttttcgcgttgttttgttcggtgcgtaattaggtgtcggtagagaagtcggattggttaacggtgtcgtttattatggtcgattaggggtcggtacgtcgtcgtattgaattgtggtttcgacgtaataaaattagtaattcgatgatttacgttacggttggcgggtatgaagcgatggtatcgatggtggtattcggttgtggcgtggtatgttgtcggaagtggtgttggaatatagtcgaaacggtgcgtnattcgtgatgatttagaacgtacgatgaaaaacgcggtggatcggcgtgtgtgttaaaaacgggtatagcgtaatgg

SEQ ID NO: 24094 - DNA, 791 bp, Artificial Sequence
  chemically treated genomic DNA (Homo sapiens) CpG-island No: 24094
  unsure (78)
ccattacgctatacccgtttttaacacacacgccgatccaccgcgtttttcatcgtacgttctaaatcatcacgaatnacgcaccgtttcgactatattccaacaccacttccgacaacataccacgccacaaccgaataccaccatcgataccatcgcttcatacccgccaaccgtaacgtaaatcatcgaattactaattttattacgtcgaaaccacaattcaatacgacgacgtaccgacccctaatcgaccataataaacgacaccgttaaccaatccgacttctctaccgacacctaattacgcaccgaacaaaacaacgcgaaaacaatcaacactactaccaaattctccaacatcgaaaacgccactacgccgaacaaaatttccgatttacccgcaatcgccaaatccgcttcaccaataaccaccttttccatcgcatctaccgcatcaccaataataaatttaatctccaccgacgaatattccgcgcgaaaacgatccaaaatcgacgacaaataactataaacaacgatcaccgaacaaaaaatatataattcgccaaaaaacgacgacccttactaatcgataatataacgcaactactaatactacaacaacgtttactaaacgaaaacgcgcaactcttcgcccgcttcaatcaacgtcaccgtacgattatcgcgcacaaacaacgactaaccgaaatcttcttccaaacgctaaatctaccgtaaaaacgtaaataaactaacgtacatcgcccgcgcgctacgaccaaaat

SEQ ID NO: 24095 - DNA, 791 bp, Artificial Sequence
  chemically treated genomic DNA (Homo sapiens) CpG-island No: 24095
  unsure (78)
ttattgcgttatattcgtttttggtatatacgtcggtttatcgcgttttttatcgtgcgttttaaattattacgggtnacgtatcgtttcggttgtgttttagtattattttcggtaatatgttacgttatagtcgagtgttattatcgatattatcgttttatgttcgttaatcgtggcgtaaattatcgggttattgattttattgcgtcgaaattatagtttaatgcggcggcgtatcggtttttgatcggttataataaacggtatcgttgattagttcggtttttttatcgatatttgattacgtatcgggtagggtagcgcgggggtaattagtattattgttagattttttagtatcgaaaacgttattgcgtcgggtaaggttttcggtttattcgtaatcgttagattcgttttattagtgattattttttttatcgtatttgtcgtattattagtagtaagtttaatttttatcgacgggtgtttcgcgcggaagcgatttagaatcggcggtagatggttgtaggtagcggttatcgagtagaagatatgtaattcgttagagagcgacggtttttgttgatcgatggtgtggcgtaattgttgatattgtaatagcgtttgttgggcgaaaacgcgtagtttttcgttcgttttagttagcgttatcgtgcggttatcgcgtataaatagcggttgatcgagatttttttttaggcgttgaatttgtcgtgagagcgtggatgggttaacgtgtatcgttcgcgcgttgcggttaaaat

SEQ ID NO: 24096 - DNA, 791 bp, Artificial Sequence
  chemically treated genomic DNA (Homo sapiens) CpG-island No: 24096
  unsure (714)
attttaaccgcaacgcgcgaacgatacacgttaacccatccacgctctcacgacaaattcaacgcctaaaaaaaaatctcgatcaaccgctatttatacgcgataaccgcacgataacgctaactaaaacgaacgaaaaactacgcgttttcgcccaacaaacgctattacaatatcaacaattacgccacaccatcgatcaacaaaaaccgtcgctctctaacgaattacatatcttctactcgataaccgctacctacaaccatctaccgccgattctaaatcgcttccgcgcgaaacacccgtcgataaaaattaaacttactactaataatacgacaaatacgataaaaaaaataatcactaataaaacgaatctaacgattacgaataaaccgaaaaccttacccgacgcaataacgttttcgatactaaaaaatctaacaataatactaattacccccgcgctaccctacccgatacgtaatcaaatatcgataaaaaaaccgaactaatcaacgataccgtttattataaccgatcaaaaaccgatacgccgccgcattaaactataatttcgacgcaataaaatcaataacccgataatttacgccacgattaacgaacataaaacgataatatcgataataacactcgactataacgtaacatattaccgaaaataatactaaaacacaaccgaaacgatacgtnacccgtaataatttaaaacgcacgataaaaaacgcgataaaccgacgtatataccaaaaacgaatataacgcaataa

SEQ ID NO: 24097 - DNA, 1314 bp, Artificial Sequence
  chemically treated genomic DNA (Homo sapiens) CpG-island No: 24097
atatttttgcgatgtaatttaattcggttgacggggagttagtaacgttgaaaatttattttttttttttttattagcggtttttttttcgataattagtacggcggatttttgtcgcggcgttgtgaacgtagtattttgattggtatcgttggtttttaggttcgttagttaaatagatttaggagtagtttagtcggtggcgttcggttttcgggtaacgttttggtttcgttggtttcggttttgtgttttaggtgattaaggatttgtttgattattatagggtttttaatgtaggcgatgatttttatggcgtcgtcgtagtcgttgtaggtttcgatgtcgatattgaaaatacgtttgagtcgttgcgtttatgttatcgacgttcgtcgttgtgttggtgttgtcggtttattagttattttgattttgttgtttttgtttcgttttgtcggcgtgattaacgttcggtgtcgattgttgggtgcgaatatttcgtggaagcgggttaggttgattttgggtttcggtattagggcggttagttttgtaatgaaatttaatggttcgaaaatgacgtgcgtggtgtcgtttcggtacggcgttttgagttggtagcgtacgttgtcgtttcgtgttaacgatagtcgtttttcggatatcgtcgggcggttgatgtatcggtatagtcgttcgagttttttgcgtttatcggttttggtcgttacgtcggcgtgtaggttggattcggttattttgttaatttcgttatcgaacggattattattggtcggtagagtttgtaaagtgaatatttttcgtttcgtttgtgaatcgatagcgatacggtaagtgatcgagtgttttagtaggggtgttatcgggtcgttatttatcgtattcgaggttagatagttgttttcgatatttcgttttagtaggttttgtcgttttagatagcgatttattcggtgggcgatggtgtgcgttagttgggtgagttttgggttggtcggcgttttgatttagcggaaacgcgttgagtcgtgggattgttcgatatatatatcgtcgagaaatagtatgtggaagtgaatatttagattgagcgtcgatttaaaacgttggattagggtgatcgcgttcgttttggttatttggtgggtatggttcgtttttttgattaggtgcgtggtaatgacgcggtaaacgatgtttagtatttattttatgatttcgggtcggttggtaaataggaaacgtagttgaaacgggaagtttaatatttattgacgtatgggttgttta

SEQ ID NO: 24098 - DNA, 1314 bp, Artificial Sequence
  chemically treated genomic DNA (Homo sapiens) CpG-island No: 24098
taaacaacccatacgtcaataaatattaaacttcccgtttcaactacgtttcctatttaccaaccgacccgaaatcataaaataaatactaaacatcgtttaccgcgtcattaccacgcacctaatcaaaaaaacgaaccatacccaccaaataaccaaaacgaacgcgatcaccctaatccaacgttttaaatcgacgctcaatctaaatattcacttccacatactatttctcgacgatatatatatcgaacaatcccacgactcaacgcgtttccgctaaatcaaaacgccgaccaacccaaaactcacccaactaacgcacaccatcgcccaccgaataaatcgctatctaaaacgacaaaacctactaaaacgaaatatcgaaaacaactatctaacctcgaatacgataaataacgacccgataacacccctactaaaacactcgatcacttaccgtatcgctatcgattcacaaacgaaacgaaaaatattcactttacaaactctaccgaccaataataatccgttcgataacgaaattaacaaaataaccgaatccaacctacacgccgacgtaacgaccaaaaccgataaacgcaaaaaactcgaacgactataccgatacatcaaccgcccgacgatatccgaaaaacgactatcgttaacacgaaacgacaacgtacgctaccaactcaaaacgccgtaccgaaacgacaccacgcacgtcattttcgaaccattaaatttcattacaaaactaaccgccctaataccgaaacccaaaatcaacctaacccgcttccacgaaatattcgcacccaacaatcgacaccgaacgttaatcacgccgacaaaacgaaacaaaaacaacaaaatcaaaataactaataaaccgacaacaccaacacaacgacgaacgtcgataacataaacgcaacgactcaaacgtattttcaatatcgacatcgaaacctacaacgactacgacgacgccataaaaatcatcgcctacattaaaaaccctataataatcaaacaaatccttaatcacctaaaacacaaaaccgaaaccaacgaaaccaaaacgttacccgaaaaccgaacgccaccgactaaactactcctaaatctatttaactaacgaacctaaaaaccaacgataccaatcaaaatactacgttcacaacgccgcgacaaaaatccgccgtactaattatcgaaaaaaaaaccgctaataaaaaaaaaaaaaataaattttcaacgttactaactccccgtcaaccgaattaaattacatcgcaaaaatat

SEQ ID NO: 24099 - DNA, 1314 bp, Artificial Sequence
  chemically treated genomic DNA (Homo sapiens) CpG-island No: 24099
tgaataatttatgcgttagtgggtgttgagtttttcgttttagttgcgttttttgtttgttagtcggttcgagattatggggtgggtgttgggtatcgtttatcgcgttattgttacgtatttggttaagaaagcgggttatatttattaagtggttaagacgggcgcggttattttgatttagcgttttggatcggcgtttaatttgaatgtttatttttatatgttgtttttcgacggtgtgtatgtcgagtaattttacggtttagcgcgttttcgttgggttaaggcgtcgattagtttagagtttatttagttgacgtatattatcgtttatcgggtgggtcgttatttggaacggtaaggtttgttggaacgggatgtcgaaaatagttatttggtttcggatgcggtggatgacgattcgatgatatttttgttggggtattcgattatttatcgtatcgttgtcggtttataggcggggcgaaaggtgtttattttgtaaattttgtcgattagtggtgattcgttcggtgacgggattggtaaggtagtcgggtttagtttgtacgtcggcgtggcggttagggtcgatgaacgtaagaagttcgaacggttgtgtcggtatattagtcgttcggcggtattcgagaagcggttgtcgttaatacgaggcggtaacgtgcgttattagtttaagacgtcgtatcgggacggtattacgtacgttattttcgaattattggattttattgtaaggttggtcgttttggtatcgaagtttagagttaatttaattcgtttttacggggtgttcgtatttaatagtcggtatcgggcgttggttacgtcggtaaaacggggtaggggtaataaggttagggtggttgatgaatcggtaatattagtataacggcgagcgtcgatgatatgggcgtaacggtttaagcgtgtttttaatatcgatatcgagatttgtagcggttgcggcggcgttatgaaagttatcgtttgtattgaagattttatagtgattaagtagatttttgattatttgaagtataaagtcgaaattagcgggattagggcgttattcgaaagtcgggcgttatcggttgagttgtttttgggtttgtttgattgacgagtttgaaggttaacgatattaattaaaatgttgcgtttatagcgtcgcggtagggattcgtcgtgttggttgtcggaaaaggagtcgttagtgggaaagaggagggtaaatttttagcgttgttggtttttcgttagtcggattgggttgtatcgtaggggtgt

SEQ ID NO: 24100 - DNA, 1314 bp, Artificial Sequence
  chemically treated genomic DNA (Homo sapiens) CpG-island No: 24100
acacccctacgatacaacccaatccgactaacgaaaaaccaacaacgctaaaaatttaccctcctctttcccactaacgactccttttccgacaaccaacacgacgaatccctaccgcgacgctataaacgcaacattttaattaatatcgttaaccttcaaactcgtcaatcaaacaaacccaaaaacaactcaaccgataacgcccgactttcgaataacgccctaatcccgctaatttcgactttatacttcaaataatcaaaaatctacttaatcactataaaatcttcaatacaaacgataactttcataacgccgccgcaaccgctacaaatctcgatatcgatattaaaaacacgcttaaaccgttacgcccatatcatcgacgctcgccgttatactaatattaccgattcatcaaccaccctaaccttattacccctaccccgttttaccgacgtaaccaacgcccgataccgactattaaatacgaacaccccgtaaaaacgaattaaattaactctaaacttcgataccaaaacgaccaaccttacaataaaatccaataattcgaaaataacgtacgtaataccgtcccgatacgacgtcttaaactaataacgcacgttaccgcctcgtattaacgacaaccgcttctcgaataccgccgaacgactaatataccgacacaaccgttcgaacttcttacgttcatcgaccctaaccgccacgccgacgtacaaactaaacccgactaccttaccaatcccgtcaccgaacgaatcaccactaatcgacaaaatttacaaaataaacacctttcgccccgcctataaaccgacaacgatacgataaataatcgaataccccaacaaaaatatcatcgaatcgtcatccaccgcatccgaaaccaaataactattttcgacatcccgttccaacaaaccttaccgttccaaataacgacccacccgataaacgataatatacgtcaactaaataaactctaaactaatcgacgccttaacccaacgaaaacgcgctaaaccgtaaaattactcgacatacacaccgtcgaaaaacaacatataaaaataaacattcaaattaaacgccgatccaaaacgctaaatcaaaataaccgcgcccgtcttaaccacttaataaatataacccgctttcttaaccaaatacgtaacaataacgcgataaacgatacccaacacccaccccataatctcgaaccgactaacaaacaaaaaacgcaactaaaacgaaaaactcaacacccactaacgcataaattattca

SEQ ID NO: 24101 - DNA, 1676 bp, Artificial Sequence
  chemically treated genomic DNA (Homo sapiens) CpG-island No: 24101
tatttcgcggtttttattgcgtgatcgagttgatcgatattcgtcgtgatacgttttatgaagtgtttgtttgcgtttgttagtcgaacgtttcgcgtatggcgtttaaatagtaggatattaaggttattttttagcgtttttatacgcgcgttgacgttcgattggttgatattaagtgttttggtcgtatgtcgaaaatttagatgttcggcgacggcgatgaattgaataagggaaatgagcggtattttgttagataggatatcgatatttacgaggtttcgatggttagtgcgtcgtatcggagcgggtttgttattagtcgtcggttagacgattggcgatttttcggtggtagttttacggagtcgaaggagtattagttttaacgaaattagtatcgttatcgtcgtggcgtaatagattacgggttacgttgtgttatcgtttaaaagtgttatcgttaatgtttcgataatgttgattattaggttttgaacgtagaagtagaacgcgatcgttgatttcgcgatgtcgtcgaattttgttaaagcgtcgttcgcggtaacggatatcgtgaagataatatcgatcgcgataatttatatcggtaggatgaaggtgaggaatgacggcgagtcgtaaagttcgtcgatttttaataggatcgtttcgtaaataagtaacgttattttacgcgttacgtattttgcgatgttttatttggcgataaaggatttcgcgaaacgggttgttacgattattataagcgcgatagtggcgaaggtaaagttgaattcgatttcggaatatttcgtttggtttatgagtatacggggagtcgtcgagaagaagacgaagaaggtgtttatatcggcgttaaagtcgatagtgtaaatttaaaaagtcggattcgcgaagatcggtaagatagatcggcgcgttttgatttgatttagagggcgggtttcgtgttatttgaaattcgtatttaggagtgcgagtatcgttagtatagttaaagtaatgaatatcgtttgttattttaagaattcgtcgattaatgtttcggcgatagggtcgagcgtaggtacgaacgttagtatcgaattgaaaaggtcgtagatgacgatatttttaggacggttggtataaacgtcgcgaatcgtcgcgaacgtcgttattagtatggtcgacgcgtttattgtttgaagtagacggaaagcgataaaggtcggtgtagttgaagattaagttgtttttagagacgtaatgacgaaagtcgttgcgttcgtaagtagaattggtcgtcgttcgattttgtttgagagcggattaaaaattatttggtttacgtcgagtattattatatagaggtttaacgtgagttggattatagcgggcgtcgtgtttaggatgtcgggtatcgttggaacgatagggagataaatatttatcgttagtgaagcgaggatgtcgaaaggagttattagtagtagtgttgtcggtagcgtataggtttacgcggggcgtgtggtggttatgacgaattaattttcgattaaggaatatcgggcgacgtttgttcgttagtaattagatgagattagttttatagagcgtcgtaataataatattggttgttgcggtttatttgtttgttgatttggaat

SEQ ID NO: 24102 - DNA, 1676 bp, Artificial Sequence
  chemically treated genomic DNA (Homo sapiens) CpG-island No: 24102
attccaaatcaacaaacaaataaaccgcaacaaccaatattattattacgacgctctataaaactaatctcatctaattactaacgaacaaacgtcgcccgatattccttaatcgaaaattaattcgtcataaccaccacacgccccgcgtaaacctatacgctaccgacaacactactactaataactcctttcgacatcctcgcttcactaacgataaatatttatctccctatcgttccaacgatacccgacatcctaaacacgacgcccgctataatccaactcacgttaaacctctatataataatactcgacgtaaaccaaataatttttaatccgctctcaaacaaaatcgaacgacgaccaattctacttacgaacgcaacgactttcgtcattacgtctctaaaaacaacttaatcttcaactacaccgacctttatcgctttccgtctacttcaaacaataaacgcgtcgaccatactaataacgacgttcgcgacgattcgcgacgtttataccaaccgtcctaaaaatatcgtcatctacgaccttttcaattcgatactaacgttcgtacctacgctcgaccctatcgccgaaacattaatcgacgaattcttaaaataacaaacgatattcattactttaactatactaacgatactcgcactcctaaatacgaatttcaaataacacgaaacccgccctctaaatcaaatcaaaacgcgccgatctatcttaccgatcttcgcgaatccgactttttaaatttacactatcgactttaacgccgatataaacaccttcttcgtcttcttctcgacgactccccgtatactcataaaccaaacgaaatattccgaaatcgaattcaactttaccttcgccactatcgcgcttataataatcgtaacaacccgtttcgcgaaatcctttatcgccaaataaaacatcgcaaaatacgtaacgcgtaaaataacgttacttatttacgaaacgatcctattaaaaatcgacgaactttacgactcgccgtcattcctcaccttcatcctaccgatataaattatcgcgatcgatattatcttcacgatatccgttaccgcgaacgacgctttaacaaaattcgacgacatcgcgaaatcaacgatcgcgttctacttctacgttcaaaacctaataatcaacattatcgaaacattaacgataacacttttaaacgataacacaacgtaacccgtaatctattacgccacgacgataacgatactaatttcgttaaaactaatactccttcgactccgtaaaactaccaccgaaaaatcgccaatcgtctaaccgacgactaataacaaacccgctccgatacgacgcactaaccatcgaaacctcgtaaatatcgatatcctatctaacaaaataccgctcatttcccttattcaattcatcgccgtcgccgaacatctaaattttcgacatacgaccaaaacacttaatatcaaccaatcgaacgtcaacgcgcgtataaaaacgctaaaaaataaccttaatatcctactatttaaacgccatacgcgaaacgttcgactaacaaacgcaaacaaacacttcataaaacgtatcacgacgaatatcgatcaactcgatcacgcaataaaaaccgcgaaata

SEQ ID NO: 24103 - DNA, 1676 bp, Artificial Sequence
  chemically treated genomic DNA (Homo sapiens) CpG-island No: 24103
attttaagttagtagataagtaagtcgtaataattagtattgttgttgcggcgttttgtaaggttagttttatttgattgttgacgagtagacgtcgttcggtattttttaatcgagggttgattcgttatgattattatacgtttcgcgtgggtttatacgttgtcggtagtattgttgttgatggtttttttcgatattttcgttttattggcgatggatatttatttttttgtcgttttagcgatgttcggtattttgaatacgacgttcgttatgatttaatttacgttgagtttttatatggtgatgttcggcgtgggttaggtgatttttggttcgtttttagatagaatcgggcgacggttaattttatttgcgggcgtaacggttttcgttattgcgtttttgggagtagtttggtttttaattgtatcggtttttgtcgtttttcgtttattttaagtagtgggcgcgtcggttatgttggtggcgacgttcgcgacggttcgcgacgtttatgttaatcgttttgagggtgtcgttatttacggtttttttagttcgatgttggcgttcgtgtttgcgttcggttttatcgtcggagtattgatcggcgagtttttgggatggtaggcgatatttattattttggttatattggcgatgttcgtatttttaaatgcgggttttaggtggtacgaaattcgttttttggattaagttaagacgcgtcgatttgttttgtcgattttcgcgagttcggttttttgggtttatattgtcggttttagcgtcggtatgggtatttttttcgtttttttttcgacggtttttcgtgtgtttataggttaagcggaatatttcgagatcggatttagttttgttttcgttattgtcgcgtttgtaatgatcgtgataattcgtttcgcgaagttttttgtcgttagatggggtatcgtaggatgcgtggcgcgtgggatggcgttgtttgtttgcggagcggttttgttggggatcggcgaattttacggttcgtcgttattttttatttttattttatcgatgtgggttgtcgcggtcggtattgtttttacggtgttcgttatcgcgaacggcgttttggtagagttcgacgatatcgcgggattagcggtcgcgttttatttttgcgtttaaagtttgatagttagtattgtcgggatattggcggtggtatttttaaacggtgatatagcgtggttcgtgatttgttacgttacggcgatggcggtattggtttcgttggggttggtgttttttcggtttcgtggggttgttatcgagaagtcgttagtcgtttaatcgacgattggtagtaggttcgtttcgatgcggcgtattaattatcgaaatttcgtgaatgtcggtattttgtttggtaggatatcgtttattttttttgtttagtttatcgtcgtcgtcgagtatttgaattttcggtatgcggttaaggtatttggtattagttagtcgagcgttagcgcgcgtgtgaaagcgttggaggataattttggtgttttgttatttgagcgttatgcgcggggcgttcggttaatagacgtaggtaggtattttatggagcgtgttacggcgggtgtcgattaattcgattacgtagtgaagatcgcggagtg

SEQ ID NO: 24104 - DNA, 1676 bp, Artificial Sequence
  chemically treated genomic DNA (Homo sapiens) CpG-island No: 24104
cactccgcgatcttcactacgtaatcgaattaatcgacacccgccgtaacacgctccataaaatacctacctacgtctattaaccgaacgccccgcgcataacgctcaaataacaaaacaccaaaattatcctccaacgctttcacacgcgcgctaacgctcgactaactaataccaaataccttaaccgcataccgaaaattcaaatactcgacgacgacgataaactaaacaaaaaaaataaacgatatcctaccaaacaaaataccgacattcacgaaatttcgataattaatacgccgcatcgaaacgaacctactaccaatcgtcgattaaacgactaacgacttctcgataacaaccccacgaaaccgaaaaaacaccaaccccaacgaaaccaataccgccatcgccgtaacgtaacaaatcacgaaccacgctatatcaccgtttaaaaataccaccgccaatatcccgacaatactaactatcaaactttaaacgcaaaaataaaacgcgaccgctaatcccgcgatatcgtcgaactctaccaaaacgccgttcgcgataacgaacaccgtaaaaacaataccgaccgcgacaacccacatcgataaaataaaaataaaaaataacgacgaaccgtaaaattcgccgatccccaacaaaaccgctccgcaaacaaacaacgccatcccacgcgccacgcatcctacgataccccatctaacgacaaaaaacttcgcgaaacgaattatcacgatcattacaaacgcgacaataacgaaaacaaaactaaatccgatctcgaaatattccgcttaacctataaacacacgaaaaaccgtcgaaaaaaaaacgaaaaaaatacccataccgacgctaaaaccgacaatataaacccaaaaaaccgaactcgcgaaaatcgacaaaacaaatcgacgcgtcttaacttaatccaaaaaacgaatttcgtaccacctaaaacccgcatttaaaaatacgaacatcgccaatataaccaaaataataaatatcgcctaccatcccaaaaactcgccgatcaatactccgacgataaaaccgaacgcaaacacgaacgccaacatcgaactaaaaaaaccgtaaataacgacaccctcaaaacgattaacataaacgtcgcgaaccgtcgcgaacgtcgccaccaacataaccgacgcgcccactacttaaaataaacgaaaaacgacaaaaaccgatacaattaaaaaccaaactactcccaaaaacgcaataacgaaaaccgttacgcccgcaaataaaattaaccgtcgcccgattctatctaaaaacgaaccaaaaatcacctaacccacgccgaacatcaccatataaaaactcaacgtaaattaaatcataacgaacgtcgtattcaaaataccgaacatcgctaaaacgacaaaaaaataaatatccatcgccaataaaacgaaaatatcgaaaaaaaccatcaacaacaatactaccgacaacgtataaacccacgcgaaacgtataataatcataacgaatcaaccctcgattaaaaaataccgaacgacgtctactcgtcaacaatcaaataaaactaaccttacaaaacgccgcaacaacaatactaattattacgacttacttatctactaacttaaaat

SEQ ID NO: 24105 - DNA, 1101 bp, Artificial Sequence
  chemically treated genomic DNA (Homo sapiens) CpG-island No: 24105
gtcgttttaattgttacgatatcgattcgttttgtacgatgtttataatttcgcggtcgagttggcggtcgatgatcggtcgttacgggataagggtgaatttatgggatttttcgattacggcgaatttgtcgttcgatagatgtacggtttcggtaaatttgtcgttgacgttttcgtcgttcgtggcggcgcggaacggtaggtttttatttaaagttatattcgattcgacgtcggttatttcgcgttttcgtaggatggcgagaaggttgcgtcggtagaagacgcggttgtttcggttgcgggtggcgtcgttttgttcgatatggtgttcgcggcgttggtttatggtttcgcggatttgttgttcgaagtcggttggcgtaaggtcggtcgtttcgtcgtggattagtcgtcggtttagttaggtcgcgtcgttcgattcgatttgtttgtttagatcgatcggggaaaggacgcgaacgttggtttgattgtttcggtcggcgttatgggcggcggtacggttgattagattatcggggatgcgttattggtcggcgtcgattcgttcgacgatatcggttcggcgtagcgtttttagtcggcgtatatgggtatcgatatagtttttatagtcgtcgtttggaacgcggtacgtataggaagaataaacgttttttttatttaagtttaatagttttggatcgtagttgattttttcgatatttttgcgatgtaatttaattcggttgacggggagttagtaacgttgaaaatttattttttttttttttattagcggtttttttttcgataattagtacggcggatttttgtcgcggcgttgtgaacgtagtattttgattggtatcgttggtttttaggttcgttagttaaatagatttaggagtagtttagtcggtggcgttcggttttcgggtaacgttttggtttcgttggtttcggttttgtgttttaggtgattaaggatggggtcgtttgcgggagagggcgaaattttacgttaaggttttggttaacgatatttttcggtaagattgatgtgtttttaggggataggagaagtcgtttgat

SEQ ID NO: 24106 - DNA, 1101 bp, Artificial Sequence
  chemically treated genomic DNA (Homo sapiens) CpG-island No: 24106
atcaaacgacttctcctatcccctaaaaacacatcaatcttaccgaaaaatatcgttaaccaaaaccttaacgtaaaatttcgccctctcccgcaaacgaccccatccttaatcacctaaaacacaaaaccgaaaccaacgaaaccaaaacgttacccgaaaaccgaacgccaccgactaaactactcctaaatctatttaactaacgaacctaaaaaccaacgataccaatcaaaatactacgttcacaacgccgcgacaaaaatccgccgtactaattatcgaaaaaaaaaccgctaataaaaaaaaaaaaaataaattttcaacgttactaactccccgtcaaccgaattaaattacatcgcaaaaatatcgaaaaaatcaactacgatccaaaactattaaacttaaataaaaaaaacgtttattcttcctatacgtaccgcgttccaaacgacgactataaaaactatatcgatacccatatacgccgactaaaaacgctacgccgaaccgatatcgtcgaacgaatcgacgccgaccaataacgcatccccgataatctaatcaaccgtaccgccgcccataacgccgaccgaaacaatcaaaccaacgttcgcgtcctttccccgatcgatctaaacaaacaaatcgaatcgaacgacgcgacctaactaaaccgacgactaatccacgacgaaacgaccgaccttacgccaaccgacttcgaacaacaaatccgcgaaaccataaaccaacgccgcgaacaccatatcgaacaaaacgacgccacccgcaaccgaaacaaccgcgtcttctaccgacgcaaccttctcgccatcctacgaaaacgcgaaataaccgacgtcgaatcgaatataactttaaataaaaacctaccgttccgcgccgccacgaacgacgaaaacgtcaacgacaaatttaccgaaaccgtacatctatcgaacgacaaattcgccgtaatcgaaaaatcccataaattcacccttatcccgtaacgaccgatcatcgaccgccaactcgaccgcgaaattataaacatcgtacaaaacgaatcgatatcgtaacaattaaaacgac

SEQ ID NO: 24107 - DNA, 1101 bp, Artificial Sequence
  chemically treated genomic DNA (Homo sapiens) CpG-island No: 24107
attaagcgattttttttattttttgggaatatattaattttatcggagaatatcgttggttaaagttttagcgtaggatttcgttttttttcgtaaacgattttatttttgattatttgaagtataaagtcgaaattagcgggattagggcgttattcgaaagtcgggcgttatcggttgagttgtttttgggtttgtttgattgacgagtttgaaggttaacgatattaattaaaatgttgcgtttatagcgtcgcggtagggattcgtcgtgttggttgtcggaaaaggagtcgttagtgggaaagaggagggtaaatttttagcgttgttggtttttcgttagtcggattgggttgtatcgtaggggtgtcgaaagagttaattgcggtttaaagttgttggatttgggtgaaaagggcgtttattttttttatacgtgtcgcgttttaggcggcgattatgagggttatgtcgatgtttatgtgcgtcggttggaggcgttacgtcgggtcggtatcgtcgagcggatcgacgtcgattaatggcgtattttcgatgatttggttagtcgtgtcgtcgtttatgacgtcggtcgagatagttaggttagcgttcgcgtttttttttcggtcgatttgaataaatagatcggatcggacggcgcgatttggttggatcggcggttgatttacggcgagacggtcgattttgcgttaatcggtttcgggtaataagttcgcgaagttatggattagcgtcgcgagtattatatcgaatagggcgacgttattcgtagtcgggatagtcgcgttttttatcggcgtaattttttcgttattttgcgggagcgcgaggtagtcggcgtcggatcggatatggttttgagtaagggtttgtcgtttcgcgtcgttacggacggcgagagcgttagcggtaagtttatcggaatcgtgtatttatcgagcggtaagttcgtcgtggtcgagaaattttatgagtttatttttgtttcgtggcggtcgattatcgatcgttaattcggtcgcgaggttatgggtatcgtgtagggcgggtcggtgtcgtggtagttagggcggt

SEQ ID NO: 24108 - DNA, 1101 bp, Artificial Sequence
  chemically treated genomic DNA (Homo sapiens) CpG-island No: 24108
accgccctaactaccacgacaccgacccgccctacacgatacccataacctcgcgaccgaattaacgatcgataatcgaccgccacgaaacaaaaataaactcataaaatttctcgaccacgacgaacttaccgctcgataaatacacgattccgataaacttaccgctaacgctctcgccgtccgtaacgacgcgaaacgacaaacccttactcaaaaccatatccgatccgacgccgactacctcgcgctcccgcaaaataacgaaaaaattacgccgataaaaaacgcgactatcccgactacgaataacgtcgccctattcgatataatactcgcgacgctaatccataacttcgcgaacttattacccgaaaccgattaacgcaaaatcgaccgtctcgccgtaaatcaaccgccgatccaaccaaatcgcgccgtccgatccgatctatttattcaaatcgaccgaaaaaaaaacgcgaacgctaacctaactatctcgaccgacgtcataaacgacgacacgactaaccaaatcatcgaaaatacgccattaatcgacgtcgatccgctcgacgataccgacccgacgtaacgcctccaaccgacgcacataaacatcgacataaccctcataatcgccgcctaaaacgcgacacgtataaaaaaaataaacgcccttttcacccaaatccaacaactttaaaccgcaattaactctttcgacacccctacgatacaacccaatccgactaacgaaaaaccaacaacgctaaaaatttaccctcctctttcccactaacgactccttttccgacaaccaacacgacgaatccctaccgcgacgctataaacgcaacattttaattaatatcgttaaccttcaaactcgtcaatcaaacaaacccaaaaacaactcaaccgataacgcccgactttcgaataacgccctaatcccgctaatttcgactttatacttcaaataatcaaaaataaaatcgtttacgaaaaaaaacgaaatcctacgctaaaactttaaccaacgatattctccgataaaattaatatattcccaaaaaataaaaaaaatcgcttaat

SEQ ID NO: 24109 - DNA, 627 bp, Artificial Sequence
  chemically treated genomic DNA (Homo sapiens) CpG-island No: 24109
taagttagagggtttaatcgtagatagaaggtaaggcgttcgcggtcgggggtttcgatttttaatatattgaataggatagcgaaggcgcgttttgttttatttggcgttgtttagtttttttcggcgttagtaattatgagtgttaaatcggtatagcgatttgttgtttcgagtcgtttaaggtcgattagattcgtgtattgaagagttttagggtttattatgaagttcggtatgtagggattattatggtaaataattatatcggtgcgtttttggtcgagtcgtatcggtagttttcgttcgatacgagttaaaagatcgagttgcggcgtatttttgttttcgttcggtaagaagtcgggattgacggtattgcgggatattatattaacggcgcgttcgaatattcgcgatagtttgcgtttaaacggatattgattaatcgataggttgtgaatagcgttaagttgttgttttattgacggttacgttttgagtaaattcgttttagatagattagtcgtcggtattttcggaattgtcgttattattaagtatgtatttttttgttttttttgttagttgattatttcggggtaagttatatttcgatttttgagt

SEQ ID NO: 24110 - DNA, 627 bp, Artificial Sequence
  chemically treated genomic DNA (Homo sapiens) CpG-island No: 24110
actcaaaaatcgaaatataacttaccccgaaataatcaactaacaaaaaaaacaaaaaaatacatacttaataataacgacaattccgaaaataccgacgactaatctatctaaaacgaatttactcaaaacgtaaccgtcaataaaacaacaacttaacgctattcacaacctatcgattaatcaatatccgtttaaacgcaaactatcgcgaatattcgaacgcgccgttaatataatatcccgcaataccgtcaatcccgacttcttaccgaacgaaaacaaaaatacgccgcaactcgatcttttaactcgtatcgaacgaaaactaccgatacgactcgaccaaaaacgcaccgatataattatttaccataataatccctacataccgaacttcataataaaccctaaaactcttcaatacacgaatctaatcgaccttaaacgactcgaaacaacaaatcgctataccgatttaacactcataattactaacgccgaaaaaaactaaacaacgccaaataaaacaaaacgcgccttcgctatcctattcaatatattaaaaatcgaaacccccgaccgcgaacgccttaccttctatctacgattaaaccctctaactta

SEQ ID NO: 24111 - DNA, 627 bp, Artificial Sequence
  chemically treated genomic DNA (Homo sapiens) CpG-island No: 24111
gtttaaaggtcgaggtgtggtttgtttcgaggtgattaattggtaggaggaataggagggtgtatgtttggtgataacggtaatttcgggagtatcggcggttgatttgtttggagcggatttgtttaaagcgtggtcgttaatggggtagtaatttggcgttgtttatagtttatcggttgattaatgttcgtttgagcgtaggttgtcgcgaatgttcggacgcgtcgttgatgtggtgtttcgtaatgtcgttaatttcgattttttatcggacgaggataagagtacgtcgtagttcgattttttggttcgtgtcgaacgagagttatcggtgcggttcgattaagagcgtatcgatatggttgtttgttatggtgatttttgtatgtcgaattttatggtggattttaaaattttttaatgtacgggtttgatcgattttgggcggttcggaatagtagatcgttatgtcgatttggtatttatgattgttaacgtcgaagagaattgggtagcgttagatgaagtagagcgcgttttcgttgttttatttaatgtattggggatcgaagttttcgatcgcgaacgttttgttttttatttgcgattggattttttgatttg

SEQ ID NO: 24112 - DNA, 627 bp, Artificial Sequence
  chemically treated genomic DNA (Homo sapiens) CpG-island No: 24112
caaatcaaaaaatccaatcgcaaataaaaaacaaaacgttcgcgatcgaaaacttcgatccccaatacattaaataaaacaacgaaaacgcgctctacttcatctaacgctacccaattctcttcgacgttaacaatcataaataccaaatcgacataacgatctactattccgaaccgcccaaaatcgatcaaacccgtacattaaaaaattttaaaatccaccataaaattcgacatacaaaaatcaccataacaaacaaccatatcgatacgctcttaatcgaaccgcaccgataactctcgttcgacacgaaccaaaaaatcgaactacgacgtactcttatcctcgtccgataaaaaatcgaaattaacgacattacgaaacaccacatcaacgacgcgtccgaacattcgcgacaacctacgctcaaacgaacattaatcaaccgataaactataaacaacgccaaattactaccccattaacgaccacgctttaaacaaatccgctccaaacaaatcaaccgccgatactcccgaaattaccgttatcaccaaacatacaccctcctattcctcctaccaattaatcacctcgaaacaaaccacacctcgacctttaaac

SEQ ID NO: 24113 - DNA, 516 bp, Artificial Sequence
  chemically treated genomic DNA (Homo sapiens) CpG-island No: 24113
gagttcgtttttgggatcgatatatcggtagagagtgacgcgttcgatgtcgagttttttgtagagatcggaaattgaagtatcgcgttgggttatggcggtttgcgcgagacgtatttgagttttggtgagcgcgaattttcgttcgtttttgcgatcgcgcgttttcgcggaggcgagattcgttatggtgcgttttcggattagatttcgttcgaattcggttaaggtggcgaagatttcgaatattatgcgatcggacgtagtcgtggtgtcgatttgagcgttttttttagttagaattcgtaggtcgattttgcggtttgatagtttttttatcgtgttgattagatgggtaagcgatcgttcgaggcgatcgagtttttagattattagtatatcgtcgttacgtaatgatttgaggtaggtagttaagttagggcgattattacgatcgtcggaagtaagattattatagatattgtttcgtttgttaacggcgattgaaaattgata

SEQ ID NO: 24114 - DNA, 516 bp, Artificial Sequence
  chemically treated genomic DNA (Homo sapiens) CpG-island No: 24114
tatcaattttcaatcgccgttaacaaacgaaacaatatctataataatcttacttccgacgatcgtaataatcgccctaacttaactacctacctcaaatcattacgtaacgacgatatactaataatctaaaaactcgatcgcctcgaacgatcgcttacccatctaatcaacacgataaaaaaactatcaaaccgcaaaatcgacctacgaattctaactaaaaaaaacgctcaaatcgacaccacgactacgtccgatcgcataatattcgaaatcttcgccaccttaaccgaattcgaacgaaatctaatccgaaaacgcaccataacgaatctcgcctccgcgaaaacgcgcgatcgcaaaaacgaacgaaaattcgcgctcaccaaaactcaaatacgtctcgcgcaaaccgccataacccaacgcgatacttcaatttccgatctctacaaaaaactcgacatcgaacgcgtcactctctaccgatatatcgatcccaaaaacgaactc

SEQ ID NO: 24115 - DNA, 516 bp, Artificial Sequence
  chemically treated genomic DNA (Homo sapiens) CpG-island No: 24115
tattagtttttaatcgtcgttgataaacgggataatatttatgatgattttgttttcggcggtcgtgatgatcgttttggtttgattgtttgttttaagttattgcgtgacggcgatgtgttggtggtttggaagttcgatcgtttcggacgatcgtttgtttatttggttaatacggtgaaggagttgttagatcgtaagatcggtttgcgggttttgattggaaagggcgtttagatcgatattacgattgcgttcggtcgtatggtgttcggaattttcgttattttggtcgagttcgagcgggatttgattcgagagcgtattatggcgggtttcgttttcgcgagagcgcgcggtcgtaagggcggacgaaaattcgcgtttattaaagtttaggtgcgtttcgcgtaagtcgttatggtttagcgcgatattttagttttcgatttttgtaaggaattcggtatcgagcgcgttattttttatcgatatgtcggttttaaaggcgagttt

SEQ ID NO: 24116 - DNA, 516 bp, Artificial Sequence
  chemically treated genomic DNA (Homo sapiens) CpG-island No: 24116
aaactcgcctttaaaaccgacatatcgataaaaaataacgcgctcgataccgaattccttacaaaaatcgaaaactaaaatatcgcgctaaaccataacgacttacgcgaaacgcacctaaactttaataaacgcgaattttcgtccgcccttacgaccgcgcgctctcgcgaaaacgaaacccgccataatacgctctcgaatcaaatcccgctcgaactcgaccaaaataacgaaaattccgaacaccatacgaccgaacgcaatcgtaatatcgatctaaacgccctttccaatcaaaacccgcaaaccgatcttacgatctaacaactccttcaccgtattaaccaaataaacaaacgatcgtccgaaacgatcgaacttccaaaccaccaacacatcgccgtcacgcaataacttaaaacaaacaatcaaaccaaaacgatcatcacgaccgccgaaaacaaaatcatcataaatattatcccgtttatcaacgacgattaaaaactaata

SEQ ID NO: 24117 - DNA, 1542 bp, Artificial Sequence
  chemically treated genomic DNA (Homo sapiens) CpG-island No: 24117
cgagcggcgaaatatgggttaagagatcgggcgatagtagttttttatcgcgtttttggtttgtaacgatttcgtcgagttttatggtgttttagaagatgatgatggcggcgagtagatttatgtcggcgatgcggtaatgttggttttcggcggaacggtcgcggattttatcgcggcggtggaagttgattgttcgttttagcgtatgatgagtttcgtttttgttgagttcgatttgggtacgtcgttggagttcggtatttagaatttagtcgattatgaatagggtgcgttcgacgcgatcgatttttcgtagggttgtcgcgagttcgttttgtcgcggataggaggcgagttttcgtagaatttggtttggcgcgacggtttcggtagtaatggtggcggcgatgcgtaggatgtcgggttaattgcgttcgattatggtttggttgattttttcgtcgattaacgttcgtaggtgcgtcggggcggtcgacggattgaacgcgtagagtcgtttggatggtaggtcgcggatgcgcggagcgaatcggtagtcgagaatggtatatgcggtaaagacgtgatcggtgaagtcgttcgtgtcggtgaattgttcgcggatattgcgtttagtatcgtttattagtaggttatcgaggatgtaaggcgtttcgtttgtcgttgtaggaattatttgggttgcgaacggcgtatattggtcggagacgtggttataggtttttaggttcggggtattgttatatttcgcgttgattaggtttatggttttattttgttttgtagcgacgaagaattgttcgtcgttcgaagtcgacgtgtttatgttttagaatcgggttatgggtaacgttgtttgtgtttcgattattatggttagcgttcggttataggtttcgttttcgatatgttatcgtttaatgcggattaatttttagaaggtgtgggtgtttgtcgtattcgttattttgcgtaagtcgaggttgatttttttcgttaagataacgtttattagttcgattcggttagcgtagggtgtttttgtgcgtagatgggtgaacgtttcggtgaagtcggtcgtcgtatttatttttagtaggagatcggtgatgcgcgtgggcgggatttgtttgtagagatcgagtattagattttcggcgtttgtcggcgcggcggtttcgagtttttcgatatgtagaacgtcgtttttaatcgattcgttcgggatcgtgtttgcgcgagcggtacggttaagttcgcgtaatcgtatgtcgaggcgagtttgtcggtttgttagttattttttcggtcgtaatggtatagcgagacgatcgtttttcgcgatggattgtgtcggaacgagtgcgtgttttagatcgttatagcgtcgggatttagtaagttagatattttcggagcggaacgtatggttttgtcgtaaattttttaggttaattcgatgttgattatggggagagaagttgtcgtttttgatattgcggagcgagtcgatgattt

SEQ ID NO: 24118 - DNA, 1542 bp, Artificial Sequence
  chemically treated genomic DNA (Homo sapiens) CpG-island No: 24118
aaatcatcgactcgctccgcaatatcaaaaacgacaacttctctccccataatcaacatcgaattaacctaaaaaatttacgacaaaaccatacgttccgctccgaaaatatctaacttactaaatcccgacgctataacgatctaaaacacgcactcgttccgacacaatccatcgcgaaaaacgatcgtctcgctataccattacgaccgaaaaaataactaacaaaccgacaaactcgcctcgacatacgattacgcgaacttaaccgtaccgctcgcgcaaacacgatcccgaacgaatcgattaaaaacgacgttctacatatcgaaaaactcgaaaccgccgcgccgacaaacgccgaaaatctaatactcgatctctacaaacaaatcccgcccacgcgcatcaccgatctcctactaaaaataaatacgacgaccgacttcaccgaaacgttcacccatctacgcacaaaaacaccctacgctaaccgaatcgaactaataaacgttatcttaacgaaaaaaatcaacctcgacttacgcaaaataacgaatacgacaaacacccacaccttctaaaaattaatccgcattaaacgataacatatcgaaaacgaaacctataaccgaacgctaaccataataatcgaaacacaaacaacgttacccataacccgattctaaaacataaacacgtcgacttcgaacgacgaacaattcttcgtcgctacaaaacaaaataaaaccataaacctaatcaacgcgaaatataacaataccccgaacctaaaaacctataaccacgtctccgaccaatatacgccgttcgcaacccaaataattcctacaacgacaaacgaaacgccttacatcctcgataacctactaataaacgatactaaacgcaatatccgcgaacaattcaccgacacgaacgacttcaccgatcacgtctttaccgcatataccattctcgactaccgattcgctccgcgcatccgcgacctaccatccaaacgactctacgcgttcaatccgtcgaccgccccgacgcacctacgaacgttaatcgacgaaaaaatcaaccaaaccataatcgaacgcaattaacccgacatcctacgcatcgccgccaccattactaccgaaaccgtcgcgccaaaccaaattctacgaaaactcgcctcctatccgcgacaaaacgaactcgcgacaaccctacgaaaaatcgatcgcgtcgaacgcaccctattcataatcgactaaattctaaataccgaactccaacgacgtacccaaatcgaactcaacaaaaacgaaactcatcatacgctaaaacgaacaatcaacttccaccgccgcgataaaatccgcgaccgttccgccgaaaaccaacattaccgcatcgccgacataaatctactcgccgccatcatcatcttctaaaacaccataaaactcgacgaaatcgttacaaaccaaaaacgcgataaaaaactactatcgcccgatctcttaacccatatttcgccgctcg

SEQ ID NO: 24119 - DNA, 1542 bp, Artificial Sequence
  chemically treated genomic DNA (Homo sapiens) CpG-island No: 24119
aaattatcggttcgtttcgtaatattaggagcggtaatttttttttttatggttaatatcgagttaatttgaagaatttgcgataaggttatgcgtttcgtttcggagatgtttggtttattaggtttcggcgttatggcgatttgaaatacgtattcgtttcggtataatttatcgcggaaggcggtcgtttcgttgtgttattgcggtcggaggaatggttggtagatcggtaagttcgtttcgatatgcggttgcgcgagtttggtcgtgtcgttcgcgtaggtacgatttcgggcgggtcgattgaaaacggcgttttgtatatcgagaaattcgaagtcgtcgcgtcgataggcgtcgaagatttggtgttcgatttttataagtagatttcgtttacgcgtattatcgattttttgttggaggtggatgcggcgatcggttttatcgaagcgtttatttatttgcgtataggagtattttgcgttgatcggatcgggttaatgaacgttattttggcggaagggattaatttcggtttgcgtaaaatggcggatgcgataaatatttatattttttgggaattgattcgtattggacggtggtatgtcgagggcgaagtttatgatcgggcgttggttatggtggtcgaggtataggtagcgttatttatggttcggttttggggtatgggtacgtcggtttcgagcgacggatagtttttcgtcgttatagagtaaggtgaggttatgaatttggttaacgcgaaatatggtaatatttcgggtttgaaagtttatagttacgttttcgattaatatgcgtcgttcgtaatttaggtgatttttgtaacggtaagcgaagcgttttatattttcgatggtttgttgatgaacgatgttggacgtaatattcgcgagtagtttatcgatacgggcggttttatcgattacgtttttgtcgtatgtgttattttcggttatcggttcgtttcgcgtattcgcgatttgttatttaaacggttttacgcgtttaattcgtcggtcgtttcggcgtatttgcgagcgttgatcggcggaaaggttaattaagttatgatcgagcgtaattggttcgatattttgcgtatcgtcgttattattgttgtcgggatcgtcgcgttaagttagattttgcggaaattcgttttttattcgcggtagaacgagttcgcgatagttttgcgggaagtcggtcgcgtcgagcgtattttgtttatgatcgattggattttggatgtcgaattttaacggcgtgtttagatcgggtttaataaaggcgaagtttattatgcgttgaagcgggtaattagtttttatcgtcgcggtgaaattcgcgatcgtttcgtcgaaggttagtattatcgtatcgtcggtatgaatttgttcgtcgttattattattttttggaatattatgaagttcggcgaggtcgttgtaaattagaaacgcgatggaaagttgttatcgttcgattttttggtttatgtttcgtcgttcg

SEQ ID NO: 24120 - DNA, 1542 bp, Artificial Sequence
  chemically treated genomic DNA (Homo sapiens) CpG-island No: 24120
cgaacgacgaaacataaaccaaaaaatcgaacgataacaactttccatcgcgtttctaatttacaacgacctcgccgaacttcataatattccaaaaaataataataacgacgaacaaattcataccgacgatacgataatactaaccttcgacgaaacgatcgcgaatttcaccgcgacgataaaaactaattacccgcttcaacgcataataaacttcgcctttattaaacccgatctaaacacgccgttaaaattcgacatccaaaatccaatcgatcataaacaaaatacgctcgacgcgaccgacttcccgcaaaactatcgcgaactcgttctaccgcgaataaaaaacgaatttccgcaaaatctaacttaacgcgacgatcccgacaacaataataacgacgatacgcaaaatatcgaaccaattacgctcgatcataacttaattaacctttccgccgatcaacgctcgcaaatacgccgaaacgaccgacgaattaaacgcgtaaaaccgtttaaataacaaatcgcgaatacgcgaaacgaaccgataaccgaaaataacacatacgacaaaaacgtaatcgataaaaccgcccgtatcgataaactactcgcgaatattacgtccaacatcgttcatcaacaaaccatcgaaaatataaaacgcttcgcttaccgttacaaaaatcacctaaattacgaacgacgcatattaatcgaaaacgtaactataaactttcaaacccgaaatattaccatatttcgcgttaaccaaattcataacctcaccttactctataacgacgaaaaactatccgtcgctcgaaaccgacgtacccataccccaaaaccgaaccataaataacgctacctatacctcgaccaccataaccaacgcccgatcataaacttcgccctcgacataccaccgtccaatacgaatcaattcccaaaaaatataaatatttatcgcatccgccattttacgcaaaccgaaattaatcccttccgccaaaataacgttcattaacccgatccgatcaacgcaaaatactcctatacgcaaataaataaacgcttcgataaaaccgatcgccgcatccacctccaacaaaaaatcgataatacgcgtaaacgaaatctacttataaaaatcgaacaccaaatcttcgacgcctatcgacgcgacgacttcgaatttctcgatatacaaaacgccgttttcaatcgacccgcccgaaatcgtacctacgcgaacgacacgaccaaactcgcgcaaccgcatatcgaaacgaacttaccgatctaccaaccattcctccgaccgcaataacacaacgaaacgaccgccttccgcgataaattataccgaaacgaatacgtatttcaaatcgccataacgccgaaacctaataaaccaaacatctccgaaacgaaacgcataaccttatcgcaaattcttcaaattaactcgatattaaccataaaaaaaaaaattaccgctcctaatattacgaaacgaaccgataattt

SEQ ID NO: 24121 - DNA, 725 bp, Artificial Sequence
  chemically treated genomic DNA (Homo sapiens) CpG-island No: 24121
gcgttagtcgaaggatgattttaagggtaggtatttcgaggtttggttgattgtataggcggttgtttggtatttgcgttattcgtttagttatcgtgatttggaagagatgtttcgcgagcggggtttcgaggtcgattatagtacgattaatcgttgggtattggtttatgtatttgttatcgagaaacggttgcggtagtttcgtcgattttattgcggttcggttcggattgatgagatttatgttaagattcgcggtaaatggcgttatttgtatcgagttatcgataagtatggtaattcggtggattttttgttgatcgttaagcgcgatttcgacgttgttaagcggttttttcgaaagatgtttaaagatgaatttttgttgtcgtcgaataggattgggacggacggggttaatattttttcgttaacgattaaaacgtcggttgatgatgggtttttttatttcgatttcgtgtattatgtgattaaatatttttagtaggggattgagagcgattattttcgggtgaagaagaatatgtcgaagatcggcggtttttaattttttaatacggcgcggcgaattatcgcgggtttcgaggcgatgttgtggttgcggaagggttttggttttttaggcggttggatcgttaatgattagaatgatttgtttgcgcgttttttcggattgtaaaaggttaataaagtatgaaaat

SEQ ID NO: 24122 - DNA, 725 bp, Artificial Sequence
  chemically treated genomic DNA (Homo sapiens) CpG-island No: 24122
attttcatactttattaaccttttacaatccgaaaaaacgcgcaaacaaatcattctaatcattaacgatccaaccgcctaaaaaaccaaaacccttccgcaaccacaacatcgcctcgaaacccgcgataattcgccgcgccgtattaaaaaattaaaaaccgccgatcttcgacatattcttcttcacccgaaaataatcgctctcaatcccctactaaaaatatttaatcacataatacacgaaatcgaaataaaaaaacccatcatcaaccgacgttttaatcgttaacgaaaaaatattaaccccgtccgtcccaatcctattcgacgacaacaaaaattcatctttaaacatctttcgaaaaaaccgcttaacaacgtcgaaatcgcgcttaacgatcaacaaaaaatccaccgaattaccatacttatcgataactcgatacaaataacgccatttaccgcgaatcttaacataaatctcatcaatccgaaccgaaccgcaataaaatcgacgaaactaccgcaaccgtttctcgataacaaatacataaaccaatacccaacgattaatcgtactataatcgacctcgaaaccccgctcgcgaaacatctcttccaaatcacgataactaaacgaataacgcaaataccaaacaaccgcctatacaatcaaccaaacctcgaaatacctacccttaaaatcatccttcgactaacgc

SEQ ID NO: 24123 - DNA, 725 bp, Artificial Sequence
  chemically treated genomic DNA (Homo sapiens) CpG-island No: 24123
atttttatgttttgttaattttttgtagttcgaagaggcgcgtaagtaaattattttggttattgacggtttagtcgtttgaaaagttaaagttttttcgtagttatagtatcgtttcgaaattcgcgatggttcgtcgcgtcgtgttaaaggattggaaatcgtcgattttcggtatgtttttttttattcggaaatggtcgtttttaattttttgttggagatgtttggttatataatgtacgggatcgggatggagaagtttattattaatcgacgttttgatcgttgacgggaaggtgttggtttcgttcgttttaattttgttcggcgataataagggtttatttttaagtatttttcggaagaatcgtttggtagcgtcgagatcgcgtttagcggttagtaggaaatttatcggattgttatgtttatcgatggttcggtatagatagcgttatttgtcgcggattttgatataggttttattaattcggatcgagtcgtaatggggtcgacgaaattgtcgtagtcgtttttcgatgataggtgtataagttaatatttagcggttgatcgtgttatgatcgatttcgaagtttcgttcgcgaaatattttttttaagttacgatagttgagcgggtagcgtaagtattaggtaatcgtttgtataattagttaggtttcgaaatgtttgtttttgaaattatttttcgattggcgt

SEQ ID NO: 24124 - DNA, 725 bp, Artificial Sequence
  chemically treated genomic DNA (Homo sapiens) CpG-island No: 24124
acgccaatcgaaaaataatttcaaaaacaaacatttcgaaacctaactaattatacaaacgattacctaatacttacgctacccgctcaactatcgtaacttaaaaaaaatatttcgcgaacgaaacttcgaaatcgatcataacacgatcaaccgctaaatattaacttatacacctatcatcgaaaaacgactacgacaatttcgtcgaccccattacgactcgatccgaattaataaaacctatatcaaaatccgcgacaaataacgctatctataccgaaccatcgataaacataacaatccgataaatttcctactaaccgctaaacgcgatctcgacgctaccaaacgattcttccgaaaaatacttaaaaataaacccttattatcgccgaacaaaattaaaacgaacgaaaccaacaccttcccgtcaacgatcaaaacgtcgattaataataaacttctccatcccgatcccgtacattatataaccaaacatctccaacaaaaaattaaaaacgaccatttccgaataaaaaaaaacataccgaaaatcgacgatttccaatcctttaacacgacgcgacgaaccatcgcgaatttcgaaacgatactataactacgaaaaaactttaacttttcaaacgactaaaccgtcaataaccaaaataatttacttacgcgcctcttcgaactacaaaaaattaacaaaacataaaaat

SEQ ID NO: 24125 - DNA, 980 bp, Artificial Sequence
  chemically treated genomic DNA (Homo sapiens) CpG-island No: 24125
gatacgttcggaataatttagttattgtatttatgtttcgagttggtgtggtttgcggatcgtatgtcggtatttcgttgcgtaagatttgtatttaatcggtaggtacgggcggcgatttttaatttgcgggattagttagattattcgagtgcgtgggtatgataatcgtgttttggggattaatataatttagaagggtttgaattattgcgatcggttttttcgcgatttagtcgagcgagtttagcgaattgtggacgagaattgtgttattaagcgtaaggtcgttttttcgtatttgttttgttaggttcgcgcgagttgttggttgaggcgttttcgaaattagtttttgttcggtcggtatttattttatttttttgttttcggacgagtgttggggcgtcggtttttattatcggcgagtatttttatatagttatcggtttagacggtcgcgtttttgcgggcgatttgtgtacgttcgatagtttcggtttcggatcggacgattgcgtcgtatcgattttgcgtttaagttgtattatcgaaattgtcgttaattaagttttgatagagttggttaagattaatgcggagtatatacgttcggagtcgcggcgattttgtaagtttcggatgttttcgttcgaagtagcgcgtttgttgttttatataagttaattacggtttttagaagaagatgttggcgatttcgtattgggaattttcgaatatcgtttcgttttagttaatgatcgttgttatgcggttattgttcgttaggatattgttggagtcgaaattcgcgtgtacgaggtgtcggatttcggggtagttttcggtttaaagtattagtttatcgagagtttgcgcgacggacgtattgacggtgtcgtttattatagtttgttagtgatatatatggggattagtaatcgcgtatatgaaattacgttatgtagtgtattgatcga

SEQ ID NO: 24126 - DNA, 980 bp, Artificial Sequence
  chemically treated genomic DNA (Homo sapiens) CpG-island No: 24126
tcgatcaatacactacataacgtaatttcatatacgcgattactaatccccatatatatcactaacaaactataataaacgacaccgtcaatacgtccgtcgcgcaaactctcgataaactaatactttaaaccgaaaactaccccgaaatccgacacctcgtacacgcgaatttcgactccaacaatatcctaacgaacaataaccgcataacaacgatcattaactaaaacgaaacgatattcgaaaattcccaatacgaaatcgccaacatcttcttctaaaaaccgtaattaacttatataaaacaacaaacgcgctacttcgaacgaaaacatccgaaacttacaaaatcgccgcgactccgaacgtatatactccgcattaatcttaaccaactctatcaaaacttaattaacgacaatttcgataatacaacttaaacgcaaaatcgatacgacgcaatcgtccgatccgaaaccgaaactatcgaacgtacacaaatcgcccgcaaaaacgcgaccgtctaaaccgataactatataaaaatactcgccgataataaaaaccgacgccccaacactcgtccgaaaacaaaaaaataaaataaataccgaccgaacaaaaactaatttcgaaaacgcctcaaccaacaactcgcgcgaacctaacaaaacaaatacgaaaaaacgaccttacgcttaataacacaattctcgtccacaattcgctaaactcgctcgactaaatcgcgaaaaaaccgatcgcaataattcaaacccttctaaattatattaatccccaaaacacgattatcatacccacgcactcgaataatctaactaatcccgcaaattaaaaatcgccgcccgtacctaccgattaaatacaaatcttacgcaacgaaataccgacatacgatccgcaaaccacaccaactcgaaacataaatacaataactaaattattccgaacgtatc

SEQ ID NO: 24127 - DNA, 980 bp, Artificial Sequence
  chemically treated genomic DNA (Homo sapiens) CpG-island No: 24127
tcggttaatatattatatggcgtgattttatatgcgcgattgttgatttttatgtgtattattggtaaattgtgatggacgatatcgttagtgcgttcgtcgcgtaggttttcgatgagttgatgttttgggtcgaggattgtttcgaagttcggtatttcgtgtacgcggatttcggttttaataatgttttgacggataatggtcgtataatagcggttattgattggagcgaggcgatgttcggggatttttaatacgaggtcgttaatatttttttttggaggtcgtggttggtttgtatggagtagtagacgcgttatttcgagcggaggtattcggagtttgtaggatcgtcgcggtttcgggcgtatatgtttcgtattggttttgattaattttattagagtttggttgacggtaatttcgatgatgtagtttgggcgtagggtcgatgcgacgtaatcgttcgattcggagtcgggattgtcgggcgtatataaatcgttcgtagaagcgcggtcgtttggatcgatggttgtgtagaagtattcgtcgatagtggaaatcgacgttttagtattcgttcgagggtaaaggaatagagtagatgtcgatcgaataagagttgatttcgagaacgttttagttagtaattcgcgcgagtttagtaaggtaaatgcgagagaacggttttacgtttggtggtatagttttcgtttatagttcgttaagttcgttcggttgggtcgcgggagggtcggtcgtagtgatttaggtttttttggattgtgttggtttttagggtacgattgttatgtttacgtattcgggtgatttgattgatttcgtagattggagatcgtcgttcgtgtttgtcgattgggtgtagattttgcgtaacgagatgtcggtatacgattcgtaaattatattaattcggaatatgggtgtagtggttgaattgtttcgggcgtgtt

SEQ ID NO: 24128 - DNA, 980 bp, Artificial Sequence
  chemically treated genomic DNA (Homo sapiens) CpG-island No: 24128
aacacgcccgaaacaattcaaccactacacccatattccgaattaatataatttacgaatcgtataccgacatctcgttacgcaaaatctacacccaatcgacaaacacgaacgacgatctccaatctacgaaatcaatcaaatcacccgaatacgtaaacataacaatcgtaccctaaaaaccaacacaatccaaaaaaacctaaatcactacgaccgaccctcccgcgacccaaccgaacgaacttaacgaactataaacgaaaactataccaccaaacgtaaaaccgttctctcgcatttaccttactaaactcgcgcgaattactaactaaaacgttctcgaaatcaactcttattcgatcgacatctactctattcctttaccctcgaacgaatactaaaacgtcgatttccactatcgacgaatacttctacacaaccatcgatccaaacgaccgcgcttctacgaacgatttatatacgcccgacaatcccgactccgaatcgaacgattacgtcgcatcgaccctacgcccaaactacatcatcgaaattaccgtcaaccaaactctaataaaattaatcaaaaccaatacgaaacatatacgcccgaaaccgcgacgatcctacaaactccgaatacctccgctcgaaataacgcgtctactactccatacaaaccaaccacgacctccaaaaaaaaatattaacgacctcgtattaaaaatccccgaacatcgcctcgctccaatcaataaccgctattatacgaccattatccgtcaaaacattattaaaaccgaaatccgcgtacacgaaataccgaacttcgaaacaatcctcgacccaaaacatcaactcatcgaaaacctacgcgacgaacgcactaacgatatcgtccatcacaatttaccaataatacacataaaaatcaacaatcgcgcatataaaatcacgccatataatatattaaccga

SEQ ID NO: 24129 - DNA, 531 bp, Artificial Sequence
  chemically treated genomic DNA (Homo sapiens) CpG-island No: 24129
tttttcgagagttgtattaggtcggagacgttgtcgaatttttcgattagaaatttttcgatagacgtcgcggtgagtttaggtttttttatattttattgttttcggacgagcgtttgtttcgttattcgtcgttcgtcgtgttaatcggattagtcgtttaaatgcgggattttcgttagtcggaggttaaacggtattgagcgttagtatattattagcgagttgaagaaagataattttcgattcgttttacgtgttgttttagtaattagcgcgattttgtttttttaacgttatttcgtttttcgtttatgagtttagttaatcgattggcgagcggtatcgtatttttcgtatttcgtttttggcggatgtaggaagattaacggatttcggtttagttgatttagggttgtcgttataatgtcgcgggagcggattaatcgagtaaaggtatgatcgattggattttttttttgaaggtttttttttttgagttatttgttcgttaaggtaaagcgtttatag

SEQ ID NO: 24130 - DNA, 531 bp, Artificial Sequence
  chemically treated genomic DNA (Homo sapiens) CpG-island No: 24130
ctataaacgctttaccttaacgaacaaataactcaaaaaaaaaaaccttcaaaaaaaaaatccaatcgatcatacctttactcgattaatccgctcccgcgacattataacgacaaccctaaatcaactaaaccgaaatccgttaatcttcctacatccgccaaaaacgaaatacgaaaaatacgataccgctcgccaatcgattaactaaactcataaacgaaaaacgaaataacgttaaaaaaacaaaatcgcgctaattactaaaacaacacgtaaaacgaatcgaaaattatctttcttcaactcgctaataatatactaacgctcaataccgtttaacctccgactaacgaaaatcccgcatttaaacgactaatccgattaacacgacgaacgacgaataacgaaacaaacgctcgtccgaaaacaataaaatataaaaaaacctaaactcaccgcgacgtctatcgaaaaatttctaatcgaaaaattcgacaacgtctccgacctaatacaactctcgaaaaa

SEQ ID NO: 24131 - DNA, 531 bp, Artificial Sequence
  chemically treated genomic DNA (Homo sapiens) CpG-island No: 24131
ttgtgagcgttttgttttggcggataggtggtttaaggagaagagtttttagaaggaaggtttagtcggttatgtttttgttcggttgattcgttttcgcgatattgtggcgatagttttgggttaattgggtcgagattcgttgatttttttgtattcgttagaggcgggatgcgaagaatgcgatgtcgttcgttagtcgattggttgagtttatgagcggagaacgagatgacgttggaggggtaaggtcgcgttgattgttggggtaatacgtggagcggatcggggattgtttttttttagttcgttgatgatatgttgacgtttaatgtcgtttggttttcgattaacgaaaatttcgtatttggacggttgattcgattggtacggcggacggcgaatggcggagtagacgttcgttcgggggtaatgagatatgaaaaagtttgaatttatcgcgacgtttgtcgagaagtttttgatcgaaaagttcgatagcgttttcgatttgatgtagttttcggaggg

SEQ ID NO: 24132 - DNA, 531 bp, Artificial Sequence
  chemically treated genomic DNA (Homo sapiens) CpG-island No: 24132
ccctccgaaaactacatcaaatcgaaaacgctatcgaacttttcgatcaaaaacttctcgacaaacgtcgcgataaattcaaactttttcatatctcattacccccgaacgaacgtctactccgccattcgccgtccgccgtaccaatcgaatcaaccgtccaaatacgaaattttcgttaatcgaaaaccaaacgacattaaacgtcaacatatcatcaacgaactaaaaaaaaacaatccccgatccgctccacgtattaccccaacaatcaacgcgaccttacccctccaacgtcatctcgttctccgctcataaactcaaccaatcgactaacgaacgacatcgcattcttcgcatcccgcctctaacgaatacaaaaaaatcaacgaatctcgacccaattaacccaaaactatcgccacaatatcgcgaaaacgaatcaaccgaacaaaaacataaccgactaaaccttccttctaaaaactcttctccttaaaccacctatccgccaaaacaaaacgctcacaa

SEQ ID NO: 24133 - DNA, 1432 bp, Artificial Sequence
  chemically treated genomic DNA (Homo sapiens) CpG-island No: 24133
  unsure (50)
ttgggtttgttggtttggtaggattttatgttcggcggcggtatgtagtncggttacgattcggtttttcgtgttagcgtgatggtcgaggcgcgcgataacgtgcgtcggttgcgttattattttagtatcgtgttgtggtgtggtaataacgaggaagaaatcgtttggaaggattggggttacggtcgcgatttgaaggcggtcgattcggcgtttgtagcgaaggtgtggtagggttatgtcgatttggttcggtaacgatttgcgttaggtggtgggtgaggaggggttgggcgtgtcgtattggtttagttcgtttagtaatgatttggacgagaaagttaacgattttattcgcggcgatagtattattggtaggtttggggtaattcggcgttgtcggtgtaggtttatttgcgcgagattttacgttttatgttcgagtacgggttgtaggcgtggtcgtcggtggcgacggtggattagatcgtatattcgtgtcgagtagcgtatcgatagttcggttattcgcgcgtattagaaatttatggtcggcgagggtaatagtcgtttgttgtattatatcgaattgggttacggtacgttaaaggatttcgaggatttcgtttatttgagttaggtgatgtaggtcgatggtatcgttttggcggcgttgtattatcgcgtttcgcgttcgtatacgatgggttcgttgtattggtagtttaacgatgtttggtcgggcgttttatggtttagcgtggattatttcggtcgttggaaggcgttgtattttgtcgcgcggcgttttttcgcgtcggtgacggtggttgcgttgcgcgacgagggtaatacgcgggtgcgtttgattaatgatggcgtcgcgcgggaggtacgtttgcggttgcgggtgatggacgaggcgattattcgcgatttgtgtcggggtttttattcgggtgaggtcgcgtcggacgtgttgttgtgcgtgattgacgttattaatttgcgtttgtatttgcgtttcgcgttggaattgcgcgaattgggtaagtcgatggtggtggttttgaatatggtcgatgtcgtttagcgtcgtggtatttaggtggatgtggtcgcgttggagcgcgagttgggcgtgtcggtggtggagatcgtggcggtgcgtaagtagggtgttaaggttttggtcgagcgtttggacgcgatggtgtcgtatttggatgtatcggtgtcgggttcggaaggcggtatcgattattacgttaaggtgcgttagatttttgcggtggtcgtgcgtatgtcgtacgtatcgcgaagatcgatgacgcgttggaatcgttgtgttgttggtatttcggtgttcgggtttggttagtttgttcgtggttatgttttttgattttttatagcgggttattttggg

SEQ ID NO: 24134 - DNA, 1432 bp, Artificial Sequence
  chemically treated genomic DNA (Homo sapiens) CpG-island No: 24134
  unsure (1383)
cccaaaataacccgctataaaaaatcaaaaaacataaccacgaacaaactaaccaaacccgaacaccgaaataccaacaacacaacgattccaacgcgtcatcgatcttcgcgatacgtacgacatacgcacgaccaccgcaaaaatctaacgcaccttaacgtaataatcgataccgccttccgaacccgacaccgatacatccaaatacgacaccatcgcgtccaaacgctcgaccaaaaccttaacaccctacttacgcaccgccacgatctccaccaccgacacgcccaactcgcgctccaacgcgaccacatccacctaaataccacgacgctaaacgacatcgaccatattcaaaaccaccaccatcgacttacccaattcgcgcaattccaacgcgaaacgcaaatacaaacgcaaattaataacgtcaatcacgcacaacaacacgtccgacgcgacctcacccgaataaaaaccccgacacaaatcgcgaataatcgcctcgtccatcacccgcaaccgcaaacgtacctcccgcgcgacgccatcattaatcaaacgcacccgcgtattaccctcgtcgcgcaacgcaaccaccgtcaccgacgcgaaaaaacgccgcgcgacaaaatacaacgccttccaacgaccgaaataatccacgctaaaccataaaacgcccgaccaaacatcgttaaactaccaatacaacgaacccatcgtatacgaacgcgaaacgcgataatacaacgccgccaaaacgataccatcgacctacatcacctaactcaaataaacgaaatcctcgaaatcctttaacgtaccgtaacccaattcgatataatacaacaaacgactattaccctcgccgaccataaatttctaatacgcgcgaataaccgaactatcgatacgctactcgacacgaatatacgatctaatccaccgtcgccaccgacgaccacgcctacaacccgtactcgaacataaaacgtaaaatctcgcgcaaataaacctacaccgacaacgccgaattaccccaaacctaccaataatactatcgccgcgaataaaatcgttaactttctcgtccaaatcattactaaacgaactaaaccaatacgacacgcccaacccctcctcacccaccacctaacgcaaatcgttaccgaaccaaatcgacataaccctaccacaccttcgctacaaacgccgaatcgaccgccttcaaatcgcgaccgtaaccccaatccttccaaacgatttcttcctcgttattaccacaccacaacacgatactaaaataataacgcaaccgacgcacgttatcgcgcgcctcgaccatcacgctaacacgaaaaaccgaatcgtaaccgnactacataccgccgccgaacataaaatcctaccaaaccaacaaacccaa

SEQ ID NO: 24135 - DNA, 1432 bp, Artificial Sequence
  chemically treated genomic DNA (Homo sapiens) CpG-island No: 24135
  unsure (1383)
tttagggtaattcgttgtggaagattaaggaatataattacggataggttgattaggttcgaatatcggggtgttagtagtatagcggttttagcgcgttatcgattttcgcggtacgtgcggtatgcgtacggttatcgtaaggatttggcgtattttggcgtggtagtcgatgtcgtttttcgggttcggtatcggtgtatttaggtgcggtattatcgcgtttaggcgttcgattagggttttggtattttgtttgcgtatcgttacggtttttattatcggtacgtttagttcgcgttttagcgcggttatatttatttggatgttacggcgttgggcggtatcgattatgtttagggttattattatcggtttgtttagttcgcgtagttttagcgcgaaacgtaggtgtaggcgtaggttggtggcgttaattacgtatagtagtacgttcggcgcggttttattcgggtagaagtttcggtataggtcgcgggtgatcgtttcgtttattattcgtagtcgtaaacgtgtttttcgcgcggcgttattattgattaggcgtattcgcgtattgttttcgtcgcgtagcgtagttatcgttatcggcgcgaagaaacgtcgcgcggtaaagtgtagcgttttttagcggtcgaagtagtttacgttggattatgaagcgttcggttagatatcgttgagttgttagtatagcgaatttatcgtgtacggacgcgaggcgcggtgatgtagcgtcgttagggcgatgttatcggtttgtattatttggtttaggtagacgaagttttcgaagttttttggcgtgtcgtagtttagttcgatgtaatgtagtaggcggttgttgttttcgtcggttatgaatttttggtgcgcgcggatgatcgggttgtcgatgcgttgttcggtacgggtgtgcgatttggtttatcgtcgttatcgacggttacgtttgtagttcgtattcggatatgaagcgtggggtttcgcgtagataggtttgtatcggtagcgtcggattgttttagatttgttagtaatgttgtcgtcgcgggtggaatcgttggttttttcgtttagattattgttgggcgagttggattagtacggtacgtttagtttttttttatttattatttggcgtaggtcgttgtcgaattaggtcgatatagttttgttatattttcgttgtaaacgtcgggtcggtcgtttttaggtcgcgatcgtggttttagtttttttaggcggtttttttttcgttgttattatattatagtacgatgttggggtgatggcgtagtcggcgtacgttgtcgcgcgtttcggttattacgttggtacggaaggtcggatcgtaatcgngttgtatgtcgtcgtcgaatatgaagttttgttagattagtaggtttag

SEQ ID NO: 24136 - DNA, 1432 bp, Artificial Sequence
  chemically treated genomic DNA (Homo sapiens) CpG-island No: 24136
  unsure (50)
ctaaacctactaatctaacaaaacttcatattcgacgacgacatacaacncgattacgatccgaccttccgtaccaacgtaataaccgaaacgcgcgacaacgtacgccgactacgccatcaccccaacatcgtactataatataataacaacgaaaaaaaaaccgcctaaaaaaactaaaaccacgatcgcgacctaaaaacgaccgacccgacgtttacaacgaaaatataacaaaactatatcgacctaattcgacaacgacctacgccaaataataaataaaaaaaaactaaacgtaccgtactaatccaactcgcccaacaataatctaaacgaaaaaaccaacgattccacccgcgacgacaacattactaacaaatctaaaacaatccgacgctaccgatacaaacctatctacgcgaaaccccacgcttcatatccgaatacgaactacaaacgtaaccgtcgataacgacgataaaccaaatcgcacacccgtaccgaacaacgcatcgacaacccgatcatccgcgcgcaccaaaaattcataaccgacgaaaacaacaaccgcctactacattacatcgaactaaactacgacacgccaaaaaacttcgaaaacttcgtctacctaaaccaaataatacaaaccgataacatcgccctaacgacgctacatcaccgcgcctcgcgtccgtacacgataaattcgctatactaacaactcaacgatatctaaccgaacgcttcataatccaacgtaaactacttcgaccgctaaaaaacgctacactttaccgcgcgacgtttcttcgcgccgataacgataactacgctacgcgacgaaaacaatacgcgaatacgcctaatcaataataacgccgcgcgaaaaacacgtttacgactacgaataataaacgaaacgatcacccgcgacctataccgaaacttctacccgaataaaaccgcgccgaacgtactactatacgtaattaacgccaccaacctacgcctacacctacgtttcgcgctaaaactacgcgaactaaacaaaccgataataataaccctaaacataatcgataccgcccaacgccgtaacatccaaataaatataaccgcgctaaaacgcgaactaaacgtaccgataataaaaaccgtaacgatacgcaaacaaaataccaaaaccctaatcgaacgcctaaacgcgataataccgcacctaaatacaccgataccgaacccgaaaaacgacatcgactaccacgccaaaatacgccaaatccttacgataaccgtacgcataccgcacgtaccgcgaaaatcgataacgcgctaaaaccgctatactactaacaccccgatattcgaacctaatcaacctatccgtaattatattccttaatcttccacaacgaattaccctaaa

SEQ ID NO: 24137 - DNA, 932 bp, Artificial Sequence
  chemically treated genomic DNA (Homo sapiens) CpG-island No: 24137
ttggtcgagaaggtttcggagtggaagggcgaggcggttttcgaggacgagaagtcggcgtggttgtcgattacggtggatacgttggtcgaacgtatttaggtgcgtattaatggcgtcgtcgacgttaattcgattaatttgttggcgttggcgttgttgtttacgtcgaatacgcgatgggcgaggtcgatttgatcgcgtagatcgagttgtgtaagattttgttggtcgagatgtcgtattcggatcgggtgacggtgatttcgtattcgtcggaacggattatcgtttacgtcgaggaaattaacgtttttattcgtattaagtattcgttgggcgacgtgtttagcgttagcggcgatatcgcggtgttgttgagttattttcgtaataacgtgttgtatttgtttatcgtttcgtcgtgggtgtgtttgttgtttttagaataatcgtcgtatgagtcgtatcggtttggtttagttgggtcgtacggtgtattcgtttttgtaggtcgagttgtttttgtcgtggagcgaagacgagttcgcgtagcgtatcgattagattattaacgtgttcgtgcgcgagggtttgttgtagaacgttaacgacgaatacggcgggtattcggcgtcgtatcgttggataagttatgtcgagcgtttgtagaacgtcggcgtgttttggtagatttattaggatatggtcgataattttatcgataattcgttggtcggtttcgaggcgtttcgtcgtgtttatagcgcggtattcgggtatgattcgtagttgcgcgtacgcgttgttagtattcgtggtttgttatagttgcgttaggacgtattcgacgggcgtttgtcgtaggttagttttattatcgtcgatgtcgtcggtagcgaatatttcggttcgtttagttcggtttaggg

SEQ ID NO: 24138 - DNA, 932 bp, Artificial Sequence
  chemically treated genomic DNA (Homo sapiens) CpG-island No: 24138
ccctaaaccgaactaaacgaaccgaaatattcgctaccgacgacatcgacgataataaaactaacctacgacaaacgcccgtcgaatacgtcctaacgcaactataacaaaccacgaatactaacaacgcgtacgcgcaactacgaatcatacccgaataccgcgctataaacacgacgaaacgcctcgaaaccgaccaacgaattatcgataaaattatcgaccatatcctaataaatctaccaaaacacgccgacgttctacaaacgctcgacataacttatccaacgatacgacgccgaatacccgccgtattcgtcgttaacgttctacaacaaaccctcgcgcacgaacacgttaataatctaatcgatacgctacgcgaactcgtcttcgctccacgacaaaaacaactcgacctacaaaaacgaatacaccgtacgacccaactaaaccaaaccgatacgactcatacgacgattattctaaaaacaacaaacacacccacgacgaaacgataaacaaatacaacacgttattacgaaaataactcaacaacaccgcgatatcgccgctaacgctaaacacgtcgcccaacgaatacttaatacgaataaaaacgttaatttcctcgacgtaaacgataatccgttccgacgaatacgaaatcaccgtcacccgatccgaatacgacatctcgaccaacaaaatcttacacaactcgatctacgcgatcaaatcgacctcgcccatcgcgtattcgacgtaaacaacaacgccaacgccaacaaattaatcgaattaacgtcgacgacgccattaatacgcacctaaatacgttcgaccaacgtatccaccgtaatcgacaaccacgccgacttctcgtcctcgaaaaccgcctcgcccttccactccgaaaccttctcgaccaa

SEQ ID NO: 24139 - DNA, 932 bp, Artificial Sequence
  chemically treated genomic DNA (Homo sapiens) CpG-island No: 24139
ttttgggtcgggttggacggatcgggatgttcgttgtcggcggtatcggcgatgatgaagttgatttgcggtaggcgttcgtcgagtacgttttggcgtagttgtggtaggttacgggtgttgatagcgcgtgcgcgtagttgcggattatgttcgggtgtcgcgttgtaggtacgacggaacgtttcgaagtcggttagcgggttgtcggtgaagttgtcggttatgttttggtagatttgttaggatacgtcggcgttttgtaggcgttcgatatagtttgtttagcggtacgacgtcggatgttcgtcgtgttcgtcgttgacgttttgtagtaggttttcgcgtacgaatacgttgatggtttggtcgatgcgttgcgcgaattcgttttcgttttacggtaggaatagttcggtttgtaggaacgggtatatcgtgcggtttagttggattaggtcggtgcggtttatgcggcggttgttttggaagtagtaggtatatttacgacgaggcggtgaataaatgtagtacgttgttgcggaagtagtttagtagtatcgcggtatcgtcgttgacgttgagtacgtcgtttagcggatgtttgatgcgggtgaggacgttgattttttcggcgtgggcgatgattcgtttcggcgagtgcggagttatcgttattcgattcgagtacggtatttcgattagtagggttttgtatagttcgatttgcgcgattaggtcggtttcgtttatcgcgtgttcggcgtggatagtagcgttagcgttagtaggttgatcgggttgacgtcggcggcgttattgatgcgtatttggatgcgttcggttagcgtatttatcgtggtcgatagttacgtcggtttttcgttttcggagatcgtttcgtttttttatttcggggttttttcggttag

SEQ ID NO: 24140 - DNA, 932 bp, Artificial Sequence
  chemically treated genomic DNA (Homo sapiens) CpG-island No: 24140
ctaaccgaaaaaaccccgaaataaaaaaacgaaacgatctccgaaaacgaaaaaccgacgtaactatcgaccacgataaatacgctaaccgaacgcatccaaatacgcatcaataacgccgccgacgtcaacccgatcaacctactaacgctaacgctactatccacgccgaacacgcgataaacgaaaccgacctaatcgcgcaaatcgaactatacaaaaccctactaatcgaaataccgtactcgaatcgaataacgataactccgcactcgccgaaacgaatcatcgcccacgccgaaaaaatcaacgtcctcacccgcatcaaacatccgctaaacgacgtactcaacgtcaacgacgataccgcgatactactaaactacttccgcaacaacgtactacatttattcaccgcctcgtcgtaaatatacctactacttccaaaacaaccgccgcataaaccgcaccgacctaatccaactaaaccgcacgatatacccgttcctacaaaccgaactattcctaccgtaaaacgaaaacgaattcgcgcaacgcatcgaccaaaccatcaacgtattcgtacgcgaaaacctactacaaaacgtcaacgacgaacacgacgaacatccgacgtcgtaccgctaaacaaactatatcgaacgcctacaaaacgccgacgtatcctaacaaatctaccaaaacataaccgacaacttcaccgacaacccgctaaccgacttcgaaacgttccgtcgtacctacaacgcgacacccgaacataatccgcaactacgcgcacgcgctatcaacacccgtaacctaccacaactacgccaaaacgtactcgacgaacgcctaccgcaaatcaacttcatcatcgccgataccgccgacaacgaacatcccgatccgtccaacccgacccaaaa

SEQ ID NO: 24141 - DNA, 847 bp, Artificial Sequence
  chemically treated genomic DNA (Homo sapiens) CpG-island No: 24141
  unsure (54, 216, 270, 368)
agttcgtaatcgagtgtttttatgaaagtgatttgcgtcgggtaaagcgacgtntgtatggcgtttttcgttcggtatgtcgattttaatttttgtttcggtaaaggcgtaaatatatttacggttttcgtttcgatcgttgcgcggatgaaataggtcgtagagtaaatcggacgcgacgttggtttttatgtgttgtttatggtgattgtcgantaaatcgacgatgtcgttcgcgttaaatgggaatattataaagcgggcgcggantaagaggcgttaagttggttaatcgaataaagttagaaagatattcgtttcggtattgatattaacgttcgttagatggtcgattttatttcggcggntaatattaatatggggacgttagtcggtttttacgttagtgtcgcgcgtatgttagatgaagtcgtaagcgtgtttggtgtcgaaggcgtgttgttaattttcgacgattttttgtcgggaatcgaaattttcggcgagcgtatttaattattgatgtaatgtcgcgtttatttatttgcgttgatttaggaggtggtatgatgacgattttaatcgttcgatcggaagttattattttcgattcgtagtaaagtgcgttgatcgtggtggatatgtaaaacgtttatgttacgttaggcggttatttagatttcgtcgggtttgatgttttaattattcgttcggttattgttaatatttaaatcgtcgtgatcgtagcgcgagcggtagggatgttgattatttggttttaaaatggttgggatgaatagtatgtcgaggttggcggattcggtttatcgaatttttataaatcgaa

SEQ ID NO: 24142 - DNA, 847 bp, Artificial Sequence
  chemically treated genomic DNA (Homo sapiens) CpG-island No: 24142
  unsure (480, 578, 632, 794)
ttcgatttataaaaattcgataaaccgaatccgccaacctcgacatactattcatcccaaccattttaaaaccaaataatcaacatccctaccgctcgcgctacgatcacgacgatttaaatattaacaataaccgaacgaataattaaaacatcaaacccgacgaaatctaaataaccgcctaacgtaacataaacgttttacatatccaccacgatcaacgcactttactacgaatcgaaaataataacttccgatcgaacgattaaaatcgtcatcataccacctcctaaatcaacgcaaataaataaacgcgacattacatcaataattaaatacgctcgccgaaaatttcgattcccgacaaaaaatcgtcgaaaattaacaacacgccttcgacaccaaacacgcttacgacttcatctaacatacgcgcgacactaacgtaaaaaccgactaacgtccccatattaatattanccgccgaaataaaatcgaccatctaacgaacgttaatatcaataccgaaacgaatatctttctaactttattcgattaaccaacttaacgcctcttantccgcgcccgctttataatattcccatttaacgcgaacgacatcgtcgatttantcgacaatcaccataaacaacacataaaaaccaacgtcgcgtccgatttactctacgacctatttcatccgcgcaacgatcgaaacgaaaaccgtaaatatatttacgcctttaccgaaacaaaaattaaaatcgacataccgaacgaaaaacgccatacanacgtcgctttacccgacgcaaatcactttcataaaaacactcgattacgaact

SEQ ID NO: 24143 - DNA, 847 bp, Artificial Sequence
  chemically treated genomic DNA (Homo sapiens) CpG-island No: 24143
  unsure (480, 578, 632, 794)
ttcgatttatgaaaattcggtgagtcgggttcgttagtttcgatatattgtttattttagttattttgaaattagatgattagtatttttgtcgttcgcgttgcggttacggcggtttgaatgttggtaatgatcgggcgagtggttgagatattaaattcggcgagatttaagtagtcgtttggcgtggtataagcgttttgtatatttattacgattagcgtattttgttgcggatcgaaggtaatggttttcggtcgagcggttaaggtcgttattatgttattttttgagttagcgtaggtagatgggcgcggtattgtattagtggttgaatgcgttcgtcgaaggtttcgattttcgatagaaaatcgtcgaaggttaatagtacgttttcggtattaggtacgtttgcgattttatttaatatgcgcgcgatattggcgtaagaatcgattaacgtttttatattgatgttantcgtcgaagtgggatcggttatttgacgaacgttggtgttagtatcggagcgggtatttttttgattttgttcggttagttagtttaacgttttttanttcgcgttcgttttgtagtgtttttatttggcgcgagcggtatcgtcggtttantcggtaattattataaataatatataagagttaacgtcgcgttcggtttgttttgcggtttgttttattcgcgtagcggtcggggcgaaagtcgtgggtgtatttacgtttttgtcgaaatagaagttgaaatcggtatatcgggcggagaacgttatgtangcgtcgttttgttcggcgtagattatttttatggggatattcggttgcggatt

SEQ ID NO: 24144 - DNA, 847 bp, Artificial Sequence
  chemically treated genomic DNA (Homo sapiens) CpG-island No: 24144
  unsure (54, 216, 270, 368)
aatccgcaaccgaatatccccataaaaataatctacgccgaacaaaacgacgcntacataacgttctccgcccgatataccgatttcaacttctatttcgacaaaaacgtaaatacacccacgactttcgccccgaccgctacgcgaataaaacaaaccgcaaaacaaaccgaacgcgacgttaactcttatatattatttataataattaccgantaaaccgacgataccgctcgcgccaaataaaaacactacaaaacgaacgcgaantaaaaaacgttaaactaactaaccgaacaaaatcaaaaaaatacccgctccgatactaacaccaacgttcgtcaaataaccgatcccacttcgacgantaacatcaatataaaaacgttaatcgattcttacgccaatatcgcgcgcatattaaataaaatcgcaaacgtacctaataccgaaaacgtactattaaccttcgacgattttctatcgaaaatcgaaaccttcgacgaacgcattcaaccactaatacaataccgcgcccatctacctacgctaactcaaaaaataacataataacgaccttaaccgctcgaccgaaaaccattaccttcgatccgcaacaaaatacgctaatcgtaataaatatacaaaacgcttataccacgccaaacgactacttaaatctcgccgaatttaatatctcaaccactcgcccgatcattaccaacattcaaaccgccgtaaccgcaacgcgaacgacaaaaatactaatcatctaatttcaaaataactaaaataaacaatatatcgaaactaacgaacccgactcaccgaattttcataaatcgaa

SEQ ID NO: 24145 - DNA, 763 bp, Artificial Sequence
  chemically treated genomic DNA (Homo sapiens) CpG-island No: 24145
tttgttatttcgttattttcggatttcgtatcgtcgtgtttttcggtttaagttttaatattcgggtaattggcgtgttttattagttcggtagtatgaattattattcgttagttttttattggagacgacggaagatcgttgtcgaagcggcgttttatcgttttagtatgacgttttgtattgttttattgttgaagtcgtcggtagtgacgtttagtgtagtgttttacgattatagtagtttagcgcgaacgtgatattagttttttttcgttattatagtagaattcgaattcgttagagtattatgttgattgtttttttttacggttattttgtttgtatgtgttcgtttcgaggcggtatagtaggttttcgtttaagtaatagcgtattttggcgtatgatcggtaaatacgtttggtattgatcgtaggtatattattaagttttgtcgtttgcgaagtagcgtttatattcgacgataattatacgttggtagttttcgataatatggtgtatacggagaagtatattcgtattattagtgtgatattgcggcggttatttatttagttatcggttcgtttgagaatgacgtgtattgcgtacgcgatattcggagataacggttgattaagtttattttttatttcgggtaataagggcgcgtgcgttatttatttttttgttcgtttatattaacggtttttttgaggagtttattttttatcgtttttttgtcgagtagcgttggagt

SEQ ID NO: 24146 - DNA, 763 bp, Artificial Sequence
  chemically treated genomic DNA (Homo sapiens) CpG-island No: 24146
actccaacgctactcgacaaaaaaacgataaaaaataaactcctcaaaaaaaccgttaatataaacgaacaaaaaaataaataacgcacgcgcccttattacccgaaataaaaaataaacttaatcaaccgttatctccgaatatcgcgtacgcaatacacgtcattctcaaacgaaccgataactaaataaataaccgccgcaatatcacactaataatacgaatatacttctccgtatacaccatattatcgaaaactaccaacgtataattatcgtcgaatataaacgctacttcgcaaacgacaaaacttaataatatacctacgatcaataccaaacgtatttaccgatcatacgccaaaatacgctattacttaaacgaaaacctactataccgcctcgaaacgaacacatacaaacaaaataaccgtaaaaaaaaacaatcaacataatactctaacgaattcgaattctactataataacgaaaaaaaactaatatcacgttcgcgctaaactactataatcgtaaaacactacactaaacgtcactaccgacgacttcaacaataaaacaatacaaaacgtcatactaaaacgataaaacgccgcttcgacaacgatcttccgtcgtctccaataaaaaactaacgaataataattcatactaccgaactaataaaacacgccaattacccgaatattaaaacttaaaccgaaaaacacgacgatacgaaatccgaaaataacgaaataacaaa

SEQ ID NO: 24147 - DNA, 763 bp, Artificial Sequence
  chemically treated genomic DNA (Homo sapiens) CpG-island No: 24147
attttagcgttgttcggtaagaaaacgatggaaaatgaattttttaaagaagtcgttgatatggacgggtaaaaaagtggatagcgtacgcgtttttattgttcggggtggggagtaagtttagttagtcgttgttttcgggtgtcgcgtgcgtagtgtacgttatttttagacgaatcgatgattggatggatggtcgtcgtagtgttatattgatgatacggatgtgttttttcgtatatattatgttatcgggagttgttaacgtatggttatcgtcgggtatgggcgttgtttcgtagacggtagaatttgatggtatgtttgcgattaatgttaaacgtgtttatcggttatgcgttagaatgcgttgttgtttgagcgaaaatttgttgtatcgtttcgaaacgggtatatataggtagagtggtcgtgaaagaaagtaattagtatggtgttttgacgggttcgagttttgttgtgataacggagagagattggtgttacgttcgcgttggattgttgtgatcgtgaggtattgtattgggcgttattatcggcggttttaatagtgaaatagtataggacgttatgttggagcggtggaacgtcgtttcggtaacgatttttcgtcgtttttagtggagggttgacggataatggtttatgttatcgggttaatgaaatacgttagttgttcggatgttgggatttgaatcgaagaatacggcggtgcggagttcgggagtaacggaatagtaga

SEQ ID NO: 24148 - DNA, 763 bp, Artificial Sequence
  chemically treated genomic DNA (Homo sapiens) CpG-island No: 24148
tctactattccgttactcccgaactccgcaccgccgtattcttcgattcaaatcccaacatccgaacaactaacgtatttcattaacccgataacataaaccattatccgtcaaccctccactaaaaacgacgaaaaatcgttaccgaaacgacgttccaccgctccaacataacgtcctatactatttcactattaaaaccgccgataataacgcccaatacaatacctcacgatcacaacaatccaacgcgaacgtaacaccaatctctctccgttatcacaacaaaactcgaacccgtcaaaacaccatactaattactttctttcacgaccactctacctatatatacccgtttcgaaacgatacaacaaattttcgctcaaacaacaacgcattctaacgcataaccgataaacacgtttaacattaatcgcaaacataccatcaaattctaccgtctacgaaacaacgcccatacccgacgataaccatacgttaacaactcccgataacataatatatacgaaaaaacacatccgtatcatcaatataacactacgacgaccatccatccaatcatcgattcgtctaaaaataacgtacactacgcacgcgacacccgaaaacaacgactaactaaacttactccccaccccgaacaataaaaacgcgtacgctatccacttttttacccgtccatatcaacgacttctttaaaaaattcattttccatcgttttcttaccgaacaacgctaaaat

SEQ ID NO: 24149 - DNA, 716 bp, Artificial Sequence
  chemically treated genomic DNA (Homo sapiens) CpG-island No: 24149
gagttggggtacgatggttgcggcgggcggaagtacgttaacgcgtgtttagaaacggggagtgtgtatgcgtcgcgtggggagggggggggcggaggggagtggacgggtgggatagagtcgatagcggggagtttatggttttgggataggcgtaagaattttaagggggcggttagcgcgggcgcggttttagcggattaagaatgggcgcgaggagatgcggggtaatttggttaacgcgggcgatagggtgaatggtaggggcggcgaagtgcggtgttggcgagaaaagttacggcggcgtatttatggttagaaagggggatgggtattgggtaatggtcgagggcgggtagattaggggttgttggcgcggggcggggggaggtgaatggatcgtaattggagtgatagatatttgttgcgtaaaagtatcggattaagtgttttgtcgcgcgtatttgacgagagaaagggtagacgggcgtgggggtaaaagtttagcggaggagagaaattttcgggagataaagggtgtaggcggcgggagggcgtaatttcgtgggtgggtattacggattatagttttcggttttaatggcggttttagtcgttttattatgggcggtttttattattttcgtgggggtaatttttttcgtttgtggaagaatttcggtgtgtggaagatttttacggttgttgcggggttg

SEQ ID NO: 24150 - DNA, 716 bp, Artificial Sequence
  chemically treated genomic DNA (Homo sapiens) CpG-island No: 24150
caaccccgcaacaaccgtaaaaatcttccacacaccgaaattcttccacaaacgaaaaaaattacccccacgaaaataataaaaaccgcccataataaaacgactaaaaccgccattaaaaccgaaaactataatccgtaatacccacccacgaaattacgccctcccgccgcctacaccctttatctcccgaaaatttctctcctccgctaaacttttacccccacgcccgtctaccctttctctcgtcaaatacgcgcgacaaaacacttaatccgatacttttacgcaacaaatatctatcactccaattacgatccattcacctccccccgccccgcgccaacaacccctaatctacccgccctcgaccattacccaatacccatccccctttctaaccataaatacgccgccgtaacttttctcgccaacaccgcacttcgccgcccctaccattcaccctatcgcccgcgttaaccaaattaccccgcatctcctcgcgcccattcttaatccgctaaaaccgcgcccgcgctaaccgcccccttaaaattcttacgcctatcccaaaaccataaactccccgctatcgactctatcccacccgtccactcccctccgccccccccctccccacgcgacgcatacacactccccgtttctaaacacgcgttaacgtacttccgcccgccgcaaccatcgtaccccaactc

SEQ ID NO: 24151 - DNA, 716 bp, Artificial Sequence
  chemically treated genomic DNA (Homo sapiens) CpG-island No: 24151
tagtttcgtaatagtcgtggaggttttttatatatcggagtttttttataaacgggggggattatttttacgaaggtggtgggggtcgtttataataaggcggttgaggtcgttattaggatcggagattatgattcgtggtgtttatttacgaaattacgttttttcgtcgtttgtattttttatttttcggaggtttttttttttcgttaaatttttatttttacgttcgtttgttttttttttcgttaggtgcgcgcgataaggtatttaattcggtgtttttacgtagtaggtatttattattttaattgcggtttatttattttttttcgtttcgcgttagtagtttttaatttgttcgttttcggttattgtttaatatttatttttttttttagttataaatacgtcgtcgtaatttttttcgttaatatcgtatttcgtcgtttttgttatttattttgtcgttcgcgttagttaaattatttcgtattttttcgcgtttatttttagttcgttggggtcgcgttcgcgttggtcgtttttttaaggtttttgcgtttattttagggttataagtttttcgttatcggttttattttattcgtttattttttttcgttttttttttttttacgcggcgtatgtatatttttcgtttttaggtacgcgttagcgtgttttcgttcgtcgtagttatcgtgttttagttt

SEQ ID NO: 24152 - DNA, 716 bp, Artificial Sequence
  chemically treated genomic DNA (Homo sapiens) CpG-island No: 24152
aaactaaaacacgataactacgacgaacgaaaacacgctaacgcgtacctaaaaacgaaaaatatacatacgccgcgtaaaaaaaaaaaaaacgaaaaaaaataaacgaataaaataaaaccgataacgaaaaacttataaccctaaaataaacgcaaaaaccttaaaaaaacgaccaacgcgaacgcgaccccaacgaactaaaaataaacgcgaaaaaatacgaaataatttaactaacgcgaacgacaaaataaataacaaaaacgacgaaatacgatattaacgaaaaaaattacgacgacgtatttataactaaaaaaaaaaataaatattaaacaataaccgaaaacgaacaaattaaaaactactaacgcgaaacgaaaaaaaataaataaaccgcaattaaaataataaatacctactacgtaaaaacaccgaattaaataccttatcgcgcgcacctaacgaaaaaaaaaacaaacgaacgtaaaaataaaaatttaacgaaaaaaaaaaacctccgaaaaataaaaaatacaaacgacgaaaaaacgtaatttcgtaaataaacaccacgaatcataatctccgatcctaataacgacctcaaccgccttattataaacgacccccaccaccttcgtaaaaataatcccccccgtttataaaaaaactccgatatataaaaaacctccacgactattacgaaacta

SEQ ID NO: 24153 - DNA, 524 bp, Artificial Sequence
  chemically treated genomic DNA (Homo sapiens) CpG-island No: 24153
ggggtgtcgtaatgacgtaggttaaatttacgattaagtttgcgtttgcgttttatcgtgttcggttatttaggtcggggaaaatttggtcgtggttagtttggcgattgaatgaattcggttaacggcgtcgggggagatggcgggtttgtcgtatttgggcggtcgtttcggttttttcgatatttttagcgtagtattaagacgaatatgcggtagtggtttgtcgatattattatttgcggacgaaatgttttaaattggaagtttgtttattttagacgtttgattaggtaaacgtgcgggaatttcgttaggataaatagtgagggtgcgttatcgttaagtcgattattacgtagcgtcgggatttttttacgttaatattaataatgtcgttggtggtcgtttgaattgacgttagtttcggtagtttatgttgattttttcgaacgtcgtattttgttaggtattttgattagttgttgtagtaatgaaattatattagcgtgttgatcgatggt

SEQ ID NO: 24154 - DNA, 524 bp, Artificial Sequence
  chemically treated genomic DNA (Homo sapiens) CpG-island No: 24154
accatcgatcaacacgctaatataatttcattactacaacaactaatcaaaatacctaacaaaatacgacgttcgaaaaaatcaacataaactaccgaaactaacgtcaattcaaacgaccaccaacgacattattaatattaacgtaaaaaaatcccgacgctacgtaataatcgacttaacgataacgcaccctcactatttatcctaacgaaattcccgcacgtttacctaatcaaacgtctaaaataaacaaacttccaatttaaaacatttcgtccgcaaataataatatcgacaaaccactaccgcatattcgtcttaatactacgctaaaaatatcgaaaaaaccgaaacgaccgcccaaatacgacaaacccgccatctcccccgacgccgttaaccgaattcattcaatcgccaaactaaccacgaccaaattttccccgacctaaataaccgaacacgataaaacgcaaacgcaaacttaatcgtaaatttaacctacgtcattacgacacccc

SEQ ID NO: 24155 - DNA, 524 bp, Artificial Sequence
  chemically treated genomic DNA (Homo sapiens) CpG-island No: 24155
attatcgattagtacgttaatatggttttattattgtaataattgattaggatgtttggtaaaatgcggcgttcgaagggattagtatggattgtcggggttggcgttagtttaggcgattattagcggtattattgatgttaacgtgagaaaatttcggcgttgcgtggtaatcgatttagcgatggcgtatttttattgtttattttggcgaagttttcgtacgtttgtttggttaggcgtttgggataagtaggtttttagtttgaggtatttcgttcgtaggtgatggtgtcgataaattattatcgtatattcgttttgatgttgcgttggaggtatcgaggaagtcggaacgatcgtttagatacggtaaattcgttatttttttcgacgtcgttggtcggatttatttaatcgttagattggttacgattaggtttttttcgatttggatagtcgggtacgatgagacgtaagcgtagatttaatcgtgagtttagtttacgttattacggtatttt

SEQ ID NO: 24156 - DNA, 524 bp, Artificial Sequence
  chemically treated genomic DNA (Homo sapiens) CpG-island No: 24156
aaaataccgtaataacgtaaactaaactcacgattaaatctacgcttacgtctcatcgtacccgactatccaaatcgaaaaaaacctaatcgtaaccaatctaacgattaaataaatccgaccaacgacgtcgaaaaaaataacgaatttaccgtatctaaacgatcgttccgacttcctcgatacctccaacgcaacatcaaaacgaatatacgataataatttatcgacaccatcacctacgaacgaaatacctcaaactaaaaacctacttatcccaaacgcctaaccaaacaaacgtacgaaaacttcgccaaaataaacaataaaaatacgccatcgctaaatcgattaccacgcaacgccgaaattttctcacgttaacatcaataataccgctaataatcgcctaaactaacgccaaccccgacaatccatactaatcccttcgaacgccgcattttaccaaacatcctaatcaattattacaataataaaaccatattaacgtactaatcgataat

SEQ ID NO: 24157 - DNA, 638 bp, Artificial Sequence
  chemically treated genomic DNA (Homo sapiens) CpG-island No: 24157
tcgggtattatattagggagtaatgtattaacgttgtataacggatcgtagttttggtaagcgcggtaattttggtttttaatattatgtcgtgcgtagtttaggtagaaggacgatatattttggtttttttacgttgtgtatatatatcgggatacgtagtatggaggcgagagtgataagtttgcgttaacgtggtcgatggttagaattttatggttagcgttttagtcgttattatcgagtatatattcgtaaacggttttttatcggtgaggcgggtgtaaattaggtggttggttaggttgagttggtgcgtttgttgaggagttatgtatatttttcggtaattttacgttttagtttttcgcgatttgcgtatcggttttaggtttttgatgatgttgatacgagttatggtgaacggacgtcgttttcggtaaggaagcgggaagagtaatcgtcgttacggaagtttcgtggatcgtcgggtattattcggtagcggcgaggtaagcgttagtttttgttgagagattttttagtgtggttttatcgtcgggttattttcgtttcgcgttgtttataggaatcgtttagcgtagatagtattcggacgttaaaaagcgtattagtga

SEQ ID NO: 24158 - DNA, 638 bp, Artificial Sequence
  chemically treated genomic DNA (Homo sapiens) CpG-island No: 24158
tcactaatacgctttttaacgtccgaatactatctacgctaaacgattcctataaacaacgcgaaacgaaaataacccgacgataaaaccacactaaaaaatctctcaacaaaaactaacgcttacctcgccgctaccgaataatacccgacgatccacgaaacttccgtaacgacgattactcttcccgcttccttaccgaaaacgacgtccgttcaccataactcgtatcaacatcatcaaaaacctaaaaccgatacgcaaatcgcgaaaaactaaaacgtaaaattaccgaaaaatatacataactcctcaacaaacgcaccaactcaacctaaccaaccacctaatttacacccgcctcaccgataaaaaaccgtttacgaatatatactcgataataacgactaaaacgctaaccataaaattctaaccatcgaccacgttaacgcaaacttatcactctcgcctccatactacgtatcccgatatatatacacaacgtaaaaaaaccaaaatatatcgtccttctacctaaactacgcacgacataatattaaaaaccaaaattaccgcgcttaccaaaactacgatccgttatacaacgttaatacattactccctaatataatacccga

SEQ ID NO: 24159 - DNA, 638 bp, Artificial Sequence
  chemically treated genomic DNA (Homo sapiens) CpG-island No: 24159
ttattaatacgttttttaacgttcggatattgtttgcgttggacggtttttgtaaataacgcgaagcgaaggtaattcgacgatgaagttatattgggaaattttttagtaagggttgacgtttgtttcgtcgttatcgaatggtgttcggcgatttacgaaattttcgtggcggcggttatttttttcgtttttttatcgaaggcggcgttcgtttattatgattcgtgttaatattattaaaggtttgggatcggtacgtaaatcgcggaaggttggagcgtggaattgtcgaaggatgtgtatgattttttaataaacgtattaatttaatttggttaattatttggtttgtattcgttttatcggtaaagggtcgtttacggatgtgtattcggtaatggcgattggggcgttaattatggggttttgattatcggttacgttggcgtagatttattattttcgtttttatgttgcgtatttcggtatgtatgtataacgtgaagagattaaagtgtatcgtttttttgtttgggttgcgtacggtatggtattgaaggttaggattatcgcgtttgttagaattacggttcgttgtatagcgttaatatattattttttgatgtgatgttcgg

SEQ ID NO: 24160 - DNA, 638 bp, Artificial Sequence
  chemically treated genomic DNA (Homo sapiens) CpG-island No: 24160
ccgaacatcacatcaaaaaataatatattaacgctatacaacgaaccgtaattctaacaaacgcgataatcctaaccttcaataccataccgtacgcaacccaaacaaaaaaacgatacactttaatctcttcacgttatacatacataccgaaatacgcaacataaaaacgaaaataataaatctacgccaacgtaaccgataatcaaaaccccataattaacgccccaatcgccattaccgaatacacatccgtaaacgaccctttaccgataaaacgaatacaaaccaaataattaaccaaattaaattaatacgtttattaaaaaatcatacacatccttcgacaattccacgctccaaccttccgcgatttacgtaccgatcccaaacctttaataatattaacacgaatcataataaacgaacgccgccttcgataaaaaaacgaaaaaaataaccgccgccacgaaaatttcgtaaatcgccgaacaccattcgataacgacgaaacaaacgtcaacccttactaaaaaatttcccaatataacttcatcgtcgaattaccttcgcttcgcgttatttacaaaaaccgtccaacgcaaacaatatccgaacgttaaaaaacgtattaataa

SEQ ID NO: 24161 - DNA, 522 bp, Artificial Sequence
  chemically treated genomic DNA (Homo sapiens) CpG-island No: 24161
gttacgataatgcgggtttgtacgattcggtaggcgtcggtggtatatacgttatgtacgtgttgtattatgttgataagttaaatttgtattatggtttgtcggagaattcggaaattagcgaaatcgtgaaattttggaaaggtatttggaaatcgttcgcggttgttggttttgcggttatttttgcggttagtattttttattacgtgggtgtcggttcgaatcgtgcggatgaggaagagaataatttgtacgaagagaaagacgaggagcgtaaatgaaacgacgtgatattatcgtgcgttatatcgcgtcggaacgtattaattattggattatcgttttttgttttattttggcggcggtgagcgggttgggttttttgttttcgttttttaattggttgatgtaaattatgggtatatcgtagttggcgcgaattttgtattcgtttgtcggcgtggttatgtttgtttcgtttattattatgttttttcgttattggtattataatttaat

SEQ ID NO: 24162 - DNA, 522 bp, Artificial Sequence
  chemically treated genomic DNA (Homo sapiens) CpG-island No: 24162
attaaattataataccaataacgaaaaaacataataataaacgaaacaaacataaccacgccgacaaacgaatacaaaattcgcgccaactacgatatacccataatttacatcaaccaattaaaaaacgaaaacaaaaaacccaacccgctcaccgccgccaaaataaaacaaaaaacgataatccaataattaatacgttccgacgcgatataacgcacgataatatcacgtcgtttcatttacgctcctcgtctttctcttcgtacaaattattctcttcctcatccgcacgattcgaaccgacacccacgtaataaaaaatactaaccgcaaaaataaccgcaaaaccaacaaccgcgaacgatttccaaatacctttccaaaatttcacgatttcgctaatttccgaattctccgacaaaccataatacaaatttaacttatcaacataatacaacacgtacataacgtatataccaccgacgcctaccgaatcgtacaaacccgcattatcgtaac

SEQ ID NO: 24163 - DNA, 522 bp, Artificial Sequence
  chemically treated genomic DNA (Homo sapiens) CpG-island No: 24163
attaggttgtgatgttagtaacggaaaaatatgatgatgaacgaggtaaatataattacgtcgataaacgggtgtagaattcgcgttagttgcggtgtgtttatgatttgtattaattagttgaaggacgggaataaaaagtttagttcgtttatcgtcgttaggatgaagtagaaggcggtgatttagtggttgatacgtttcggcgcggtgtagcgtacgatggtgttacgtcgttttatttgcgtttttcgttttttttttcgtgtagattatttttttttttattcgtacggttcggatcgatatttacgtagtggaagatattggtcgtaaaggtagtcgtaaagttaatagtcgcgagcggtttttagatgtttttttagaattttacggtttcgttgattttcgggtttttcggtaagttatgatatagatttggtttgttagtatggtgtagtacgtatatgacgtgtgtattatcgacgtttgtcggatcgtatagattcgtattgtcgtaat

SEQ ID NO: 24164 - DNA, 522 bp, Artificial Sequence
  chemically treated genomic DNA (Homo sapiens) CpG-island No: 24164
attacgacaatacgaatctatacgatccgacaaacgtcgataatacacacgtcatatacgtactacaccatactaacaaaccaaatctatatcataacttaccgaaaaacccgaaaatcaacgaaaccgtaaaattctaaaaaaacatctaaaaaccgctcgcgactattaactttacgactacctttacgaccaatatcttccactacgtaaatatcgatccgaaccgtacgaataaaaaaaaaaataatctacacgaaaaaaaaaacgaaaaacgcaaataaaacgacgtaacaccatcgtacgctacaccgcgccgaaacgtatcaaccactaaatcaccgccttctacttcatcctaacgacgataaacgaactaaactttttattcccgtccttcaactaattaatacaaatcataaacacaccgcaactaacgcgaattctacacccgtttatcgacgtaattatatttacctcgttcatcatcatatttttccgttactaacatcacaacctaat

SEQ ID NO: 24165 - DNA, 669 bp, Artificial Sequence
  chemically treated genomic DNA (Homo sapiens) CpG-island No: 24165
gcgttgggtattgtgttgaaagggtaattggcgttggggatgttgttggcggtgtaaatagttacgggggtgttggcgtttgtggtgatgattgtgttgtcgcgttattcgttggtggtggaagtgaagcgttagttttgtcgtagcgaaaaaatgaaaatgtttttacgggcggggtgagttgttgttttcggtttcgataacggttgtcggatgcggcgtaaaacgttttattcgttttacggttttgtgttcgggatttgtaggtttgataagaacgcgtgagcgtcgtattcggtaattagtattcggtaattattattaggtattttttatttttagtattttatgcgtttttgttataatattttcggcggtaaagttaaagaacgggaatagtttattcgtcggagtagatttttcgtaattcgttatttcgataatgttttttttagattaatatatttgtattagtaatcggtaatatttgtttttatcgttacgcgagtcgtaacgttagaaggtaatatcgattttcgatattttttattttgggcgtcgaaaatatcggtcgagggtagggaaattacgcgtatattgcgatttttttttgttaatttttttgtcgtttgtagggtaatttttatttttgaatcggtggtaattaga

SEQ ID NO: 24166 - DNA, 669 bp, Artificial Sequence
  chemically treated genomic DNA (Homo sapiens) CpG-island No: 24166
tctaattaccaccgattcaaaaataaaaattaccctacaaacgacaaaaaaattaacaaaaaaaaatcgcaatatacgcgtaatttccctaccctcgaccgatattttcgacgcccaaaataaaaaatatcgaaaatcgatattaccttctaacgttacgactcgcgtaacgataaaaacaaatattaccgattactaatacaaatatattaatctaaaaaaaacattatcgaaataacgaattacgaaaaatctactccgacgaataaactattcccgttctttaactttaccgccgaaaatattataacaaaaacgcataaaatactaaaaataaaaaatacctaataataattaccgaatactaattaccgaatacgacgctcacgcgttcttatcaaacctacaaatcccgaacacaaaaccgtaaaacgaataaaacgttttacgccgcatccgacaaccgttatcgaaaccgaaaacaacaactcaccccgcccgtaaaaacattttcattttttcgctacgacaaaactaacgcttcacttccaccaccaacgaataacgcgacaacacaatcatcaccacaaacgccaacacccccgtaactatttacaccgccaacaacatccccaacgccaattaccctttcaacacaatacccaacgc

SEQ ID NO: 24167 - DNA, 669 bp, Artificial Sequence
  chemically treated genomic DNA (Homo sapiens) CpG-island No: 24167
tttgattgttatcggtttagagatggaaattattttgtaagcggtagagaaattagtaggagaaggtcgtaatgtacgcgtagtttttttgttttcgatcgatattttcgacgtttaggatgaggaatatcgggagtcggtgttgttttttaacgttgcggttcgcgtggcggtggaagtaggtattgtcgattattggtataagtatgttggtttgaaaggggtattgtcgggatgacgggttacggggaatttgtttcggcggataagttgttttcgttttttggttttatcgtcgagaatattgtggtaaaagcgtataaggtgttgggagtgaaaggtgtttgatggtgattgtcggatgttgattgtcggatgcgacgtttacgcgtttttattaggtttataggtttcgagtatagaatcgtaggacggataaggcgttttacgtcgtattcggtaatcgttgtcggaatcgaaaatagtaatttatttcgttcgtaaaagtatttttattttttcgttgcgataaaattgacgttttatttttattattagcggatggcgcgatagtataattattattataaacgttagtattttcgtggttatttgtatcgttagtagtatttttagcgttagttgtttttttagtataatgtttagcgt

SEQ ID NO: 24168 - DNA, 669 bp, Artificial Sequence
  chemically treated genomic DNA (Homo sapiens) CpG-island No: 24168
acgctaaacattatactaaaaaaacaactaacgctaaaaatactactaacgatacaaataaccacgaaaatactaacgtttataataataattatactatcgcgccatccgctaataataaaaataaaacgtcaattttatcgcaacgaaaaaataaaaatacttttacgaacgaaataaattactattttcgattccgacaacgattaccgaatacgacgtaaaacgccttatccgtcctacgattctatactcgaaacctataaacctaataaaaacgcgtaaacgtcgcatccgacaatcaacatccgacaatcaccatcaaacacctttcactcccaacaccttatacgcttttaccacaatattctcgacgataaaaccaaaaaacgaaaacaacttatccgccgaaacaaattccccgtaacccgtcatcccgacaatacccctttcaaaccaacatacttataccaataatcgacaatacctacttccaccgccacgcgaaccgcaacgttaaaaaacaacaccgactcccgatattcctcatcctaaacgtcgaaaatatcgatcgaaaacaaaaaaactacgcgtacattacgaccttctcctactaatttctctaccgcttacaaaataatttccatctctaaaccgataacaatcaaa

SEQ ID NO: 24169 - DNA, 865 bp, Artificial Sequence
  chemically treated genomic DNA (Homo sapiens) CpG-island No: 24169
cgtttcggttttttacgtcgtaaagagatggaaaagcgcgttatcgaattgatggtattttacggtttttttttcgacgtgcgcgaatcgtttaatcgttttttagtcgcgatgtagtaaatcgtcgttatttgtcgggttatcgatttttttgttaagtgttgattttcgatgaatttatcgttagtttcgatatttaggaagtggagttattgtttgatttgatgcgttagttgcgcgatcgcggcgttagtttgatttttgttatttattttttcgattaggtttattaggttagcgatcggattatcgttttacgtaacggtagtttcgtaggttgtcgggaaacgtgcgagttatcgtagatcgaattggtaaaaatgatgttggggcgcgagttggatatttacgcgttatagcgtgtcgggcgatatattgttgagcgataaattcgttgtcgcgtttaaaaattacggtaaaaaaggaacgatcgtatcgtttgatttcgaagtacgtttcggcgagatcgtcggtttggttggattgttgggattaggacgtatcgaaatcgtcgaagtgattttcggtattaaatttgttgatagcggtacggcgttgattaaaggtaaatcgtaaaatttgcgatcgttatattaggtttcggtattgggtattggtttttgttcggaagataggaaaatcgatggtattatcgttgtcgtttcggtgcgggaaaatattattttcgttttttaggtttagcgcggttggttacgttttatttttcgtaaagaatagtaagagattgtcgaacgttttattcgttagtttggtattcgtatatttttaattgaataatcgattg

SEQ ID NO: 24170 - DNA, 865 bp, Artificial Sequence
  chemically treated genomic DNA (Homo sapiens) CpG-island No: 24170
caatcgattattcaattaaaaatatacgaataccaaactaacgaataaaacgttcgacaatctcttactattctttacgaaaaataaaacgtaaccaaccgcgctaaacctaaaaaacgaaaataatattttcccgcaccgaaacgacaacgataataccatcgattttcctatcttccgaacaaaaaccaatacccaataccgaaacctaatataacgatcgcaaattttacgatttacctttaatcaacgccgtaccgctatcaacaaatttaataccgaaaatcacttcgacgatttcgatacgtcctaatcccaacaatccaaccaaaccgacgatctcgccgaaacgtacttcgaaatcaaacgatacgatcgttccttttttaccgtaatttttaaacgcgacaacgaatttatcgctcaacaatatatcgcccgacacgctataacgcgtaaatatccaactcgcgccccaacatcatttttaccaattcgatctacgataactcgcacgtttcccgacaacctacgaaactaccgttacgtaaaacgataatccgatcgctaacctaataaacctaatcgaaaaaataaataacaaaaatcaaactaacgccgcgatcgcgcaactaacgcatcaaatcaaacaataactccacttcctaaatatcgaaactaacgataaattcatcgaaaatcaacacttaacaaaaaaatcgataacccgacaaataacgacgatttactacatcgcgactaaaaaacgattaaacgattcgcgcacgtcgaaaaaaaaaccgtaaaataccatcaattcgataacgcgcttttccatctctttacgacgtaaaaaaccgaaacg

SEQ ID NO: 24171 - DNA, 865 bp, Artificial Sequence
  chemically treated genomic DNA (Homo sapiens) CpG-island No: 24171
taatcggttgtttagttgaaggtgtgcgaatgttaagttggcggataaagcgttcggtaattttttgttgttttttgcgggaaatgggacgtagttagtcgcgttgggtttggagagcgaggatgatattttttcgtatcgaggcggtagcgatgatgttatcggtttttttgtttttcgggtagaagttaatgtttagtatcgaagtttgatgtggcgatcgtaggttttgcggtttgtttttgattaacgtcgtgtcgttgttagtaggtttgatatcgaagattatttcggcggtttcggtacgttttgattttagtaatttagttagatcgacgatttcgtcggggcgtatttcgagattaaacggtgcgatcgttttttttttgtcgtaatttttgaacgcggtaacgggtttgtcgtttaataatgtatcgttcggtacgttgtagcgcgtgggtatttagttcgcgttttagtattatttttattagttcgatttgcggtagttcgtacgtttttcgatagtttacgaaattgtcgttgcgtaagacggtgattcgatcgttgatttgatagatttgatcgagaaagtgagtgataaaaattaggttgacgtcgcgatcgcgtaattgacgtattaggttaaatagtaattttattttttgggtgtcgagattggcggtgggtttatcgaggattagtatttggtagagagatcgatagttcgataaatagcgacgatttgttgtatcgcgattgaaaagcggttgagcggttcgcgtacgtcgagggagaaatcgtaagatgttattagttcggtggcgcgtttttttatttttttgcggcgtagaaggtcgaagcg

SEQ ID NO: 24172 - DNA, 865 bp, Artificial Sequence
  chemically treated genomic DNA (Homo sapiens) CpG-island No: 24172
cgcttcgaccttctacgccgcaaaaaaataaaaaaacgcgccaccgaactaataacatcttacgatttctccctcgacgtacgcgaaccgctcaaccgcttttcaatcgcgatacaacaaatcgtcgctatttatcgaactatcgatctctctaccaaatactaatcctcgataaacccaccgccaatctcgacacccaaaaaataaaattactatttaacctaatacgtcaattacgcgatcgcgacgtcaacctaatttttatcactcactttctcgatcaaatctatcaaatcaacgatcgaatcaccgtcttacgcaacgacaatttcgtaaactatcgaaaaacgtacgaactaccgcaaatcgaactaataaaaataatactaaaacgcgaactaaatacccacgcgctacaacgtaccgaacgatacattattaaacgacaaacccgttaccgcgttcaaaaattacgacaaaaaaaaaacgatcgcaccgtttaatctcgaaatacgccccgacgaaatcgtcgatctaactaaattactaaaatcaaaacgtaccgaaaccgccgaaataatcttcgatatcaaacctactaacaacgacacgacgttaatcaaaaacaaaccgcaaaacctacgatcgccacatcaaacttcgatactaaacattaacttctacccgaaaaacaaaaaaaccgataacatcatcgctaccgcctcgatacgaaaaaatatcatcctcgctctccaaacccaacgcgactaactacgtcccatttcccgcaaaaaacaacaaaaaattaccgaacgctttatccgccaacttaacattcgcacaccttcaactaaacaaccgatta

SEQ ID NO: 24173 - DNA, 632 bp, Artificial Sequence
  chemically treated genomic DNA (Homo sapiens) CpG-island No: 24173
  unsure (587..588, 608..)
tattattagcgaaatgtcggtagaagaagcgtatcgttatattcgtagcggcgtgttgaaatattatttatcggttttgtattcggaagatgttattgaagggtcgttggcgtttgtcgagaagcgcgattcggtgtggaaaggacgttaataatcgtgagttattacgtttttgaggggttaatttcggtggtttattcgacggcgtttgtttattttagtgtcgttttgattggcgatgtgattgtgggagtcggtgtttatatcggtttattcgttttattgcgtggtgattacgggcggttgatcgtgtaagcgggagttaatatttaggatggttgtattatgtatggttattgcgatattgatattatcgttggggaaaacggttatatcgggtacggagcgattttgtatggttgtttgattggtcgcgatgtattggtcgggatgaatagcgtgattatggatggcgcggttattggcgaagagagtattgttgtcgttatgagttttgttaaagcgggttttcgcggcgagaaacgttagttgttgatgggtacgttagtcgcgcgcgtgatacgtannnatgtatagtgacgtacganngttatacgtggaaacggttgaat

SEQ ID NO: 24174 - DNA, 632 bp, Artificial Sequence
  chemically treated genomic DNA (Homo sapiens) CpG-island No: 24174
  unsure (24..25, 44..)
attcaaccgtttccacgtataacnntcgtacgtcactatacatnnntacgtatcacgcgcgcgactaacgtacccatcaacaactaacgtttctcgccgcgaaaacccgctttaacaaaactcataacgacaacaatactctcttcgccaataaccgcgccatccataatcacgctattcatcccgaccaatacatcgcgaccaatcaaacaaccatacaaaatcgctccgtacccgatataaccgttttccccaacgataatatcaatatcgcaataaccatacataatacaaccatcctaaatattaactcccgcttacacgatcaaccgcccgtaatcaccacgcaataaaacgaataaaccgatataaacaccgactcccacaatcacatcgccaatcaaaacgacactaaaataaacaaacgccgtcgaataaaccaccgaaattaacccctcaaaaacgtaataactcacgattattaacgtcctttccacaccgaatcgcgcttctcgacaaacgccaacgacccttcaataacatcttccgaatacaaaaccgataaataatatttcaacacgccgctacgaatataacgatacgcttcttctaccgacatttcgctaataata

SEQ ID NO: 24175 - DNA, 632 bp, Artificial Sequence
  chemically treated genomic DNA (Homo sapiens) CpG-island No: 24175
  unsure (24..25, 44..)
atttaatcgtttttacgtgtaatnntcgtacgttattatatatnnntgcgtattacgcgcgcggttggcgtatttattaataattggcgtttttcgtcgcgaaagttcgttttgataaagtttatggcggtaataatgtttttttcgttaatgatcgcgttatttataattacgttgtttatttcgattaatgtatcgcgattaattaaataattatgtaggatcgtttcgtgttcgatatggtcgttttttttaacgatagtgttagtgtcgtagtagttatgtataatgtagttattttgaatattggttttcgtttgtacgattaatcgttcgtagttattacgtagtgaggcgagtgggtcgatgtagatatcggtttttataattatatcgttaattaagacggtattgggatggataaacgtcgtcgggtgaattatcggaattaattttttaaaggcgtaatagtttacggttgttaacgttttttttatatcggatcgcgtttttcggtaaacgttagcggttttttaatggtatttttcgaatgtagaatcgatggatagtgttttaatacgtcgttgcgaatatagcgatacgttttttttatcggtatttcgttggtggtg

SEQ ID NO: 24176 - DNA, 632 bp, Artificial Sequence
  chemically treated genomic DNA (Homo sapiens) CpG-island No: 24176
  unsure (587..588, 608..)
caccaccaacgaaataccgataaaaaaaacgtatcgctatattcgcaacgacgtattaaaacactatccatcgattctacattcgaaaaataccattaaaaaaccgctaacgtttaccgaaaaacgcgatccgatataaaaaaaacgttaacaaccgtaaactattacgcctttaaaaaattaattccgataattcacccgacgacgtttatccatcccaataccgtcttaattaacgatataattataaaaaccgatatctacatcgacccactcgcctcactacgtaataactacgaacgattaatcgtacaaacgaaaaccaatattcaaaataactacattatacataactactacgacactaacactatcgttaaaaaaaacgaccatatcgaacacgaaacgatcctacataattatttaattaatcgcgatacattaatcgaaataaacaacgtaattataaataacgcgatcattaacgaaaaaaacattattaccgccataaactttatcaaaacgaactttcgcgacgaaaaacgccaattattaataaatacgccaaccgcgcgcgtaatacgcannnatatataataacgtacgannattacacgtaaaaacgattaaat

SEQ ID NO: 24177 - DNA, 867 bp, Artificial Sequence
  chemically treated genomic DNA (Homo sapiens) CpG-island No: 24177
attgtcggacgttgttatttgcggcggcgtttggcgaaaatgtcgtaattttattagtattagtaataataatacgtcgattattaataaattaaaatcgttcgcgtttgcggaagtaatcggtgttattatcgcgtttaaattatttagtagcgtcgcgtttatggtatcgttcgttacgttttgcgtcgtttataaatcgttaattcgttttaatatcgttttcggggtttgcgtttgtagtattgtgtattgtagtaacgagttgatcgtatttaattagtcgaatagcgttagataaattacgtttaaaatttatatcggtattaggttaaatagattaatggcgaggaacgattttagcgtggagagtagtattaataattttggtcgcgtattatgtgttagtttttcgttggttaacgtattaatagtcgcgtcgagcgggatcgtcgcgtagagaaaattaatttgtgtcgttgatatttgttagttgttagttagcgtcggatatagtattcgtatcgcgttcgttatcgttaataaattatttagtagcgtaatttcgtttattagcgggttggtaagtagaaaacgaaattttgttagtaatgattttaacggatgtttacgcggttgcggtggcggtggtaacgtcggaaggtttaataacggtagtaaggtaataaacgtgttcgtcgtcgttagttcgtagttttaggttacgttatcggtcgttagtaataaatcgttaattatgggcgaaattatcgattttagacgtacggttaatatggtgatcgtttcggtttgtattaagtttttacgttttattagtgttggtgtcgtcgttaatagcgtcgtaat

SEQ ID NO: 24178 - DNA, 867 bp, Artificial Sequence
  chemically treated genomic DNA (Homo sapiens) CpG-island No: 24178
attacgacgctattaacgacgacaccaacactaataaaacgtaaaaacttaatacaaaccgaaacgatcaccatattaaccgtacgtctaaaatcgataatttcgcccataattaacgatttattactaacgaccgataacgtaacctaaaactacgaactaacgacgacgaacacgtttattaccttactaccgttattaaaccttccgacgttaccaccgccaccgcaaccgcgtaaacatccgttaaaatcattactaacaaaatttcgttttctacttaccaacccgctaataaacgaaattacgctactaaataatttattaacgataacgaacgcgatacgaatactatatccgacgctaactaacaactaacaaatatcaacgacacaaattaattttctctacgcgacgatcccgctcgacgcgactattaatacgttaaccaacgaaaaactaacacataatacgcgaccaaaattattaatactactctccacgctaaaatcgttcctcgccattaatctatttaacctaataccgatataaattttaaacgtaatttatctaacgctattcgactaattaaatacgatcaactcgttactacaatacacaatactacaaacgcaaaccccgaaaacgatattaaaacgaattaacgatttataaacgacgcaaaacgtaacgaacgataccataaacgcgacgctactaaataatttaaacgcgataataacaccgattacttccgcaaacgcgaacgattttaatttattaataatcgacgtattattattactaatactaataaaattacgacattttcgccaaacgccgccgcaaataacaacgtccgacaat

SEQ ID NO: 24179 - DNA, 867 bp, Artificial Sequence
  chemically treated genomic DNA (Homo sapiens) CpG-island No: 24179
gttacggcgttattggcggcgatattagtattggtagggcgtgaaaatttaatgtaggtcggggcgattattatgttgatcgtgcgtttggggtcggtgatttcgtttatgattggcggtttattgttggcgatcggtggcgtagtttggaattacgggttggcggcggcgggtacgtttattattttgttatcgttgttaagtttttcggcgttgttatcgttatcgtagtcgcgtgagtattcgttgaaattattattggtaggatttcgttttttgtttgttagttcgttggtgggcgggattgcgttgttgggtggtttattgacgatggcgagcgcggtgcgggtattgtattcggcgttggttgataattggtagatgttagcggtatagattggttttttttacgcggcgatttcgttcggcgcggttattggtgcgttaattagcgggaagttggtatatagtgcgcgattagggttattgatgttgttttttacgttgggatcgtttttcgttattggtttgtttggtttgatgtcgatgtggattttaggcgtggtttgtttggcgttgttcggttggttgagtgcggttagttcgttgttgtaatatataatgttgtaaacgtaaatttcggaagcgatgttagggcggattaacggtttgtggacggcgtagaacgtgacgggcgatgttataggcgcggcgttgttgggtggtttgggcgcgatgatgatatcggttgttttcgtaagcgcgagcggttttggtttgttgatagtcggcgtgttgttattgttggtgttggtggagttgcgatattttcgttagacgtcgtcgtaggtgatagcgttcgatagt

SEQ ID NO: 24180 - DNA, 867 bp, Artificial Sequence
  chemically treated genomic DNA (Homo sapiens) CpG-island No: 24180
actatcgaacgctatcacctacgacgacgtctaacgaaaatatcgcaactccaccaacaccaacaataacaacacgccgactatcaacaaaccaaaaccgctcgcgcttacgaaaacaaccgatatcatcatcgcgcccaaaccacccaacaacgccgcgcctataacatcgcccgtcacgttctacgccgtccacaaaccgttaatccgccctaacatcgcttccgaaatttacgtttacaacattatatattacaacaacgaactaaccgcactcaaccaaccgaacaacgccaaacaaaccacgcctaaaatccacatcgacatcaaaccaaacaaaccaataacgaaaaacgatcccaacgtaaaaaacaacatcaataaccctaatcgcgcactatataccaacttcccgctaattaacgcaccaataaccgcgccgaacgaaatcgccgcgtaaaaaaaaccaatctataccgctaacatctaccaattatcaaccaacgccgaatacaatacccgcaccgcgctcgccatcgtcaataaaccacccaacaacgcaatcccgcccaccaacgaactaacaaacaaaaaacgaaatcctaccaataataatttcaacgaatactcacgcgactacgataacgataacaacgccgaaaaacttaacaacgataacaaaataataaacgtacccgccgccgccaacccgtaattccaaactacgccaccgatcgccaacaataaaccgccaatcataaacgaaatcaccgaccccaaacgcacgatcaacataataatcgccccgacctacattaaattttcacgccctaccaatactaatatcgccgccaataacgccgtaac

SEQ ID NO: 24181 - DNA, 663 bp, Artificial Sequence
  chemically treated genomic DNA (Homo sapiens) CpG-island No: 24181
  unsure (14, 55, 60, 87..88, 129, 197, 277, 281..282, 299, 319, 339)
  unsure (354, 370, 414, 481, 492, 497, 597, 602)
ggggtcggtcgttntcgggtttaggtcgttttcgcgtttcggttttcgcggtttnggggncgcgggggcgcgtcggatcggcgagtnngcgggcggggcgggggggggggtttaggtcgcggggggcgnacgcggagttttcgggggtcggcggtcgtatcgggcggtcgagggcgggcgcgaggaacgcgaacgtngcggcgggcgaggggggcgagggcggcgggtcgcggcgcgcggcgcgtcggtcgcgacggagagagagtaatagttcggncgtnnntcgcgcgtcggatcgnttaacgcgtttcgagtaganagagttagggacggtcgttngttacggggggcggngcggcgcgcggcggangcgcgtcgtagtcgcgcggcgacggcgcgcggagggtacggggnagggcgcgagatagggagggaggcgacggacgggcggggtatagatcgtcggcggacgaggggagtnggagcgggcgnggagncggtacgagagatcgacgggtagcgcgacgggcgtaggacggcggcgaggggcgagggagcgggcgcggcgcgggcgaaggcgcggagagaggcgtcggnagganggggcgggggagggcgcgttcggagagaggaggtcggagagaggagagaatcggagggagt

SEQ ID NO: 24182 - DNA, 663 bp, Artificial Sequence
  chemically treated genomic DNA (Homo sapiens) CpG-island No: 24182
  unsure (62, 67, 167, 172, 183, 250, 294, 310, 325, 345, 365, 381..382)
  unsure (387, 467, 535, 576..577, 604, 609, 650)
actccctccgattctctcctctctccgacctcctctctccgaacgcgccctcccccgccccntcctnccgacgcctctctccgcgccttcgcccgcgccgcgcccgctccctcgcccctcgccgccgtcctacgcccgtcgcgctacccgtcgatctctcgtaccgnctccncgcccgctccnactcccctcgtccgccgacgatctataccccgcccgtccgtcgcctccctccctatctcgcgccctnccccgtaccctccgcgcgccgtcgccgcgcgactacgacgcgcntccgccgcgcgccgcnccgccccccgtaacnaacgaccgtccctaactctntctactcgaaacgcgttaancgatccgacgcgcgannnacgnccgaactattactctctctccgtcgcgaccgacgcgccgcgcgccgcgacccgccgccctcgcccccctcgcccgccgcnacgttcgcgttcctcgcgcccgccctcgaccgcccgatacgaccgccgacccccgaaaactccgcgtncgccccccgcgacctaaacccccccccccgccccgcccgcnnactcgccgatccgacgcgcccccgcgnccccnaaaccgcgaaaaccgaaacgcgaaaacgacctaaacccganaacgaccgacccc

SEQ ID NO: 24183 - DNA, 663 bp, Artificial Sequence
  chemically treated genomic DNA (Homo sapiens) CpG-island No: 24183
  unsure (62, 67, 167, 172, 183, 250, 294, 310, 325, 345, 365, 381..382)
  unsure (387, 467, 535, 576..577, 604, 609, 650)
gtttttttcggttttttttttttttcggtttttttttttcgggcgcgttttttttcgttttnttttntcggcgttttttttcgcgttttcgttcgcgtcgcgttcgttttttcgtttttcgtcgtcgttttgcgttcgtcgcgttgttcgtcggtttttcgtgtcgnttttncgttcgttttngtttttttcgttcgtcggcggtttgtgtttcgttcgttcgtcgtttttttttttgtttcgcgttttntttcgtgtttttcgcgcgtcgtcgtcgcgcggttgcggcgcgtnttcgtcgcgcgtcgtntcgtttttcgtggtnggcggtcgtttttggttttntttgttcggggcgcgttggncggttcggcgcgcggnnngcgntcgggttgttgtttttttttcgtcgcggtcggcgcgtcgcgcgtcgcggttcgtcgttttcgtttttttcgttcgtcgtngcgttcgcgtttttcgcgttcgttttcggtcgttcggtgcggtcgtcggttttcgggggtttcgcgtncgtttttcgcggtttgggttttttttttcgtttcgttcgtnngttcgtcggttcggcgcgttttcgcgnttttngggtcgcgggggtcggggcgcgggggcggtttgggttcggnggcggtcggtttt

SEQ ID NO: 24184 - DNA, 663 bp, Artificial Sequence
  chemically treated genomic DNA (Homo sapiens) CpG-island No: 24184
  unsure (14, 55, 60, 87..88, 129, 197, 277, 281..282, 299, 319, 339)
  unsure (354, 370, 414, 481, 492, 497, 597, 602)
aaaaccgaccgccnccgaacccaaaccgcccccgcgccccgacccccgcgacccnaaaancgcgaaaacgcgccgaaccgacgaacnnacgaacgaaacgaaaaaaaaaacccaaaccgcgaaaaacgnacgcgaaacccccgaaaaccgacgaccgcaccgaacgaccgaaaacgaacgcgaaaaacgcgaacgcnacgacgaacgaaaaaaacgaaaacgacgaaccgcgacgcgcgacgcgccgaccgcgacgaaaaaaaaacaacaacccgancgcnnnccgcgcgccgaaccgnccaacgcgccccgaacaaanaaaaccaaaaacgaccgccnaccacgaaaaacganacgacgcgcgacgaanacgcgccgcaaccgcgcgacgacgacgcgcgaaaaacacgaaanaaaacgcgaaacaaaaaaaaaaacgacgaacgaacgaaacacaaaccgccgacgaacgaaaaaaacnaaaacgaacgnaaaancgacacgaaaaaccgacgaacaacgcgacgaacgcaaaacgacgacgaaaaacgaaaaaacgaacgcgacgcgaacgaaaacgcgaaaaaaaacgccganaaaanaaaacgaaaaaaaacgcgcccgaaaaaaaaaaaccgaaaaaaaaaaaaaaccgaaaaaaac

SEQ ID NO: 24185 - DNA, 689 bp, Artificial Sequence
  chemically treated genomic DNA (Homo sapiens) CpG-island No: 24185
  unsure (29, 33, 202, 355, 362, 493, 672)
gcggtcgggggcggggcgggacggacggngttnggaagggggggcggggggcgcgggcgcgggggggtcgaaatttttcgggggcggttcgcggcggggggggcgggggggggtcgagggaagcgcggacgggggcgttcgggcggggggcgtacgtaggggcgttattcgggcggaggggtcgatagcgggggcggcggtnatttttaggggcgagggcggggcggggggcgcggggcgggaggaaggcgggggtcggtcgggacgcgcgggcgcgcggcggagcgacgcggtatcggagagggtagcgtcgcgggggcggagggcggcgcgtagcggtagcggcgggggcggngcgggancgaggggagaggagtagggtagcgcggcgcggcgggagtaggacgaggaagaggagcgggcggtcgggcgggaaggcgagttagtagagcggaaaacggcgcgaggacgaacggaggcgggcgaggaatanggcgcgtcgtcgcgcgagaagagagagagagggagggggagcgacgagagaagtagggagcgaggcggaggcgaagcgagtacggggagcgagggaaagtataaggcggagggagagtatagaagaagagagacggagaaggagacggagtatagtaagtagagaataagcgattagancgggggaagaagggcga

SEQ ID NO: 24186 - DNA, 689 bp, Artificial Sequence
  chemically treated genomic DNA (Homo sapiens) CpG-island No: 24186
  unsure (18, 197, 328, 335, 488, 657, 661)
tcgcccttcttcccccgntctaatcgcttattctctacttactatactccgtctccttctccgtctctcttcttctatactctccctccgccttatactttccctcgctccccgtactcgcttcgcctccgcctcgctccctacttctctcgtcgctccccctccctctctctctcttctcgcgcgacgacgcgccntattcctcgcccgcctccgttcgtcctcgcgccgttttccgctctactaactcgccttcccgcccgaccgcccgctcctcttcctcgtcctactcccgccgcgccgcgctaccctactcctctcccctcgntcccgcnccgcccccgccgctaccgctacgcgccgccctccgcccccgcgacgctaccctctccgataccgcgtcgctccgccgcgcgcccgcgcgtcccgaccgacccccgccttcctcccgccccgcgccccccgccccgccctcgcccctaaaaatnaccgccgcccccgctatcgacccctccgcccgaataacgcccctacgtacgccccccgcccgaacgcccccgtccgcgcttccctcgacccccccccgccccccccgccgcgaaccgcccccgaaaaatttcgacccccccgcgcccgcgccccccgcccccccttccnaacnccgtccgtcccgccccgcccccgaccgc

SEQ ID NO: 24187 - DNA, 689 bp, Artificial Sequence
  chemically treated genomic DNA (Homo sapiens) CpG-island No: 24187
  unsure (18, 197, 328, 335, 488, 657, 661)
tcgttttttttttttcgntttggtcgtttgttttttgtttgttgtgtttcgttttttttttcgtttttttttttttgtgtttttttttcgttttgtgttttttttcgtttttcgtgttcgtttcgttttcgtttcgttttttgtttttttcgtcgtttttttttttttttttttttttttcgcgcggcggcgcgttntgtttttcgttcgttttcgttcgttttcgcgtcgtttttcgttttgttggttcgttttttcgttcggtcgttcgtttttttttttcgttttgttttcgtcgcgtcgcgttgttttgttttttttttttcgntttcgtntcgttttcgtcgttgtcgttgcgcgtcgtttttcgttttcgcggcgttgtttttttcggtgtcgcgtcgtttcgtcgcgcgttcgcgcgtttcggtcggttttcgtttttttttcgtttcgcgtttttcgtttcgttttcgtttttgggggtngtcgtcgttttcgttgtcggttttttcgttcgggtggcgtttttgcgtgcgtttttcgttcgggcgttttcgttcgcgtttttttcggttttttttcgtttttttcgtcgcgggtcgttttcggggggtttcggttttttcgcgttcgcgtttttcgtttttttttttnggtntcgttcgtttcgtttcgttttcggtcgt

SEQ ID NO: 24188 - DNA, 689 bp, Artificial Sequence
  chemically treated genomic DNA (Homo sapiens) CpG-island No: 24188
  unsure (29, 33, 202, 355, 362, 493, 672)
acgaccgaaaacgaaacgaaacgaacganaccnaaaaaaaaaaacgaaaaacgcgaacgcgaaaaaaccgaaaccccccgaaaacgacccgcgacgaaaaaaacgaaaaaaaaccgaaaaaaacgcgaacgaaaacgcccgaacgaaaaacgcacgcaaaaacgccacccgaacgaaaaaaccgacaacgaaaacgacgacnacccccaaaaacgaaaacgaaacgaaaaacgcgaaacgaaaaaaaaacgaaaaccgaccgaaacgcgcgaacgcgcgacgaaacgacgcgacaccgaaaaaaacaacgccgcgaaaacgaaaaacgacgcgcaacgacaacgacgaaaacganacgaaancgaaaaaaaaaaaacaaaacaacgcgacgcgacgaaaacaaaacgaaaaaaaaaaacgaacgaccgaacgaaaaaacgaaccaacaaaacgaaaaacgacgcgaaaacgaacgaaaacgaacgaaaaacanaacgcgccgccgcgcgaaaaaaaaaaaaaaaaaaaaaaaaacgacgaaaaaaacaaaaaacgaaacgaaaacgaaacgaacacgaaaaacgaaaaaaaacacaaaacgaaaaaaaaacacaaaaaaaaaaaaacgaaaaaaaaaacgaaacacaacaaacaaaaaacaaacgaccaaancgaaaaaaaaaaaacga

SEQ ID NO: 24189 - DNA, 596 bp, Artificial Sequence
  chemically treated genomic DNA (Homo sapiens) CpG-island No: 24189
  unsure (13, 38, 65, 97, 152, 192, 285, 287, 305, 456, 497, 511..512)
  unsure (568, 576)
tacgcggttcggnggcgcggttttttcgcgttcggggncgcggtcggcggcgtcgtcgtcgcgtngcgggggcggcggtttttattagggttcgcgngtcgttcgcgtttcggtttcgcggggcggtcggcggcgtcgtattttcggggcgngcggttattacgggcgggcgcggtttcgcggcgtcggttngagcgggtcgacggtttttcgtttcgcgaacgggcgtcggtcgtacggttcgggcggggcgtattcggtcgcgcgggttcggtcgattagcgntntcggtcggaggtcgtttntagggggcgcgcgcgcgcgcgtttcgatagtcgttcgcgtcgcggttcgcgcggcggcgtcgcgggtagcgaggggttcggcgatttcgtcgattcggacgggtcgtatttatcgtcgttttcgcgcggcgcgggcgcgatttcgataggnggcgttcgtatttcgttttcgcgtcgtcgcgggattcgcgncggcgttcgcgttnnggttcggtcgtcgcgcgcgcgggtattagtaggggagtaagtttagcgtcgcgttncggcgttnagaggatcggacgggcgagg

SEQ ID NO: 24190 - DNA, 596 bp, Artificial Sequence
  chemically treated genomic DNA (Homo sapiens) CpG-island No: 24190
  unsure (21, 29, 85..86, 100, 141, 292, 310, 312, 405, 445, 500, 532)
  unsure (559, 584)
cctcgcccgtccgatcctctnaacgccgnaacgcgacgctaaacttactcccctactaatacccgcgcgcgcgacgaccgaaccnnaacgcgaacgccgncgcgaatcccgcgacgacgcgaaaacgaaatacgaacgccncctatcgaaatcgcgcccgcgccgcgcgaaaacgacgataaatacgacccgtccgaatcgacgaaatcgccgaacccctcgctacccgcgacgccgccgcgcgaaccgcgacgcgaacgactatcgaaacgcgcgcgcgcgcgccccctanaaacgacctccgaccganancgctaatcgaccgaacccgcgcgaccgaatacgccccgcccgaaccgtacgaccgacgcccgttcgcgaaacgaaaaaccgtcgacccgctcnaaccgacgccgcgaaaccgcgcccgcccgtaataaccgcncgccccgaaaatacgacgccgccgaccgccccgcgaaaccgaaacgcgaacgacncgcgaaccctaataaaaaccgccgcccccgcnacgcgacgacgacgccgccgaccgcgnccccgaacgcgaaaaaaccgcgccnccgaaccgcgta

SEQ ID NO: 24191 - DNA, 596 bp, Artificial Sequence
  chemically treated genomic DNA (Homo sapiens) CpG-island No: 24191
  unsure (21, 29, 85..86, 100, 141, 292, 310, 312, 405, 445, 500, 532)
  unsure (559, 584)
tttcgttcgttcggttttttnggcgtcgnggcgcggcgttgggtttgtttttttgttggtgttcgcgcgcgcggcggtcgggttnnggcgcgggcgtcgncgcgggtttcgcggcggcgcgggggcggggtgcgggcgttntttgtcggggtcgcgttcgcgtcgcgcgggggcggcggtgggtgcggttcgttcgggtcggcggggtcgtcgggtttttcgttgttcgcggcgtcgtcgcgcgggtcgcggcgcgggcggttgtcggggcgcgcgcgcgcgcgttttttgngggcggttttcggtcggngncgttggtcggtcgggttcgcgcggtcgggtgcgtttcgttcgggtcgtgcggtcggcgttcgttcgcggggcggggggtcgtcggttcgtttnggtcggcgtcgcggggtcgcgttcgttcgtggtggtcgtncgtttcgggggtgcggcgtcgtcggtcgtttcgcggggtcggggcgcgggcggtncgcgggttttggtgggggtcgtcgttttcgtngcgcggcggcggcgtcgtcggtcgcgntttcgggcgcgggggggtcgcgttntcgggtcgcgtg

SEQ ID NO: 24192 - DNA, 596 bp, Artificial Sequence
  chemically treated genomic DNA (Homo sapiens) CpG-island No: 24192
  unsure (13, 38, 65, 97, 152, 192, 285, 287, 305, 456, 497, 511..512)
  unsure (568, 576)
cacgcgacccganaacgcgacccccccgcgcccgaaancgcgaccgacgacgccgccgccgcgcnacgaaaacgacgacccccaccaaaacccgcgnaccgcccgcgccccgaccccgcgaaacgaccgacgacgccgcacccccgaaacgnacgaccaccacgaacgaacgcgaccccgcgacgccgaccnaaacgaaccgacgaccccccgccccgcgaacgaacgccgaccgcacgacccgaacgaaacgcacccgaccgcgcgaacccgaccgaccaacgncnccgaccgaaaaccgcccncaaaaaacgcgcgcgcgcgcgccccgacaaccgcccgcgccgcgacccgcgcgacgacgccgcgaacaacgaaaaacccgacgaccccgccgacccgaacgaaccgcacccaccgccgcccccgcgcgacgcgaacgcgaccccgacaaanaacgcccgcaccccgcccccgcgccgccgcgaaacccgcgncgacgcccgcgccnnaacccgaccgccgcgcgcgcgaacaccaacaaaaaaacaaacccaacgccgcgccncgacgccnaaaaaaccgaacgaacgaaa

SEQ ID NO: 24193 - DNA, 577 bp, Artificial Sequence
  chemically treated genomic DNA (Homo sapiens) CpG-island No: 24193
  unsure (4, 17, 56..57, 240, 325, 355, 388, 564)
gggngcgtcgggggcgnacgggttcggcggtcggggcggcgtcggggcggcggggnngacggggggggcgcgcgggcgtcgggggcgttcggcgtcgtcggggtcgcggtcgtcgggcggcgcgcgtcgggagggcggggggggggggggtcgcgggggcggtcggtcgggggaggggcggacgcgggggaggcggcgcgcggtcggcgggaggcggagggtatagtcgatagggggttncgcgcgcgggcgaagcggttcgcggcgggggcggagcggggggggagggcggggaacgggaggggggggttcgcggggagaaaangggggaagcggacggttagagagggggagnggggagggggagggagggagcggggcggcgcgnggtagggggggagagagggggaaggacgggggcggcgggggggcgcgcgcgggggcggagagggcgcgggggggggggagcgaggggggcgggggggcgagcgagcgggagcggggagggtaaggtattaggaggtagaagaggcggcgggggcgaggcgggaaggggggagtagnaagaggggatagg

SEQ ID NO: 24194 - DNA, 577 bp, Artificial Sequence
  chemically treated genomic DNA (Homo sapiens) CpG-island No: 24194
  unsure (14, 190, 223, 253, 338, 521..522, 561, 574)
cctatcccctcttnctactccccccttcccgcctcgcccccgccgcctcttctacctcctaataccttaccctccccgctcccgctcgctcgcccccccgcccccctcgctcccccccccccgcgccctctccgcccccgcgcgcgcccccccgccgcccccgtccttccccctctctccccccctaccncgcgccgccccgctccctccctccccctccccnctccccctctctaaccgtccgcttcccccnttttctccccgcgaacccccccctcccgttccccgccctccccccccgctccgcccccgccgcgaaccgcttcgcccgcgcgcgnaaccccctatcgactataccctccgcctcccgccgaccgcgcgccgcctcccccgcgtccgcccctcccccgaccgaccgcccccgcgaccccccccccccccgccctcccgacgcgcgccgcccgacgaccgcgaccccgacgacgccgaacgcccccgacgcccgcgcgccccccccgtcnnccccgccgccccgacgccgccccgaccgccgaacccgtncgcccccgacgcnccc

SEQ ID NO: 24195 - DNA, 577 bp, Artificial Sequence
  chemically treated genomic DNA (Homo sapiens) CpG-island No: 24195
  unsure (14, 190, 223, 253, 338, 521..522, 561, 574)
tttgtttttttttnttgttttttttttttcgtttcgttttcgtcgttttttttgttttttggtgttttgtttttttcgttttcgttcgttcgttttttcgtttttttcgttttttttttttcgcgtttttttcgttttcgcgcgcgttttttcgtcgttttcgtttttttttttttttttttttttgttncgcgtcgtttcgttttttttttttttttttttnttttttttttttggtcgttcgttttttttntttttttttcgcgggtttttttttttcgtttttcgtttttttttttcgtttcgttttcgtcgcgggtcgtttcgttcgcgcgcgnggttttttgtcggttgtgtttttcgtttttcgtcggtcgcgcgtcgtttttttcgcgttcgtttttttttcggtcggtcgttttcgcggtttttttttttttcgttttttcggcgcgcgtcgttcggcggtcgcggtttcggcggcgtcgggcgttttcggcgttcgcgcgtttttttcgttnntttcgtcgtttcggcgtcgtttcggtcgtcgggttcgtncgttttcggcgtnttt

SEQ ID NO: 24196 - DNA, 577 bp, Artificial Sequence
  chemically treated genomic DNA (Homo sapiens) CpG-island No: 24196
  unsure (4, 17, 56..57, 240, 325, 355, 388, 564)
aaanacgccgaaaacgnacgaacccgacgaccgaaacgacgccgaaacgacgaaannaacgaaaaaaacgcgcgaacgccgaaaacgcccgacgccgccgaaaccgcgaccgccgaacgacgcgcgccgaaaaaacgaaaaaaaaaaaaaccgcgaaaacgaccgaccgaaaaaaaaacgaacgcgaaaaaaacgacgcgcgaccgacgaaaaacgaaaaacacaaccgacaaaaaaccncgcgcgcgaacgaaacgacccgcgacgaaaacgaaacgaaaaaaaaaaacgaaaaacgaaaaaaaaaaacccgcgaaaaaaaaanaaaaaaaacgaacgaccaaaaaaaaaaaanaaaaaaaaaaaaaaaaaaaacgaaacgacgcgnaacaaaaaaaaaaaaaaaaaaaaaaacgaaaacgacgaaaaaacgcgcgcgaaaacgaaaaaaacgcgaaaaaaaaaaaacgaaaaaaacgaaaaaacgaacgaacgaaaacgaaaaaaacaaaacaccaaaaaacaaaaaaaacgacgaaaacgaaacgaaaaaaaaaaaacaanaaaaaaaaacaaa

SEQ ID NO: 24197 - DNA, 585 bp, Artificial Sequence
  chemically treated genomic DNA (Homo sapiens) CpG-island No: 24197
tgcgcggttgtttaggagatgttagtgtgaaggagggaagagaattggttcgttaagtttcgtagacgatgaaaggtacgtatatcgtttcgggagtaaagttaagaggagcgtgcgttatcgcgatcgagtagggattattggagagtgagtttagggtaaatatgaggagtacgcgaacgacgttatcggacgggtggagagtttttagggttattatcgaattttacggcgaagataataaggacgaaggttagttaacgagatagagacgtcgttatataatagcgaagatacggattcgcgacgttaatttaattatggacgttttagtagtatcggcgggatatcgtatcgtttagaggaagtgatatagcgtttagttttttaattattagggtttttcgattattttacggtagattatttcgtattagaagtcgatattttaaaataatagattaatacgttagagcgcgtagcggacgagagacgtttttaagagagagaataagtaagaaaagtataataaagaggggtacgcggtggcggcgttataattagtggattttttttgtgtagtat

SEQ ID NO: 24198 - DNA, 585 bp, Artificial Sequence
  chemically treated genomic DNA (Homo sapiens) CpG-island No: 24198
atactacacaaaaaaaatccactaattataacgccgccaccgcgtacccctctttattatacttttcttacttattctctctcttaaaaacgtctctcgtccgctacgcgctctaacgtattaatctattattttaaaatatcgacttctaatacgaaataatctaccgtaaaataatcgaaaaaccctaataattaaaaaactaaacgctatatcacttcctctaaacgatacgatatcccgccgatactactaaaacgtccataattaaattaacgtcgcgaatccgtatcttcgctattatataacgacgtctctatctcgttaactaaccttcgtccttattatcttcgccgtaaaattcgataataaccctaaaaactctccacccgtccgataacgtcgttcgcgtactcctcatatttaccctaaactcactctccaataatccctactcgatcgcgataacgcacgctcctcttaactttactcccgaaacgatatacgtacctttcatcgtctacgaaacttaacgaaccaattctcttccctccttcacactaacatctcctaaacaaccgcgca

SEQ ID NO: 24199 - DNA, 585 bp, Artificial Sequence
  chemically treated genomic DNA (Homo sapiens) CpG-island No: 24199
atattatataagggggatttattagttatagcgtcgttatcgcgtgtttttttttgttgtattttttttgtttatttttttttttgggggcgtttttcgttcgttgcgcgttttggcgtgttggtttattgttttggggtgtcgatttttaatacggggtggtttatcgtaggatggtcgaggggttttgatggttaaagggttgggcgttgtgttattttttttgggcggtgcggtgtttcgtcgatgttgttgaggcgtttatggttaggttggcgtcgcgggttcgtgttttcgttgttgtatggcggcgtttttgtttcgttgattgattttcgtttttattgttttcgtcgtgaaattcggtggtaattttggggattttttattcgttcgatggcgtcgttcgcgtgttttttatatttgttttggatttattttttagtggtttttgttcggtcgcggtggcgtacgttttttttggttttgttttcgaagcggtgtacgtgttttttatcgtttgcgagatttggcgagttaattttttttttttttttatattgatattttttgagtagtcgcgta

SEQ ID NO: 24200 - DNA, 585 bp, Artificial Sequence
  chemically treated genomic DNA (Homo sapiens) CpG-island No: 24200
tacgcgactactcaaaaaatatcaatataaaaaaaaaaaaaaaattaactcgccaaatctcgcaaacgataaaaaacacgtacaccgcttcgaaaacaaaaccaaaaaaaacgtacgccaccgcgaccgaacaaaaaccactaaaaaataaatccaaaacaaatataaaaaacacgcgaacgacgccatcgaacgaataaaaaatccccaaaattaccaccgaatttcacgacgaaaacaataaaaacgaaaatcaatcaacgaaacaaaaacgccgccatacaacaacgaaaacacgaacccgcgacgccaacctaaccataaacgcctcaacaacatcgacgaaacaccgcaccgcccaaaaaaaataacacaacgcccaaccctttaaccatcaaaacccctcgaccatcctacgataaaccaccccgtattaaaaatcgacaccccaaaacaataaaccaacacgccaaaacgcgcaacgaacgaaaaacgcccccaaaaaaaaaaataaacaaaaaaaatacaacaaaaaaaaacacgcgataacgacgctataactaataaatcccccttatataatat

SEQ ID NO: 24201 - DNA, 952 bp, Artificial Sequence
  chemically treated genomic DNA (Homo sapiens) CpG-island No: 24201
taggcgttgtattaggcgggttttgaaacgcgtattttgcgtggattggatgaattgggttgggatgttgtcgggtaattgattgatggggaagggcgattggttaattgcgtgtggaaaatttgggcgtgggaaatcgcgtttgattagattcgtgaagttagcgatcgtgagtttgttgcggtgttaattcgtatcggttattcgtaaaacgaagtgcgttttatcgacgtattgttgcgttcggaagtgttggtttttgagtcgttgtggacggtgattttcggtaataaagcgattttgtcgattttttggtcgttgtttaggacgataacggcgagattatcgattcgtataacggtttgggcgatttgtaaaatcgtttgttgcgttatgtttttttcgtttttggcgaagattcgttacgcgtattgcgcgtggcgcgttttgttgcgcgttatgcggagcgcggtttaaaaattgtcgattatattttggcgttgatgcgcgagatgatttatgcgggtgaattggaatatttgacgtttgaacgggtatggaaagagacggaaagcgtttttattattcgtaatttataggtgtttttttaggtattgcgcgattgcggcgtattgcgcgttttattttcggaaattgacgtattgtttggcgtttcggtttttgttaagtggtattcggaaatcgatacgggtatttatattttaatgacgtttttaatggcggcgatgttgagttcgtaggtcgatgttcgtttcgtaattttatgttacgatttcggtaaaggggtgacgtcgttagaattttgggtcgcgttatttattggttatgggtttcggcgggttgtttaagttagttgggaataaatttattgtttagtcggttttgtcgtcgtggtttaaaatggtaaattgtagtcgaattgttaaggtta

SEQ ID NO: 24202 - DNA, 952 bp, Artificial Sequence
  chemically treated genomic DNA (Homo sapiens) CpG-island No: 24202
taaccttaacaattcgactacaatttaccattttaaaccacgacgacaaaaccgactaaacaataaatttattcccaactaacttaaacaacccgccgaaacccataaccaataaataacgcgacccaaaattctaacgacgtcacccctttaccgaaatcgtaacataaaattacgaaacgaacatcgacctacgaactcaacatcgccgccattaaaaacgtcattaaaatataaatacccgtatcgatttccgaataccacttaacaaaaaccgaaacgccaaacaatacgtcaatttccgaaaataaaacgcgcaatacgccgcaatcgcgcaatacctaaaaaaacacctataaattacgaataataaaaacgctttccgtctctttccatacccgttcaaacgtcaaatattccaattcacccgcataaatcatctcgcgcatcaacgccaaaatataatcgacaatttttaaaccgcgctccgcataacgcgcaacaaaacgcgccacgcgcaatacgcgtaacgaatcttcgccaaaaacgaaaaaaacataacgcaacaaacgattttacaaatcgcccaaaccgttatacgaatcgataatctcgccgttatcgtcctaaacaacgaccaaaaaatcgacaaaatcgctttattaccgaaaatcaccgtccacaacgactcaaaaaccaacacttccgaacgcaacaatacgtcgataaaacgcacttcgttttacgaataaccgatacgaattaacaccgcaacaaactcacgatcgctaacttcacgaatctaatcaaacgcgatttcccacgcccaaattttccacacgcaattaaccaatcgcccttccccatcaatcaattacccgacaacatcccaacccaattcatccaatccacgcaaaatacgcgtttcaaaacccgcctaatacaacgccta

SEQ ID NO: 24203 - DNA, 952 bp, Artificial Sequence
  chemically treated genomic DNA (Homo sapiens) CpG-island No: 24203
tggttttaataattcggttgtaatttattattttgggttacggcggtaagatcggttgggtaataggtttgtttttaattaatttaaataattcgtcggggtttatgattaatagatgacgcggtttagagttttggcggcgttatttttttatcgagatcgtggtataaagttgcgaaacggatatcgatttgcggatttagtatcgtcgttattgagagcgttattaaggtatgaatattcgtatcgattttcggatgttatttggtaggggtcggaacgttaaatagtgcgttaattttcgggaataaaacgcgtagtgcgtcgtaatcgcgtagtatttggaagaatatttgtggattgcgggtggtgagggcgtttttcgtttttttttatattcgtttaggcgttaggtgttttagtttattcgtatgggttatttcgcgtattaacgttagagtataatcggtaatttttaaatcgcgtttcgtataacgcgtagtaaaacgcgttacgcgtaatacgcgtaacggattttcgttaaaagcgggggaaatatggcgtaatagacgattttgtagatcgtttagatcgttgtacgggtcgataatttcgtcgttatcgttttgggtagcgattagaggatcggtagaatcgttttgttgtcggggattatcgtttatagcggtttaaagattagtattttcgggcgtagtaatacgtcgataagacgtatttcgttttgcggatgatcggtacggattggtatcgtagtaaatttacggtcgttaattttacgaatttgattaaacgcggttttttacgtttaggttttttatacgtagttaattagtcgtttttttttattaattagttgttcggtagtattttagtttagtttatttaatttacgtaagatacgcgttttaaagttcgtttggtgtagcgtttg

SEQ ID NO: 24204 - DNA, 952 bp, Artificial Sequence
  chemically treated genomic DNA (Homo sapiens) CpG-island No: 24204
caaacgctacaccaaacgaactttaaaacgcgtatcttacgtaaattaaataaactaaactaaaatactaccgaacaactaattaataaaaaaaaacgactaattaactacgtataaaaaacctaaacgtaaaaaaccgcgtttaatcaaattcgtaaaattaacgaccgtaaatttactacgataccaatccgtaccgatcatccgcaaaacgaaatacgtcttatcgacgtattactacgcccgaaaatactaatctttaaaccgctataaacgataatccccgacaacaaaacgattctaccgatcctctaatcgctacccaaaacgataacgacgaaattatcgacccgtacaacgatctaaacgatctacaaaatcgtctattacgccatatttcccccgcttttaacgaaaatccgttacgcgtattacgcgtaacgcgttttactacgcgttatacgaaacgcgatttaaaaattaccgattatactctaacgttaatacgcgaaataacccatacgaataaactaaaacacctaacgcctaaacgaatataaaaaaaaacgaaaaacgccctcaccacccgcaatccacaaatattcttccaaatactacgcgattacgacgcactacgcgttttattcccgaaaattaacgcactatttaacgttccgacccctaccaaataacatccgaaaatcgatacgaatattcataccttaataacgctctcaataacgacgatactaaatccgcaaatcgatatccgtttcgcaactttataccacgatctcgataaaaaaataacgccgccaaaactctaaaccgcgtcatctattaatcataaaccccgacgaattatttaaattaattaaaaacaaacctattacccaaccgatcttaccgccgtaacccaaaataataaattacaaccgaattattaaaacca

SEQ ID NO: 24205 - DNA, 550 bp, Artificial Sequence
  chemically treated genomic DNA (Homo sapiens) CpG-island No: 24205
acgataaatagagatttattcgataatcgttaaatacgagcgaacgtcgttttaatatatatataaaagtatattaatagattagacgttatttatatttaatttcgattcgtcggtcgttttttattcgtaacgtatatttagtaagtttacgaagaagttattgtttaatacgttaacgcggttagtgaagacgtcgtttttgttgttatcgaagttggtatttagtatacgtatgtcgtttattaggagacgtatttaaaaaacggttatttttagttgttgtgttttgtcgattagtagtgattcggtggtggaaacgtttagacgagcgcgatagttacggaaatcgttagtaattggttttagtagtttaaatattttaatgttagtttgattttgacgcgtattaacgcgattcggcgtaaacggtatatgaatgtttaaatttgcggcgtttgcggtttttttaatattaattatattagttagtattatgatattcgttagcgaggttttattagattttttttggattttttttagaata

SEQ ID NO: 24206 - DNA, 550 bp, Artificial Sequence
  chemically treated genomic DNA (Homo sapiens) CpG-island No: 24206
tattctaaaaaaaatccaaaaaaaatctaataaaacctcgctaacgaatatcataatactaactaatataattaatattaaaaaaaccgcaaacgccgcaaatttaaacattcatataccgtttacgccgaatcgcgttaatacgcgtcaaaatcaaactaacattaaaatatttaaactactaaaaccaattactaacgatttccgtaactatcgcgctcgtctaaacgtttccaccaccgaatcactactaatcgacaaaacacaacaactaaaaataaccgttttttaaatacgtctcctaataaacgacatacgtatactaaataccaacttcgataacaacaaaaacgacgtcttcactaaccgcgttaacgtattaaacaataacttcttcgtaaacttactaaatatacgttacgaataaaaaacgaccgacgaatcgaaattaaatataaataacgtctaatctattaatatacttttatatatatattaaaacgacgttcgctcgtatttaacgattatcgaataaatctctatttatcgt

SEQ ID NO: 24207 - DNA, 550 bp, Artificial Sequence
  chemically treated genomic DNA (Homo sapiens) CpG-island No: 24207
tgttttggagaaaatttagaaagagtttggtaaagtttcgttggcggatattatagtgttggttggtgtggttggtgttgagaaagtcgtaagcgtcgtaggtttgagtatttatgtatcgtttgcgtcgggtcgcgttgatgcgcgttaggattagattgatattgagatgtttgagttgttggagttaattgttgacggttttcgtaattatcgcgttcgtttggacgtttttattatcgagttattgttgatcgataaagtatagtaattgaggatgatcgttttttaaatgcgttttttggtgggcggtatgcgtgtattgggtgttaatttcgatggtagtaaaaacggcgtttttattgatcgcgttggcgtattgagtaatgattttttcgtgaatttgttggatatgcgttacgagtggaaagcgatcgacgaatcggggttgggtgtgggtggcgtttggtttattggtgtgtttttgtgtgtatgttggggcggcgttcgttcgtgtttagcggttgtcgggtgggtttttgtttgtcgt

SEQ ID NO: 24208 - DNA, 550 bp, Artificial Sequence
  chemically treated genomic DNA (Homo sapiens) CpG-island No: 24208
acgacaaacaaaaacccacccgacaaccgctaaacacgaacgaacgccgccccaacatacacacaaaaacacaccaataaaccaaacgccacccacacccaaccccgattcgtcgatcgctttccactcgtaacgcatatccaacaaattcacgaaaaaatcattactcaatacgccaacgcgatcaataaaaacgccgtttttactaccatcgaaattaacacccaatacacgcataccgcccaccaaaaaacgcatttaaaaaacgatcatcctcaattactatactttatcgatcaacaataactcgataataaaaacgtccaaacgaacgcgataattacgaaaaccgtcaacaattaactccaacaactcaaacatctcaatatcaatctaatcctaacgcgcatcaacgcgacccgacgcaaacgatacataaatactcaaacctacgacgcttacgactttctcaacaccaaccacaccaaccaacactataatatccgccaacgaaactttaccaaactctttctaaattttctccaaaaca

SEQ ID NO: 24209 - DNA, 518 bp, Artificial Sequence
  chemically treated genomic DNA (Homo sapiens) CpG-island No: 24209
gtatcgatagtgtcgaggatggtttttattatggtttaggtttttagcgtttcggtttcggtcgcgtcggtaaatttatcgaataattagaaatcggcgtcgttaacgtggttgataataatcgaattattagcgatataaatcgatagcgtcgttatttgcgtatcggagtagtttagttgtttaataatcggtattattagttttatcgtcgttaaataggttacggtggtagaattttgaatgatgcgtattgtagttgttagtacgaagtaggtgatagtaatcggtaggtttatgtcggttaacgtttcgtttagtgtcggatttacgttagagttaattagtatttgtttgaatacgtcgttcgtattaattattagtagaatgattttcgtcggttgtagcgcgtgatcgtaaatttttattattttgttttttggtatgttttgacgtattgttagatcgtaaatcgttattagataagtaattagaatcgcggtaaacggatgatcgat

SEQ ID NO: 24210 - DNA, 518 bp, Artificial Sequence
  chemically treated genomic DNA (Homo sapiens) CpG-island No: 24210
atcgatcatccgtttaccgcgattctaattacttatctaataacgatttacgatctaacaatacgtcaaaacataccaaaaaacaaaataataaaaatttacgatcacgcgctacaaccgacgaaaatcattctactaataattaatacgaacgacgtattcaaacaaatactaattaactctaacgtaaatccgacactaaacgaaacgttaaccgacataaacctaccgattactatcacctacttcgtactaacaactacaatacgcatcattcaaaattctaccaccgtaacctatttaacgacgataaaactaataataccgattattaaacaactaaactactccgatacgcaaataacgacgctatcgatttatatcgctaataattcgattattatcaaccacgttaacgacgccgatttctaattattcgataaatttaccgacgcgaccgaaaccgaaacgctaaaaacctaaaccataataaaaaccatcctcgacactatcgatac

SEQ ID NO: 24211 - DNA, 518 bp, Artificial Sequence
  chemically treated genomic DNA (Homo sapiens) CpG-island No: 24211
atcggttattcgtttatcgcgattttggttgtttgtttggtggcgatttacggtttggtaatgcgttagggtatgttaaaagataaagtgatggagatttgcggttacgcgttgtaatcggcggggattattttgttggtgattggtgcgggcggcgtgtttaaataggtgttggttgattttggcgtaggttcggtattgggcgaagcgttaatcggtatgggtttgtcgattgttattatttgtttcgtgttggtagttgtagtgcgtattatttagggttttgttatcgtagtttgtttaacggcggtaggattggtgatgtcggttattgaataattgaattatttcggtgcgtaaatggcggcgttgtcgatttgtatcgttggtggttcgattgttgttagttacgttaacgacgtcggtttttggttgttcggtaaatttatcggcgcgatcgaagtcgaaacgttgaaaatttggattatgatggaaattattttcggtattgtcggtgt

SEQ ID NO: 24212 - DNA, 518 bp, Artificial Sequence
  chemically treated genomic DNA (Homo sapiens) CpG-island No: 24212
acaccgacaataccgaaaataatttccatcataatccaaattttcaacgtttcgacttcgatcgcgccgataaatttaccgaacaaccaaaaaccgacgtcgttaacgtaactaacaacaatcgaaccaccaacgatacaaatcgacaacgccgccatttacgcaccgaaataattcaattattcaataaccgacatcaccaatcctaccgccgttaaacaaactacgataacaaaaccctaaataatacgcactacaactaccaacacgaaacaaataataacaatcgacaaacccataccgattaacgcttcgcccaataccgaacctacgccaaaatcaaccaacacctatttaaacacgccgcccgcaccaatcaccaacaaaataatccccgccgattacaacgcgtaaccgcaaatctccatcactttatcttttaacataccctaacgcattaccaaaccgtaaatcgccaccaaacaaacaaccaaaatcgcgataaacgaataaccgat

SEQ ID NO: 24213 - DNA, 528 bp, Artificial Sequence
  chemically treated genomic DNA (Homo sapiens) CpG-island No: 24213
ttattatatatcgtattatttttacgtatatttaatattttttaatagttttataattttttatttttttatacggttgttttagcgtttatcgtgttttacgagaattatcgttaatatttggttgttggtggggacggcgttgggattgtagttgaatgagcgtcgtatttggtattattggcggatgcggcgtaaacgttttattcgttttacgcgttaaagagtcggtttgtaggtttgataagacgtattagcgtcgtattaggtattgtgttttattggcggacgcgtttaatggcggtgtttatgatttcggtttttttcgcgatgatcgttacgatcgcgttagtttttacgatagttacgtttatacgttttacgtttattttagttacggtggtagttattattatgacgttattaacggtttttgcgttatttataattgcgatgttagtagttacggtcgcgttagtgattatcgttttagtaattatcgtaatgatcgcgatcgttaatttgtaa

SEQ ID NO: 24214 - DNA, 528 bp, Artificial Sequence
  chemically treated genomic DNA (Homo sapiens) CpG-island No: 24214
ttacaaattaacgatcgcgatcattacgataattactaaaacgataatcactaacgcgaccgtaactactaacatcgcaattataaataacgcaaaaaccgttaataacgtcataataataactaccaccgtaactaaaataaacgtaaaacgtataaacgtaactatcgtaaaaactaacgcgatcgtaacgatcatcgcgaaaaaaaccgaaatcataaacaccgccattaaacgcgtccgccaataaaacacaatacctaatacgacgctaatacgtcttatcaaacctacaaaccgactctttaacgcgtaaaacgaataaaacgtttacgccgcatccgccaataataccaaatacgacgctcattcaactacaatcccaacgccgtccccaccaacaaccaaatattaacgataattctcgtaaaacacgataaacgctaaaacaaccgtataaaaaaataaaaaattataaaactattaaaaaatattaaatatacgtaaaaataatacgatatataataa

SEQ ID NO: 24215 - DNA, 528 bp, Artificial Sequence
  chemically treated genomic DNA (Homo sapiens) CpG-island No: 24215
ttataaattggcgatcgcgattattacggtaattattgggacggtggttattggcgcgatcgtgattattggtatcgtaattatgagtggcgtaaaaatcgttggtggcgttatgataatggttattatcgtggttgggataagcgtaaagcgtatgagcgtggttatcgtgaaggttggcgcgatcgtgacgattatcgcggaaaaggtcggggttatgggtatcgttattaaacgcgttcgttaatggagtataatgtttgatgcgacgttagtgcgttttattaggtttataaatcggttttttaacgcgtagggcggataaggcgtttacgtcgtattcgttaatagtgttagatgcgacgtttatttaattataattttagcgtcgtttttattaataattagatattggcggtggttttcgtgagatacggtggacgttggagtagtcgtgtgggagagtgggggattgtgggattattggggggtgttgggtgtgcgtgagggtggtgcggtgtgtggtgg

SEQ ID NO: 24216 - DNA, 528 bp, Artificial Sequence
  chemically treated genomic DNA (Homo sapiens) CpG-island No: 24216
ccaccacacaccgcaccaccctcacgcacacccaacaccccccaataatcccacaatcccccactctcccacacgactactccaacgtccaccgtatctcacgaaaaccaccgccaatatctaattattaataaaaacgacgctaaaattataattaaataaacgtcgcatctaacactattaacgaatacgacgtaaacgccttatccgccctacgcgttaaaaaaccgatttataaacctaataaaacgcactaacgtcgcatcaaacattatactccattaacgaacgcgtttaataacgatacccataaccccgaccttttccgcgataatcgtcacgatcgcgccaaccttcacgataaccacgctcatacgctttacgcttatcccaaccacgataataaccattatcataacgccaccaacgatttttacgccactcataattacgataccaataatcacgatcgcgccaataaccaccgtcccaataattaccgtaataatcgcgatcgccaatttataa

SEQ ID NO: 24217 - DNA, 887 bp, Artificial Sequence
  chemically treated genomic DNA (Homo sapiens) CpG-island No: 24217
  unsure (126, 259)
cgtcgcgcgttgggatgaaggtgtaatttgcgatttgtttgaaggttatgcgtcgtataaatcgcgttatgttttattcgattacgttcgtattttggcgaacggattcgaatggttggagttggnaggcgcgtagattttgatgtcggtttttttttgttgattatttttatttttacgtatcgtcggttatttcggtgtcggtttatttggggtatttggtgcgatgtttgtatcgttttgtgggttttttatttangtcgggttcgatgtcggtataatcgtttttggcgttttttcgtcgagattttgttagacggtttttttgggcggttaatgtcggttcgtttggttggttcgtttttcgcgcgattttttagttttgttttcggtttggaggcgttcggtttcgggaaagatagtttgttggcggaatttcgtttgcgggaataaatttagttattggtggcgtatcgttatattacgcgcgatgttagcgtcggaagtgaaaattatatcgttttgagcgagtaggagttttttattcgcgcggggtaaaatttgttggttttaagttggtacgttaacggtttgtattatggcgtcggcgtcgagattgatttttggttgtacgtcggattcgacgtgttggttaacggtttacgcgtttatttgtcgtaggcgcgggcgcgttattaatcggtagttttgcggttacgtgattatcgcgtttgtcgtacggagttatcgtttgattagtaaatttattgtcgtcgggtagaaggcgttgttttcgttgaatattatttatatcgtcgtttcgtattttgaggtattgattatcggcgagagtgatattaaaaatttcgttagtcgtgagacgatta

SEQ ID NO: 24218 - DNA, 887 bp, Artificial Sequence
  chemically treated genomic DNA (Homo sapiens) CpG-island No: 24218
  unsure (629, 762)
taatcgtctcacgactaacgaaatttttaatatcactctcgccgataatcaatacctcaaaatacgaaacgacgatataaataatattcaacgaaaacaacgccttctacccgacgacaataaatttactaatcaaacgataactccgtacgacaaacgcgataatcacgtaaccgcaaaactaccgattaataacgcgcccgcgcctacgacaaataaacgcgtaaaccgttaaccaacacgtcgaatccgacgtacaaccaaaaatcaatctcgacgccgacgccataatacaaaccgttaacgtaccaacttaaaaccaacaaattttaccccgcgcgaataaaaaactcctactcgctcaaaacgatataattttcacttccgacgctaacatcgcgcgtaatataacgatacgccaccaataactaaatttattcccgcaaacgaaattccgccaacaaactatctttcccgaaaccgaacgcctccaaaccgaaaacaaaactaaaaaatcgcgcgaaaaacgaaccaaccaaacgaaccgacattaaccgcccaaaaaaaccgtctaacaaaatctcgacgaaaaaacgccaaaaacgattataccgacatcgaacccgacntaaataaaaaacccacaaaacgatacaaacatcgcaccaaataccccaaataaaccgacaccgaaataaccgacgatacgtaaaaataaaaataatcaacaaaaaaaaaccgacatcaaaatctacgcgcctnccaactccaaccattcgaatccgttcgccaaaatacgaacgtaatcgaataaaacataacgcgatttatacgacgcataaccttcaaacaaatcgcaaattacaccttcatcccaacgcgcgacg

SEQ ID NO: 24219 - DNA, 887 bp, Artificial Sequence
  chemically treated genomic DNA (Homo sapiens) CpG-island No: 24219
  unsure (629, 762)
tgatcgttttacgattagcgaagtttttggtgttattttcgtcgatgattagtgttttaagatgcggagcggcgatatgaatgatatttagcgaagatagcgttttttgttcgacggtaataaatttgttggttaggcgataatttcgtgcggtaggcgcggtggttacgtagtcgtaggattgtcgattgatagcgcgttcgcgtttgcggtagatgggcgcgtgagtcgttgattagtacgtcgaattcggcgtgtagttagagattaatttcgacgtcgacgttataatatagatcgttagcgtgttagtttaaggttaatagattttgtttcgcgcgggtaaaaaatttttgttcgtttagggcgatatggtttttattttcggcgttggtatcgcgcgtgatgtagcgatgcgttattagtaattgagtttgttttcgtaggcggagtttcgttagtaggttgtttttttcggagtcggacgtttttaaatcgagaataggattgaagaatcgcgcggagaacgggttaattaaacgggtcgatattggtcgtttaaaaaggtcgtttggtaaggtttcggcgagggaacgttagaaacggttatatcgatatcgaattcggtntgggtaagaagtttataaaacggtgtaaatatcgtattaagtgttttaggtagatcggtatcgaggtgatcgacggtacgtgggggtaaagatggttagtagagagaggtcggtattaagatttgcgcgtttnttagttttagttattcggattcgttcgttagaatacgggcgtaatcgggtaagatatagcgcggtttgtacggcgtatgatttttaaatagatcgtagattatatttttattttagcgcgcggcg

SEQ ID NO: 24220 - DNA, 887 bp, Artificial Sequence
  chemically treated genomic DNA (Homo sapiens) CpG-island No: 24220
  unsure (126, 259)
cgccgcgcgctaaaataaaaatataatctacgatctatttaaaaatcatacgccgtacaaaccgcgctatatcttacccgattacgcccgtattctaacgaacgaatccgaataactaaaactaanaaacgcgcaaatcttaataccgacctctctctactaaccatctttacccccacgtaccgtcgatcacctcgataccgatctacctaaaacacttaatacgatatttacaccgttttataaacttcttacccanaccgaattcgatatcgatataaccgtttctaacgttccctcgccgaaaccttaccaaacgacctttttaaacgaccaatatcgacccgtttaattaacccgttctccgcgcgattcttcaatcctattctcgatttaaaaacgtccgactccgaaaaaaacaacctactaacgaaactccgcctacgaaaacaaactcaattactaataacgcatcgctacatcacgcgcgataccaacgccgaaaataaaaaccatatcgccctaaacgaacaaaaattttttacccgcgcgaaacaaaatctattaaccttaaactaacacgctaacgatctatattataacgtcgacgtcgaaattaatctctaactacacgccgaattcgacgtactaatcaacgactcacgcgcccatctaccgcaaacgcgaacgcgctatcaatcgacaatcctacgactacgtaaccaccgcgcctaccgcacgaaattatcgcctaaccaacaaatttattaccgtcgaacaaaaaacgctatcttcgctaaatatcattcatatcgccgctccgcatcttaaaacactaatcatcgacgaaaataacaccaaaaacttcgctaatcgtaaaacgatca

SEQ ID NO: 24221 - DNA, 600 bp, Artificial Sequence
  chemically treated genomic DNA (Homo sapiens) CpG-island No: 24221
  unsure (495)
atgtcgatcgggtaggatgcgtcgtgacgtggtagacggataacgcgaatgtcgtgcgcgaagtatttatcgttaaattgcgcgttaagatcgagtttttgggttttttttagtagtttttgttttagttggatatcgcggaattttgattatgttcgttttttttcgtcggtagtttatcgtaatagtgagcgtttgttaatttgacggtttttaggttggttttcgtagacgtatcgttaattataaacgcgatatggtacggcgggtaggttgtagtatcgagggtacgtattttttcgacgaggaagttttttagtttgtcgggagttagtagggttttggttttttggtagagatacgttttgttggtagagcgtcgtttttcgtaacgtaaaggaatttgtatttatcgttatttatcgcgtataggtcgatttgcgcgagtaggttagtgtttgtgttgatttttttgtatatgtttagcgtcgtatnttttgttgacgtttttcggttttagtaatttaggtttatatagcgtatattggaatatcgtttttttaaaaaagcgtatttttttcgggcgatggcgatttataa

SEQ ID NO: 24222 - DNA, 600 bp, Artificial Sequence
  chemically treated genomic DNA (Homo sapiens) CpG-island No: 24222
  unsure (106)
ttataaatcgccatcgcccgaaaaaaatacgcttttttaaaaaaacgatattccaatatacgctatataaacctaaattactaaaaccgaaaaacgtcaacaaaanatacgacgctaaacatatacaaaaaaatcaacacaaacactaacctactcgcgcaaatcgacctatacgcgataaataacgataaatacaaattcctttacgttacgaaaaacgacgctctaccaacaaaacgtatctctaccaaaaaaccaaaaccctactaactcccgacaaactaaaaaacttcctcgtcgaaaaaatacgtaccctcgatactacaacctacccgccgtaccatatcgcgtttataattaacgatacgtctacgaaaaccaacctaaaaaccgtcaaattaacaaacgctcactattacgataaactaccgacgaaaaaaaacgaacataatcaaaattccgcgatatccaactaaaacaaaaactactaaaaaaaacccaaaaactcgatcttaacgcgcaatttaacgataaatacttcgcgcacgacattcgcgttatccgtctaccacgtcacgacgcatcctacccgatcgacat

SEQ ID NO: 24223 - DNA, 600 bp, Artificial Sequence
  chemically treated genomic DNA (Homo sapiens) CpG-island No: 24223
  unsure (106)
ttatgaatcgttatcgttcggaagagatgcgtttttttaaagaagcggtgttttaatatgcgttgtatgagtttggattattggagtcggaaggcgttagtaaagnatgcggcgttggatatgtataaagaggttaatataggtattaatttgttcgcgtaaatcgatttgtacgcggtagatggcgatgagtataaatttttttgcgttgcgaaaggcggcgttttgttaataaaacgtatttttattaggaaattaaagttttgttgattttcggtaaattgaaaaattttttcgtcgagaaaatgcgtattttcggtattgtagtttgttcgtcgtattatatcgcgtttgtgattggcggtacgtttgcggaaattaatttgaaaatcgttaagttagtaagcgtttattattacgatgaattgtcgacggaagggaacgaatatggttagggtttcgcgatgtttagttggaataggaattgttggaagaggtttagaaattcggttttggcgcgtagtttggcggtaaatatttcgcgtacgatattcgcgttattcgtttgttacgttacggcgtattttgttcggtcggtat

SEQ ID NO: 24224 - DNA, 600 bp, Artificial Sequence
  chemically treated genomic DNA (Homo sapiens) CpG-island No: 24224
  unsure (495)
ataccgaccgaacaaaatacgccgtaacgtaacaaacgaataacgcgaatatcgtacgcgaaatatttaccgccaaactacgcgccaaaaccgaatttctaaacctcttccaacaattcctattccaactaaacatcgcgaaaccctaaccatattcgttcccttccgtcgacaattcatcgtaataataaacgcttactaacttaacgattttcaaattaatttccgcaaacgtaccgccaatcacaaacgcgatataatacgacgaacaaactacaataccgaaaatacgcattttctcgacgaaaaaatttttcaatttaccgaaaatcaacaaaactttaatttcctaataaaaatacgttttattaacaaaacgccgcctttcgcaacgcaaaaaaatttatactcatcgccatctaccgcgtacaaatcgatttacgcgaacaaattaatacctatattaacctctttatacatatccaacgccgcatnctttactaacgccttccgactccaataatccaaactcatacaacgcatattaaaacaccgcttctttaaaaaaacgcatctcttccgaacgataacgattcataa

SEQ ID NO: 24225 - DNA, 597 bp, Artificial Sequence
  chemically treated genomic DNA (Homo sapiens) CpG-island No: 24225
gttcgcggagtgtcgtggataaattatcgtattattgtattgcgagattgttttatgtaagatcgaacgtcgtagtcgttaacggtagggattcgatatttttcgttagataatggtttgcggtatttttttggcgtgtttgaataagtattggcggcgagagatttaaggtcgttatttgcgcgtgacgttttcgttagtggcggtttatttagttaggtttataattcgcgtttagtacgtgggtgtatttacgttgtggaagtattgttagtaaggcgttatatttttggcgttgtagatttgtatgttgtttatagtgtgcggttgttcgattaaatgtcgttgtaatggtttgtttattaatcgttgttatgtagtatttttagtagacggtcgatattttgtattttatgcgtacgggttagcgttaagcgtagtcgcgtagtattagcgggtacggttggcgggcgaatcgtcgtgatttagtagttttgttgacgtagtttttttgttagttgtaacgtacggttgttattatcgataattaatggttggatggcgttgtatgaattagtaagcgtaaacggtaaattt

SEQ ID NO: 24226 - DNA, 597 bp, Artificial Sequence
  chemically treated genomic DNA (Homo sapiens) CpG-island No: 24226
aaatttaccgtttacgcttactaattcatacaacgccatccaaccattaattatcgataataacaaccgtacgttacaactaacaaaaaaactacgtcaacaaaactactaaatcacgacgattcgcccgccaaccgtacccgctaatactacgcgactacgcttaacgctaacccgtacgcataaaatacaaaatatcgaccgtctactaaaaatactacataacaacgattaataaacaaaccattacaacgacatttaatcgaacaaccgcacactataaacaacatacaaatctacaacgccaaaaatataacgccttactaacaatacttccacaacgtaaatacacccacgtactaaacgcgaattataaacctaactaaataaaccgccactaacgaaaacgtcacgcgcaaataacgaccttaaatctctcgccgccaatacttattcaaacacgccaaaaaaataccgcaaaccattatctaacgaaaaatatcgaatccctaccgttaacgactacgacgttcgatcttacataaaacaatctcgcaatacaataatacgataatttatccacgacactccgcgaac

SEQ ID NO: 24227 - DNA, 597 bp, Artificial Sequence
  chemically treated genomic DNA (Homo sapiens) CpG-island No: 24227
ggatttgtcgtttacgtttgttgatttatgtagcgttatttagttattgattgtcggtgataatagtcgtgcgttataattggtagaaaaattgcgttagtaaggttgttgggttacggcgattcgttcgttaatcgtattcgttggtattgcgcgattgcgtttaacgttaattcgtgcgtatgaaatgtaggatatcgatcgtttgttggaggtgttgtatggtaacggttaataaataagttattgtagcggtatttggtcgggtagtcgtatattatgagtaatatgtagatttatagcgttagagatgtgacgttttattggtaatgtttttatagcgtaaatatatttacgtattggacgcgggttgtggatttggttggatgagtcgttattggcgggaacgttacgcgtaggtgacggttttagatttttcgtcgttaatgtttgtttaggtacgttagaaggatgtcgtagattattatttggcgggagatatcgaatttttgtcgttagcgattgcgacgttcgattttgtatggagtaatttcgtagtgtagtggtgcggtaatttatttacggtatttcgcgagt

SEQ ID NO: 24228 - DNA, 597 bp, Artificial Sequence
  chemically treated genomic DNA (Homo sapiens) CpG-island No: 24228
actcgcgaaataccgtaaataaattaccgcaccactacactacgaaattactccatacaaaatcgaacgtcgcaatcgctaacgacaaaaattcgatatctcccgccaaataataatctacgacatccttctaacgtacctaaacaaacattaacgacgaaaaatctaaaaccgtcacctacgcgtaacgttcccgccaataacgactcatccaaccaaatccacaacccgcgtccaatacgtaaatatatttacgctataaaaacattaccaataaaacgtcacatctctaacgctataaatctacatattactcataatatacgactacccgaccaaataccgctacaataacttatttattaaccgttaccatacaacacctccaacaaacgatcgatatcctacatttcatacgcacgaattaacgttaaacgcaatcgcgcaataccaacgaatacgattaacgaacgaatcgccgtaacccaacaaccttactaacgcaatttttctaccaattataacgcacgactattatcaccgacaatcaataactaaataacgctacataaatcaacaaacgtaaacgacaaatcc

SEQ ID NO: 24229 - DNA, 534 bp, Artificial Sequence
  chemically treated genomic DNA (Homo sapiens) CpG-island No: 24229
tagtagttgtcgcgtttttgtttttcgataacgttcgtgtcgtgggtattatcgattattaattagcgattgtgttgttgcgttatttgttggattttcgttagtggcgtagtatcgtcgtttatgttgaatacgcgttttgttattattatttgttgtttcggatagggggaagtaagtaatcgcgttaaatgagtgatatcgttatgagtaaaacggcgaagttgcgacgggtttaaattggtagtttttagtaatgaggtatggttaagtcggtcggtagtaatacggttttttttcgttattatcgcggtaataattgtttgattagcgacgaaattagagatatttagtagtgttcgttaatagttaagttattcggttagttttttttttagtgtttgatgtattacgttataatcgttgacgtgatcggagtcgtcgttatcgatgttaaattgttcgttttttgttgttaggtacggataatttgcggatgatggtttaaatttaaataatcgttattggaaaagt

SEQ ID NO: 24230 - DNA, 534 bp, Artificial Sequence
  chemically treated genomic DNA (Homo sapiens) CpG-island No: 24230
acttttccaataacgattatttaaatttaaaccatcatccgcaaattatccgtacctaacaacaaaaaacgaacaatttaacatcgataacgacgactccgatcacgtcaacgattataacgtaatacatcaaacactaaaaaaaaaactaaccgaataacttaactattaacgaacactactaaatatctctaatttcgtcgctaatcaaacaattattaccgcgataataacgaaaaaaaaccgtattactaccgaccgacttaaccatacctcattactaaaaactaccaatttaaacccgtcgcaacttcgccgttttactcataacgatatcactcatttaacgcgattacttacttccccctatccgaaacaacaaataataataacaaaacgcgtattcaacataaacgacgatactacgccactaacgaaaatccaacaaataacgcaacaacacaatcgctaattaataatcgataatacccacgacacgaacgttatcgaaaaacaaaaacgcgacaactacta

SEQ ID NO: 24231 - DNA, 534 bp, Artificial Sequence
  chemically treated genomic DNA (Homo sapiens) CpG-island No: 24231
atttttttagtaacgattatttaggtttaagttattattcgtaaattattcgtgtttggtagtagggggcggataatttggtatcggtagcggcggtttcggttacgttagcggttatagcgtggtgtattaggtattggaagaagagttggtcgagtggtttggttattggcgggtattgttgaatatttttggtttcgtcgttaattaggtagttattgtcgcgatgatggcgaaagaggatcgtattgttgtcgatcggtttagttatgttttattgttggaagttgttagtttaagttcgtcgtagtttcgtcgttttgtttataacgatgttatttatttggcgcgattgtttgtttttttttgttcggggtagtaaatggtggtgatagaacgcgtgtttagtatggacggcgatattgcgttattggcggaaatttagtaggtaacgtaatagtataatcgttggttgatggtcgatgatgtttacggtacgggcgttatcggggagtaggggcgcggtagttgttg

SEQ ID NO: 24232 - DNA, 534 bp, Artificial Sequence
  chemically treated genomic DNA (Homo sapiens) CpG-island No: 24232
caacaactaccgcgcccctactccccgataacgcccgtaccgtaaacatcatcgaccatcaaccaacgattatactattacgttacctactaaatttccgccaataacgcaatatcgccgtccatactaaacacgcgttctatcaccaccatttactaccccgaacaaaaaaaaacaaacaatcgcgccaaataaataacatcgttataaacaaaacgacgaaactacgacgaacttaaactaacaacttccaacaataaaacataactaaaccgatcgacaacaatacgatcctctttcgccatcatcgcgacaataactacctaattaacgacgaaaccaaaaatattcaacaatacccgccaataaccaaaccactcgaccaactcttcttccaatacctaatacaccacgctataaccgctaacgtaaccgaaaccgccgctaccgataccaaattatccgccccctactaccaaacacgaataatttacgaataataacttaaacctaaataatcgttactaaaaaaat

SEQ ID NO: 24233 - DNA, 1050 bp, Artificial Sequence
  chemically treated genomic DNA (Homo sapiens) CpG-island No: 24233
tggtcgtcgatcgttttagtggtgaagttcgtgcgatggtcggaggttttgagtcgtagtttgcgggttataatcgtgcgatgtaggcgcgtcgttcgattggtttttttgtaaaattagcgatttatttgacggttttaagttagtcgaaaatttatcgtttgaatacgtggattgcggatgcgttaattgcgttgcgttatcgaatggttaggtttggttatcgtagaatgatgatcgtcgttatagcgaaagcgttagagtgatgttggtggatgcgttgattcgttcgatgaacgtgtcgacggtaaatttggggatggcgttggggttgtttgcggttacggagatttggattaaattgggcgtatcgaaagattagttgtattcggtttcggtaatgttgttgggggcgttgaatttaacgttaatcgaagtggcgtaggtattttagattatcgttagcggtggtaatcgtgtatcgttttttgcgttgcgttcggtaatcgcggaagatggtaaagtgttgtattagagtttttcgtaggcggaacgcgttgtttcggcgtaggcggcgtatttgatattatggattatgtagtaggtggtataacgcggtacgggtcgttagtttggggcgaaatattcgaatttgtatttggtagggaaaatagggattattaataataacgtagatatttggtttgcgggtattgacggtagtacggtgattattatttgggtcggtcgtgataataattagtcgattaaattgtatggtgttagcggggtaatgtcgatttattagcgttatttggttaattagacgttaacgtcgttgaattttgtttcgttagaagatattgtagatatgggcgtggattacgacggtaattttgtttgtagcggtggtatgcgtattttgtcggtttggattagcgattcgtaatcgttgtgttagtagagcgagatgtagtagtagtcgttaggtaattcgtttgattagtttttttagtcgtagtaatagtcgtaatagtaatttgtttagta

SEQ ID NO: 24234 - DNA, 1050 bp, Artificial Sequence
  chemically treated genomic DNA (Homo sapiens) CpG-island No: 24234
tactaaacaaattactattacgactattactacgactaaaaaaactaatcaaacgaattacctaacgactactactacatctcgctctactaacacaacgattacgaatcgctaatccaaaccgacaaaatacgcataccaccgctacaaacaaaattaccgtcgtaatccacgcccatatctacaatatcttctaacgaaacaaaattcaacgacgttaacgtctaattaaccaaataacgctaataaatcgacattaccccgctaacaccatacaatttaatcgactaattattatcacgaccgacccaaataataatcaccgtactaccgtcaatacccgcaaaccaaatatctacgttattattaataatccctattttccctaccaaatacaaattcgaatatttcgccccaaactaacgacccgtaccgcgttataccacctactacataatccataatatcaaatacgccgcctacgccgaaacaacgcgttccgcctacgaaaaactctaatacaacactttaccatcttccgcgattaccgaacgcaacgcaaaaaacgatacacgattaccaccgctaacgataatctaaaatacctacgccacttcgattaacgttaaattcaacgcccccaacaacattaccgaaaccgaatacaactaatctttcgatacgcccaatttaatccaaatctccgtaaccgcaaacaaccccaacgccatccccaaatttaccgtcgacacgttcatcgaacgaatcaacgcatccaccaacatcactctaacgctttcgctataacgacgatcatcattctacgataaccaaacctaaccattcgataacgcaacgcaattaacgcatccgcaatccacgtattcaaacgataaattttcgactaacttaaaaccgtcaaataaatcgctaattttacaaaaaaaccaatcgaacgacgcgcctacatcgcacgattataacccgcaaactacgactcaaaacctccgaccatcgcacgaacttcaccactaaaacgatcgacgacca

SEQ ID NO: 24235 - DNA, 1050 bp, Artificial Sequence
  chemically treated genomic DNA (Homo sapiens) CpG-island No: 24235
tgttgagtaggttgttgttgcggttgttgttgcggttgagaagattgattaaacggattgtttgacggttgttgttgtatttcgttttgttggtatagcgattgcggatcgttggtttagatcggtaagatacgtatgttatcgttgtaaataaagttgtcgtcgtagtttacgtttatatttgtaatattttttggcggaataagatttagcggcgttggcgtttggttagttagataacgttgataaatcgatattgtttcgttggtattatatagtttggtcggttggttgttattacggtcgatttaagtgatggttatcgtgttgtcgttaatgttcgtaaattaggtatttacgttattgttggtagtttttgttttttttgttagatgtaggttcgggtatttcgttttaagttgacgattcgtatcgcgttgtattatttgttgtatggtttatagtgttagatacgtcgtttgcgtcggaatagcgcgtttcgtttgcgggaagttttgatatagtattttgttatttttcgcgattatcgaacgtagcgtagaaagcggtgtacggttattatcgttggcgatggtttggaatgtttgcgttatttcgattggcgttaagtttaacgtttttagtagtattgtcggaatcggatgtaattgatttttcggtacgtttagtttaatttaggttttcgtaatcgtaggtagttttagcgttatttttagatttatcgtcggtacgtttatcgaacgggttaacgtatttattagtattattttgacgttttcgttataacgacggttattattttgcggtgattagatttggttattcggtgacgtagcgtaattggcgtattcgtaatttacgtatttagacgatagattttcggttggtttaaggtcgttagataagtcgttggttttgtaagggaattaatcgaacgacgcgtttgtatcgtacggttgtagttcgtaaattgcggtttagaattttcgattatcgtacgaattttattattaaagcggtcgacgatta

SEQ ID NO: 24236 - DNA, 1050 bp, Artificial Sequence
  chemically treated genomic DNA (Homo sapiens) CpG-island No: 24236
taatcgtcgaccgctttaataataaaattcgtacgataatcgaaaattctaaaccgcaatttacgaactacaaccgtacgatacaaacgcgtcgttcgattaattcccttacaaaaccaacgacttatctaacgaccttaaaccaaccgaaaatctatcgtctaaatacgtaaattacgaatacgccaattacgctacgtcaccgaataaccaaatctaatcaccgcaaaataataaccgtcgttataacgaaaacgtcaaaataatactaataaatacgttaacccgttcgataaacgtaccgacgataaatctaaaaataacgctaaaactacctacgattacgaaaacctaaattaaactaaacgtaccgaaaaatcaattacatccgattccgacaatactactaaaaacgttaaacttaacgccaatcgaaataacgcaaacattccaaaccatcgccaacgataataaccgtacaccgctttctacgctacgttcgataatcgcgaaaaataacaaaatactatatcaaaacttcccgcaaacgaaacgcgctattccgacgcaaacgacgtatctaacactataaaccatacaacaaataatacaacgcgatacgaatcgtcaacttaaaacgaaatacccgaacctacatctaacaaaaaaaacaaaaactaccaacaataacgtaaatacctaatttacgaacattaacgacaacacgataaccatcacttaaatcgaccgtaataacaaccaaccgaccaaactatataataccaacgaaacaatatcgatttatcaacgttatctaactaaccaaacgccaacgccgctaaatcttattccgccaaaaaatattacaaatataaacgtaaactacgacgacaactttatttacaacgataacatacgtatcttaccgatctaaaccaacgatccgcaatcgctataccaacaaaacgaaatacaacaacaaccgtcaaacaatccgtttaatcaatcttctcaaccgcaacaacaaccgcaacaacaacctactcaaca

SEQ ID NO: 24237 - DNA, 749 bp, Artificial Sequence
  chemically treated genomic DNA (Homo sapiens) CpG-island No: 24237
tgttcggagatttttatcgttaggtatagtttaggttttagtattaggttggagatatcgatatagcgttcgtgttttatttatttttcgtttttcgttatcggacgagaataggttaatttcgtatttatcgttttgtaaagttgttttgttagcgtaatgttttttttgttgttaatatcgcgatcgacgttgattattagacgggttttgtcgagatcgacgttgttgttttggcgcgtttgggttgtcgtgcgggtaatcgttatagtcggagtttgttattttacggtgtgcgtttcgttagtgcgtgacgcgtttggttgagtcgtatcgaacgtgtcgttgttgatggttagtatcgtatacggcgtggtaatgcgtttttcgttaatcgttagattatcgtaaattatgtgttttattgtcgttttatcgttttgtacgttgacggtgttggtatcgttagatatcgtcgttttaaggcgataatttagttttgtcgttagtaatttgtcgcgacgggtgtttggtagtagtattaggtcgtttgcgtcgtgttggcgaatagtgttagttatgatatcggcgtaattttcgattattcgatcgttcgggttgtcggttaattttagatatgattagcgcgattggattgttgtgcgcgtcggattatgaggataaggtgtgattgaatagttaagttgcgtacgttattattcgtaacgaaaaggttcgtgatattagtt

SEQ ID NO: 24238 - DNA, 749 bp, Artificial Sequence
  chemically treated genomic DNA (Homo sapiens) CpG-island No: 24238
aactaatatcacgaaccttttcgttacgaataataacgtacgcaacttaactattcaatcacaccttatcctcataatccgacgcgcacaacaatccaatcgcgctaatcatatctaaaattaaccgacaacccgaacgatcgaataatcgaaaattacgccgatatcataactaacactattcgccaacacgacgcaaacgacctaatactactaccaaacacccgtcgcgacaaattactaacgacaaaactaaattatcgccttaaaacgacgatatctaacgataccaacaccgtcaacgtacaaaacgataaaacgacaataaaacacataatttacgataatctaacgattaacgaaaaacgcattaccacgccgtatacgatactaaccatcaacaacgacacgttcgatacgactcaaccaaacgcgtcacgcactaacgaaacgcacaccgtaaaataacaaactccgactataacgattacccgcacgacaacccaaacgcgccaaaacaacaacgtcgatctcgacaaaacccgtctaataatcaacgtcgatcgcgatattaacaacaaaaaaaacattacgctaacaaaacaactttacaaaacgataaatacgaaattaacctattctcgtccgataacgaaaaacgaaaaataaataaaacacgaacgctatatcgatatctccaacctaatactaaaacctaaactatacctaacgataaaaatctccgaaca

SEQ ID NO: 24239 - DNA, 749 bp, Artificial Sequence
  chemically treated genomic DNA (Homo sapiens) CpG-island No: 24239
agttggtattacgaattttttcgttgcgaatgatgacgtgcgtagtttagttatttaattatattttgtttttatgattcgacgcgtatagtaatttagtcgcgttaattatgtttgagattaatcggtaattcggacgatcggatgatcgaagattacgtcggtgttatggttgatattattcgttagtacggcgtagacggtttggtgttgttgttaaatattcgtcgcggtaaattattggcggtaaaattgggttatcgttttaaagcggcggtgtttaacgatgttagtatcgttagcgtataggacggtaaagcgatagtgaaatatatggtttacggtggtttggcgattggcgaagaacgtattgttacgtcgtatgcggtattgattattagtagcggtacgttcgatgcggtttagttagacgcgttacgtattggcgaaacgtatatcgtggagtggtaggtttcggttgtggcgattattcgtacggtaatttaggcgcgttagagtaatagcgtcgatttcgataaagttcgtttggtggttagcgtcggtcgcggtattggtagtaaagagaatattgcgttggtagaatagttttgtaaggcgataggtgcggagttggtttgttttcgttcggtggcggaaaacgaaaaatggatggagtacgaacgttatgtcggtatttttaatttgatgttgaaatttgaattgtatttggcggtggggattttcgggta

SEQ ID NO: 24240 - DNA, 749 bp, Artificial Sequence
  chemically treated genomic DNA (Homo sapiens) CpG-island No: 24240
tacccgaaaatccccaccgccaaatacaattcaaatttcaacatcaaattaaaaataccgacataacgttcgtactccatccatttttcgttttccgccaccgaacgaaaacaaaccaactccgcacctatcgccttacaaaactattctaccaacgcaatattctctttactaccaataccgcgaccgacgctaaccaccaaacgaactttatcgaaatcgacgctattactctaacgcgcctaaattaccgtacgaataatcgccacaaccgaaacctaccactccacgatatacgtttcgccaatacgtaacgcgtctaactaaaccgcatcgaacgtaccgctactaataatcaataccgcatacgacgtaacaatacgttcttcgccaatcgccaaaccaccgtaaaccatatatttcactatcgctttaccgtcctatacgctaacgatactaacatcgttaaacaccgccgctttaaaacgataacccaattttaccgccaataatttaccgcgacgaatatttaacaacaacaccaaaccgtctacgccgtactaacgaataatatcaaccataacaccgacgtaatcttcgatcatccgatcgtccgaattaccgattaatctcaaacataattaacgcgactaaattactatacgcgtcgaatcataaaaacaaaatataattaaataactaaactacgcacgtcatcattcgcaacgaaaaaattcgtaataccaact

SEQ ID NO: 24241 - DNA, 569 bp, Artificial Sequence
  chemically treated genomic DNA (Homo sapiens) CpG-island No: 24241
ttttcggttttgtcggttaacggacgtacggtttattaggggtatttgttcgtaatgaattaattgttggtcgaattcgggatgcgttattattcggaaatttttttgatcgatagtatatttttttcgtttggtagaagcgtaatttatagggcgttgcggcgtcgtttcggtatatgttttcgaataaggtgtggatgtcgttcgttaagagttggttcgtttatagtaaagagggatagcgatacgcggtgtttgatgcgttgatcgaatattatttggaaatttagggagaagttttgcgcgatgttttattggtaacgggcggttttggtttggcgattggtttggttcggtagtgggcgtaagaaaacggtaattaggttcgtaaagtagggcgttcgttcgttgggcgcggcgtagtgtttttcggtttatgtttttaaatgattaatcgttaggtagtatattatcgttaaattgtattagttcgtgaagttgatgtggtacgttgttttttaattgaaattttggtcgtttatgtatacgaattggtagagtgggttttg

SEQ ID NO: 24242 - DNA, 569 bp, Artificial Sequence
  chemically treated genomic DNA (Homo sapiens) CpG-island No: 24242
caaaacccactctaccaattcgtatacataaacgaccaaaatttcaattaaaaaacaacgtaccacatcaacttcacgaactaatacaatttaacgataatatactacctaacgattaatcatttaaaaacataaaccgaaaaacactacgccgcgcccaacgaacgaacgccctactttacgaacctaattaccgttttcttacgcccactaccgaaccaaaccaatcgccaaaccaaaaccgcccgttaccaataaaacatcgcgcaaaacttctccctaaatttccaaataatattcgatcaacgcatcaaacaccgcgtatcgctatccctctttactataaacgaaccaactcttaacgaacgacatccacaccttattcgaaaacatataccgaaacgacgccgcaacgccctataaattacgcttctaccaaacgaaaaaaatatactatcgatcaaaaaaatttccgaataataacgcatcccgaattcgaccaacaattaattcattacgaacaaatacccctaataaaccgtacgtccgttaaccgacaaaaccgaaaa

SEQ ID NO: 24243 - DNA, 569 bp, Artificial Sequence
  chemically treated genomic DNA (Homo sapiens) CpG-island No: 24243
tagaatttattttgttagttcgtgtgtataagcggttagagttttaattgagaggtagcgtgttatattaattttacgggttggtgtaatttgacggtaatgtgttatttggcggttggttatttgagagtatgaatcggagagtattacgtcgcgtttagcgagcggacgttttgttttgcgagtttggttatcgtttttttgcgtttattgtcgggttaggttaatcgttagattagaatcgttcgttattagtggggtatcgcgtaaggtttttttttgaatttttagatggtgttcggttagcgtattaagtatcgcgtatcgttatttttttttgttgtaagcgagttaatttttgacgaacggtatttatattttgttcgaaaatatgtgtcgaaacgacgtcgtagcgttttgtggattgcgtttttattagacggggaagatatgttgtcggttaagggaattttcgggtgatggcgtatttcggattcggttagtagttgatttattacgaataaatatttttgataaatcgtacgttcgttgatcggtagggtcggaga

SEQ ID NO: 24244 - DNA, 569 bp, Artificial Sequence
  chemically treated genomic DNA (Homo sapiens) CpG-island No: 24244
tctccgaccctaccgatcaacgaacgtacgatttatcaaaaatatttattcgtaataaatcaactactaaccgaatccgaaatacgccatcacccgaaaattcccttaaccgacaacatatcttccccgtctaataaaaacgcaatccacaaaacgctacgacgtcgtttcgacacatattttcgaacaaaatataaataccgttcgtcaaaaattaactcgcttacaacaaaaaaaaataacgatacgcgatacttaatacgctaaccgaacaccatctaaaaattcaaaaaaaaaccttacgcgataccccactaataacgaacgattctaatctaacgattaacctaacccgacaataaacgcaaaaaaacgataaccaaactcgcaaaacaaaacgtccgctcgctaaacgcgacgtaatactctccgattcatactctcaaataaccaaccgccaaataacacattaccgtcaaattacaccaacccgtaaaattaatataacacgctacctctcaattaaaactctaaccgcttatacacacgaactaacaaaataaattcta

SEQ ID NO: 24245 - DNA, 545 bp, Artificial Sequence
  chemically treated genomic DNA (Homo sapiens) CpG-island No: 24245
  unsure (168, 178, 192, 226, 237..238, 247, 254, 276, 289, 322)
gaatcgggcggtaaagtttaggtttcgggtatgggtagtcggtttcggtcgcgagtcgtagcgttagtagcgttagtagcgttagtagcgttagattcgggacgtcgttcggcgggttagagacgagacgttagcgtcgaagttgcggtcgggatatagtagtaggtnttagcgggtncggagtgggttttntatcgtttgggtgggcggggtttgttgcgcgttnggggtaggaanngggtcgggnaaaattncggaaaggtcgggaagggcggngaagggtcggaangggtcgggtttatcggggcgggcgtggaaagtncgggtttcgaacgttttcgggttttataggtgggtgaagttaagtggttgttggagcgtttcgggggatagttagtgtttgcggcgtcgagagggtcgttcgtggatttaaatgggtattattttcgatcgtttatagtttttttaatagtttgtatttcgttttgtcgtggttggtcgtgtattttttgtggagtttgaaggtataaggggatttttaaaat

SEQ ID NO: 24246 - DNA, 545 bp, Artificial Sequence
  chemically treated genomic DNA (Homo sapiens) CpG-island No: 24246
  unsure (224, 257, 270, 292, 299, 308..309, 320, 354, 368, 378)
attttaaaaatccccttataccttcaaactccacaaaaaatacacgaccaaccacgacaaaacgaaatacaaactattaaaaaaactataaacgatcgaaaataatacccatttaaatccacgaacgaccctctcgacgccgcaaacactaactatcccccgaaacgctccaacaaccacttaacttcacccacctataaaacccgaaaacgttcgaaacccgnactttccacgcccgccccgataaacccgacccnttccgacccttcnccgcccttcccgacctttccgnaattttncccgacccnnttcctaccccnaacgcgcaacaaaccccgcccacccaaacgatanaaaacccactccgnacccgctaanacctactactatatcccgaccgcaacttcgacgctaacgtctcgtctctaacccgccgaacgacgtcccgaatctaacgctactaacgctactaacgctactaacgctacgactcgcgaccgaaaccgactacccatacccgaaacctaaactttaccgcccgattc

SEQ ID NO: 24247 - DNA, 545 bp, Artificial Sequence
  chemically treated genomic DNA (Homo sapiens) CpG-island No: 24247
  unsure (224, 257, 270, 292, 299, 308..309, 320, 354, 368, 378)
attttggggatttttttgtatttttagattttataaggagtatacgattagttacgataaaacgagatgtagattattgggaggattataaacggtcgggggtgatatttatttgagtttacgaacggttttttcggcgtcgtagatattggttgtttttcgagacgttttagtagttatttaattttatttatttgtagggttcggggacgttcgaagttcgnattttttacgttcgtttcggtgggttcggtttntttcggttttttntcgtttttttcggttttttcgnaattttnttcggtttnntttttgttttngacgcgtagtaggtttcgtttatttaggcggtanggaatttatttcgngttcgttagnatttgttgttatgtttcggtcgtagtttcgacgttggcgtttcgtttttagttcgtcgagcggcgtttcgggtttagcgttgttggcgttgttggcgttgttggcgttgcggttcgcggtcgggatcgattgtttatgttcggagtttgagttttgtcgttcgattt

SEQ ID NO: 24248 - DNA, 545 bp, Artificial Sequence
  chemically treated genomic DNA (Homo sapiens) CpG-island No: 24248
  unsure (168, 178, 192, 226, 237..238, 247, 254, 276, 289, 322)
aaatcgaacgacaaaactcaaactccgaacataaacaatcgatcccgaccgcgaaccgcaacgccaacaacgccaacaacgccaacaacgctaaacccgaaacgccgctcgacgaactaaaaacgaaacgccaacgtcgaaactacgaccgaaacataacaacaaatnctaacgaacncgaaataaattccntaccgcctaaataaacgaaacctactacgcgtcnaaaacaaaaannaaaccgaanaaaattncgaaaaaaccgaaaaaaacganaaaaaaccgaaanaaaccgaacccaccgaaacgaacgtaaaaaatncgaacttcgaacgtccccgaaccctacaaataaataaaattaaataactactaaaacgtctcgaaaaacaaccaatatctacgacgccgaaaaaaccgttcgtaaactcaaataaatatcacccccgaccgtttataatcctcccaataatctacatctcgttttatcgtaactaatcgtatactccttataaaatctaaaaatacaaaaaaatccccaaaat

SEQ ID NO: 24249 - DNA, 976 bp, Artificial Sequence
  chemically treated genomic DNA (Homo sapiens) CpG-island No: 24249
  unsure (224)
ttcggacgttgtaggcgttagaagggggcggggagtagaaaacggtcgggtgaattattgggcgtaataggtgtcgtagtcgtagttgcgttcgtagcgcgcgcggatcgtagggataaggtttttttttttttcgggtttttttggaggtaaggaggagattatcgaggtttttattcgataaatgtaggttacggttgtttatcgtttagtaattggcggangttaatgggaggcggcggggtttgcggcgtcggcgcgcgggggcggggtgggaatttcggaaatttgcggaggtcgggaggcggttgtaaggggcggggaaggcgggagttcgtagcggaggaggggtcgcgggcgggaggcgttgcgaggcgttgttggttttcgggttgcgggagtcgggttaggacgtcgagcggtgatttttcgtcgttttcgggggtcgtgacggtgagtagtagcgtttcgcgtcggggattgtgacgcgttttcgttaggaaggggcgggcgggggtgggcgtcggtaaggggcgggcgcgcgcggaggtgagagtcggtatttggtttagcgtttcgttgttcggcgggaggtttcgcgcggttgttggggtcgttgtagggtgcgggcgagcgtcgattcgggtcgtttttggaggaggaggtgggaggtaggtgttggtttcgggatcgttttcgttggcgttcgcggagttgcgtttgcggagcgttttgattcggggagttttaaattttttttgggatggagtaaggttggcgttcggcgttgggggacgagtagcgcggggacgtgggggaggaggggatggtcgatttggggttgtagagttttagtagcggtcgtggggtatgcggggtttggcgatttgttagtgtagtcgtaagaggtagtttttaaaacgagttattgggtggtcgttgtagtggaagagaatttcgatagtggtttagtaaa

SEQ ID NO: 24250 - DNA, 976 bp, Artificial Sequence
  chemically treated genomic DNA (Homo sapiens) CpG-island No: 24250
  unsure (753)
tttactaaaccactatcgaaattctcttccactacaacgaccacccaataactcgttttaaaaactacctcttacgactacactaacaaatcgccaaaccccgcataccccacgaccgctactaaaactctacaaccccaaatcgaccatcccctcctcccccacgtccccgcgctactcgtcccccaacgccgaacgccaaccttactccatcccaaaaaaaatttaaaactccccgaatcaaaacgctccgcaaacgcaactccgcgaacgccaacgaaaacgatcccgaaaccaacacctacctcccacctcctcctccaaaaacgacccgaatcgacgctcgcccgcaccctacaacgaccccaacaaccgcgcgaaacctcccgccgaacaacgaaacgctaaaccaaataccgactctcacctccgcgcgcgcccgccccttaccgacgcccacccccgcccgccccttcctaacgaaaacgcgtcacaatccccgacgcgaaacgctactactcaccgtcacgacccccgaaaacgacgaaaaatcaccgctcgacgtcctaacccgactcccgcaacccgaaaaccaacaacgcctcgcaacgcctcccgcccgcgacccctcctccgctacgaactcccgccttccccgccccttacaaccgcctcccgacctccgcaaatttccgaaattcccaccccgcccccgcgcgccgacgccgcaaaccccgccgcctcccattaacntccgccaattactaaacgataaacaaccgtaacctacatttatcgaataaaaacctcgataatctcctccttacctccaaaaaaacccgaaaaaaaaaaaaaccttatccctacgatccgcgcgcgctacgaacgcaactacgactacgacacctattacgcccaataattcacccgaccgttttctactccccgcccccttctaacgcctacaacgtccgaa

SEQ ID NO: 24251 - DNA, 976 bp, Artificial Sequence
  chemically treated genomic DNA (Homo sapiens) CpG-island No: 24251
  unsure (753)
tttattagattattatcggggtttttttttattgtagcggttatttaataattcgttttaaagattgttttttgcggttgtattagtaaatcgttaaatttcgtatgttttacggtcgttgttgagattttgtagttttaaatcggttattttttttttttttacgttttcgcgttgttcgttttttaacgtcgggcgttaattttgttttattttagagagggtttggggtttttcgggttagagcgtttcgtaggcgtagtttcgcgaacgttagcgagagcggtttcggggttagtatttattttttatttttttttttaggagcggttcgggtcgacgttcgttcgtattttgtaacggttttaatagtcgcgcggagtttttcgtcgaataacggggcgttgagttaggtgtcggtttttattttcgcgcgcgttcgttttttgtcggcgtttattttcgttcgtttttttttggcgggggcgcgttataattttcgacgcgaggcgttgttgtttatcgttacggttttcgggagcggcggggagttatcgttcggcgttttagttcggttttcgtagttcgagggttagtagcgtttcgtagcgtttttcgttcgcggtttttttttcgttgcgggttttcgtttttttcgttttttgtagtcgtttttcggttttcgtaggttttcgaggtttttatttcgttttcgcgcgtcggcgtcgtaggtttcgtcgttttttattggtnttcgttagttgttaggcgatgaataatcgtggtttgtatttgtcgggtgggggtttcggtagttttttttttatttttaaaaaaattcggagaaaaagaagattttatttttgcggttcgcgcgcgttgcgggcgtagttgcggttgcggtatttgttacgtttagtgatttattcggtcgttttttgtttttcgtttttttttgacgtttgtagcgttcggg

SEQ ID NO: 24252 - DNA, 976 bp, Artificial Sequence
  chemically treated genomic DNA (Homo sapiens) CpG-island No: 24252
  unsure (224)
cccgaacgctacaaacgtcaaaaaaaaacgaaaaacaaaaaacgaccgaataaatcactaaacgtaacaaataccgcaaccgcaactacgcccgcaacgcgcgcgaaccgcaaaaataaaatcttctttttctccgaatttttttaaaaataaaaaaaaaactaccgaaacccccacccgacaaatacaaaccacgattattcatcgcctaacaactaacgaanaccaataaaaaacgacgaaacctacgacgccgacgcgcgaaaacgaaataaaaacctcgaaaacctacgaaaaccgaaaaacgactacaaaaaacgaaaaaaacgaaaacccgcaacgaaaaaaaaaccgcgaacgaaaaacgctacgaaacgctactaaccctcgaactacgaaaaccgaactaaaacgccgaacgataactccccgccgctcccgaaaaccgtaacgataaacaacaacgcctcgcgtcgaaaattataacgcgcccccgccaaaaaaaaacgaacgaaaataaacgccgacaaaaaacgaacgcgcgcgaaaataaaaaccgacacctaactcaacgccccgttattcgacgaaaaactccgcgcgactattaaaaccgttacaaaatacgaacgaacgtcgacccgaaccgctcctaaaaaaaaaaataaaaaataaatactaaccccgaaaccgctctcgctaacgttcgcgaaactacgcctacgaaacgctctaacccgaaaaaccccaaaccctctctaaaataaaacaaaattaacgcccgacgttaaaaaacgaacaacgcgaaaacgtaaaaaaaaaaaaaataaccgatttaaaactacaaaatctcaacaacgaccgtaaaacatacgaaatttaacgatttactaatacaaccgcaaaaaacaatctttaaaacgaattattaaataaccgctacaataaaaaaaaaccccgataataatctaataaa

SEQ ID NO: 24253 - DNA, 612 bp, Artificial Sequence
  chemically treated genomic DNA (Homo sapiens) CpG-island No: 24253
  unsure (477, 585, 611)
cggtagttagtagtagtatcgtttcgcggggttaggggttcggagcggtcgggcgggggtcgtcgggtaaggcgcgtagggttgggttgcggcgaggcgagaattacgcgcggcgggcgggcgtttggagtgtttgggtttgcgggtcggggcgggtcgcggcggaggggaagaggaggagtcggcgcgcgcgttatttaggcggggcggtgtttttagggggcgagtaggtcgttatcgttatcgttatcgttattattgttagaatcgtttttcgggggtcgtcgggtgttttttattttttcggtttcgggacggggttcgtagttcgtagtttttttcgtggaaatcgggtttttcgtttttgtgcgtcgcgagcgggtttcggatagcgttagatgcgagcgcgtcgggaagggttgcgaagattcgtttttcgggagttcgaatggttttttaggatttcgtagggcgggntttttaggtttgttacggtttttagtgtgggcgtgacgagcgtttttttttggagtttagttttcggtttgggattgttcgttgggttgttcggaggtttcggagtantcggaaagggcggttggaggtttttng

SEQ ID NO: 24254 - DNA, 612 bp, Artificial Sequence
  chemically treated genomic DNA (Homo sapiens) CpG-island No: 24254
  unsure (2, 28, 136)
cnaaaaacctccaaccgccctttccgantactccgaaacctccgaacaacccaacgaacaatcccaaaccgaaaactaaactccaaaaaaaaacgctcgtcacgcccacactaaaaaccgtaacaaacctaaaaancccgccctacgaaatcctaaaaaaccattcgaactcccgaaaaacgaatcttcgcaacccttcccgacgcgctcgcatctaacgctatccgaaacccgctcgcgacgcacaaaaacgaaaaacccgatttccacgaaaaaaactacgaactacgaaccccgtcccgaaaccgaaaaaataaaaaacacccgacgacccccgaaaaacgattctaacaataataacgataacgataacgataacgacctactcgccccctaaaaacaccgccccgcctaaataacgcgcgcgccgactcctcctcttcccctccgccgcgacccgccccgacccgcaaacccaaacactccaaacgcccgcccgccgcgcgtaattctcgcctcgccgcaacccaaccctacgcgccttacccgacgacccccgcccgaccgctccgaacccctaaccccgcgaaacgatactactactaactaccg

SEQ ID NO: 24255 - DNA, 612 bp, Artificial Sequence
  chemically treated genomic DNA (Homo sapiens) CpG-island No: 24255
  unsure (2, 28, 136)
tngggagtttttagtcgtttttttcgantgtttcggggttttcgagtaatttagcgggtagttttaagtcgagggttgaattttagggaggagcgttcgttacgtttatattggaggtcgtggtaggtttggaaanttcgttttgcggggttttaagaagttattcgagttttcgaagagcgagttttcgtagtttttttcggcgcgttcgtatttggcgttgttcggagttcgttcgcgacgtatagggacgggaggttcggtttttacgggagaggttgcggattgcgggtttcgtttcgaggtcgggggagtgggagatattcggcgattttcgagaggcgattttggtagtggtggcggtggcggtggcggtggcggtttattcgttttttggaagtatcgtttcgtttgggtggcgcgcgcgtcggtttttttttttttttttcgtcgcggttcgtttcggttcgtaaatttaaatattttaggcgttcgttcgtcgcgcgtgattttcgtttcgtcgtagtttagttttgcgcgttttgttcggcggttttcgttcggtcgtttcgggtttttggtttcgcggagcgatgttgttgttggttgtcg

SEQ ID NO: 24256 - DNA, 612 bp, Artificial Sequence
  chemically treated genomic DNA (Homo sapiens) CpG-island No: 24256
  unsure (477, 585, 611)
cgacaaccaacaacaacatcgctccgcgaaaccaaaaacccgaaacgaccgaacgaaaaccgccgaacaaaacgcgcaaaactaaactacgacgaaacgaaaatcacgcgcgacgaacgaacgcctaaaatatttaaatttacgaaccgaaacgaaccgcgacgaaaaaaaaaaaaaaaaaccgacgcgcgcgccacccaaacgaaacgatacttccaaaaaacgaataaaccgccaccgccaccgccaccgccaccactaccaaaatcgcctctcgaaaatcgccgaatatctcccactcccccgacctcgaaacgaaacccgcaatccgcaacctctcccgtaaaaaccgaacctcccgtccctatacgtcgcgaacgaactccgaacaacgccaaatacgaacgcgccgaaaaaaactacgaaaactcgctcttcgaaaactcgaataacttcttaaaaccccgcaaaacgaantttccaaacctaccacgacctccaatataaacgtaacgaacgctcctccctaaaattcaaccctcgacttaaaactacccgctaaattactcgaaaaccccgaaacantcgaaaaaaacgactaaaaactcccna

SEQ ID NO: 24257 - DNA, 540 bp, Artificial Sequence
  chemically treated genomic DNA (Homo sapiens) CpG-island No: 24257
  unsure (191, 239)
tttatcgaatttaaagaaggttataatttttttttagtttatttcgtttttgaagagtttttttattatcgtggtaaagcgttttcgcgcggtgaagggcgttaggtgtagttggttggatatttcggcgaagtcgcggcggtagcggcgggagaagtcgtcgtcggtttggcggagggttaggtggattnataggtggtatcgggttgagcgtaggtttcgcggcggcgtcgggggtnagtcggggtttgtagcggcgaggttttggcgatcgggtttcgggatgcggttggatggggcgtgtgttcgggttgggaggagaagatgttcggtgcgggggcggttttcgggggcgcggcgtttatatttttcgtattttattcgtagtttttttgcgatagtttataatggatgtattttattattatttttcggttatcgtattttgtttttttagcgtgcgttattttttttagaggaaaagtaacgggggttaacggtatttttcgttttagtttttattttacggtttttagagaa

SEQ ID NO: 24258 - DNA, 540 bp, Artificial Sequence
  chemically treated genomic DNA (Homo sapiens) CpG-island No: 24258
  unsure (302, 350)
ttctctaaaaaccgtaaaataaaaactaaaacgaaaaataccgttaacccccgttacttttcctctaaaaaaaataacgcacgctaaaaaaacaaaatacgataaccgaaaaataataataaaatacatccattataaactatcgcaaaaaaactacgaataaaatacgaaaaatataaacgccgcgcccccgaaaaccgcccccgcaccgaacatcttctcctcccaacccgaacacacgccccatccaaccgcatcccgaaacccgatcgccaaaacctcgccgctacaaaccccgactnacccccgacgccgccgcgaaacctacgctcaacccgataccacctatnaatccacctaaccctccgccaaaccgacgacgacttctcccgccgctaccgccgcgacttcgccgaaatatccaaccaactacacctaacgcccttcaccgcgcgaaaacgctttaccacgataataaaaaaactcttcaaaaacgaaataaactaaaaaaaaattataaccttctttaaattcgataaa

SEQ ID NO: 24259 - DNA, 540 bp, Artificial Sequence
  chemically treated genomic DNA (Homo sapiens) CpG-island No: 24259
  unsure (302, 350)
ttttttgggggtcgtggggtgggagttggggcgagaggtgtcgttggttttcgttgttttttttttgggaaggatggcgtacgttgggagaatagggtacgataatcgggagatagtgatgaagtatatttattataagttgtcgtagaggggttacgagtgggatgcgggagatgtgggcgtcgcgttttcgggggtcgttttcgtatcgggtattttttttttttagttcgggtatacgttttatttagtcgtatttcgggattcggtcgttaggatttcgtcgttgtagatttcggttngttttcggcgtcgtcgcggggtttgcgtttagttcggtgttatttgtnggtttatttgatttttcgttaggtcggcgacgatttttttcgtcgttatcgtcgcgatttcgtcgagatgtttagttagttgtatttgacgttttttatcgcgcggggacgttttgttacggtggtggaggagttttttagggacggggtgaattgggggaggattgtggttttttttgagttcggtggg

SEQ ID NO: 24260 - DNA, 540 bp, Artificial Sequence
  chemically treated genomic DNA (Homo sapiens) CpG-island No: 24260
  unsure (191, 239)
cccaccgaactcaaaaaaaaccacaatcctcccccaattcaccccgtccctaaaaaactcctccaccaccgtaacaaaacgtccccgcgcgataaaaaacgtcaaatacaactaactaaacatctcgacgaaatcgcgacgataacgacgaaaaaaatcgtcgccgacctaacgaaaaatcaaataaaccnacaaataacaccgaactaaacgcaaaccccgcgacgacgccgaaaacnaaccgaaatctacaacgacgaaatcctaacgaccgaatcccgaaatacgactaaataaaacgtatacccgaactaaaaaaaaaaaatacccgatacgaaaacgacccccgaaaacgcgacgcccacatctcccgcatcccactcgtaacccctctacgacaacttataataaatatacttcatcactatctcccgattatcgtaccctattctcccaacgtacgccatccttcccaaaaaaaaaacaacgaaaaccaacgacacctctcgccccaactcccaccccacgacccccaaaaaa

SEQ ID NO: 24261 - DNA, 531 bp, Artificial Sequence
  chemically treated genomic DNA (Homo sapiens) CpG-island No: 24261
cggaacgcgtttttttcggttacgagatgaggggtacgtagacggacgcgtttttcggtgagtgtgcgtgtattagtgtatgatttttttatttcgtttatagggtttgggtattcgttattatttacggttgtttggttagtaaataatagtagattcgataatcgttagttatttcgacggtttacgtttatcgttagtttttagtttttcgtagatcggaagtttttttgtttcggttcgtaggtttacgttttattgatagtaggaatcggaagtttttttgtttcgatcgtttgcgcgcggtttcgttggtcgtataggcgtagtggagttcgggcggagttgtgggagtggaggaggaagaggcggtagggggtacgggggttggttttagaagatggcggaggcgggggtgagttgggggtttttcggcgaagcgcgggtgacgtggtgttgaggaaagcggtttgaggaggagggtggtttttgggaagaagaattatttgtgtttttgtagtttgggaattt

SEQ ID NO: 24262 - DNA, 531 bp, Artificial Sequence
  chemically treated genomic DNA (Homo sapiens) CpG-island No: 24262
aaattcccaaactacaaaaacacaaataattcttcttcccaaaaaccaccctcctcctcaaaccgctttcctcaacaccacgtcacccgcgcttcgccgaaaaacccccaactcacccccgcctccgccatcttctaaaaccaacccccgtaccccctaccgcctcttcctcctccactcccacaactccgcccgaactccactacgcctatacgaccaacgaaaccgcgcgcaaacgatcgaaacaaaaaaacttccgattcctactatcaataaaacgtaaacctacgaaccgaaacaaaaaaacttccgatctacgaaaaactaaaaactaacgataaacgtaaaccgtcgaaataactaacgattatcgaatctactattatttactaaccaaacaaccgtaaataataacgaatacccaaaccctataaacgaaataaaaaaatcatacactaatacacgcacactcaccgaaaaacgcgtccgtctacgtacccctcatctcgtaaccgaaaaaaacgcgttccg

SEQ ID NO: 24263 - DNA, 531 bp, Artificial Sequence
  chemically treated genomic DNA (Homo sapiens) CpG-island No: 24263
gggtttttaggttgtaaaaatataagtagtttttttttttaagggttatttttttttttaggtcgttttttttagtattacgttattcgcgtttcgtcgggagatttttaatttattttcgttttcgttattttttgggattagttttcgtattttttatcgttttttttttttttatttttataatttcgttcgagttttattgcgtttgtgcggttaacgaggtcgcgcgtaggcgatcggggtagaagagttttcggtttttgttgttaataagacgtggatttgcgagtcggggtaaaagggttttcggtttgcgggaaattggaggttagcggtgggcgtggatcgtcgaggtgattggcggttgtcggatttgttgttgtttgttgattaggtagtcgtaggtaatgacggatgtttagattttgtgggcggagtaaaggaattatgtattgatatacgtatatttatcgaggggcgcgttcgtttgcgtgttttttatttcgtagtcgaaaggagcgcgtttcg

SEQ ID NO: 24264 - DNA, 531 bp, Artificial Sequence
  chemically treated genomic DNA (Homo sapiens) CpG-island No: 24264
cgaaacgcgctcctttcgactacgaaataaaaaacacgcaaacgaacgcgcccctcgataaatatacgtatatcaatacataattcctttactccgcccacaaaatctaaacatccgtcattacctacgactacctaatcaacaaacaacaacaaatccgacaaccgccaatcacctcgacgatccacgcccaccgctaacctccaatttcccgcaaaccgaaaacccttttaccccgactcgcaaatccacgtcttattaacaacaaaaaccgaaaactcttctaccccgatcgcctacgcgcgacctcgttaaccgcacaaacgcaataaaactcgaacgaaattataaaaataaaaaaaaaaaaaacgataaaaaatacgaaaactaatcccaaaaaataacgaaaacgaaaataaattaaaaatctcccgacgaaacgcgaataacgtaatactaaaaaaaacgacctaaaaaaaaaaataacccttaaaaaaaaaaactacttatatttttacaacctaaaaaccc

SEQ ID NO: 24265 - DNA, 604 bp, Artificial Sequence
  chemically treated genomic DNA (Homo sapiens) CpG-island No: 24265
tcgtagaatagtcggatcgggtggaaggatcgttttttttttcgtagtttttaagggagttggaataaaaaacgaaattaaaatttgtttgttcgtttttttttttatcgtttgcgtttcgttggttgtgggttttttgcggtcgttgagggcgcgtttttttttcgttatggtaagttgtttttgttttgggttttgcggtgtaggttcgtgtttgtatcgtcgttatggttttttagaagggcgcggaatcgggcgcgacgggttagggtgtagggttgcgcgggagggggcggcgtacggaggggttttagggattcgggggttttcgtagagtcgtttatttcggcgggtaaatttaggttagtttcgttgtattttttttaggtggcggtattgcgcgtttttgaaatttacgtacggcggtgtagtataggttcgttttagaggtttaggattaggttgttattttttatatttattgtttaggcgacggggacgtcgtcgttcgtcgaggagttgtttcgtaggttgttagggtttaattgttgtttttttacgtttcggggggaataaaagtggtttgattagttagaaatggagg

SEQ ID NO: 24266 - DNA, 604 bp, Artificial Sequence
  chemically treated genomic DNA (Homo sapiens) CpG-island No: 24266
cctccatttctaactaatcaaaccacttttattccccccgaaacgtaaaaaaacaacaattaaaccctaacaacctacgaaacaactcctcgacgaacgacgacgtccccgtcgcctaaacaataaatataaaaaataacaacctaatcctaaacctctaaaacgaacctatactacaccgccgtacgtaaatttcaaaaacgcgcaataccgccacctaaaaaaaatacaacgaaactaacctaaatttacccgccgaaataaacgactctacgaaaacccccgaatccctaaaacccctccgtacgccgccccctcccgcgcaaccctacaccctaacccgtcgcgcccgattccgcgcccttctaaaaaaccataacgacgatacaaacacgaacctacaccgcaaaacccaaaacaaaaacaacttaccataacgaaaaaaaaacgcgccctcaacgaccgcaaaaaacccacaaccaacgaaacgcaaacgataaaaaaaaaaacgaacaaacaaattttaatttcgttttttattccaactcccttaaaaactacgaaaaaaaaaacgatccttccacccgatccgactattctacga

SEQ ID NO: 24267 - DNA, 604 bp, Artificial Sequence
  chemically treated genomic DNA (Homo sapiens) CpG-island No: 24267
tttttatttttggttaattaggttatttttgtttttttcgaggcgtgggaggataatagttaagttttaatagtttgcgaagtagtttttcgacgaacggcggcgttttcgtcgtttgggtagtgggtgtgggaggtgatagtttagttttgagtttttggagcgggtttatattgtatcgtcgtacgtgaattttaggagcgcgtaatgtcgttatttgggaagggtgtagcgaggttgatttgagtttgttcgtcggggtggacggttttacgggaattttcgggtttttggggttttttcgtgcgtcgttttttttcgcgtagttttgtattttggttcgtcgcgttcggtttcgcgtttttttaggggattatggcgacggtataggtacggatttgtatcgtaaaatttaaagtaaaagtaatttgttatggcggaggggagacgcgtttttagcggtcgtagaaagtttataattagcggaacgtaggcgatggggagaggagcgagtaggtaggttttggtttcgttttttgttttagtttttttggaggttacgaagaaaagggcggtttttttattcgattcggttgttttgcga

SEQ ID NO: 24268 - DNA, 604 bp, Artificial Sequence
  chemically treated genomic DNA (Homo sapiens) CpG-island No: 24268
tcgcaaaacaaccgaatcgaataaaaaaaccgcccttttcttcgtaacctccaaaaaaactaaaacaaaaaacgaaaccaaaacctacctactcgctcctctccccatcgcctacgttccgctaattataaactttctacgaccgctaaaaacgcgtctcccctccgccataacaaattacttttactttaaattttacgatacaaatccgtacctataccgtcgccataatcccctaaaaaaacgcgaaaccgaacgcgacgaaccaaaatacaaaactacgcgaaaaaaaacgacgcacgaaaaaaccccaaaaacccgaaaattcccgtaaaaccgtccaccccgacgaacaaactcaaatcaacctcgctacacccttcccaaataacgacattacgcgctcctaaaattcacgtacgacgatacaatataaacccgctccaaaaactcaaaactaaactatcacctcccacacccactacccaaacgacgaaaacgccgccgttcgtcgaaaaactacttcgcaaactattaaaacttaactattatcctcccacgcctcgaaaaaaacaaaaataacctaattaaccaaaaataaaaa

SEQ ID NO: 24269 - DNA, 775 bp, Artificial Sequence
  chemically treated genomic DNA (Homo sapiens) CpG-island No: 24269
  unsure (728, 732)
ttttgtttcggtcgttgtattttcgcgggcgtttaggtgggacgtgggtaggtgcgcgagcgtcgtgtgtgtcggtgtggatttgtgtgtgtgtttgcgtgtgtgcgtgtgcgtgtgtcgcgggttggtttcgggatattgaggattttcgggtcggtttaggtttgttcgattttgttgttttcgtcgttcgttcggttttatttttcggcgggtcggttttttatttggacgcgtcgcgttttttttttttagcgggagcgtcgtattgatattgtagatggagtttatgtcgttgtttttcgtttttttttgaacgtgtgcgtgtgcgcgcgtgtggttgttttttttagttttagtttcgaacgtaaatattttatcgaggtatagggaagtcgggagtagtcgaggaacgcggagggcgtcgaattagagtttgcggggtttgatagttttttttgcggcgtataaggtgggcgtaatagtataataaaaaggtcggaaaatggggatcgatttcgaatattttttttttttttttagattcggagttcgagtagcggcggcggttttcgggggttgcggtggcgacgtcgggttgtggtttttcgtttttattttcgcgggttgtatgtttttgatgttaagcgggtatagcggcgttatttcgcgtcgtttatgttcgttcggtcgggtcgtttgtcgggcgcggggagtgcgcgtgggantcgncggggagcgttttcggcgtttttgcgcgtttttttggtagcgg

SEQ ID NO: 24270 - DNA, 775 bp, Artificial Sequence
  chemically treated genomic DNA (Homo sapiens) CpG-island No: 24270
  unsure (44, 48)
ccgctaccaaaaaaacgcgcaaaaacgccgaaaacgctccccgncgantcccacgcgcactccccgcgcccgacaaacgacccgaccgaacgaacataaacgacgcgaaataacgccgctatacccgcttaacatcaaaaacatacaacccgcgaaaataaaaacgaaaaaccacaacccgacgtcgccaccgcaacccccgaaaaccgccgccgctactcgaactccgaatctaaaaaaaaaaaaaaaatattcgaaatcgatccccattttccgacctttttattatactattacgcccaccttatacgccgcaaaaaaaactatcaaaccccgcaaactctaattcgacgccctccgcgttcctcgactactcccgacttccctatacctcgataaaatatttacgttcgaaactaaaactaaaaaaaacaaccacacgcgcgcacacgcacacgttcaaaaaaaaacgaaaaacaacgacataaactccatctacaatatcaatacgacgctcccgctaaaaaaaaaaaacgcgacgcgtccaaataaaaaaccgacccgccgaaaaataaaaccgaacgaacgacgaaaacaacaaaatcgaacaaacctaaaccgacccgaaaatcctcaatatcccgaaaccaacccgcgacacacgcacacgcacacacgcaaacacacacacaaatccacaccgacacacacgacgctcgcgcacctacccacgtcccacctaaacgcccgcgaaaatacaacgaccgaaacaaaa

SEQ ID NO: 24271 - DNA, 775 bp, Artificial Sequence
  chemically treated genomic DNA (Homo sapiens) CpG-island No: 24271
  unsure (44, 48)
tcgttattagagaggcgcgtagaggcgtcgagagcgtttttcgncggnttttacgcgtatttttcgcgttcggtaagcggttcgatcgggcgagtatgggcggcgcggagtgacgtcgttgtgttcgtttggtattaaggatatgtagttcgcgggggtgggaacgaagggttatagttcggcgtcgttatcgtagttttcgagagtcgtcgtcgttgttcgggtttcgggtttgggaggagaaaaggggtgttcggaatcgatttttatttttcgatttttttgttgtattattacgtttattttgtacgtcgtaagagaagttgttaagtttcgtaggttttgattcggcgtttttcgcgtttttcggttgttttcggtttttttgtgtttcggtggagtatttgcgttcggggttggggttggaggaggtagttatacgcgcgtatacgtatacgtttagaggagggcgagaggtagcggtataggttttatttgtagtgttaatgcggcgttttcgttgaaggagggaaacgcggcgcgtttaggtaaggagtcggttcgtcggggagtggggtcgggcgggcggcgagggtagtaaggtcggatagatttgggtcgattcgggagtttttagtgtttcggagttagttcgcggtatacgtatacgtatatacgtaggtatatatatagatttatatcggtatatacggcgttcgcgtatttgtttacgttttatttggacgttcgcggaggtgtagcggtcggagtaggg

SEQ ID NO: 24272 - DNA, 775 bp, Artificial Sequence
  chemically treated genomic DNA (Homo sapiens) CpG-island No: 24272
  unsure (728, 732)
ccctactccgaccgctacacctccgcgaacgtccaaataaaacgtaaacaaatacgcgaacgccgtatataccgatataaatctatatatatacctacgtatatacgtatacgtataccgcgaactaactccgaaacactaaaaactcccgaatcgacccaaatctatccgaccttactaccctcgccgcccgcccgaccccactccccgacgaaccgactccttacctaaacgcgccgcgtttccctccttcaacgaaaacgccgcattaacactacaaataaaacctataccgctacctctcgccctcctctaaacgtatacgtatacgcgcgtataactacctcctccaaccccaaccccgaacgcaaatactccaccgaaacacaaaaaaaccgaaaacaaccgaaaaacgcgaaaaacgccgaatcaaaacctacgaaacttaacaacttctcttacgacgtacaaaataaacgtaataatacaacaaaaaaatcgaaaaataaaaatcgattccgaacaccccttttctcctcccaaacccgaaacccgaacaacgacgacgactctcgaaaactacgataacgacgccgaactataacccttcgttcccacccccgcgaactacatatccttaataccaaacgaacacaacgacgtcactccgcgccgcccatactcgcccgatcgaaccgcttaccgaacgcgaaaaatacgcgtaaaanccgncgaaaaacgctctcgacgcctctacgcgcctctctaataacga

SEQ ID NO: 24273 - DNA, 658 bp, Artificial Sequence
  chemically treated genomic DNA (Homo sapiens) CpG-island No: 24273
  unsure (26, 47, 61, 105, 112, 140, 153..154, 263, 306, 338, 390, 399..400)
  unsure (418, 423, 430, 434, 542, 546, 558, 614, 638)
gcgatagcgcgcgtttttattttatncgttaataagtcgaagttttnttaaaggaatttgnatcggcggggttgtcgtggtacgatcggtcgttaaggttatttntgcgggncgtttcgatttcggttgatcgtcgttgngttttttgggaanntcgcgtgtcggtcgtaggagaaggtagattttcgggagtttcggcgtttatcgcggtattaatcgcgtttgcgtttcgttttttttttttttgggtttcgttcgcgttntgcgtagttgcggggtttcgcgtcgtcggagtttgagaggttnggaaatgttttttaacgggtgggggaagttgngtaggtacgggcggtttcgtagtgatcggattcgggggaggtgagtgatttngtttaagtnnaaaagggaaagataattngagtngtttttnggtnagttggtttacgtatgcgttcgttaggtcggttgggagtcggtaagggaaagtcgagcgggttttattgggggaaaggggttagttatttttcggaagaggcggggtngcgncgggttcggcgnttggattcgaaacgttttttggtgtttttgggtttggcggttgagttcggggagtntagtttttgtttgggtaaagaaangaggattttttttttttttt

SEQ ID NO: 24274 - DNA, 658 bp, Artificial Sequence
  chemically treated genomic DNA (Homo sapiens) CpG-island No: 24274
  unsure (21, 45, 101, 113, 117, 225, 229, 236, 241, 259..260, 269)
  unsure (321, 353, 396, 505..506, 519, 547, 554, 598, 612, 633)
aaaaaaaaaaaaaaatcctcntttctttacccaaacaaaaactanactccccgaactcaaccgccaaacccaaaaacaccaaaaaacgtttcgaatccaancgccgaacccgncgcnaccccgcctcttccgaaaaataactaacccctttcccccaataaaacccgctcgactttcccttaccgactcccaaccgacctaacgaacgcatacgtaaaccaactnaccnaaaaacnactcnaattatctttcccttttnnacttaaacnaaatcactcacctcccccgaatccgatcactacgaaaccgcccgtacctacncaacttcccccacccgttaaaaaacatttccnaacctctcaaactccgacgacgcgaaaccccgcaactacgcanaacgcgaacgaaacccaaaaaaaaaaaaaacgaaacgcaaacgcgattaataccgcgataaacgccgaaactcccgaaaatctaccttctcctacgaccgacacgcgannttcccaaaaaacncaacgacgatcaaccgaaatcgaaacgncccgcanaaataaccttaacgaccgatcgtaccacgacaaccccgccgatncaaattcctttaanaaaacttcgacttattaacgnataaaataaaaacgcgcgctatcgc

SEQ ID NO: 24275 - DNA, 658 bp, Artificial Sequence
  chemically treated genomic DNA (Homo sapiens) CpG-island No: 24275
  unsure (21, 45, 101, 113, 117, 225, 229, 236, 241, 259..260, 269)
  unsure (321, 353, 396, 505..506, 519, 547, 554, 598, 612, 633)
aaaaaaaaaggaaagtttttntttttttatttaagtaaagattangtttttcgggtttaatcgttaggtttaggagtattaggaagcgtttcgaatttagncgtcgggttcgncgtngtttcgtttttttcgggaagtgattgattttttttttttaatggggttcgttcggtttttttttgtcggtttttagtcggtttagcggacgtatgcgtagattagttngttngggggtngtttnaattattttttttttttnnatttaggtnaaattatttatttttttcgagttcggttattgcggagtcgttcgtgtttatntagttttttttattcgttaaggggtatttttnggttttttagatttcggcggcgcgaaatttcgtaattgcgtanggcgcgggcggagtttaaaggaagggagggcggggcgtaggcgcggttagtatcgcggtgggcgtcggggttttcgggaatttatttttttttgcggtcggtacgcggnntttttagggggtntagcggcggttagtcgaggtcgagacgnttcgtangggtggttttagcggtcggtcgtattacggtagtttcgtcgatntaggtttttttggngagatttcgatttgttggcgngtagggtgaaggcgcgcgttgtcgt

SEQ ID NO: 24276 - DNA, 658 bp, Artificial Sequence
  chemically treated genomic DNA (Homo sapiens) CpG-island No: 24276
  unsure (26, 47, 61, 105, 112, 140, 153..154, 263, 306, 338, 390, 399..400)
  unsure (418, 423, 430, 434, 542, 546, 558, 614, 638)
acgacaacgcgcgccttcaccctacncgccaacaaatcgaaatctcnccaaaaaaacctanatcgacgaaactaccgtaatacgaccgaccgctaaaaccacccntacgaancgtctcgacctcgactaaccgccgctanaccccctaaaaannccgcgtaccgaccgcaaaaaaaaataaattcccgaaaaccccgacgcccaccgcgatactaaccgcgcctacgccccgccctcccttcctttaaactccgcccgcgccntacgcaattacgaaatttcgcgccgccgaaatctaaaaaaccnaaaaataccccttaacgaataaaaaaaactanataaacacgaacgactccgcaataaccgaactcgaaaaaaataaataatttnacctaaatnnaaaaaaaaaaaataattnaaacnacccccnaacnaactaatctacgcatacgtccgctaaaccgactaaaaaccgacaaaaaaaaaccgaacgaaccccattaaaaaaaaaaaatcaatcacttcccgaaaaaaacgaaacnacgncgaacccgacgnctaaattcgaaacgcttcctaatactcctaaacctaacgattaaacccgaaaaacntaatctttacttaaataaaaaaanaaaaactttccttttttttt

SEQ ID NO: 24277 - DNA, 640 bp, Artificial Sequence
  chemically treated genomic DNA (Homo sapiens) CpG-island No: 24277
  unsure (146)
aggcgttttcgggtgcgtttcgaggttttattcgggaagttgtttcggtttggagattaaggttaagtcggtggtttcgggaagtttacgtttgttacgggcggttggttttgaaagttcgggttacggggtttgttaagtttggnagaggggttttttacgtcgtagtataaaaatgttagaggaagggttgcgttcgtttttttatttatttttcggaattacgtcgtttttcgcgcgttttcgtagattgtaggagtttagggcgtttggggattgtgacggcgtttaaggcgggggatgtggcggttttgggtcgtcgttttttgttttcgtttttgtgaggtttttcgaggtagtgtttgtgtttggggtagcgacgtcgacggcgttgggggcgcgaaagggtttacgtttttgcgtttttttggcgtcgagagaaaagcgggcgaagatagggtttcggaaggggataggcgaaaaacgtttttttgtttttttttcggtcggggttcgggtcgatttattcggtttttatttacggcgtttttataatttataaaaacgggtgaggaaaaagatcggtttcgttttttttacgttagagattaaaattagtagaataaaaatagttttaaaa

SEQ ID NO: 24278 - DNA, 640 bp, Artificial Sequence
  chemically treated genomic DNA (Homo sapiens) CpG-island No: 24278
  unsure (495)
ttttaaaactatttttattctactaattttaatctctaacgtaaaaaaaacgaaaccgatctttttcctcacccgtttttataaattataaaaacgccgtaaataaaaaccgaataaatcgacccgaaccccgaccgaaaaaaaaacaaaaaaacgtttttcgcctatccccttccgaaaccctatcttcgcccgcttttctctcgacgccaaaaaaacgcaaaaacgtaaaccctttcgcgcccccaacgccgtcgacgtcgctaccccaaacacaaacactacctcgaaaaacctcacaaaaacgaaaacaaaaaacgacgacccaaaaccgccacatcccccgccttaaacgccgtcacaatccccaaacgccctaaactcctacaatctacgaaaacgcgcgaaaaacgacgtaattccgaaaaataaataaaaaaacgaacgcaacccttcctctaacatttttatactacgacgtaaaaaacccctctnccaaacttaacaaaccccgtaacccgaactttcaaaaccaaccgcccgtaacaaacgtaaacttcccgaaaccaccgacttaaccttaatctccaaaccgaaacaacttcccgaataaaacctcgaaacgcacccgaaaacgcct

SEQ ID NO: 24279 - DNA, 640 bp, Artificial Sequence
  chemically treated genomic DNA (Homo sapiens) CpG-island No: 24279
  unsure (495)
ttttggggttgtttttgttttgttggttttggtttttggcgtggggggggcggggtcggtttttttttttattcgtttttgtgggttgtgggggcgtcgtgggtgggggtcgggtgagtcggttcgagtttcggtcgggggggaggtaaggaagcgtttttcgtttattttttttcgggattttgttttcgttcgtttttttttcggcgttaggggaacgtaggagcgtgagttttttcgcgtttttagcgtcgtcggcgtcgttgttttagatatagatattgtttcgagaggttttatagaggcgggggtagaaggcggcgatttagagtcgttatatttttcgttttgggcgtcgttatagtttttagacgttttggatttttgtagtttacgaagacgcgcgggggacggcgtggtttcgagaggtaggtgaggaggcgggcgtagttttttttttggtatttttgtattgcggcgtgaaaggtttttttnttaagtttggtagatttcgtggttcgagtttttaggattaatcgttcgtggtaggcgtgggtttttcggggttatcggtttaattttgatttttagatcgaggtagtttttcgggtagggtttcggggcgtattcgaaaacgttt

SEQ ID NO: 24280 - DNA, 640 bp, Artificial Sequence
  chemically treated genomic DNA (Homo sapiens) CpG-island No: 24280
  unsure (146)
aaacgttttcgaatacgccccgaaaccctacccgaaaaactacctcgatctaaaaatcaaaattaaaccgataaccccgaaaaacccacgcctaccacgaacgattaatcctaaaaactcgaaccacgaaatctaccaaacttaanaaaaaaacctttcacgccgcaatacaaaaataccaaaaaaaaaactacgcccgcctcctcacctacctctcgaaaccacgccgtcccccgcgcgtcttcgtaaactacaaaaatccaaaacgtctaaaaactataacgacgcccaaaacgaaaaatataacgactctaaatcgccgccttctacccccgcctctataaaacctctcgaaacaatatctatatctaaaacaacgacgccgacgacgctaaaaacgcgaaaaaactcacgctcctacgttcccctaacgccgaaaaaaaaacgaacgaaaacaaaatcccgaaaaaaaataaacgaaaaacgcttccttacctcccccccgaccgaaactcgaaccgactcacccgacccccacccacgacgcccccacaacccacaaaaacgaataaaaaaaaaaaccgaccccgccccccccacgccaaaaaccaaaaccaacaaaacaaaaacaaccccaaaa

SEQ ID NO: 24281 - DNA, 717 bp, Artificial Sequence
  chemically treated genomic DNA (Homo sapiens) CpG-island No: 24281
  unsure (79, 573, 688)
tagtaaagcgagcggttttggggtgggggcgggggtggggtggcgaggaaggggagaggtgatattggttttggaggantggggtagttcgaattgaggttgggttgagtatacggttcgttatgacgtcgagtttgttttttttgtagatggtttgggattgtcggaggttggtggcggcggggcgcgtaggttgcgtacggtttatattaatacgtagttgttggaattggagaaggaattttattttaataagtatttgtgtcggttacgtcgcgtcgagatcgcggttttgttggattttatcgaaaggtaggttaaagtttggttttagaatcggcgtatgaagtataagcggtagacgtagtattcgagagtcgtcggatgggggagtttgttttgttcgggagtttttggaggatatttgcgattttgtcgaggaattttcggttagttcgggcggttttttcgtttcgcgggcggcgggggaagtttgttgttattcgtcggaagtggtgtcgggggttttaagcgcggatttttcgtttttagttcgttttttagaaggcgtangcgcgttgaagtttcggttgcgcgtttgtcggggtcgggggttggagttcgggttatttgtcgaaaaattttttttggggcgttaggatttaattttttttttcgatttaaattnttggcgggttattttttgtttttatttat

SEQ ID NO: 24282 - DNA, 717 bp, Artificial Sequence
  chemically treated genomic DNA (Homo sapiens) CpG-island No: 24282
  unsure (30, 145, 639)
ataaataaaaacaaaaaataacccgccaanaatttaaatcgaaaaaaaaaattaaatcctaacgccccaaaaaaaatttttcgacaaataacccgaactccaacccccgaccccgacaaacgcgcaaccgaaacttcaacgcgcntacgccttctaaaaaacgaactaaaaacgaaaaatccgcgcttaaaacccccgacaccacttccgacgaataacaacaaacttcccccgccgcccgcgaaacgaaaaaaccgcccgaactaaccgaaaattcctcgacaaaatcgcaaatatcctccaaaaactcccgaacaaaacaaactcccccatccgacgactctcgaatactacgtctaccgcttatacttcatacgccgattctaaaaccaaactttaacctacctttcgataaaatccaacaaaaccgcgatctcgacgcgacgtaaccgacacaaatacttattaaaataaaattccttctccaattccaacaactacgtattaatataaaccgtacgcaacctacgcgccccgccgccaccaacctccgacaatcccaaaccatctacaaaaaaaacaaactcgacgtcataacgaaccgtatactcaacccaacctcaattcgaactaccccantcctccaaaaccaatatcacctctccccttcctcgccaccccacccccgcccccaccccaaaaccgctcgctttacta

SEQ ID NO: 24283 - DNA, 717 bp, Artificial Sequence
  chemically treated genomic DNA (Homo sapiens) CpG-island No: 24283
  unsure (30, 145, 639)
ataggtggaaataaggaatggttcgttaanaatttaggtcgggaaggaaagttgaattttggcgttttaagaaaaatttttcggtaaatggttcgggttttagttttcggtttcggtaagcgcgtagtcggaattttaacgcgtntgcgttttttaaggaacgggttaaaggcggggggttcgcgtttaaggttttcggtattattttcggcgggtgatagtaggtttttttcgtcgttcgcgaggcggaggggtcgttcgggttggtcgggggtttttcggtagggtcgtagatgttttttaagggttttcgggtaaggtaggtttttttattcggcggttttcgggtgttgcgtttgtcgtttgtgttttatgcgtcggttttgaaattagattttgatttgtttttcggtgaggtttagtaaggtcgcgatttcgacgcggcgtggtcggtataggtatttattaaagtggaattttttttttagttttagtagttgcgtgttggtgtaagtcgtgcgtagtttgcgcgtttcgtcgttattagttttcggtagttttaggttatttgtagggaaaataggttcggcgttatagcgggtcgtgtatttagtttaattttagttcggattattttanttttttaaaattagtattattttttttttttttcgttattttattttcgtttttattttaaagtcgttcgttttattg

SEQ ID NO: 24284 - DNA, 717 bp, Artificial Sequence
  chemically treated genomic DNA (Homo sapiens) CpG-island No: 24284
  unsure (79, 573, 688)
caataaaacgaacgactttaaaataaaaacgaaaataaaataacgaaaaaaaaaaaaaataatactaattttaaaaaantaaaataatccgaactaaaattaaactaaatacacgacccgctataacgccgaacctattttccctacaaataacctaaaactaccgaaaactaataacgacgaaacgcgcaaactacgcacgacttacaccaacacgcaactactaaaactaaaaaaaaaattccactttaataaatacctataccgaccacgccgcgtcgaaatcgcgaccttactaaacctcaccgaaaaacaaatcaaaatctaatttcaaaaccgacgcataaaacacaaacgacaaacgcaacacccgaaaaccgccgaataaaaaaacctaccttacccgaaaacccttaaaaaacatctacgaccctaccgaaaaacccccgaccaacccgaacgacccctccgcctcgcgaacgacgaaaaaaacctactatcacccgccgaaaataataccgaaaaccttaaacgcgaaccccccgcctttaacccgttccttaaaaaacgcanacgcgttaaaattccgactacgcgcttaccgaaaccgaaaactaaaacccgaaccatttaccgaaaaatttttcttaaaacgccaaaattcaactttccttcccgacctaaattnttaacgaaccattccttatttccacctat

SEQ ID NO: 24285 - DNA, 570 bp, Artificial Sequence
  chemically treated genomic DNA (Homo sapiens) CpG-island No: 24285
  unsure (21, 42, 63, 158, 527)
tcggtgtgttcgtttttcgtntatggcgttttcggcgttttnttacgtttcgtcgtgtttttngttagttgtcgtttttttcgtttggtaatttggttcgtttttaaagttcgagtttagttcggtgttagacgagttcggggttttcgtagttttgncgcggttcggacggagtgggagttttttaggaaattggcgtttgtcgcgttcggagtgttagattcgcgcgtttttggggttttggaggtcgaataaagtcgggggcgggggcgggggcggggtgggggcgagcgtattcgggttttttttttagttcggcgggacgttcgggggttgttgggggttgttgcgggttgagcgattaggatgcggttggttgcggcggcggagttttagtttgggtcgagggttcggggtttggtagtcggttttcgcgcgtatttagcgttcggtcgttcgtcgttgttcgcgttttagcggaagatcgtataggtaagtgtggggtgcggagtcggggcgttcggggntttggcgggggtgtagaggtgggtggttgagattttcgttttt

SEQ ID NO: 24286 - DNA, 570 bp, Artificial Sequence
  chemically treated genomic DNA (Homo sapiens) CpG-island No: 24286
  unsure (44, 413, 508, 529, 550)
aaaaacgaaaatctcaaccacccacctctacacccccgccaaanccccgaacgccccgactccgcaccccacacttacctatacgatcttccgctaaaacgcgaacaacgacgaacgaccgaacgctaaatacgcgcgaaaaccgactaccaaaccccgaaccctcgacccaaactaaaactccgccgccgcaaccaaccgcatcctaatcgctcaacccgcaacaacccccaacaacccccgaacgtcccgccgaactaaaaaaaaaacccgaatacgctcgcccccaccccgcccccgcccccgcccccgactttattcgacctccaaaaccccaaaaacgcgcgaatctaacactccgaacgcgacaaacgccaatttcctaaaaaactcccactccgtccgaaccgcgncaaaactacgaaaaccccgaactcgtctaacaccgaactaaactcgaactttaaaaacgaaccaaattaccaaacgaaaaaaacgacaactaacnaaaaacacgacgaaacgtaanaaaacgccgaaaacgccatanacgaaaaacgaacacaccga

SEQ ID NO: 24287 - DNA, 570 bp, Artificial Sequence
  chemically treated genomic DNA (Homo sapiens) CpG-island No: 24287
  unsure (44, 413, 508, 529, 550)
gggggcgggggttttagttatttatttttgtattttcgttaggntttcgagcgtttcggtttcgtattttatatttatttgtgcggtttttcgttagggcgcgggtaacggcgggcggtcgggcgttgggtgcgcgcgggggtcgattgttaggtttcggattttcggtttaggttggggtttcgtcgtcgtagttagtcgtattttagtcgtttaattcgtagtaatttttagtaattttcgagcgtttcgtcgagttgggggagaggttcggatgcgttcgtttttatttcgttttcgttttcgttttcggttttgttcggtttttagggttttaggagcgcgcggatttggtatttcgggcgcggtagacgttagttttttgagaagtttttatttcgttcgggtcgcgntagggttgcgggaatttcgggttcgtttggtatcgagttgaattcgggttttgagagcgggttaagttgttaggcgagaggagcggtaattgatnaggggtacggcgaggcgtagnggagcgtcgggggcgttatgngcggaaggcgggtatatcgg

SEQ ID NO: 24288 - DNA, 570 bp, Artificial Sequence
  chemically treated genomic DNA (Homo sapiens) CpG-island No: 24288
  unsure (21, 42, 63, 158, 527)
ccgatatacccgccttccgcncataacgcccccgacgctccnctacgcctcgccgtacccctnatcaattaccgctcctctcgcctaacaacttaacccgctctcaaaacccgaattcaactcgataccaaacgaacccgaaattcccgcaaccctancgcgacccgaacgaaataaaaacttctcaaaaaactaacgtctaccgcgcccgaaataccaaatccgcgcgctcctaaaaccctaaaaaccgaacaaaaccgaaaacgaaaacgaaaacgaaataaaaacgaacgcatccgaacctctcccccaactcgacgaaacgctcgaaaattactaaaaattactacgaattaaacgactaaaatacgactaactacgacgacgaaaccccaacctaaaccgaaaatccgaaacctaacaatcgacccccgcgcgcacccaacgcccgaccgcccgccgttacccgcgccctaacgaaaaaccgcacaaataaatataaaatacgaaaccgaaacgctcgaaancctaacgaaaatacaaaaataaataactaaaacccccgccccc

SEQ ID NO: 24289 - DNA, 605 bp, Artificial Sequence
  chemically treated genomic DNA (Homo sapiens) CpG-island No: 24289
  unsure (236, 252)
cgacgggaagttttatttattgttgtacgaatttattcgttgtatttacgggtagatcggagtggagtatttttgtttttttgtttcgtcgaatacgtttttgttttgcgcgtagttcgattttcgcggttcggggtggaacgggggttgttcgtcggcgtcggagagtgcgtaggtcgattttttttcgcggtagaaggtcggcgtcggttcgtagtcgtagggcgtcgttcggntcgtagttatcgtttngtcggcgggtaataggaggaagtggtaaagtttttgttttggttcggttttggttcgtagggcgcggggtaatgttttagcgggttcgtatagttcgacgaatagagcggtagttggtttaggaaggatttttgttcgttggttagagtgacggggaaggtggagtttacgaaataggaatttattgggaggggaggcgcgcgcggtcgttgttgtttcgtcgggtttatgatttgttgtgttttatagttcgagcgtcgcgtttattagtagtatattcgagattgggttttagttgaggggggatggcgaggtgttagtgagggttagaaggaaatataattatttgattt

SEQ ID NO: 24290 - DNA, 605 bp, Artificial Sequence
  chemically treated genomic DNA (Homo sapiens) CpG-island No: 24290
  unsure (354, 370)
aaatcaaataattatatttccttctaaccctcactaacacctcgccatcccccctcaactaaaacccaatctcgaatatactactaataaacgcgacgctcgaactataaaacacaacaaatcataaacccgacgaaacaacaacgaccgcgcgcgcctcccctcccaataaattcctatttcgtaaactccaccttccccgtcactctaaccaacgaacaaaaatccttcctaaaccaactaccgctctattcgtcgaactatacgaacccgctaaaacattaccccgcgccctacgaaccaaaaccgaaccaaaacaaaaactttaccacttcctcctattacccgccgacnaaacgataactacganccgaacgacgccctacgactacgaaccgacgccgaccttctaccgcgaaaaaaaatcgacctacgcactctccgacgccgacgaacaacccccgttccaccccgaaccgcgaaaatcgaactacgcgcaaaacaaaaacgtattcgacgaaacaaaaaaacaaaaatactccactccgatctacccgtaaatacaacgaataaattcgtacaacaataaataaaacttcccgtcg

SEQ ID NO: 24291 - DNA, 605 bp, Artificial Sequence
  chemically treated genomic DNA (Homo sapiens) CpG-island No: 24291
  unsure (354, 370)
ggattagatggttgtatttttttttggtttttattggtatttcgttatttttttttagttaaaatttaatttcggatatattattaataggcgcggcgttcggattataaaatataataaattataaattcggcggagtagtagcggtcgcgcgcgtttttttttttaatgagtttttatttcgtgaattttatttttttcgttattttggttagcgggtaggagttttttttgggttagttatcgttttattcgtcgggttatgcggattcgttgagatattatttcgcgttttacgggttagggtcgggttaggataagggttttgttatttttttttattattcgtcggtngggcggtggttacggntcgagcggcgttttgcgattacgggtcggcgtcggttttttatcgcgagaaagagtcggtttgcgtatttttcggcgtcgacgagtagttttcgttttatttcgagtcgcggaagtcggattgcgcgtaggataagagcgtgttcggcgagatagaagagtagaagtgttttatttcggtttattcgtggatgtagcggatgaattcgtgtaatagtgagtgagatttttcgtcg

SEQ ID NO: 24292 - DNA, 605 bp, Artificial Sequence
  chemically treated genomic DNA (Homo sapiens) CpG-island No: 24292
  unsure (236, 252)
cgacgaaaaatctcactcactattacacgaattcatccgctacatccacgaataaaccgaaataaaacacttctactcttctatctcgccgaacacgctcttatcctacgcgcaatccgacttccgcgactcgaaataaaacgaaaactactcgtcgacgccgaaaaatacgcaaaccgactctttctcgcgataaaaaaccgacgccgacccgtaatcgcaaaacgccgctcganccgtaaccaccgcccnaccgacgaataataaaaaaaaataacaaaacccttatcctaacccgaccctaacccgtaaaacgcgaaataatatctcaacgaatccgcataacccgacgaataaaacgataactaacccaaaaaaaactcctacccgctaaccaaaataacgaaaaaaataaaattcacgaaataaaaactcattaaaaaaaaaaacgcgcgcgaccgctactactccgccgaatttataatttattatattttataatccgaacgccgcgcctattaataatatatccgaaattaaattttaactaaaaaaaaataacgaaataccaataaaaaccaaaaaaaaatacaaccatctaatcc

SEQ ID NO: 24293 - DNA, 826 bp, Artificial Sequence
  chemically treated genomic DNA (Homo sapiens) CpG-island No: 24293
ggtttcgcgggggagcgggtttggagttaaatcggtcggtcgtaggttggagtagcgggcgtcggagcgcgcggtggggatgttcgaaaaggagttagaggtttagtcggagagttcgagaatacgagggatgtttattttgtaatatggttttaagtttttttttgtttacgcggaagcgtttttcgttttatttcgggttgtgtagggtcgtttcggcgattaagtcgttttcggagtcgggtattggggagtcggtgttgcgttcgttgttggagtcggggttcgattgcgtcgttaggtagtcgggttttttttgggcggttatggtgggcgcgtagcgttcgggttttcgttgtcgtcgtcgttttgtttgcgttgtcgttttcgttcgtcggtcgggtttaattggtttttagcgtcgcggcgttagttcgtttttttgtagtcgtcgacgttatcgttaacgtcgtcgtcgttattgagttttcggcgtattttagtttcgggcgtcgtttacgttattcgttatttcgggtcgcggtttcggttcgggtttagtggttgcgtcgtttttcgttagtaacgttcgcgcggaatgagcgcgtcgcgttgttcgcgtttttattcgtagggttcggcgtttttttttcgttcgtcgtttttatagtcgcgcgtttattggttcggttagtttacggggagtcgcggcgggcgggcggtttttggcgtttatatattcgcgcgcgtatatatatattacgtatatattgttattttttgtatttatacgtataaattttttttatatatgtatttttatagt

SEQ ID NO: 24294 - DNA, 826 bp, Artificial Sequence
  chemically treated genomic DNA (Homo sapiens) CpG-island No: 24294
actataaaaatacatatataaaaaaaatttatacgtataaatacaaaaaataacaatatatacgtaatatatatatacgcgcgcgaatatataaacgccaaaaaccgcccgcccgccgcgactccccgtaaactaaccgaaccaataaacgcgcgactataaaaacgacgaacgaaaaaaaaacgccgaaccctacgaataaaaacgcgaacaacgcgacgcgctcattccgcgcgaacgttactaacgaaaaacgacgcaaccactaaacccgaaccgaaaccgcgacccgaaataacgaataacgtaaacgacgcccgaaactaaaatacgccgaaaactcaataacgacgacgacgttaacgataacgtcgacgactacaaaaaaacgaactaacgccgcgacgctaaaaaccaattaaacccgaccgacgaacgaaaacgacaacgcaaacaaaacgacgacgacaacgaaaacccgaacgctacgcgcccaccataaccgcccaaaaaaaacccgactacctaacgacgcaatcgaaccccgactccaacaacgaacgcaacaccgactccccaatacccgactccgaaaacgacttaatcgccgaaacgaccctacacaacccgaaataaaacgaaaaacgcttccgcgtaaacaaaaaaaaacttaaaaccatattacaaaataaacatccctcgtattctcgaactctccgactaaacctctaactccttttcgaacatccccaccgcgcgctccgacgcccgctactccaacctacgaccgaccgatttaactccaaacccgctcccccgcgaaacc

SEQ ID NO: 24295 - DNA, 826 bp, Artificial Sequence
  chemically treated genomic DNA (Homo sapiens) CpG-island No: 24295
gttatgaaagtgtatgtatggaaaggatttatacgtgtaagtgtagaaagtggtagtgtgtacgtggtgtgtgtgtgcgcgcgcgagtgtgtgagcgttaggggtcgttcgttcgtcgcggtttttcgtgggttggtcgggttaatgagcgcgcggttgtaggggcggcgggcggggagggggcgtcgagttttgcggatggaggcgcgggtagcgcggcgcgtttatttcgcgcgggcgttgttggcggggggcggcgtagttattggattcggatcggggtcgcgattcggggtggcgggtggcgtgggcggcgttcggggttgggatgcgtcgggggtttagtggcggcggcggcgttggcggtggcgtcggcggttgtagggggacgagttagcgtcgcggcgttgggagttagttgagttcggtcggcgagcggaggcggtagcgtaggtagagcggcggcggtagcgggagttcgagcgttgcgcgtttattatggtcgtttagggagagttcggttatttggcggcgtagtcggatttcggttttaatagcgagcgtagtatcgattttttagtgttcggtttcgaggacgatttggtcgtcggggcgattttgtatagttcggagtggagcgaggagcgttttcgcgtggataggaagaaatttgaggttatgttataaggtaggtatttttcgtgttttcggatttttcgattgagtttttaattttttttcggatatttttatcgcgcgtttcggcgttcgttattttagtttacggtcggtcggtttagttttaggttcgttttttcgcggagtt

SEQ ID NO: 24296 - DNA, 826 bp, Artificial Sequence
  chemically treated genomic DNA (Homo sapiens) CpG-island No: 24296
aactccgcgaaaaaacgaacctaaaactaaaccgaccgaccgtaaactaaaataacgaacgccgaaacgcgcgataaaaatatccgaaaaaaaattaaaaactcaatcgaaaaatccgaaaacacgaaaaatacctaccttataacataacctcaaatttcttcctatccacgcgaaaacgctcctcgctccactccgaactatacaaaatcgccccgacgaccaaatcgtcctcgaaaccgaacactaaaaaatcgatactacgctcgctattaaaaccgaaatccgactacgccgccaaataaccgaactctccctaaacgaccataataaacgcgcaacgctcgaactcccgctaccgccgccgctctacctacgctaccgcctccgctcgccgaccgaactcaactaactcccaacgccgcgacgctaactcgtccccctacaaccgccgacgccaccgccaacgccgccgccgccactaaacccccgacgcatcccaaccccgaacgccgcccacgccacccgccaccccgaatcgcgaccccgatccgaatccaataactacgccgccccccgccaacaacgcccgcgcgaaataaacgcgccgcgctacccgcgcctccatccgcaaaactcgacgccccctccccgcccgccgcccctacaaccgcgcgctcattaacccgaccaacccacgaaaaaccgcgacgaacgaacgacccctaacgctcacacactcgcgcgcgcacacacacaccacgtacacactaccactttctacacttacacgtataaatcctttccatacatacactttcataac

SEQ ID NO: 24297 - DNA, 689 bp, Artificial Sequence
  chemically treated genomic DNA (Homo sapiens) CpG-island No: 24297
gttttcgtatcgtagttttcgtcgttatttcgcgtttcgttattttcgcgtacgtcgttttcggcgtttgagtttcggtcgtattcggcgtcgtttatttgtttttggatgtttcgtacgcgttgttcgtgtaggcggcgacgtgttgagtttgaatattatttaggcgcgtacgtagtagtagatatcgaagataagcgagagcggtaggaggaagaggtatacgaatatttagcgttggtggatgagtacgaattttagtttttttaggcgtatttatagtaggaagagtagcgcgtatacggttagcgatacggcgggttttatggtgcggcgtcgcgcggtaagcgttgcgggttcgcgttttttgttattgtcgttagtttcgcgtttggttcgttttgcgtttgtagtttatagttcggggagttcgggatcgttcgtcgtttcgcgattggttcgggtcgtcgaggttcggtgggtcgagattcgggcggcgattaatggcgagtcgcgtcggggatcggattaggaattcgtagtttttattggttgcgggagtcggatcgttttattttttttttttcgtcgtcgcgcgaggcgggggtgttagggattgggtgtcggtggggttcgttgcgaatattgggggtgggtagttgggatttagggttttaggttttcggggt

SEQ ID NO: 24298 - DNA, 689 bp, Artificial Sequence
  chemically treated genomic DNA (Homo sapiens) CpG-island No: 24298
accccgaaaacctaaaaccctaaatcccaactacccacccccaatattcgcaacgaaccccaccgacacccaatccctaacacccccgcctcgcgcgacgacgaaaaaaaaaaaataaaacgatccgactcccgcaaccaataaaaactacgaattcctaatccgatccccgacgcgactcgccattaatcgccgcccgaatctcgacccaccgaacctcgacgacccgaaccaatcgcgaaacgacgaacgatcccgaactccccgaactataaactacaaacgcaaaacgaaccaaacgcgaaactaacgacaataacaaaaaacgcgaacccgcaacgcttaccgcgcgacgccgcaccataaaacccgccgtatcgctaaccgtatacgcgctactcttcctactataaatacgcctaaaaaaactaaaattcgtactcatccaccaacgctaaatattcgtatacctcttcctcctaccgctctcgcttatcttcgatatctactactacgtacgcgcctaaataatattcaaactcaacacgtcgccgcctacacgaacaacgcgtacgaaacatccaaaaacaaataaacgacgccgaatacgaccgaaactcaaacgccgaaaacgacgtacgcgaaaataacgaaacgcgaaataacgacgaaaactacgatacgaaaac

SEQ ID NO: 24299 - DNA, 689 bp, Artificial Sequence
  chemically treated genomic DNA (Homo sapiens) CpG-island No: 24299
gtttcgagggtttggggttttgagttttaattgtttatttttagtattcgtagcggattttatcggtatttagtttttggtattttcgtttcgcgcggcggcggggagaaaagggtggagcggttcgattttcgtagttaatgaaagttgcgggtttttggttcgattttcggcgcggttcgttattggtcgtcgttcgggtttcggtttatcgaatttcggcgattcgagttaatcgcgaggcggcgggcgatttcgggtttttcgggttgtgggttataggcgtagagcgggttaggcgcggagttggcggtagtgataggaggcgcgaattcgtagcgtttatcgcgcggcgtcgtattatggagttcgtcgtgtcgttggtcgtgtgcgcgttgttttttttgttgtgggtgcgtttgaaggggttggagttcgtgtttatttattagcgttgggtgttcgtgtgttttttttttttgtcgttttcgtttattttcgatatttattattacgtgcgcgtttgggtggtgtttaagtttagtacgtcgtcgtttgtacgagtagcgcgtgcgggatatttagaagtaggtgagcggcgtcgggtgcggtcgggatttaggcgtcggaggcggcgtgcgcggggatagcgggacgcgaggtggcgacgggagttgcggtgcgggggt

SEQ ID NO: 24300 - DNA, 689 bp, Artificial Sequence
  chemically treated genomic DNA (Homo sapiens) CpG-island No: 24300
acccccgcaccgcaactcccgtcgccacctcgcgtcccgctatccccgcgcacgccgcctccgacgcctaaatcccgaccgcacccgacgccgctcacctacttctaaatatcccgcacgcgctactcgtacaaacgacgacgtactaaacttaaacaccacccaaacgcgcacgtaataataaatatcgaaaataaacgaaaacgacaaaaaaaaaaaacacacgaacacccaacgctaataaataaacacgaactccaaccccttcaaacgcacccacaacaaaaaaaacaacgcgcacacgaccaacgacacgacgaactccataatacgacgccgcgcgataaacgctacgaattcgcgcctcctatcactaccgccaactccgcgcctaacccgctctacgcctataacccacaacccgaaaaacccgaaatcgcccgccgcctcgcgattaactcgaatcgccgaaattcgataaaccgaaacccgaacgacgaccaataacgaaccgcgccgaaaatcgaaccaaaaacccgcaactttcattaactacgaaaatcgaaccgctccacccttttctccccgccgccgcgcgaaacgaaaataccaaaaactaaataccgataaaatccgctacgaatactaaaaataaacaattaaaactcaaaaccccaaaccctcgaaac

SEQ ID NO: 24301 - DNA, 587 bp, Artificial Sequence
  chemically treated genomic DNA (Homo sapiens) CpG-island No: 24301
tttcgcgttcggcgtcggtcgcggtgatggggtaggtttagggtttgggtagtttttttcgtcgttcgggtttttttcgtcggtacgaagtcgttttttgtttgcgcgcgtcgtagggacgtggcggtttttagaggtcgggatagcgggcgtagcgtggagtttgggggtcgaggcgcgggtttagatattttcgggtaagtttcgcggcggcggtcgcgataacggtaaaaatgcgttcgcgatcggttttttgttcgcgttttcgtagttcggttgtttttttcggttttgcgttgtttttttttcgtttgttttttttttttttgggtttttcgtttgtttttattgatttcgacgtcgattttattttttggatgaaaggggtcggatcgtttcgggaaattttttttcggcggcggggttgaaggagcgggcgcgtttgcgtttcgttttagtcggacggtgcgcgaggagggcgggtcggcgcgttatattttcggtttgttagttagggtcgtttttattttttttacgggtcggtggttaatagtttcgaggtttttaagtttttttttggtcgttaa

SEQ ID NO: 24302 - DNA, 587 bp, Artificial Sequence
  chemically treated genomic DNA (Homo sapiens) CpG-island No: 24302
ttaacgaccaaaaaaaaacttaaaaacctcgaaactattaaccaccgacccgtaaaaaaaataaaaacgaccctaactaacaaaccgaaaatataacgcgccgacccgccctcctcgcgcaccgtccgactaaaacgaaacgcaaacgcgcccgctccttcaaccccgccgccgaaaaaaaatttcccgaaacgatccgacccctttcatccaaaaaataaaatcgacgtcgaaatcaataaaaacaaacgaaaaacccaaaaaaaaaaaaaacaaacgaaaaaaaaacaacgcaaaaccgaaaaaaacaaccgaactacgaaaacgcgaacaaaaaaccgatcgcgaacgcatttttaccgttatcgcgaccgccgccgcgaaacttacccgaaaatatctaaacccgcgcctcgacccccaaactccacgctacgcccgctatcccgacctctaaaaaccgccacgtccctacgacgcgcgcaaacaaaaaacgacttcgtaccgacgaaaaaaacccgaacgacgaaaaaaactacccaaaccctaaacctaccccatcaccgcgaccgacgccgaacgcgaaa

SEQ ID NO: 24303 - DNA, 587 bp, Artificial Sequence
  chemically treated genomic DNA (Homo sapiens) CpG-island No: 24303
ttggcggttaaggggaaatttgggagtttcgggattgttggttatcggttcgtgggaggagtaaaggcggttttggttggtaggtcgagggtgtgacgcgtcggttcgtttttttcgcgtatcgttcggttagggcgaggcgtaggcgcgttcgtttttttagtttcgtcgtcggggaggggtttttcgggacgattcggttttttttatttaggaagtgaaatcgacgtcggggttaatgaaaataaacggggagtttagggggaaggaaggtaggcgaggaagaggtagcgtagggtcggagggagtagtcgggttgcggaagcgcgagtaggaggtcggtcgcgggcgtatttttgtcgttgtcgcggtcgtcgtcgcgaggtttattcgggaatgtttgggttcgcgtttcggtttttaagttttacgttgcgttcgttgtttcggtttttaaaggtcgttacgtttttgcggcgcgcgtaggtagaaagcggtttcgtgtcggcggagggggttcgggcggcgggaggggttgtttaggttttgggtttattttattatcgcggtcggcgtcgggcgcgagg

SEQ ID NO: 24304 - DNA, 587 bp, Artificial Sequence
  chemically treated genomic DNA (Homo sapiens) CpG-island No: 24304
cctcgcgcccgacgccgaccgcgataataaaataaacccaaaacctaaacaacccctcccgccgcccgaaccccctccgccgacacgaaaccgctttctacctacgcgcgccgcaaaaacgtaacgacctttaaaaaccgaaacaacgaacgcaacgtaaaacttaaaaaccgaaacgcgaacccaaacattcccgaataaacctcgcgacgacgaccgcgacaacgacaaaaatacgcccgcgaccgacctcctactcgcgcttccgcaacccgactactccctccgaccctacgctacctcttcctcgcctaccttccttccccctaaactccccgtttattttcattaaccccgacgtcgatttcacttcctaaataaaaaaaaccgaatcgtcccgaaaaacccctccccgacgacgaaactaaaaaaacgaacgcgcctacgcctcgccctaaccgaacgatacgcgaaaaaaacgaaccgacgcgtcacaccctcgacctaccaaccaaaaccgcctttactcctcccacgaaccgataaccaacaatcccgaaactcccaaatttccccttaaccgccaa

SEQ ID NO: 24305 - DNA, 625 bp, Artificial Sequence
  chemically treated genomic DNA (Homo sapiens) CpG-island No: 24305
gggcgcggggtcggttaggattttcgcgttcggattttcgggtgtttgacgtttattttgttcggtatttttttaatatttttcggtttacgtcgtcgcgcgcgtcgggttttcgcggtcgcggagggaggttcgtttagagtttggggtcgcgtcgtcgtcgtttcggttttttttttttttttttttttttttttttgggtttcgagtcgcgtagtggttcggaaaagtttggttcgggttgttttttatcgtttttttttttgggattggtttgtttgcgttttttgtatcgggggttattcgttatgatcggttgttttattgataagagcggattagatggtagttcgtatggattcggcgttttgtttcggtagtacgtaggttcgatttagtaattaaatatagcgataatgtgggtatcgcgcgtttattgaaacgcgcgcgggtcgtttagggtttacgttatcgtttcggcgagtattttttcgcgttttttaattttaaagcgaaatttcggtcgtcgtttttttcgttttttatttttagttttggtttcgaggcgttttgtgtttgttattgtttggtgtgttgtattcgcgaggggattagagagataaga

SEQ ID NO: 24306 - DNA, 625 bp, Artificial Sequence
  chemically treated genomic DNA (Homo sapiens) CpG-island No: 24306
tcttatctctctaatcccctcgcgaatacaacacaccaaacaataacaaacacaaaacgcctcgaaaccaaaactaaaaataaaaaacgaaaaaaacgacgaccgaaatttcgctttaaaattaaaaaacgcgaaaaaatactcgccgaaacgataacgtaaaccctaaacgacccgcgcgcgtttcaataaacgcgcgatacccacattatcgctatatttaattactaaatcgaacctacgtactaccgaaacaaaacgccgaatccatacgaactaccatctaatccgctcttatcaataaaacaaccgatcataacgaataacccccgatacaaaaaacgcaaacaaaccaatcccaaaaaaaaaaacgataaaaaacaacccgaaccaaacttttccgaaccactacgcgactcgaaacccaaaaaaaaaaaaaaaaaaaaaaaaaaaaaaccgaaacgacgacgacgcgaccccaaactctaaacgaacctccctccgcgaccgcgaaaacccgacgcgcgcgacgacgtaaaccgaaaaatattaaaaaaataccgaacaaaataaacgtcaaacacccgaaaatccgaacgcgaaaatcctaaccgaccccgcgccc

SEQ ID NO: 24307 - DNA, 625 bp, Artificial Sequence
  chemically treated genomic DNA (Homo sapiens) CpG-island No: 24307
ttttgtttttttgattttttcgcgggtgtaatatattaaatagtaataaatataaagcgtttcggggttaaggttgggggtggggggcgggaagagcggcggtcgaagtttcgttttggggttggggggcgcggagaggtgttcgtcggggcggtggcgtgggttttgggcggttcgcgcgcgttttaatgggcgcgcgatgtttatattgtcgttgtgtttggttgttagatcgagtttgcgtgttgtcgaagtagggcgtcgagtttatgcgaattgttatttgattcgtttttattaatgaagtagtcgattatggcggatggttttcggtgtaagaggcgtaaataagttaattttaggaggaaaaacggtaagaagtagttcgaattaaattttttcgggttattacgcggttcgagatttagggagaaggagggggaaagggaaaaggaatcgaggcggcggcggcgcggttttaggttttaggcgagttttttttcgcggtcgcgggagttcggcgcgcgcggcggcgtggatcggggggtgttggggaagtgtcgggtaaagtgagcgttaggtattcgggggttcgagcgcgggggttttggtcggtttcgcgttt

SEQ ID NO: 24308 - DNA, 625 bp, Artificial Sequence
  chemically treated genomic DNA (Homo sapiens) CpG-island No: 24308
aaacgcgaaaccgaccaaaacccccgcgctcgaacccccgaatacctaacgctcactttacccgacacttccccaacaccccccgatccacgccgccgcgcgcgccgaactcccgcgaccgcgaaaaaaaactcgcctaaaacctaaaaccgcgccgccgccgcctcgattccttttccctttccccctccttctccctaaatctcgaaccgcgtaataacccgaaaaaatttaattcgaactacttcttaccgtttttcctcctaaaattaacttatttacgcctcttacaccgaaaaccatccgccataatcgactacttcattaataaaaacgaatcaaataacaattcgcataaactcgacgccctacttcgacaacacgcaaactcgatctaacaaccaaacacaacgacaatataaacatcgcgcgcccattaaaacgcgcgcgaaccgcccaaaacccacgccaccgccccgacgaacacctctccgcgccccccaaccccaaaacgaaacttcgaccgccgctcttcccgccccccacccccaaccttaaccccgaaacgctttatatttattactatttaatatattacacccgcgaaaaaatcaaaaaaacaaaa

SEQ ID NO: 24309 - DNA, 720 bp, Artificial Sequence
  chemically treated genomic DNA (Homo sapiens) CpG-island No: 24309
aaacgagcgagcgtttaagaggagaggaggaggaatagagcgcgacggcgaagggtcgagggagtgtaagttaggtcgcggttagagcgcgggcggaataagtatgcgcgatagaaggatattttcgtaggcgaatttgtcggtatttttgtaatacgttaacgattacgtaatttaggaagggcggcggcgggttgtgaggtggcggttgaggcggttggggtaatttttgtattagttataggcggcggcggcgttacgcgattagtaaatattatcgcgaggtttttgcgttttcggtaacggcggcggcggtcgacggcgagtacggcgcggcgagtatgtagcgtttcgggggagggatttgttaggggttggagggagtgggtgtatggggaaggagcgagcgcgtagggaagagattagagcgtcgggtcgtttttgtcgtatttcgggttcgtcgcgcggcgcgggagttcggggttgtcggattcgcgtgcgcgggggtagggttttcgcgtcggtcggagggaggcgcgttttcgtcgcgtcgttcgggttttagcgtcgttgttatttgattttttttgtttttcgcggaagcgcgttttttttttgatttatatttaatacggggagaaatgttgttgttttcgtttagttgtcgtttttcgggagtttaatgtgatcgttttttaaaatggaattgaaaagttgaga

SEQ ID NO: 24310 - DNA, 720 bp, Artificial Sequence
  chemically treated genomic DNA (Homo sapiens) CpG-island No: 24310
tctcaacttttcaattccattttaaaaaacgatcacattaaactcccgaaaaacgacaactaaacgaaaacaacaacatttctccccgtattaaatataaatcaaaaaaaaaacgcgcttccgcgaaaaacaaaaaaaatcaaataacaacgacgctaaaacccgaacgacgcgacgaaaacgcgcctccctccgaccgacgcgaaaaccctacccccgcgcacgcgaatccgacaaccccgaactcccgcgccgcgcgacgaacccgaaatacgacaaaaacgacccgacgctctaatctcttccctacgcgctcgctccttccccatacacccactccctccaacccctaacaaatccctcccccgaaacgctacatactcgccgcgccgtactcgccgtcgaccgccgccgccgttaccgaaaacgcaaaaacctcgcgataatatttactaatcgcgtaacgccgccgccgcctataactaatacaaaaattaccccaaccgcctcaaccgccacctcacaacccgccgccgcccttcctaaattacgtaatcgttaacgtattacaaaaataccgacaaattcgcctacgaaaatatccttctatcgcgcatacttattccgcccgcgctctaaccgcgacctaacttacactccctcgacccttcgccgtcgcgctctattcctcctcctctcctcttaaacgctcgctcgttt

SEQ ID NO: 24311 - DNA, 720 bp, Artificial Sequence
  chemically treated genomic DNA (Homo sapiens) CpG-island No: 24311
ttttaattttttagttttattttgagaaacgattatattgaattttcgagaagcggtagttgagcgagagtagtagtattttttttcgtgttgggtgtgggttaggagagaggcgcgttttcgcgggagatagggggagttaggtggtagcggcgttggagttcgagcggcgcggcgggggcgcgttttttttcggtcggcgcggggattttgttttcgcgtacgcgagttcggtaatttcgggttttcgcgtcgcgcggcgaattcggggtgcggtaggggcggttcggcgttttagttttttttttgcgcgttcgttttttttttatgtatttattttttttagtttttggtaggtttttttttcgaagcgttgtatattcgtcgcgtcgtgttcgtcgtcggtcgtcgtcgtcgttatcggaggcgtaggagtttcgcgatagtgtttgttgatcgcgtgacgtcgtcgtcgtttgtaattgatgtagaggttattttagtcgttttagtcgttattttatagttcgtcgtcgttttttttgggttacgtggtcgttgacgtattgtagaggtgtcggtaggttcgtttgcggaagtgtttttttgtcgcgtatgtttgtttcgttcgcgttttgatcgcggtttggtttgtattttttcgatttttcgtcgtcgcgttttgtttttttttttttttttttgggcgttcgttcgttt

SEQ ID NO: 24312 - DNA, 720 bp, Artificial Sequence
  chemically treated genomic DNA (Homo sapiens) CpG-island No: 24312
aaacgaacgaacgcccaaaaaaaaaaaaaaaaaaacaaaacgcgacgacgaaaaatcgaaaaaatacaaaccaaaccgcgatcaaaacgcgaacgaaacaaacatacgcgacaaaaaaacacttccgcaaacgaacctaccgacacctctacaatacgtcaacgaccacgtaacccaaaaaaaacgacgacgaactataaaataacgactaaaacgactaaaataacctctacatcaattacaaacgacgacgacgtcacgcgatcaacaaacactatcgcgaaactcctacgcctccgataacgacgacgacgaccgacgacgaacacgacgcgacgaatatacaacgcttcgaaaaaaaaacctaccaaaaactaaaaaaaataaatacataaaaaaaaaacgaacgcgcaaaaaaaaaactaaaacgccgaaccgcccctaccgcaccccgaattcgccgcgcgacgcgaaaacccgaaattaccgaactcgcgtacgcgaaaacaaaatccccgcgccgaccgaaaaaaaacgcgcccccgccgcgccgctcgaactccaacgccgctaccacctaactccccctatctcccgcgaaaacgcgcctctctcctaacccacacccaacacgaaaaaaaatactactactctcgctcaactaccgcttctcgaaaattcaatataatcgtttctcaaaataaaactaaaaaattaaaa

SEQ ID NO: 24313 - DNA, 593 bp, Artificial Sequence
  chemically treated genomic DNA (Homo sapiens) CpG-island No: 24313
tcgttttcggaattaacgtcgcgtacgcgtcggaggtatggtttcgtttcgatttcgtttggcggtttatttcgtaggtcggtatagtacggttgttcgcggtagtagaagaggaagatgtagcggtggaaggcgttcgggcggttaggtagcggcgtatatatttgtagtaggaaggagagcgggcggtttatagttcgtaggttagggttggggtttcggtagttcggtcgcgtttagttatgtcggtcgttcgtttattttgttggggaattgttcgttgcgtagtcgttacgtcggcgtcgattcgcgaagtttagttttataggtttggtttcggcggtagttatgcggggcgcgggttggcgtggcgtagtttatagttgggtcggaaggcggaaatcgggcgtcgggtcggaaggtaagaggcgggtattttttcggaggataggaggcggaaacgcgtttgacgggagcggttgtaggattaatgcgagggaacggggtagaggaaatttttcggtattagtttcgtttttggcgtttttgttttcgagtcgtttttttggtgttttcgggtgttttgggatggt

SEQ ID NO: 24314 - DNA, 593 bp, Artificial Sequence
  chemically treated genomic DNA (Homo sapiens) CpG-island No: 24314
accatcccaaaacacccgaaaacaccaaaaaaacgactcgaaaacaaaaacgccaaaaacgaaactaataccgaaaaatttcctctaccccgttccctcgcattaatcctacaaccgctcccgtcaaacgcgtttccgcctcctatcctccgaaaaaatacccgcctcttaccttccgacccgacgcccgatttccgccttccgacccaactataaactacgccacgccaacccgcgccccgcataactaccgccgaaaccaaacctataaaactaaacttcgcgaatcgacgccgacgtaacgactacgcaacgaacaattccccaacaaaataaacgaacgaccgacataactaaacgcgaccgaactaccgaaaccccaaccctaacctacgaactataaaccgcccgctctccttcctactacaaatatatacgccgctacctaaccgcccgaacgccttccaccgctacatcttcctcttctactaccgcgaacaaccgtactataccgacctacgaaataaaccgccaaacgaaatcgaaacgaaaccatacctccgacgcgtacgcgacgttaattccgaaaacga

SEQ ID NO: 24315 - DNA, 593 bp, Artificial Sequence
  chemically treated genomic DNA (Homo sapiens) CpG-island No: 24315
attattttagagtattcggaggtattaggaaagcggttcggaggtagaggcgttaggggcggggttgatgtcgagaggttttttttgtttcgttttttcgtattggttttgtaatcgttttcgttagacgcgttttcgttttttgtttttcggaaaggtgttcgttttttgtttttcggttcggcgttcgattttcgtttttcgatttagttgtgggttgcgttacgttagttcgcgtttcgtatggttgtcgtcggggttaggtttgtggagttgggtttcgcgagtcggcgtcggcgtggcgattgcgtagcgagtagttttttagtaaggtgggcgggcggtcggtatggttgggcgcggtcgggttgtcggggttttagttttggtttgcgagttgtgggtcgttcgtttttttttttgttgtaggtgtatgcgtcgttgtttggtcgttcggacgttttttatcgttgtattttttttttttgttgtcgcgagtagtcgtgttgtgtcggtttgcgaggtgagtcgttaaacggggtcggaacggggttatgttttcgacgcgtgcgcggcgttaatttcgggagcga

SEQ ID NO: 24316 - DNA, 593 bp, Artificial Sequence
  chemically treated genomic DNA (Homo sapiens) CpG-island No: 24316
tcgctcccgaaattaacgccgcgcacgcgtcgaaaacataaccccgttccgaccccgtttaacgactcacctcgcaaaccgacacaacacgactactcgcgacaacaaaaaaaaaaaatacaacgataaaaaacgtccgaacgaccaaacaacgacgcatacacctacaacaaaaaaaaaaacgaacgacccacaactcgcaaaccaaaactaaaaccccgacaacccgaccgcgcccaaccataccgaccgcccgcccaccttactaaaaaactactcgctacgcaatcgccacgccgacgccgactcgcgaaacccaactccacaaacctaaccccgacgacaaccatacgaaacgcgaactaacgtaacgcaacccacaactaaatcgaaaaacgaaaatcgaacgccgaaccgaaaaacaaaaaacgaacacctttccgaaaaacaaaaaacgaaaacgcgtctaacgaaaacgattacaaaaccaatacgaaaaaacgaaacaaaaaaaacctctcgacatcaaccccgcccctaacgcctctacctccgaaccgctttcctaatacctccgaatactctaaaataat

SEQ ID NO: 24317 - DNA, 821 bp, Artificial Sequence
  chemically treated genomic DNA (Homo sapiens) CpG-island No: 24317
cgggcgggcgggcggggcgtagggtaggttcgggaaaggcggggtcgtattgtcgggttttttatcgttcgtatcgtttttagtttcgtttttagttattcgggtttcgcggtagttttgtagttttcgcgcgattgtagcgcgcgttcggattttttttcgtagtcgttttttttttgttgcgcgatttttagtatttatttgttttgtaaatcggggcgttggggtttttttttttcggcgagtttcggttttgtttcggagatttttttcgatgtcggacgcgggttgggggtggggtcgcgtttatttcgtcggtttataggtgggtgggcgacgagttgggcgacgatacggtgtttagtagcggcggcggcggcggcggtcgtgggggttttcgcgagttttaggcgcggcgttgcgcgtggggttggtgtttcgcgtggacgtcgcggacgcgttcgttttgcgttggtttatcgtggggttggtgcgcgcgtcgcgttttcgtcgtcgcgcgtggggttggtttgcgcgagtaggtgcgcggttatcgtcgtcgtcgtcgtttgcggggtttgaggcgttattatagtagttatcgttgttgttgtcgtcgtcgtcgttcgcgttcgcgtggggttgttatgttgttgttgttgttgttgttttagttggaacggaatcgtcgtttttatgggttgtaagcggttttcgggtttttcggtcgtggttatcgtattatttttaagggagtcggtcggcgtgggggatttattgcgttttattcgttgggatatggtttttttttttttcggtga

SEQ ID NO: 24318 - DNA, 821 bp, Artificial Sequence
  chemically treated genomic DNA (Homo sapiens) CpG-island No: 24318
tcaccgaaaaaaaaaaaaaccatatcccaacgaataaaacgcaataaatcccccacgccgaccgactcccttaaaaataatacgataaccacgaccgaaaaacccgaaaaccgcttacaacccataaaaacgacgattccgttccaactaaaacaacaacaacaacaacaacataacaaccccacgcgaacgcgaacgacgacgacgacaacaacaacgataactactataataacgcctcaaaccccgcaaacgacgacgacgacgataaccgcgcacctactcgcgcaaaccaaccccacgcgcgacgacgaaaacgcgacgcgcgcaccaaccccacgataaaccaacgcaaaacgaacgcgtccgcgacgtccacgcgaaacaccaaccccacgcgcaacgccgcgcctaaaactcgcgaaaacccccacgaccgccgccgccgccgccgctactaaacaccgtatcgtcgcccaactcgtcgcccacccacctataaaccgacgaaataaacgcgaccccacccccaacccgcgtccgacatcgaaaaaaatctccgaaacaaaaccgaaactcgccgaaaaaaaaaaaccccaacgccccgatttacaaaacaaataaatactaaaaatcgcgcaacaaaaaaaaaacgactacgaaaaaaaatccgaacgcgcgctacaatcgcgcgaaaactacaaaactaccgcgaaacccgaataactaaaaacgaaactaaaaacgatacgaacgataaaaaacccgacaatacgaccccgcctttcccgaacctaccctacgccccgcccgcccgcccg

SEQ ID NO: 24319 - DNA, 821 bp, Artificial Sequence
  chemically treated genomic DNA (Homo sapiens) CpG-island No: 24319
ttatcggggaggggggggattatgttttagcgggtgaggcgtaatgggttttttacgtcggtcggtttttttgggggtggtgcggtggttacggtcgggggattcgggagtcgtttgtagtttatgagggcgacggtttcgttttagttgaagtagtagtagtagtagtaatatggtagttttacgcggacgcggacggcggcggcggtaataataacggtggttgttgtggtggcgttttaggtttcgtaggcggcggcggcggcggtggtcgcgtatttgttcgcgtagattagttttacgcgcggcggcgggaacgcgacgcgcgtattagttttacggtgggttaacgtagaacgggcgcgttcgcgacgtttacgcgaggtattagttttacgcgtagcgtcgcgtttggagttcgcgggagtttttacggtcgtcgtcgtcgtcgtcgttgttgggtatcgtgtcgtcgtttagttcgtcgtttatttatttgtggatcggcgaggtgagcgcggttttatttttagttcgcgttcggtatcggaggaggttttcggagtagagtcgaagttcgtcggagaagaggagttttagcgtttcggtttgtaaagtaggtaagtgttgggggtcgcgtagtaagggggaggcggttgcgggaaggggttcgggcgcgcgttgtaatcgcgcggggattgtagagttgtcgcggagttcgggtggttgggggcggggttgggggcggtgcgggcggtgggggattcggtagtgcggtttcgtttttttcgggtttattttacgtttcgttcgttcgttcg

SEQ ID NO: 24320 - DNA, 821 bp, Artificial Sequence
  chemically treated genomic DNA (Homo sapiens) CpG-island No: 24320
cgaacgaacgaacgaaacgtaaaataaacccgaaaaaaacgaaaccgcactaccgaatcccccaccgcccgcaccgcccccaaccccgcccccaaccacccgaactccgcgacaactctacaatccccgcgcgattacaacgcgcgcccgaaccccttcccgcaaccgcctcccccttactacgcgacccccaacacttacctactttacaaaccgaaacgctaaaactcctcttctccgacgaacttcgactctactccgaaaacctcctccgataccgaacgcgaactaaaaataaaaccgcgctcacctcgccgatccacaaataaataaacgacgaactaaacgacgacacgatacccaacaacgacgacgacgacgacgaccgtaaaaactcccgcgaactccaaacgcgacgctacgcgtaaaactaatacctcgcgtaaacgtcgcgaacgcgcccgttctacgttaacccaccgtaaaactaatacgcgcgtcgcgttcccgccgccgcgcgtaaaactaatctacgcgaacaaatacgcgaccaccgccgccgccgccgcctacgaaacctaaaacgccaccacaacaaccaccgttattattaccgccgccgccgtccgcgtccgcgtaaaactaccatattactactactactactacttcaactaaaacgaaaccgtcgccctcataaactacaaacgactcccgaatcccccgaccgtaaccaccgcaccacccccaaaaaaaccgaccgacgtaaaaaacccattacgcctcacccgctaaaacataatcccccccctccccgataa

SEQ ID NO: 24321 - DNA, 640 bp, Artificial Sequence
  chemically treated genomic DNA (Homo sapiens) CpG-island No: 24321
tgtgggcggggattcggcgttcgggagggaaggggttggtttagagattatagacgggcggggatcgtttcggttcgggtttttagcgttcggcgttcgtatattcgttagtttagttgtcggtacgtcggttagttagtcgttgtcgtttattagtggcgtttcgttgatttttcgggggtagttttttaacggttttcgtagttagagtattatttcgcggtggggtatttttagttcgttcgtagttttcggttttcgtcgcgtcgttattttcgcgagaagttaggaagttcgcgaagtggggggaggaggagtagggaggggtatttaacggtggtggttggttttgcgtcggattcgggagaggggcgggcgttattgtgtttcgttgtcgattgtatttttttagttacgggtttagaattttaaggagaaaggcggcggtgcgtgttgttgcgagtgggacgcgtattggtcggtgcggtttaggagtcggggtaatgagttgcggagttagttttttttcgttttgggcgttagttcgggattaggtcgcgagtgggggaggggaggaaacgaagaggtttggggaacgggaggtcgtttttttttagggggattttttagagtgatcgta

SEQ ID NO: 24322 - DNA, 640 bp, Artificial Sequence
  chemically treated genomic DNA (Homo sapiens) CpG-island No: 24322
tacgatcactctaaaaaatccccctaaaaaaaaacgacctcccgttccccaaacctcttcgtttcctcccctcccccactcgcgacctaatcccgaactaacgcccaaaacgaaaaaaaactaactccgcaactcattaccccgactcctaaaccgcaccgaccaatacgcgtcccactcgcaacaacacgcaccgccgcctttctccttaaaattctaaacccgtaactaaaaaaatacaatcgacaacgaaacacaataacgcccgcccctctcccgaatccgacgcaaaaccaaccaccaccgttaaatacccctccctactcctcctccccccacttcgcgaacttcctaacttctcgcgaaaataacgacgcgacgaaaaccgaaaactacgaacgaactaaaaataccccaccgcgaaataatactctaactacgaaaaccgttaaaaaactacccccgaaaaatcaacgaaacgccactaataaacgacaacgactaactaaccgacgtaccgacaactaaactaacgaatatacgaacgccgaacgctaaaaacccgaaccgaaacgatccccgcccgtctataatctctaaaccaaccccttccctcccgaacgccgaatccccgcccaca

SEQ ID NO: 24323 - DNA, 640 bp, Artificial Sequence
  chemically treated genomic DNA (Homo sapiens) CpG-island No: 24323
tgcggttattttagaggatttttttgagaggaagcggtttttcgttttttaggttttttcgttttttttttttttttattcgcggtttggtttcgaattagcgtttaagacggagaagaattagtttcgtagtttattatttcggtttttgagtcgtatcgattagtgcgcgttttattcgtagtaatacgtatcgtcgtttttttttttggagttttaggttcgtgattgaggaaatgtagtcggtagcgaagtataatggcgttcgtttttttttcggattcggcgtagaattagttattatcgttaagtgtttttttttgttttttttttttttatttcgcggattttttggtttttcgcgagagtggcggcgcggcggggatcgagagttgcgggcgggttggaggtattttatcgcggggtggtgttttgattgcgggaatcgttgaagagttgttttcggggagttagcgaggcgttattggtaagcggtagcggttggttggtcggcgtgtcggtagttgggttggcgagtgtgcgggcgtcgggcgttggaggttcgggtcggggcggttttcgttcgtttatagtttttgagttagttttttttttttcgggcgtcgggttttcgtttata

SEQ ID NO: 24324 - DNA, 640 bp, Artificial Sequence
  chemically treated genomic DNA (Homo sapiens) CpG-island No: 24324
tataaacgaaaacccgacgcccgaaaaaaaaaaaactaactcaaaaactataaacgaacgaaaaccgccccgacccgaacctccaacgcccgacgcccgcacactcgccaacccaactaccgacacgccgaccaaccaaccgctaccgcttaccaataacgcctcgctaactccccgaaaacaactcttcaacgattcccgcaatcaaaacaccaccccgcgataaaatacctccaacccgcccgcaactctcgatccccgccgcgccgccactctcgcgaaaaaccaaaaaatccgcgaaataaaaaaaaaaaaaacaaaaaaaaacacttaacgataataactaattctacgccgaatccgaaaaaaaaacgaacgccattatacttcgctaccgactacatttcctcaatcacgaacctaaaactccaaaaaaaaaaacgacgatacgtattactacgaataaaacgcgcactaatcgatacgactcaaaaaccgaaataataaactacgaaactaattcttctccgtcttaaacgctaattcgaaaccaaaccgcgaataaaaaaaaaaaaaaaacgaaaaaacctaaaaaacgaaaaaccgcttcctctcaaaaaaatcctctaaaataaccgca

SEQ ID NO: 24325 - DNA, 534 bp, Artificial Sequence
  chemically treated genomic DNA (Homo sapiens) CpG-island No: 24325
gttgacgttgggggcgtttcgtttagcgcgcgcgtttgaaggtcggaagtgtttttttttttttcggtttatcgtgttcgaggtttttttagaattcgtggtaggcgtttagggcgtacgagattttttttagtttattagttttttttcggagttcggtcgggagtatcgatttttttttttcgttgtcggtagttgcgcgtcgggaaggttttttttttcgttttttttttcgttttgcgtcgtcgtttttgtggatagatttttcgttttcgacgtttgttaggagttgcggtatttggtttaggttttttttttgcgattcgttatttgttattttagtttttttttcgttttcgtcgacgacgataggggtcggtttatggtcgtattgggggtttcgttattttagtcggattttgcgcgagataaggcggcggtagggattttcgtttttgttgttagcgttcggtcgggtagggggtttcggggagttgaagcgggcgtcggaggaggaggaggaggaggagggga

SEQ ID NO: 24326 - DNA, 534 bp, Artificial Sequence
  chemically treated genomic DNA (Homo sapiens) CpG-island No: 24326
tcccctcctcctcctcctcctcctccgacgcccgcttcaactccccgaaaccccctacccgaccgaacgctaacaacaaaaacgaaaatccctaccgccgccttatctcgcgcaaaatccgactaaaataacgaaacccccaatacgaccataaaccgacccctatcgtcgtcgacgaaaacgaaaaaaaaactaaaataacaaataacgaatcgcaaaaaaaaaacctaaaccaaataccgcaactcctaacaaacgtcgaaaacgaaaaatctatccacaaaaacgacgacgcaaaacgaaaaaaaaaacgaaaaaaaaaaccttcccgacgcgcaactaccgacaacgaaaaaaaaaaatcgatactcccgaccgaactccgaaaaaaaactaataaactaaaaaaaatctcgtacgccctaaacgcctaccacgaattctaaaaaaacctcgaacacgataaaccgaaaaaaaaaaaaacacttccgaccttcaaacgcgcgcgctaaacgaaacgcccccaacgtcaac

SEQ ID NO: 24327 - DNA, 534 bp, Artificial Sequence
  chemically treated genomic DNA (Homo sapiens) CpG-island No: 24327
tttttttttttttttttttttttttcggcgttcgttttagtttttcggggttttttgttcggtcgggcgttgatagtaagggcgggggtttttgtcgtcgttttgtttcgcgtagggttcggttggggtagcggagtttttagtgcggttatggatcggtttttgtcgtcgtcggcggaggcggaggaggaattggagtggtaagtggcgagtcgtaggaggaaggtttgggttaagtgtcgtagtttttggtaagcgtcggagacggaggatttgtttatagaagcgacgacgtaggacgaggaggaggacgagggggaggattttttcggcgcgtagttgtcggtagcggggggaagaggtcggtgttttcggtcgggtttcggggggaggttggtgggttggggagagtttcgtgcgttttgggcgtttgttacgagttttgggagagtttcgggtacggtaggtcgaggggagaggggatattttcgatttttaaacgcgcgcgttgaacgaggcgtttttagcgttaat

SEQ ID NO: 24328 - DNA, 534 bp, Artificial Sequence
  chemically treated genomic DNA (Homo sapiens) CpG-island No: 24328
attaacgctaaaaacgcctcgttcaacgcgcgcgtttaaaaatcgaaaatatcccctctcccctcgacctaccgtacccgaaactctcccaaaactcgtaacaaacgcccaaaacgcacgaaactctccccaacccaccaacctccccccgaaacccgaccgaaaacaccgacctcttccccccgctaccgacaactacgcgccgaaaaaatcctccccctcgtcctcctcctcgtcctacgtcgtcgcttctataaacaaatcctccgtctccgacgcttaccaaaaactacgacacttaacccaaaccttcctcctacgactcgccacttaccactccaattcctcctccgcctccgccgacgacgacaaaaaccgatccataaccgcactaaaaactccgctaccccaaccgaaccctacgcgaaacaaaacgacgacaaaaacccccgcccttactatcaacgcccgaccgaacaaaaaaccccgaaaaactaaaacgaacgccgaaaaaaaaaaaaaaaaaaaaaaaaa

SEQ ID NO: 24329 - DNA, 582 bp, Artificial Sequence
  chemically treated genomic DNA (Homo sapiens) CpG-island No: 24329
gtaaattcgttttcgtattttatcgagagggaaaaacgtcgcgttttttttttttaaaatcgttcgggttcggtgtttaaggcgttttcgagggtgcgggttcgtaggcgtaggaatgatcgttcgtttttatttggagtggtggttgtacgcgaaagtcgttcgcgttcgtcgtcgttttttggaatcgcgaggggtgtgggtgcgagggtgtagaaagggagggtgcggggtgggtcggggtgtagtgcggagcggggtcgggcggttagggcggttttttattcggcgtttttaagaatttgggagcgcgtagagttgataggtgttggcgtcggcggaggcgcgcggcgtagggcgaggtgggaatcgatcgagtattgggaaaagttttttttataagggcggtaggcgggggcgatcgttagatattcggaggcggacgttagaggagagtggtgttagggcgtgtgttagggacgttgttttcgcgaggagggtgggtgtgcgggatgcgaaggaaacggggtttaaggagttggggggtaggttgggttttggttcgcgttgttagttatggta

SEQ ID NO: 24330 - DNA, 582 bp, Artificial Sequence
  chemically treated genomic DNA (Homo sapiens) CpG-island No: 24330
taccataactaacaacgcgaaccaaaacccaacctaccccccaactccttaaaccccgtttccttcgcatcccgcacacccaccctcctcgcgaaaacaacgtccctaacacacgccctaacaccactctcctctaacgtccgcctccgaatatctaacgatcgcccccgcctaccgcccttataaaaaaaacttttcccaatactcgatcgattcccacctcgccctacgccgcgcgcctccgccgacgccaacacctatcaactctacgcgctcccaaattcttaaaaacgccgaataaaaaaccgccctaaccgcccgaccccgctccgcactacaccccgacccaccccgcaccctccctttctacaccctcgcacccacacccctcgcgattccaaaaaacgacgacgaacgcgaacgactttcgcgtacaaccaccactccaaataaaaacgaacgatcattcctacgcctacgaacccgcaccctcgaaaacgccttaaacaccgaacccgaacgattttaaaaaaaaaaaacgcgacgtttttccctctcgataaaatacgaaaacgaatttac

SEQ ID NO: 24331 - DNA, 582 bp, Artificial Sequence
  chemically treated genomic DNA (Homo sapiens) CpG-island No: 24331
tattatggttggtagcgcggattagagtttagtttgttttttagttttttgggtttcgtttttttcgtatttcgtatatttatttttttcgcgagggtagcgtttttagtatacgttttagtattatttttttttgacgttcgttttcggatgtttgacgatcgttttcgtttgtcgtttttataaaggggattttttttaatattcgatcgatttttatttcgttttgcgtcgcgcgttttcgtcggcgttaatatttgttaattttgcgcgtttttaggtttttggagacgtcgagtgaggagtcgttttgatcgttcggtttcgtttcgtattgtatttcgatttatttcgtattttttttttttgtattttcgtatttatatttttcgcggttttagggggcggcggcgagcgcggacggttttcgcgtgtagttattattttaggtaggagcggacggttatttttgcgtttacgggttcgtattttcggaaacgttttgggtatcgagttcgggcggttttagaggggagggacgcggcgtttttttttttcggtgggatgcgagggcgggtttgt

SEQ ID NO: 24332 - DNA, 582 bp, Artificial Sequence
  chemically treated genomic DNA (Homo sapiens) CpG-island No: 24332
acaaacccgccctcgcatcccaccgaaaaaaaaaaacgccgcgtccctcccctctaaaaccgcccgaactcgatacccaaaacgtttccgaaaatacgaacccgtaaacgcaaaaataaccgtccgctcctacctaaaataataactacacgcgaaaaccgtccgcgctcgccgccgccccctaaaaccgcgaaaaatataaatacgaaaatacaaaaaaaaaaaatacgaaataaatcgaaatacaatacgaaacgaaaccgaacgatcaaaacgactcctcactcgacgtctccaaaaacctaaaaacgcgcaaaattaacaaatattaacgccgacgaaaacgcgcgacgcaaaacgaaataaaaatcgatcgaatattaaaaaaaatcccctttataaaaacgacaaacgaaaacgatcgtcaaacatccgaaaacgaacgtcaaaaaaaaataatactaaaacgtatactaaaaacgctaccctcgcgaaaaaaataaatatacgaaatacgaaaaaaacgaaacccaaaaaactaaaaaacaaactaaactctaatccgcgctaccaaccataata

SEQ ID NO: 24333 - DNA, 791 bp, Artificial Sequence
  chemically treated genomic DNA (Homo sapiens) CpG-island No: 24333
gtttcgttcgcggggagggttttatttattcgttttttcgtattacgttgttgttttcgtagtcgtaggcgttttcggtttggttgcggaatatgttgaagtcgtgttcggtgtggtcgttttggtggaagtattcggcgtatagcgatatgtagggcgagatgtcgtacgttcggtagcggtaggttacgaagttggttgtttagattaggtcgtagagcgtcgcgggatcgtaggttcgtatcgtcgcgtagaattcgtcgtagtcgtcgtcgttcgttagaaggtatttatattattttagggtttttttttcggtcgttttcggatcgttttcgttttcggtcgtcgtcgcgttttcgtcgtcggtagtcgcggttagcggtcgttcggcgtttagtattcgttttagtagcgtttgtagttttttagtatttgcgcggttgttcggtcggttgagggtcgttttgaggtgcgcgggggtggtcgttttggttagggttagtttcggcgcgggtagttcgggttgtgacggttgttggttttcgacggtcgtcgcggtcgtcgtcgtatgatgagagtttagaatttggagagtttagggttagcggttttttagggagagtgagggaatagattgttgcgattgttcggttcgtttaattttcgcgatattcggagcgttcgcgttttttcgttcgtagtttcgtttttatatacgttttttcgggttgtagagtttttttttcgttttttttttttgggcgtttgtggattaagttaggttttta

SEQ ID NO: 24334 - DNA, 791 bp, Artificial Sequence
  chemically treated genomic DNA (Homo sapiens) CpG-island No: 24334
taaaaacctaacttaatccacaaacgcccaaaaaaaaaaaacgaaaaaaaaactctacaacccgaaaaaacgtatataaaaacgaaactacgaacgaaaaaacgcgaacgctccgaatatcgcgaaaattaaacgaaccgaacaatcgcaacaatctattccctcactctccctaaaaaaccgctaaccctaaactctccaaattctaaactctcatcatacgacgacgaccgcgacgaccgtcgaaaaccaacaaccgtcacaacccgaactacccgcgccgaaactaaccctaaccaaaacgaccacccccgcgcacctcaaaacgaccctcaaccgaccgaacaaccgcgcaaatactaaaaaactacaaacgctactaaaacgaatactaaacgccgaacgaccgctaaccgcgactaccgacgacgaaaacgcgacgacgaccgaaaacgaaaacgatccgaaaacgaccgaaaaaaaaaccctaaaataatataaataccttctaacgaacgacgacgactacgacgaattctacgcgacgatacgaacctacgatcccgcgacgctctacgacctaatctaaacaaccaacttcgtaacctaccgctaccgaacgtacgacatctcgccctacatatcgctatacgccgaatacttccaccaaaacgaccacaccgaacacgacttcaacatattccgcaaccaaaccgaaaacgcctacgactacgaaaacaacaacgtaatacgaaaaaacgaataaataaaaccctccccgcgaacgaaac

SEQ ID NO: 24335 - DNA, 791 bp, Artificial Sequence
  chemically treated genomic DNA (Homo sapiens) CpG-island No: 24335
tgggagtttagtttggtttataggcgtttaggagagaggggcgggaggaaggttttgtagttcgagggggcgtgtgtaggggcggggttgcgggcggaggagcgcggacgtttcgggtatcgcgagagttgggcgggtcgagtaatcgtagtagtttatttttttattttttttggaggatcgttggttttggattttttaaattttgagtttttattatgcggcggcggtcgcggcggtcgtcgggggttagtagtcgttatagttcgagttgttcgcgtcggggttggttttagttaaggcggttattttcgcgtattttaaggcggtttttagtcggtcggataatcgcgtaggtgttgaggagttgtaggcgttgttggagcgggtgttgagcgtcgagcggtcgttggtcgcggttgtcggcggcgaggacgcggcggcggtcggaggcgggggcggttcgggggcggtcgaggaggaggttttggagtggtgtaagtgttttttggcgggcggcggcggttacgacgagttttgcgcggcggtgcgggtttacgatttcgcggcgttttgcggtttggtttggatagttaatttcgtggtttatcgttgtcggacgtgcggtatttcgttttgtatgtcgttgtgcgtcgagtgtttttattagggcgattatatcggatacgattttaatatgtttcgtagttaggtcgggggcgtttgcgattgcggggatagtaacgtgatgcgggagagcgggtgagtggagtttttttcgcgggcgaggt

SEQ ID NO: 24336 - DNA, 791 bp, Artificial Sequence
  chemically treated genomic DNA (Homo sapiens) CpG-island No: 24336
acctcgcccgcgaaaaaaactccactcacccgctctcccgcatcacgttactatccccgcaatcgcaaacgcccccgacctaactacgaaacatattaaaatcgtatccgatataatcgccctaataaaaacactcgacgcacaacgacatacaaaacgaaataccgcacgtccgacaacgataaaccacgaaattaactatccaaaccaaaccgcaaaacgccgcgaaatcgtaaacccgcaccgccgcgcaaaactcgtcgtaaccgccgccgcccgccaaaaaacacttacaccactccaaaacctcctcctcgaccgcccccgaaccgcccccgcctccgaccgccgccgcgtcctcgccgccgacaaccgcgaccaacgaccgctcgacgctcaacacccgctccaacaacgcctacaactcctcaacacctacgcgattatccgaccgactaaaaaccgccttaaaatacgcgaaaataaccgccttaactaaaaccaaccccgacgcgaacaactcgaactataacgactactaacccccgacgaccgccgcgaccgccgccgcataataaaaactcaaaatttaaaaaatccaaaaccaacgatcctccaaaaaaaataaaaaaataaactactacgattactcgacccgcccaactctcgcgatacccgaaacgtccgcgctcctccgcccgcaaccccgcccctacacacgccccctcgaactacaaaaccttcctcccgcccctctctcctaaacgcctataaaccaaactaaactccca

SEQ ID NO: 24337 - DNA, 723 bp, Artificial Sequence
  chemically treated genomic DNA (Homo sapiens) CpG-island No: 24337
ttaacgtcgttttcgggtcggggcgcgtcgttagagtttagatttttttagaatgtttttaggaaatcgtcgggtggggcggagatttgtttttcgtagcggtttttttatttgtcgtttcgtttgtgttttttggaaatgagtttttgtttttttaaggtcgtggggtagtcggattcgagtttggggcgaaacgggagttgaagttggcgtttaggaagagggattgggcgattattcggagtcggatcgggagttcgagcggggttagttagagtcggaggggaagtcggagtcgggtcggggttagacggcgtagttcgaggtttgggttcgggtcggtggaggtttcggggtgggattaaggatcgaatcgaggtcggtttgggcgttagggtagttttcggagcggcgatcgttgttggataaggggtcgtagttatttcggcgtgggttggaaggacgtatttttgttggggcgaaatttcgaattcgtagtcgtttgttcgcgattgttaagtcgatcgtttgaaagggtcgttgtttcgcgttttttagtggttggggtggtggtgggtatttcgatttttttttggcgtttatgatgttgtcggtcgcgttgggtttcggttttttttatttgttcgaggacgaagaaggtttggaggagtcgtgcgtttaggggagttcggttaaggttgagtgggttttatgcggggttat

SEQ ID NO: 24338 - DNA, 723 bp, Artificial Sequence
  chemically treated genomic DNA (Homo sapiens) CpG-island No: 24338
ataaccccgcataaaacccactcaaccttaaccgaactcccctaaacgcacgactcctccaaaccttcttcgtcctcgaacaaataaaaaaaaccgaaacccaacgcgaccgacaacatcataaacgccaaaaaaaaatcgaaatacccaccaccaccccaaccactaaaaaacgcgaaacaacgaccctttcaaacgatcgacttaacaatcgcgaacaaacgactacgaattcgaaatttcgccccaacaaaaatacgtccttccaacccacgccgaaataactacgaccccttatccaacaacgatcgccgctccgaaaactaccctaacgcccaaaccgacctcgattcgatccttaatcccaccccgaaacctccaccgacccgaacccaaacctcgaactacgccgtctaaccccgacccgactccgacttcccctccgactctaactaaccccgctcgaactcccgatccgactccgaataatcgcccaatccctcttcctaaacgccaacttcaactcccgtttcgccccaaactcgaatccgactaccccacgaccttaaaaaaacaaaaactcatttccaaaaaacacaaacgaaacgacaaataaaaaaaccgctacgaaaaacaaatctccgccccacccgacgatttcctaaaaacattctaaaaaaatctaaactctaacgacgcgccccgacccgaaaacgacgttaa

SEQ ID NO: 24339 - DNA, 723 bp, Artificial Sequence
  chemically treated genomic DNA (Homo sapiens) CpG-island No: 24339
atggtttcgtatgaagtttatttagttttggtcgggtttttttgggcgtacggtttttttagatttttttcgttttcgggtaggtaaaggaagtcggagtttagcgcggtcggtagtattatgggcgttagaggaagatcggggtgtttattattattttagttattggaaggcgcgggatagcggtttttttaggcggtcggtttggtagtcgcgggtagacggttacggattcggggtttcgttttagtaggggtgcgtttttttaatttacgtcggggtggttgcggttttttatttagtaacgatcgtcgtttcgagggttgttttgacgtttagatcggtttcgattcggtttttggttttatttcgggatttttatcgattcggatttagatttcgagttgcgtcgtttggtttcggttcggtttcggtttttttttcgattttgattgatttcgttcggattttcggttcgatttcgggtagtcgtttagtttttttttttgggcgttaattttagttttcgtttcgttttaggttcgggttcggttgttttacgattttagaggaatagaaatttatttttaggaagtataggcgggacggtaggtgaaaaagtcgttgcggggagtagattttcgttttattcgacggttttttggaggtattttaggggagtttgagttttggcggcgcgtttcgattcggaggcggcgttgg

SEQ ID NO: 24340 - DNA, 723 bp, Artificial Sequence
  chemically treated genomic DNA (Homo sapiens) CpG-island No: 24340
ccaacgccgcctccgaatcgaaacgcgccgccaaaactcaaactcccctaaaatacctccaaaaaaccgtcgaataaaacgaaaatctactccccgcaacgactttttcacctaccgtcccgcctatacttcctaaaaataaatttctattcctctaaaatcgtaaaacaaccgaacccgaacctaaaacgaaacgaaaactaaaattaacgcccaaaaaaaaaaactaaacgactacccgaaatcgaaccgaaaatccgaacgaaatcaatcaaaatcgaaaaaaaaaccgaaaccgaaccgaaaccaaacgacgcaactcgaaatctaaatccgaatcgataaaaatcccgaaataaaaccaaaaaccgaatcgaaaccgatctaaacgtcaaaacaaccctcgaaacgacgatcgttactaaataaaaaaccgcaaccaccccgacgtaaattaaaaaaacgcacccctactaaaacgaaaccccgaatccgtaaccgtctacccgcgactaccaaaccgaccgcctaaaaaaaccgctatcccgcgccttccaataactaaaataataataaacaccccgatcttcctctaacgcccataatactaccgaccgcgctaaactccgacttcctttacctacccgaaaacgaaaaaaatctaaaaaaaccgtacgcccaaaaaaacccgaccaaaactaaataaacttcatacgaaaccat

SEQ ID NO: 24341 - DNA, 851 bp, Artificial Sequence
  chemically treated genomic DNA (Homo sapiens) CpG-island No: 24341
gaaggggaaggcggcggcgcgcgttgttttttggggaagtagttttatttgttgtggggggcgtcgttggggaggggtcgagtcgtgtttacgtttgtacgtttcgtttcgttcgtcgtacggttcggcgacgggggagttttcgcgagtggtttcgcgtttagatcgtgcggggggttgttcgggtggaggcgggggagtcgtcgggatattaaaataggagttgtttgtggggtggagcggtattagttggcggttttcgagcgttttttttaaagatggttagaggggtcggaggcgttttcgttttcgttcgttattagttcgcgggttagcgtcgcgtttcgagtttcggcgggaggtaggtgcggtgtggattcgtagttcgaggtcggtttgttgggagcgagcggggtcgggcgcggggagtcggggtcgggcgcgggtagcggggtcgggcgcgggtagcgaggtcgcgcgggagaggagcgtagataatggtcgcgcgggcgtcgggtcgggtcgaacgcgttgcgttggggttgtttgcggcgttttttttatatttgcgcggagcgtcgggtagagggacgcgggtatcgggttcgcgggcggtacgcggcgttttcgagtttagtttcgtttttggtttcggggcggggcggttttcgggcgggaacgtgggtcggggtttaggcgcggggcgcgcggaaatttttgcggcgggcgcggcggagggggcgagggttgtaagggttgcgtcgagttgttttgttttttttttttttttaagcgaaagggttcgggatttttttttttcgagatttttttttgtttatttatatttttat

SEQ ID NO: 24342 - DNA, 851 bp, Artificial Sequence
  chemically treated genomic DNA (Homo sapiens) CpG-island No: 24342
ataaaaatataaataaacaaaaaaaaatctcgaaaaaaaaaaatcccgaaccctttcgcttaaaaaaaaaaaaaaaacaaaacaactcgacgcaacccttacaaccctcgccccctccgccgcgcccgccgcaaaaatttccgcgcgccccgcgcctaaaccccgacccacgttcccgcccgaaaaccgccccgccccgaaaccaaaaacgaaactaaactcgaaaacgccgcgtaccgcccgcgaacccgatacccgcgtccctctacccgacgctccgcgcaaatataaaaaaaacgccgcaaacaaccccaacgcaacgcgttcgacccgacccgacgcccgcgcgaccattatctacgctcctctcccgcgcgacctcgctacccgcgcccgaccccgctacccgcgcccgaccccgactccccgcgcccgaccccgctcgctcccaacaaaccgacctcgaactacgaatccacaccgcacctacctcccgccgaaactcgaaacgcgacgctaacccgcgaactaataacgaacgaaaacgaaaacgcctccgacccctctaaccatctttaaaaaaaacgctcgaaaaccgccaactaataccgctccaccccacaaacaactcctattttaatatcccgacgactcccccgcctccacccgaacaaccccccgcacgatctaaacgcgaaaccactcgcgaaaactcccccgtcgccgaaccgtacgacgaacgaaacgaaacgtacaaacgtaaacacgactcgacccctccccaacgacgccccccacaacaaataaaactacttccccaaaaaacaacgcgcgccgccgccttccccttc

SEQ ID NO: 24343 - DNA, 851 bp, Artificial Sequence
  chemically treated genomic DNA (Homo sapiens) CpG-island No: 24343
atggaaatataaatggataagaagaggtttcggaaaagggaaatttcgagttttttcgtttaaggaaggagagaaagtaaggtagttcggcgtagtttttgtagttttcgtttttttcgtcgcgttcgtcgtaggggttttcgcgcgtttcgcgtttgggtttcggtttacgttttcgttcggagatcgtttcgtttcggggttaggagcggggttggattcgagggcgtcgcgtgtcgttcgcgggttcggtgttcgcgtttttttgttcggcgtttcgcgtaggtgtgggaaggacgtcgtaggtagttttagcgtaacgcgttcggttcggttcggcgttcgcgcggttattgtttgcgtttttttttcgcgcggtttcgttgttcgcgttcggtttcgttgttcgcgttcggtttcggtttttcgcgttcggtttcgttcgtttttagtaggtcggtttcgggttgcgggtttatatcgtatttatttttcgtcggggttcgggacgcggcgttggttcgcgggttagtagcgagcgggagcggggacgttttcggtttttttgattatttttggaagaggcgttcggaagtcgttagttagtgtcgttttattttataagtagtttttattttggtgtttcggcggttttttcgtttttattcgaatagtttttcgtacggtttgggcgcgaggttattcgcgggaattttttcgtcgtcgggtcgtgcggcgagcggggcggggcgtgtaggcgtgagtacggttcggtttttttttagcggcgttttttatagtaggtgggattgtttttttaggagatagcgcgcgtcgtcgttttttttttt

SEQ ID NO: 24344 - DNA, 851 bp, Artificial Sequence
  chemically treated genomic DNA (Homo sapiens) CpG-island No: 24344
aaaaaaaaaaacgacgacgcgcgctatctcctaaaaaaacaatcccacctactataaaaaacgccgctaaaaaaaaaccgaaccgtactcacgcctacacgccccgccccgctcgccgcacgacccgacgacgaaaaaattcccgcgaataacctcgcgcccaaaccgtacgaaaaactattcgaataaaaacgaaaaaaccgccgaaacaccaaaataaaaactacttataaaataaaacgacactaactaacgacttccgaacgcctcttccaaaaataatcaaaaaaaccgaaaacgtccccgctcccgctcgctactaacccgcgaaccaacgccgcgtcccgaaccccgacgaaaaataaatacgatataaacccgcaacccgaaaccgacctactaaaaacgaacgaaaccgaacgcgaaaaaccgaaaccgaacgcgaacaacgaaaccgaacgcgaacaacgaaaccgcgcgaaaaaaaaacgcaaacaataaccgcgcgaacgccgaaccgaaccgaacgcgttacgctaaaactacctacgacgtccttcccacacctacgcgaaacgccgaacaaaaaaacgcgaacaccgaacccgcgaacgacacgcgacgccctcgaatccaaccccgctcctaaccccgaaacgaaacgatctccgaacgaaaacgtaaaccgaaacccaaacgcgaaacgcgcgaaaacccctacgacgaacgcgacgaaaaaaacgaaaactacaaaaactacgccgaactaccttactttctctccttccttaaacgaaaaaactcgaaatttcccttttccgaaacctcttcttatccatttatatttccat

SEQ ID NO: 24345 - DNA, 1060 bp, Artificial Sequence
  chemically treated genomic DNA (Homo sapiens) CpG-island No: 24345
acggacgatttttcgtttttggattgtcgtagttttttttttagattaattgttttaagagaggggggcggatatatttaattagtacgatataggttttttgattgacgttcgggttttcgcgttggcgtgttgtgttttgaggcgggaggaggaggaggagcggggaggaaaatttgagttaattttagtagtttgcgcgggaggttaatcgaacgtcgcgttttggagcgattatttaattcgcgaaagggggtagggcgtatttttgttaggaattaatagaaagtttttaagggttaggagcgacgtttagcgggagtaatgattggtttatattcgggattcgggggcgggtcggcgttagagacgagaagagaggaggggaggtttttttcgtcgtcgttattttggacgggttcggttagtttcgcggagttatcgtagacgcgcggttttttttgagttcgatttcgtcgttagataatttcggtttattttttaattttattttcgttcgcgcgtatcgcgatacgttcgggtttcggggcgcgagaaaaaggcggcgggcgttcgtttttttcgtttgtcgcgatacgttttttagcggcggcgttagtttttgtggtgagagcgttaggttcgattgggtcggatttttttttttttttttttcgcgttatcggtcgtttttttcgtcgtttttcgttttggcgatatcgtcgtttgtcgcgatatggttttttttcgtttgttttttgtttcgtttttgtagcgcgggtttcggcggggggcggtttttttttttttcgtttttcgttttttgcgttttttttacgttttttagcgttttcgggtgttttttcgcgatttggattcgtgttttcgttcgtcgtcgttttttcgcgtggtatcgcgtcgggttttcggtaggggtgtgagggtgcgaagttttttcgggcgcgaggtgttcgttttttttcgcgtcggtattggtttttggttggaaggatggaggcgtttttggttttaggtgttcgtttttcggggtttaggtgtt

SEQ ID NO: 24346 - DNA, 1060 bp, Artificial Sequence
  chemically treated genomic DNA (Homo sapiens) CpG-island No: 24346
aacacctaaaccccgaaaaacgaacacctaaaaccaaaaacgcctccatccttccaaccaaaaaccaataccgacgcgaaaaaaaacgaacacctcgcgcccgaaaaaacttcgcaccctcacacccctaccgaaaacccgacgcgataccacgcgaaaaaacgacgacgaacgaaaacacgaatccaaatcgcgaaaaaacacccgaaaacgctaaaaaacgtaaaaaaaacgcaaaaaacgaaaaacgaaaaaaaaaaaaaccgccccccgccgaaacccgcgctacaaaaacgaaacaaaaaacaaacgaaaaaaaaccatatcgcgacaaacgacgatatcgccaaaacgaaaaacgacgaaaaaaacgaccgataacgcgaaaaaaaaaaaaaaaaaaatccgacccaatcgaacctaacgctctcaccacaaaaactaacgccgccgctaaaaaacgtatcgcgacaaacgaaaaaaacgaacgcccgccgcctttttctcgcgccccgaaacccgaacgtatcgcgatacgcgcgaacgaaaataaaattaaaaaataaaccgaaattatctaacgacgaaatcgaactcaaaaaaaaccgcgcgtctacgataactccgcgaaactaaccgaacccgtccaaaataacgacgacgaaaaaaacctcccctcctctcttctcgtctctaacgccgacccgcccccgaatcccgaatataaaccaatcattactcccgctaaacgtcgctcctaacccttaaaaactttctattaattcctaacaaaaatacgccctaccccctttcgcgaattaaataatcgctccaaaacgcgacgttcgattaacctcccgcgcaaactactaaaattaactcaaattttcctccccgctcctcctcctcctcccgcctcaaaacacaacacgccaacgcgaaaacccgaacgtcaatcaaaaaacctatatcgtactaattaaatatatccgcccccctctcttaaaacaattaatctaaaaaaaaaactacgacaatccaaaaacgaaaaatcgtccgt

SEQ ID NO: 24347 - DNA, 1060 bp, Artificial Sequence
  chemically treated genomic DNA (Homo sapiens) CpG-island No: 24347
ggtatttgagtttcgagaagcgagtatttgggattaggggcgtttttatttttttagttaggagttaatatcgacgcggagaggggcgggtatttcgcgttcggggaggtttcgtatttttatatttttatcgggggttcgacgcgatgttacgcggggaggcggcggcgggcggggatacgggtttaggtcgcggaaggatattcggaagcgttgaggaacgtgaaagaagcgtagaaaacggagggcgagagggagggagatcgtttttcgtcggagttcgcgttgtagaggcggggtagggggtaggcgaggggaggttatgtcgcgatagacggcggtgtcgttagggcgggaggcggcggggagggcggtcgatggcgcggggggaggaagggaaggggttcggtttagtcgagtttgacgtttttattataggagttggcgtcgtcgttgaggagcgtatcgcgataggcgggggaggcgagcgttcgtcgtttttttttcgcgtttcggggttcgggcgtatcgcgatacgcgcgaacggaagtggggttggggagtgggtcggggttgtttgacgacggggtcgggtttaagggaggtcgcgcgtttgcgatggtttcgcggaattgatcgggttcgtttaagatggcggcggcggaggaggttttttttttttttttttcgtttttggcgtcgattcgttttcgagtttcgaatataggttagttattgttttcgttgaacgtcgtttttgatttttggaggttttttattggtttttggtagggatgcgttttgttttttttcgcggattgggtgatcgttttaaggcgcggcgttcgattggtttttcgcgtaggttgttaggattggtttaggttttttttttcgttttttttttttttttcgttttagggtataatacgttagcgcgaggattcgaacgttaattaagagatttgtgtcgtgttgattggatgtattcgttttttttttttaaaataattggtttgggggaggagttacgatagtttaggggcgggaagtcgttcgt

SEQ ID NO: 24348 - DNA, 1060 bp, Artificial Sequence
  chemically treated genomic DNA (Homo sapiens) CpG-island No: 24348
acgaacgacttcccgcccctaaactatcgtaactcctcccccaaaccaattattttaaaaaaaaaaaacgaatacatccaatcaacacgacacaaatctcttaattaacgttcgaatcctcgcgctaacgtattataccctaaaacgaaaaaaaaaaaaaaaacgaaaaaaaaaacctaaaccaatcctaacaacctacgcgaaaaaccaatcgaacgccgcgccttaaaacgatcacccaatccgcgaaaaaaaacaaaacgcatccctaccaaaaaccaataaaaaacctccaaaaatcaaaaacgacgttcaacgaaaacaataactaacctatattcgaaactcgaaaacgaatcgacgccaaaaacgaaaaaaaaaaaaaaaaaacctcctccgccgccgccatcttaaacgaacccgatcaattccgcgaaaccatcgcaaacgcgcgacctcccttaaacccgaccccgtcgtcaaacaaccccgacccactccccaaccccacttccgttcgcgcgtatcgcgatacgcccgaaccccgaaacgcgaaaaaaaaacgacgaacgctcgcctcccccgcctatcgcgatacgctcctcaacgacgacgccaactcctataataaaaacgtcaaactcgactaaaccgaaccccttcccttcctccccccgcgccatcgaccgccctccccgccgcctcccgccctaacgacaccgccgtctatcgcgacataacctcccctcgcctaccccctaccccgcctctacaacgcgaactccgacgaaaaacgatctccctccctctcgccctccgttttctacgcttctttcacgttcctcaacgcttccgaatatccttccgcgacctaaacccgtatccccgcccgccgccgcctccccgcgtaacatcgcgtcgaacccccgataaaaatataaaaatacgaaacctccccgaacgcgaaatacccgcccctctccgcgtcgatattaactcctaactaaaaaaataaaaacgcccctaatcccaaatactcgcttctcgaaactcaaatacc

SEQ ID NO: 24349 - DNA, 602 bp, Artificial Sequence
  chemically treated genomic DNA (Homo sapiens) CpG-island No: 24349
tttcggaagtttcgggttttagagttttcgatttttttaatttgtaggttaagtcgttcgtaaaattatttgttttattaggtttagtagtcgaggacggcgggacgtggttttaggttttgtgggagttgtagttttttgttttcggtttcgtttcggtttatttttacgtttatttcgaatttttgtttaaaggttttgtttttttgtttaacgtcgtaattagttttttgagttgttaacgtttttttttttgtttcgacgtttcgtcgttcggttatagcgattttttgtttagtaggatcggtttatagcgggacgtgagttatttttttttcgcggtttatcgtttttttcgtttagtgttaggtgttaataaagttgttgttttaaatgcggttaggaatatcgcgagcggggattaattagagagtagttttgtttttataacggcgcgagagtgagacgttatcggtgagcgattaacgttagaaatagtggtgcgcggagaggagaggtgagtgtgatggagattacggggagcgggaggttgggtttttgggtttgggagaagaagtgtgtgaggaaaaaggcgggttttt

SEQ ID NO: 24350 - DNA, 602 bp, Artificial Sequence
  chemically treated genomic DNA (Homo sapiens) CpG-island No: 24350
aaaaacccgcctttttcctcacacacttcttctcccaaacccaaaaacccaacctcccgctccccgtaatctccatcacactcacctctcctctccgcgcaccactatttctaacgttaatcgctcaccgataacgtctcactctcgcgccgttataaaaacaaaactactctctaattaatccccgctcgcgatattcctaaccgcatttaaaacaacaactttattaacacctaacactaaacgaaaaaaacgataaaccgcgaaaaaaaaataactcacgtcccgctataaaccgatcctactaaacaaaaaatcgctataaccgaacgacgaaacgtcgaaacaaaaaaaaaaacgttaacaactcaaaaaactaattacgacgttaaacaaaaaaacaaaacctttaaacaaaaattcgaaataaacgtaaaaataaaccgaaacgaaaccgaaaacaaaaaactacaactcccacaaaacctaaaaccacgtcccgccgtcctcgactactaaacctaataaaacaaataattttacgaacgacttaacctacaaattaaaaaaatcgaaaactctaaaacccgaaacttccgaaa

SEQ ID NO: 24351 - DNA, 602 bp, Artificial Sequence
  chemically treated genomic DNA (Homo sapiens) CpG-island No: 24351
aaagattcgtttttttttttatatatttttttttttagatttaggagtttagtttttcgtttttcgtggtttttattatatttatttttttttttcgcgtattattgtttttagcgttagtcgtttatcgatgacgttttattttcgcgtcgttatagaggtaaagttattttttgattggttttcgttcgcgatgtttttggtcgtatttgaaataataattttattagtatttggtattaggcggagagagcggtaagtcgcgaggaggaaatgatttacgtttcgttgtggatcgattttgttaagtagagaatcgttgtggtcggacgacggggcgtcgagataagaagaaagacgttggtaatttagaggattggttgcggcgttagataagaaagtaaggtttttaagtagggattcggggtggacgtgggggtgggtcgaagcgaagtcggaaataggaaattataatttttataaggtttagggttacgtttcgtcgttttcggttgttgagtttgatgggataagtagttttgcgaacggtttaatttatagattgaagaggtcggaagttttgaggttcggggttttcggag

SEQ ID NO: 24352 - DNA, 602 bp, Artificial Sequence
  chemically treated genomic DNA (Homo sapiens) CpG-island No: 24352
ctccgaaaaccccgaacctcaaaacttccgacctcttcaatctataaattaaaccgttcgcaaaactacttatcccatcaaactcaacaaccgaaaacgacgaaacgtaaccctaaaccttataaaaattataatttcctatttccgacttcgcttcgacccacccccacgtccaccccgaatccctacttaaaaaccttactttcttatctaacgccgcaaccaatcctctaaattaccaacgtctttcttcttatctcgacgccccgtcgtccgaccacaacgattctctacttaacaaaatcgatccacaacgaaacgtaaatcatttcctcctcgcgacttaccgctctctccgcctaataccaaatactaataaaattattatttcaaatacgaccaaaaacatcgcgaacgaaaaccaatcaaaaaataactttacctctataacgacgcgaaaataaaacgtcatcgataaacgactaacgctaaaaacaataatacgcgaaaaaaaaaaataaatataataaaaaccacgaaaaacgaaaaactaaactcctaaatctaaaaaaaaaaatatataaaaaaaaaaacgaatcttt

SEQ ID NO: 24353 - DNA, 500 bp, Artificial Sequence
  chemically treated genomic DNA (Homo sapiens) CpG-island No: 24353
tttttcgtcggttttgtttttttttttttttcgattttatcggttataagatgatgtggtttaatttttttttgtaagaggagaatcggcggcggggggtcgcgggtcggcggcgggcgtacgggtagggtaggtcggggttgacgttcgagcgcgaggggaaggtgaagttggcgttgttgttggtcgtcggtgggcgttacgttggcggtgttgttcgtgggtatcgagttttgggtggagtttaatatttataaggttaacggtagcgtcgtgtgcgaagcggttttatttggggttgtggaaggcgtgtattaagcggttgtggtaggcggacgtgttcgtggatagggatatttgcggtttcgcggagttgttcggaggtgagtagtcgtcgtttcgagcgtagggtttgcgttttacggatagggagggagaggggttcgtgttcgaggagaaaattcgttttagggataaaagtttgagttcggaggagatag

SEQ ID NO: 24354 - DNA, 500 bp, Artificial Sequence
  chemically treated genomic DNA (Homo sapiens) CpG-island No: 24354
ctatctcctccgaactcaaacttttatccctaaaacgaattttctcctcgaacacgaacccctctccctccctatccgtaaaacgcaaaccctacgctcgaaacgacgactactcacctccgaacaactccgcgaaaccgcaaatatccctatccacgaacacgtccgcctaccacaaccgcttaatacacgccttccacaaccccaaataaaaccgcttcgcacacgacgctaccgttaaccttataaatattaaactccacccaaaactcgatacccacgaacaacaccgccaacgtaacgcccaccgacgaccaacaacaacgccaacttcaccttcccctcgcgctcgaacgtcaaccccgacctaccctacccgtacgcccgccgccgacccgcgaccccccgccgccgattctcctcttacaaaaaaaaattaaaccacatcatcttataaccgataaaatcgaaaaaaaaaaaaaaacaaaaccgacgaaaaa

SEQ ID NO: 24355 - DNA, 500 bp, Artificial Sequence
  chemically treated genomic DNA (Homo sapiens) CpG-island No: 24355
ttgtttttttcgggtttaggtttttgtttttggggcgggtttttttttcggatacgggtttttttttttttttgttcgtgggacgtaagttttgcgttcggggcggcggttgtttattttcgggtagtttcgcggggtcgtaggtgtttttgtttacgggtacgttcgtttgttatagtcgtttggtgtacgttttttatagttttaggtggggtcgtttcgtatacggcgttgtcgttggttttgtaggtgttgagttttatttagaattcggtgtttacggatagtatcgttagcgtggcgtttatcggcggttagtagtagcgttagttttatttttttttcgcgttcgggcgttagtttcgatttgttttgttcgtgcgttcgtcgtcggttcgcggtttttcgtcgtcggttttttttttgtaggaagaagttggattatattattttatggtcggtggggtcgggaagggggaggaggtagagtcggcgaaggg

SEQ ID NO: 24356 - DNA, 500 bp, Artificial Sequence
  chemically treated genomic DNA (Homo sapiens) CpG-island No: 24356
cccttcgccgactctacctcctcccccttcccgaccccaccgaccataaaataatataatccaacttcttcctacaaaaaaaaaaccgacgacgaaaaaccgcgaaccgacgacgaacgcacgaacaaaacaaatcgaaactaacgcccgaacgcgaaaaaaaaataaaactaacgctactactaaccgccgataaacgccacgctaacgatactatccgtaaacaccgaattctaaataaaactcaacacctacaaaaccaacgacaacgccgtatacgaaacgaccccacctaaaactataaaaaacgtacaccaaacgactataacaaacgaacgtacccgtaaacaaaaacacctacgaccccgcgaaactacccgaaaataaacaaccgccgccccgaacgcaaaacttacgtcccacgaacaaaaaaaaaaaaaaacccgtatccgaaaaaaaaacccgccccaaaaacaaaaacctaaacccgaaaaaaacaa

SEQ ID NO: 24357 - DNA, 798 bp, Artificial Sequence
  chemically treated genomic DNA (Homo sapiens) CpG-island No: 24357
cgtttggtttcgaattttatacggggtatattgagtttgcgtaaagttttcgttttcggtttttaatcgtcgtttgcgcgttgggtttcggagcgtcgtttgtcggttttcgagtttattttttgttgagttagtagtattattcgttacgttttttttttttttttcgggtttgggtttcgttacgtcgtacgcgggcgatattgtttttgtttcggacgtgttagttttttttgggtaagatatttatggcgtcgtagttgtttagggattggtacgttcgtttttttgtattttcgattggcgagaggatgttttttttttttttgtttttatttcgatcgcggattggtttcgaattagttggtacggttttttggtttgtagcgataggtgattggttgagacgttttttattatagcgaatgttaggcgttcggttcgtggtattttttagtaatcgttttttgttatagatttgaattaattataagttggttcgtttttgatgttattagatgcggtcgtcgattggtcgatatgatcgataagtttttttgcggaagagcgttttgtatcgataaatatgttcgtatatttgattggtttttgtttcgttgtagttttgtttttatttttaggacgtagattttaaagcgcgtttagtaatttcggttgtatttattgatataaggaagattattcgagagttagggacgtggcggcgaggggttttggaaatttttagatattaaagttggaagggcgtggagttttttttagtttttttagtttata

SEQ ID NO: 24358 - DNA, 798 bp, Artificial Sequence
  chemically treated genomic DNA (Homo sapiens) CpG-island No: 24358
tataaactaaaaaaactaaaaaaaactccacgcccttccaactttaatatctaaaaatttccaaaacccctcgccgccacgtccctaactctcgaataatcttccttatatcaataaatacaaccgaaattactaaacgcgctttaaaatctacgtcctaaaaataaaaacaaaactacaacgaaacaaaaaccaatcaaatatacgaacatatttatcgatacaaaacgctcttccgcaaaaaaacttatcgatcatatcgaccaatcgacgaccgcatctaataacatcaaaaacgaaccaacttataattaattcaaatctataacaaaaaacgattactaaaaaataccacgaaccgaacgcctaacattcgctataataaaaaacgtctcaaccaatcacctatcgctacaaaccaaaaaaccgtaccaactaattcgaaaccaatccgcgatcgaaataaaaacaaaaaaaaaaaaaacatcctctcgccaatcgaaaatacaaaaaaacgaacgtaccaatccctaaacaactacgacgccataaatatcttacccaaaaaaaactaacacgtccgaaacaaaaacaatatcgcccgcgtacgacgtaacgaaacccaaacccgaaaaaaaaaaaaaaaacgtaacgaataatactactaactcaacaaaaaataaactcgaaaaccgacaaacgacgctccgaaacccaacgcgcaaacgacgattaaaaaccgaaaacgaaaactttacgcaaactcaatataccccgtataaaattcgaaaccaaacg

SEQ ID NO: 24359 - DNA, 798 bp, Artificial Sequence
  chemically treated genomic DNA (Homo sapiens) CpG-island No: 24359
tgtaaattaggagaattggagaagattttacgtttttttagttttggtatttggagatttttagggtttttcgtcgttacgtttttgattttcgggtgattttttttgtattaataaatatagtcgaggttgttgagcgcgttttgaaatttgcgttttgaaggtgggggtagggttatagcggggtaggagttaattaaatgtacgggtatgtttgtcggtgtagagcgttttttcgtaaggagatttgtcggttatgtcggttaatcgacggtcgtatttggtagtattaggggcgggttaatttatgattggtttagatttgtgataagaggcggttgttaggggatattacgagtcgaacgtttagtattcgttgtgataaagggcgttttagttaattatttgtcgttataggttagggggtcgtattaattaattcggaattaattcgcggtcgaagtagggataagaaaaaggggggtattttttcgttaatcggaagtgtaaagaggcgggcgtgttagtttttggatagttacgacgttatgaatattttgtttaagaagagttggtacgttcggaataaggataatgtcgttcgcgtgcgacgtgacgaggtttaggttcgggaggaggagaaggagcgtgacgagtggtgttgttggtttagtaagaggtaagttcggaagtcggtaggcggcgtttcggggtttagcgcgtaggcggcggttgggggtcggaagcggaggttttgcgtaggtttaatgtgtttcgtgtgaaattcgggattaggcg

SEQ ID NO: 24360 - DNA, 798 bp, Artificial Sequence
  chemically treated genomic DNA (Homo sapiens) CpG-island No: 24360
cgcctaatcccgaatttcacacgaaacacattaaacctacgcaaaacctccgcttccgacccccaaccgccgcctacgcgctaaaccccgaaacgccgcctaccgacttccgaacttacctcttactaaaccaacaacaccactcgtcacgctccttctcctcctcccgaacctaaacctcgtcacgtcgcacgcgaacgacattatccttattccgaacgtaccaactcttcttaaacaaaatattcataacgtcgtaactatccaaaaactaacacgcccgcctctttacacttccgattaacgaaaaaatacccccctttttcttatccctacttcgaccgcgaattaattccgaattaattaatacgaccccctaacctataacgacaaataattaactaaaacgccctttatcacaacgaatactaaacgttcgactcgtaatatcccctaacaaccgcctcttatcacaaatctaaaccaatcataaattaacccgcccctaatactaccaaatacgaccgtcgattaaccgacataaccgacaaatctccttacgaaaaaacgctctacaccgacaaacatacccgtacatttaattaactcctaccccgctataaccctacccccaccttcaaaacgcaaatttcaaaacgcgctcaacaacctcgactatatttattaatacaaaaaaaatcacccgaaaatcaaaaacgtaacgacgaaaaaccctaaaaatctccaaataccaaaactaaaaaaacgtaaaatcttctccaattctcctaatttaca

SEQ ID NO: 24361 - DNA, 783 bp, Artificial Sequence
  chemically treated genomic DNA (Homo sapiens) CpG-island No: 24361
tttaacgcgttttcggggtcgtttcgtattcgttagttcgtagagattttgtcgtcgtgtaatttcgtttcgttattgggcgtcgtattttggtttatttgagttgttcgtcgggtaggaggcggtcgagtagttttagttcgtttgtagtcgtagtttcggttacgtttttttcgtttagcgcgtattcgcgtcgtttgttttttttgggcgtacgtcggcgtgcgtagattaggtcggggaagaagttacggttagggttcgggcgggtagggaagaagtttcggagtagaagtcgagagcgcgagtcggtaacgggattcgagtttaggtttatattgggattcgagtttcgagtacgtgaaggggcgggtttcgggttcggaataaggaggagttaaaagttttggattcgaaggggaatagacgggttttggaaaggaggcggggtttggagttcggcgtgaggaatgaggcggggttttttcgggtttttcgggtataatcgggagtttgagtttttcggaagcggggttataaatttcggtttatttcggtaatagtcgagaacggagagttgaggttattgtggcggagttatatgtttcggtttttttcggaggtagtcgagtttttagggttattgtttcgatgtgggcggggttatagattcggtcggatgtgggtggggttataagtttcggtttatttcgtagatagttgggtataagtgacgttaggatgataggcggagttaataggttcgttagatatttatgagta

SEQ ID NO: 24362 - DNA, 783 bp, Artificial Sequence
  chemically treated genomic DNA (Homo sapiens) CpG-island No: 24362
tactcataaatatctaacgaacctattaactccgcctatcatcctaacgtcacttatacccaactatctacgaaataaaccgaaacttataaccccacccacatccgaccgaatctataaccccgcccacatcgaaacaataaccctaaaaactcgactacctccgaaaaaaaccgaaacatataactccgccacaataacctcaactctccgttctcgactattaccgaaataaaccgaaatttataaccccgcttccgaaaaactcaaactcccgattatacccgaaaaacccgaaaaaaccccgcctcattcctcacgccgaactccaaaccccgcctcctttccaaaacccgtctattccccttcgaatccaaaacttttaactcctccttattccgaacccgaaacccgccccttcacgtactcgaaactcgaatcccaatataaacctaaactcgaatcccgttaccgactcgcgctctcgacttctactccgaaacttcttccctacccgcccgaaccctaaccgtaacttcttccccgacctaatctacgcacgccgacgtacgcccaaaaaaaacaaacgacgcgaatacgcgctaaacgaaaaaaacgtaaccgaaactacgactacaaacgaactaaaactactcgaccgcctcctacccgacgaacaactcaaataaaccaaaatacgacgcccaataacgaaacgaaattacacgacgacaaaatctctacgaactaacgaatacgaaacgaccccgaaaacgcgttaaa

SEQ ID NO: 24363 - DNA, 783 bp, Artificial Sequence
  chemically treated genomic DNA (Homo sapiens) CpG-island No: 24363
tatttatgggtgtttggcgaatttgttgatttcgtttattattttagcgttatttgtatttaattatttacgaagtaaatcgaagtttgtggttttatttatattcggtcgagtttgtggtttcgtttatatcggaatagtgattttaaggattcgattattttcgaagaaagtcgaaatatgtggtttcgttatagtggttttagtttttcgttttcgattattgtcgaagtgagtcgaagtttgtggtttcgttttcggagaatttaagttttcgattgtgttcgaagaattcgaagagatttcgttttattttttacgtcgagttttagatttcgttttttttttagagttcgtttgttttttttcgggtttaaagtttttggtttttttttgtttcgagttcgaagttcgtttttttacgtattcggagttcggattttagtgtggatttggattcgaatttcgttgtcgattcgcgttttcggtttttgtttcggggttttttttttgttcgttcgggttttgatcgtggtttttttttcggtttgatttgcgtacgtcggcgtgcgtttagaaggagtaggcggcgcgggtgcgcgttgggcgggggaggcgtggtcggagttgcggttgtaagcgggttgggattgttcggtcgttttttgttcggcgagtagtttaggtgggttagggtgcggcgtttagtggcgaggcgaggttatacggcggtagggtttttgcgggttggcgggtgcggggcggtttcggaggcgcgttgga

SEQ ID NO: 24364 - DNA, 783 bp, Artificial Sequence
  chemically treated genomic DNA (Homo sapiens) CpG-island No: 24364
tccaacgcgcctccgaaaccgccccgcacccgccaacccgcaaaaaccctaccgccgtataacctcgcctcgccactaaacgccgcaccctaacccacctaaactactcgccgaacaaaaaacgaccgaacaatcccaacccgcttacaaccgcaactccgaccacgcctcccccgcccaacgcgcacccgcgccgcctactccttctaaacgcacgccgacgtacgcaaatcaaaccgaaaaaaaaaccacgatcaaaacccgaacgaacaaaaaaaaaaccccgaaacaaaaaccgaaaacgcgaatcgacaacgaaattcgaatccaaatccacactaaaatccgaactccgaatacgtaaaaaaacgaacttcgaactcgaaacaaaaaaaaaccaaaaactttaaacccgaaaaaaaacaaacgaactctaaaaaaaaaacgaaatctaaaactcgacgtaaaaaataaaacgaaatctcttcgaattcttcgaacacaatcgaaaacttaaattctccgaaaacgaaaccacaaacttcgactcacttcgacaataatcgaaaacgaaaaactaaaaccactataacgaaaccacatatttcgactttcttcgaaaataatcgaatccttaaaatcactattccgatataaacgaaaccacaaactcgaccgaatataaataaaaccacaaacttcgatttacttcgtaaataattaaatacaaataacgctaaaataataaacgaaatcaacaaattcgccaaacacccataaata

SEQ ID NO: 24365 - DNA, 923 bp, Artificial Sequence
  chemically treated genomic DNA (Homo sapiens) CpG-island No: 24365
gggcggggcgaaagcgatttgtttttaaaggggcggaatttcgagggtcggcgtgcgtttacgggatcgggttagggtgacgatttttaagtttttaagtagaggagaggaagcggtagagggaggtgcgtttagtggggcggagttaaggtggttttcgcgggaggagggcggggtttcggttttgcgaggggcgggatttgatttttcgcggcgttgatggggcgggatgacgaagttgacgagggtgtcggtatgagggggtggagtaaggagcgcgtggcggtgcgtagtgggtggttttatttcgattgcgaattattgtttatgaggtgattcgttggttttatcggtggatagtgggatattttgaagggaggtaaggaggcggattgagcgtttttaattggggtgagttcgttcgagcgagagtggacggcgggtgtttagggggcggggttttcggttgtggggttcggtcgtagggcgggaattttttaattggggtgcgttggcgttcggagggggcggggttatagcgcgagcgtgtcgggagtcgatgacgttcgaacgtcgaatttattgcgttcgggaggaggcggggttacggattcggtcgagtcgagaatattcgaacgttaaattgttggcgttcgagaagggggcggggttgcggattcggtggagtcgaggacgttcgaacgtcgaattttttgtgttcgggagggggtagggttttgtattgtgggagtttgagagcgaggaggttcgaaagtcgaattatagtcgttcggaaagaggaggagcgaaggttcgagcgttcggaagagggtgtggtttcggcggtgttttagtttttagagtttttgatcgttgacgggaatattcgaagggggacgtttattttgtaagagggtggtgtt

SEQ ID NO: 24366 - DNA, 923 bp, Artificial Sequence
  chemically treated genomic DNA (Homo sapiens) CpG-island No: 24366
aacaccaccctcttacaaaataaacgtcccccttcgaatattcccgtcaacgatcaaaaactctaaaaactaaaacaccgccgaaaccacaccctcttccgaacgctcgaaccttcgctcctcctctttccgaacgactataattcgactttcgaacctcctcgctctcaaactcccacaatacaaaaccctaccccctcccgaacacaaaaaattcgacgttcgaacgtcctcgactccaccgaatccgcaaccccgcccccttctcgaacgccaacaatttaacgttcgaatattctcgactcgaccgaatccgtaaccccgcctcctcccgaacgcaataaattcgacgttcgaacgtcatcgactcccgacacgctcgcgctataaccccgccccctccgaacgccaacgcaccccaattaaaaaattcccgccctacgaccgaaccccacaaccgaaaaccccgccccctaaacacccgccgtccactctcgctcgaacgaactcaccccaattaaaaacgctcaatccgcctccttacctcccttcaaaatatcccactatccaccgataaaaccaacgaatcacctcataaacaataattcgcaatcgaaataaaaccacccactacgcaccgccacgcgctccttactccaccccctcataccgacaccctcgtcaacttcgtcatcccgccccatcaacgccgcgaaaaatcaaatcccgcccctcgcaaaaccgaaaccccgccctcctcccgcgaaaaccaccttaactccgccccactaaacgcacctccctctaccgcttcctctcctctacttaaaaacttaaaaatcgtcaccctaacccgatcccgtaaacgcacgccgaccctcgaaattccgcccctttaaaaacaaatcgctttcgccccgccc

SEQ ID NO: 24367 - DNA, 923 bp, Artificial Sequence
  chemically treated genomic DNA (Homo sapiens) CpG-island No: 24367
ggtattatttttttgtaaagtgggcgttttttttcgggtgttttcgttagcggttagaagttttggaggttaaggtatcgtcgaggttatattttttttcggacgttcgagttttcgtttttttttttttcgaacgattgtgattcggttttcggattttttcgtttttagatttttatagtataaaattttgttttttttcgagtataggaagttcggcgttcgggcgttttcggttttatcgaattcgtagtttcgtttttttttcgaacgttagtaatttgacgttcgggtgttttcggttcggtcgaattcgtagtttcgttttttttcggacgtaataggttcggcgttcgggcgttatcggttttcggtacgttcgcgttgtggtttcgtttttttcgagcgttagcgtattttagttggggagttttcgttttacgatcgaattttatagtcgaaagtttcgttttttggatattcgtcgtttattttcgttcgggcgggtttattttaattgggagcgtttagttcgtttttttgtttttttttagaatgttttattgtttatcgatagaattagcgagttattttataaatagtaattcgtagtcgaggtggagttatttattgcgtatcgttacgcgttttttgttttatttttttatgtcgatattttcgttaatttcgttatttcgttttattagcgtcgcgggaagttaggtttcgtttttcgtaggatcgaagtttcgtttttttttcgcgggggttattttggtttcgttttattgagcgtatttttttttgtcgtttttttttttttatttgggaatttgaggatcgttattttggttcggtttcgtaggcgtacgtcggttttcggggtttcgtttttttgagggtaagtcgttttcgtttcgttt

SEQ ID NO: 24368 - DNA, 923 bp, Artificial Sequence
  chemically treated genomic DNA (Homo sapiens) CpG-island No: 24368
aaacgaaacgaaaacgacttaccctcaaaaaaacgaaaccccgaaaaccgacgtacgcctacgaaaccgaaccaaaataacgatcctcaaattcccaaataaaaaaaaaaaaacgacaaaaaaaaatacgctcaataaaacgaaaccaaaataacccccgcgaaaaaaaaacgaaacttcgatcctacgaaaaacgaaacctaacttcccgcgacgctaataaaacgaaataacgaaattaacgaaaatatcgacataaaaaaataaaacaaaaaacgcgtaacgatacgcaataaataactccacctcgactacgaattactatttataaaataactcgctaattctatcgataaacaataaaacattctaaaaaaaaacaaaaaaacgaactaaacgctcccaattaaaataaacccgcccgaacgaaaataaacgacgaatatccaaaaaacgaaactttcgactataaaattcgatcgtaaaacgaaaactccccaactaaaatacgctaacgctcgaaaaaaacgaaaccacaacgcgaacgtaccgaaaaccgataacgcccgaacgccgaacctattacgtccgaaaaaaaacgaaactacgaattcgaccgaaccgaaaacacccgaacgtcaaattactaacgttcgaaaaaaaaacgaaactacgaattcgataaaaccgaaaacgcccgaacgccgaacttcctatactcgaaaaaaaacaaaattttatactataaaaatctaaaaacgaaaaaatccgaaaaccgaatcacaatcgttcgaaaaaaaaaaaaacgaaaactcgaacgtccgaaaaaaaatataacctcgacgataccttaacctccaaaacttctaaccgctaacgaaaacacccgaaaaaaaacgcccactttacaaaaaaataatacc

SEQ ID NO: 24369 - DNA, 695 bp, Artificial Sequence
  chemically treated genomic DNA (Homo sapiens) CpG-island No: 24369
cgtgtcgcgcgtttgcggaggtttgttttttacgttttaaggcgtaatggtaggtacggtagtgcgggtatagagcgggtgtcgatcgtaggttataagggtagagcgggattttgggggtttggcgaggggcgagggtcgggggtttgttttcggcgtttcgttttcggcggtcgcgacgtggtggggatcgttcgggggggagtttggcgttcgggtttagtaggtggtgaacggcggttgagcgaggtttcgttttttgaggtttaggggcggggtttcgtcgagatttcggaggttttgggtgcgttgtagcggttcgcggcgcgtagttgtttcggtaattgttttgtttttcggttttcgtaggaggatgttggtggtggaggtggcgaacggtcgttttttggtgtggggagtcgaggcggtgtaggtttttcgggagcgtttgggtgtggggggtcgtacggtaggcgttttgtttcgcggtttcgttagaattcgcgtttgggtttttcgttgttgttgatgttcgaagaggcgcggtttttggcgagatcggcgtcgtgattttggttagcgtttcgcgtttagattttcggtattatagtttggtaagggggcggggttcgaattcgggttcggtgggagcgggatttgggagttaagttttttggtttttgaagggattataa

SEQ ID NO: 24370 - DNA, 695 bp, Artificial Sequence
  chemically treated genomic DNA (Homo sapiens) CpG-island No: 24370
ttataatcccttcaaaaaccaaaaaacttaactcccaaatcccgctcccaccgaacccgaattcgaaccccgcccccttaccaaactataataccgaaaatctaaacgcgaaacgctaaccaaaatcacgacgccgatctcgccaaaaaccgcgcctcttcgaacatcaacaacaacgaaaaacccaaacgcgaattctaacgaaaccgcgaaacaaaacgcctaccgtacgaccccccacacccaaacgctcccgaaaaacctacaccgcctcgactccccacaccaaaaaacgaccgttcgccacctccaccaccaacatcctcctacgaaaaccgaaaaacaaaacaattaccgaaacaactacgcgccgcgaaccgctacaacgcacccaaaacctccgaaatctcgacgaaaccccgcccctaaacctcaaaaaacgaaacctcgctcaaccgccgttcaccacctactaaacccgaacgccaaactcccccccgaacgatccccaccacgtcgcgaccgccgaaaacgaaacgccgaaaacaaacccccgaccctcgcccctcgccaaacccccaaaatcccgctctacccttataacctacgatcgacacccgctctatacccgcactaccgtacctaccattacgccttaaaacgtaaaaaacaaacctccgcaaacgcgcgacacg

SEQ ID NO: 24371 - DNA, 695 bp, Artificial Sequence
  chemically treated genomic DNA (Homo sapiens) CpG-island No: 24371
ttatggtttttttagaagttaggaaatttgatttttaggtttcgtttttatcgaattcgagttcgagtttcgtttttttattaggttgtggtgtcgagagtttggacgcggggcgttgattagagttacggcgtcgatttcgttaagagtcgcgttttttcgggtattagtagtagcgggaggtttaggcgcgagttttggcggggtcgcggggtagggcgtttatcgtgcggttttttatatttaggcgttttcggagggtttgtatcgtttcggttttttatattagggagcggtcgttcgttatttttattattagtatttttttgcgggagtcgggaggtaaagtagttatcgaaatagttgcgcgtcgcggatcgttgtagcgtatttaaagttttcggggtttcggcgaagtttcgtttttaggttttaggaggcggggtttcgtttagtcgtcgtttattatttgttgggttcgagcgttaggttttttttcgggcgatttttattacgtcgcggtcgtcggagacgagacgtcggagataagttttcgattttcgtttttcgttaagtttttagggtttcgttttatttttgtgatttgcggtcggtattcgttttgtgttcgtattgtcgtatttattattgcgttttggagcgtgaaaaataaattttcgtaagcgcgcgatacg

SEQ ID NO: 24372 - DNA, 695 bp, Artificial Sequence
  chemically treated genomic DNA (Homo sapiens) CpG-island No: 24372
cgtatcgcgcgcttacgaaaatttatttttcacgctccaaaacgcaataataaatacgacaatacgaacacaaaacgaataccgaccgcaaatcacaaaaataaaacgaaaccctaaaaacttaacgaaaaacgaaaatcgaaaacttatctccgacgtctcgtctccgacgaccgcgacgtaataaaaatcgcccgaaaaaaaacctaacgctcgaacccaacaaataataaacgacgactaaacgaaaccccgcctcctaaaacctaaaaacgaaacttcgccgaaaccccgaaaactttaaatacgctacaacgatccgcgacgcgcaactatttcgataactactttacctcccgactcccgcaaaaaaatactaataataaaaataacgaacgaccgctccctaatataaaaaaccgaaacgatacaaaccctccgaaaacgcctaaatataaaaaaccgcacgataaacgccctaccccgcgaccccgccaaaactcgcgcctaaacctcccgctactactaatacccgaaaaaacgcgactcttaacgaaatcgacgccgtaactctaatcaacgccccgcgtccaaactctcgacaccacaacctaataaaaaaacgaaactcgaactcgaattcgataaaaacgaaacctaaaaatcaaatttcctaacttctaaaaaaaccataa

SEQ ID NO: 24373 - DNA, 659 bp, Artificial Sequence
  chemically treated genomic DNA (Homo sapiens) CpG-island No: 24373
gttcgtcggattttatcgtattgaagggattgcgcgtgcgcgagttaggtgacgattcgtttttataggttttagaattttcgagatttttcgcgtttgtttttcgttttttttttttagattttcggtttgttcgttgggggcgcgcgcggtgtgtggtaggcggtacggcgttggcggtcgagtgcgtttgttacgcgtggcggtgcgtggttgttaggggcgtttgaggttgtcgggtagtttagtaggtcgagggaggaagtagcgtggagtcggtgtcgagtcggggcgaagttggattttttaggtgagtgcggttgcggagttaggggagtcgattttagatatttcgtcggttttacgttttcgatttttttttatttgagttttttcgcgcgggtttttagtttttcggttatttttattttagtttcgttttttttcgttattttttatttttcgggaggttagggagtcgcggttttttattcggtcgggatttcgcgttttttcggagtttttttttttttcgttacgtttcgcgaatttagtcggtttcgttttcgggtgttcgaatattgttttattttttagttatggttttcgagttttttttgttttgtcgcgttgaggtttaaattttttttgggtgtgag

SEQ ID NO: 24374 - DNA, 659 bp, Artificial Sequence
  chemically treated genomic DNA (Homo sapiens) CpG-island No: 24374
ctcacacccaaaaaaaatttaaacctcaacgcgacaaaacaaaaaaaactcgaaaaccataactaaaaaataaaacaatattcgaacacccgaaaacgaaaccgactaaattcgcgaaacgtaacgaaaaaaaaaaaaactccgaaaaaacgcgaaatcccgaccgaataaaaaaccgcgactccctaacctcccgaaaaataaaaaataacgaaaaaaaacgaaactaaaataaaaataaccgaaaaactaaaaacccgcgcgaaaaaactcaaataaaaaaaaatcgaaaacgtaaaaccgacgaaatatctaaaatcgactcccctaactccgcaaccgcactcacctaaaaaatccaacttcgccccgactcgacaccgactccacgctacttcctccctcgacctactaaactacccgacaacctcaaacgcccctaacaaccacgcaccgccacgcgtaacaaacgcactcgaccgccaacgccgtaccgcctaccacacaccgcgcgcgcccccaacgaacaaaccgaaaatctaaaaaaaaaaaacgaaaaacaaacgcgaaaaatctcgaaaattctaaaacctataaaaacgaatcgtcacctaactcgcgcacgcgcaatcccttcaatacgataaaatccgacgaac

SEQ ID NO: 24375 - DNA, 659 bp, Artificial Sequence
  chemically treated genomic DNA (Homo sapiens) CpG-island No: 24375
tttatatttagagggaatttaaattttagcgcggtaggatagaggaagttcggaggttataattaggggatgaggtagtgttcgggtattcggaggcgaggtcgattaagttcgcggggcgtggcggagaggagaagggtttcgaggaggcgcgaagtttcggtcgggtaggaggtcgcggttttttggtttttcgggggatgagaggtggcgggaggaagcggggttagggtgagagtggtcggagggttggggattcgcgcgaaaggatttaggtagagggaggtcgggagcgtgggatcggcggagtgtttggggtcggtttttttggtttcgtagtcgtatttatttaggggatttagtttcgtttcggttcggtatcggttttacgttattttttttttcggtttgttgggttattcggtagttttaggcgtttttagtaattacgtatcgttacgcgtgataagcgtattcggtcgttagcgtcgtgtcgtttgttatatatcgcgcgcgtttttagcggatagatcgagagtttggaagaagagggcgggaggtaagcgcggggaatttcgggggttttggggtttgtaggggcgggtcgttatttgattcgcgtacgcgtagtttttttagtgcggtgggattcggcgagt

SEQ ID NO: 24376 - DNA, 659 bp, Artificial Sequence
  chemically treated genomic DNA (Homo sapiens) CpG-island No: 24376
actcgccgaatcccaccgcactaaaaaaactacgcgtacgcgaatcaaataacgacccgcccctacaaaccccaaaacccccgaaattccccgcgcttacctcccgccctcttcttccaaactctcgatctatccgctaaaaacgcgcgcgatatataacaaacgacacgacgctaacgaccgaatacgcttatcacgcgtaacgatacgtaattactaaaaacgcctaaaactaccgaataacccaacaaaccgaaaaaaaaaataacgtaaaaccgataccgaaccgaaacgaaactaaatcccctaaataaatacgactacgaaaccaaaaaaaccgaccccaaacactccgccgatcccacgctcccgacctccctctacctaaatcctttcgcgcgaatccccaaccctccgaccactctcaccctaaccccgcttcctcccgccacctctcatcccccgaaaaaccaaaaaaccgcgacctcctacccgaccgaaacttcgcgcctcctcgaaacccttctcctctccgccacgccccgcgaacttaatcgacctcgcctccgaatacccgaacactacctcatcccctaattataacctccgaacttcctctatcctaccgcgctaaaatttaaattccctctaaatataaa

SEQ ID NO: 24377 - DNA, 669 bp, Artificial Sequence
  chemically treated genomic DNA (Homo sapiens) CpG-island No: 24377
tttgttttcgattttaggcggtcgcgagcggcggggggttttaagttcgagagaggcgaggcgagggggcgaagttgcgggttttatagttcgaagcgcgttgggatttcgtttcggtattttcgttttcgtttttcgttgcgtttcgttatgcgtttcggggcgtacggttcgttttcgagagtttcgttgtttgattgtcgtaattgttattttttttcggttttttgtttttcgttttcgtttcggtttcgttttttttttattttcgtttcggttttgattttttttttcgagcgagtcgtaggagatataggcgttggttgtttcgttcgtttttcgtttcgtcgcgtttttttcgttcgggatgggttttttcgtcgtcgtcggatttttcgttttcgtcgtcgtttgttttgtcgcgttcgtattgaagttcgggttttcgcgcgtcgcggttcgtttcgtagtttcgttttttgtttattcgggcggtcgtagggcggttacgatgttgtcgtttttattttttcgtttcgggttgttgttgttgttgtttttgtgttcggcgtacgtcggcggattgtggtggtgagttcggttgttttggcgcggttttggattttggagggtggggatttcgggatttaggatagattggggtgtttt

SEQ ID NO: 24378 - DNA, 669 bp, Artificial Sequence
  chemically treated genomic DNA (Homo sapiens) CpG-island No: 24378
aaaacaccccaatctatcctaaatcccgaaatccccaccctccaaaatccaaaaccgcgccaaaacaaccgaactcaccaccacaatccgccgacgtacgccgaacacaaaaacaacaacaacaacaacccgaaacgaaaaaataaaaacgacaacatcgtaaccgccctacgaccgcccgaataaacaaaaaacgaaactacgaaacgaaccgcgacgcgcgaaaacccgaacttcaatacgaacgcgacaaaacaaacgacgacgaaaacgaaaaatccgacgacgacgaaaaaacccatcccgaacgaaaaaaacgcgacgaaacgaaaaacgaacgaaacaaccaacgcctatatctcctacgactcgctcgaaaaaaaaaatcaaaaccgaaacgaaaataaaaaaaaaacgaaaccgaaacgaaaacgaaaaacaaaaaaccgaaaaaaaataacaattacgacaatcaaacaacgaaactctcgaaaacgaaccgtacgccccgaaacgcataacgaaacgcaacgaaaaacgaaaacgaaaataccgaaacgaaatcccaacgcgcttcgaactataaaacccgcaacttcgccccctcgcctcgcctctctcgaacttaaaaccccccgccgctcgcgaccgcctaaaatcgaaaacaaa

SEQ ID NO: 24379 - DNA, 669 bp, Artificial Sequence
  chemically treated genomic DNA (Homo sapiens) CpG-island No: 24379
ggaatattttagtttgttttgggtttcggggtttttattttttagggtttagagtcgcgttaggatagtcggatttattattatagttcgtcgacgtgcgtcgggtataggagtagtagtagtagtagttcgaggcgggagggtaagggcggtagtatcgtgatcgttttacggtcgttcgggtgggtagggggcgaggttgcggggcgaatcgcggcgcgcgagggttcgggttttagtgcgagcgcggtagaataggcggcggcgggagcgagggattcggcggcggcgggggggtttatttcgggcgaggagggcgcggcggagcggagagcggacggggtagttagcgtttgtgttttttgcggttcgttcgggagaagaaattagagtcggggcggaggtgggaggggagcggggtcgaggcgggggcggggggtagggggtcggagggaggtggtagttgcgatagttaggtagcgggattttcgggagcgagtcgtgcgtttcggggcgtatggcggagcgtagcggagggcgggagcgggggtgtcggggcggggttttagcgcgtttcgggttgtgggattcgtagtttcgttttttcgtttcgtttttttcggatttggagtttttcgtcgttcgcggtcgtttggagtcgggggtaag

SEQ ID NO: 24380 - DNA, 669 bp, Artificial Sequence
  chemically treated genomic DNA (Homo sapiens) CpG-island No: 24380
cttacccccgactccaaacgaccgcgaacgacgaaaaactccaaatccgaaaaaaacgaaacgaaaaaacgaaactacgaatcccacaacccgaaacgcgctaaaaccccgccccgacacccccgctcccgccctccgctacgctccgccatacgccccgaaacgcacgactcgctcccgaaaatcccgctacctaactatcgcaactaccacctccctccgaccccctaccccccgcccccgcctcgaccccgctcccctcccacctccgccccgactctaatttcttctcccgaacgaaccgcaaaaaacacaaacgctaactaccccgtccgctctccgctccgccgcgccctcctcgcccgaaataaacccccccgccgccgccgaatccctcgctcccgccgccgcctattctaccgcgctcgcactaaaacccgaaccctcgcgcgccgcgattcgccccgcaacctcgccccctacccacccgaacgaccgtaaaacgatcacgatactaccgcccttaccctcccgcctcgaactactactactactactcctatacccgacgcacgtcgacgaactataataataaatccgactatcctaacgcgactctaaaccctaaaaaataaaaaccccgaaacccaaaacaaactaaaatattcc

SEQ ID NO: 24381 - DNA, 751 bp, Artificial Sequence
  chemically treated genomic DNA (Homo sapiens) CpG-island No: 24381
gtcgttaattcgtcgtataaagcgggtcgttgttttttttttttttcgcgttcgggtttagcgtggcgtttaattgttgatcggttttggaacgttttagtagcgcgtcgggggttttcggtgtttatttagcgggttgcgggttgcgtcgggggttttttggagagtcggttcgcgtcgttcgcgcgttcgcgttagagtagttatgtatcggcgtagttacgttttttagattcgtaaggagtagtacgagtacgtcgacgaggtttcgcgcgtcgtcgagttcgagcgttcggtcgacgagggttgggttggggtaacgagtttggcggcgttgtaggggttcggcgagcgcgtggtcgtttacgtttagcgggttcgcgttttcgagtagcgttatgtcgggtttcggaggtagttggatgttttttagcgtttgggcgagttggtcgggttcgaggacgttttcgttcgttaagtcgagagtaatcgttagcgcgttcgggatttggaggtcgagcgcgttcggttggagcgttagggtatcgaggcgtagcgcgcgttcgacgagtttcgaagtaagtaagcggcggttatcgggggaaatcgaggtagggcgtgggtcgtttcggcggcgcggggttgggagtacgttgttattatgtaggggtggagcgtcgtttttggttttttgtcgatcgatgattttatttttgtacgtaggtggtatatttttttaagttaagattgg

SEQ ID NO: 24382 - DNA, 751 bp, Artificial Sequence
  chemically treated genomic DNA (Homo sapiens) CpG-island No: 24382
ccaatcttaacttaaaaaaatataccacctacgtacaaaaataaaatcatcgatcgacaaaaaaccaaaaacgacgctccacccctacataataacaacgtactcccaaccccgcgccgccgaaacgacccacgccctacctcgatttcccccgataaccgccgcttacttacttcgaaactcgtcgaacgcgcgctacgcctcgataccctaacgctccaaccgaacgcgctcgacctccaaatcccgaacgcgctaacgattactctcgacttaacgaacgaaaacgtcctcgaacccgaccaactcgcccaaacgctaaaaaacatccaactacctccgaaacccgacataacgctactcgaaaacgcgaacccgctaaacgtaaacgaccacgcgctcgccgaacccctacaacgccgccaaactcgttaccccaacccaaccctcgtcgaccgaacgctcgaactcgacgacgcgcgaaacctcgtcgacgtactcgtactactccttacgaatctaaaaaacgtaactacgccgatacataactactctaacgcgaacgcgcgaacgacgcgaaccgactctccaaaaaacccccgacgcaacccgcaacccgctaaataaacaccgaaaacccccgacgcgctactaaaacgttccaaaaccgatcaacaattaaacgccacgctaaacccgaacgcgaaaaaaaaaaaaaacaacgacccgctttatacgacgaattaacgac

SEQ ID NO: 24383 - DNA, 751 bp, Artificial Sequence
  chemically treated genomic DNA (Homo sapiens) CpG-island No: 24383
ttagttttagtttaaggaaatgtgttatttgcgtgtagggatgaggttatcgatcgataggggattagagacggcgttttatttttgtatggtagtagcgtgtttttagtttcgcgtcgtcgggacggtttacgttttgtttcggtttttttcgatggtcgtcgtttatttgtttcggaattcgtcgagcgcgcgttgcgtttcggtgttttggcgttttagtcgggcgcgttcggtttttaggtttcggacgcgttggcggttgttttcgatttggcgggcgagggcgttttcgggttcggttagttcgtttaggcgttggaaggtatttagttgttttcggagttcggtatggcgttgttcgagggcgcgggttcgttggacgtgggcggttacgcgttcgtcgagtttttgtagcgtcgttaggttcgttgttttagtttagttttcgtcggtcgggcgttcgggttcggcggcgcgcgaagtttcgtcggcgtgttcgtattgttttttgcgggtttggaagacgtagttgcgtcggtatatggttgttttggcgcgggcgcgcgggcggcgcgagtcggttttttaggaggttttcggcgtagttcgtagttcgttaaataaatatcggaggttttcggcgcgttgttgggacgttttagagtcgattagtagttgggcgttacgttgggttcgggcgcgggagaagaaaagagtagcggttcgttttgtgcggcggattagcggt

SEQ ID NO: 24384 - DNA, 751 bp, Artificial Sequence
  chemically treated genomic DNA (Homo sapiens) CpG-island No: 24384
accgctaatccgccgcacaaaacgaaccgctactcttttcttctcccgcgcccgaacccaacgtaacgcccaactactaatcgactctaaaacgtcccaacaacgcgccgaaaacctccgatatttatttaacgaactacgaactacgccgaaaacctcctaaaaaaccgactcgcgccgcccgcgcgcccgcgccaaaacaaccatataccgacgcaactacgtcttccaaacccgcaaaaaacaatacgaacacgccgacgaaacttcgcgcgccgccgaacccgaacgcccgaccgacgaaaactaaactaaaacaacgaacctaacgacgctacaaaaactcgacgaacgcgtaaccgcccacgtccaacgaacccgcgccctcgaacaacgccataccgaactccgaaaacaactaaataccttccaacgcctaaacgaactaaccgaacccgaaaacgccctcgcccgccaaatcgaaaacaaccgccaacgcgtccgaaacctaaaaaccgaacgcgcccgactaaaacgccaaaacaccgaaacgcaacgcgcgctcgacgaattccgaaacaaataaacgacgaccatcgaaaaaaaccgaaacaaaacgtaaaccgtcccgacgacgcgaaactaaaaacacgctactaccatacaaaaataaaacgccgtctctaatcccctatcgatcgataacctcatccctacacgcaaataacacatttccttaaactaaaactaa

SEQ ID NO: 24385 - DNA, 1470 bp, Artificial Sequence
  chemically treated genomic DNA (Homo sapiens) CpG-island No: 24385
gtcgagataacgggaaggcggttagtcgtattaattagtagcgtttaagtttcgttagcgtagatttgttgttcgcggttaggtcgggtatttgtatgattttcgggttatttttttaaagtttaggtagagcgcgggtgggaagcgtgcgaggagagttgagttagggagttgcggggaggagaaggtaagaatgttttagagaaaaagtcggagagggttgtaaattggttggttcggttggcggggttcggcgcggcggaacgggagcgagaggggaacgaaggggaggggagcggaggaggttagcgttttaaagtttcgcgttacggcgtcgttgattagtggttgtttatttaatatgagcgtggtttaggttcggtcgcgtttcgcgcgtatgtttagcgtttagtagtcgggcgttaggcgtttttatggtcgttttcgggcggtttgttcggttcggggtttttttttttgttcgcgggtttttgcgttcggggataggggcgcgcgttcgggtttcggtttttcggcgtcgacgttcgacgttttttttagcggcgattgtgaggcgcggggtggttggggcggtttgggagtcgtttttcggtgtttgtttcgcgtttgtaggattattttggtatagtcgcgttcgttcgttgcgtcgttcggacggcggttagagaacggcgggttggttgggcggttgggcgtagtttattttttagcgggcgggcgggcggagggtggagggcgggttcgtttttttcgcgggtcgggaggcggggagatcgtggaggtcgggcggttgttgtttggttggtagtatcgcgggaggcgcgtcggatttgttagttcgtcgtcgttgtcgtcgtttcggttgttacggcgatcgcggaacgtcggggggcgggggcggggatattttgcgagcggtcgcggtttcgtttcgtcgtttttttgcgtcggacgcgcgttttaggtcggttagcgcgcgcggattttcggcgtaggcggggttcgatttttttggcgttcggttatttatattttttcggcgtcgcgcggggttcggtcggtgcgaggacgcgggggcggacggtttttcggaggcggtcgtttttttattgtgggagtgatggggtcgaaggaagagttttttcgggatcggggcgttgatttaagtttcggagtttgttaaggttgcgtttggagttcgcgtaggcgagacgcggcggggtagggagaaggcgttcggagcggttatttaggggcgttgtgcgttgcgtttgggcgttggtcggttttatcgatgtgaagcgcgcgggtggtaattaagttatcgttttcgtttatttttcgtagtgtggtcgcgtaatttggagcgtagttttttatttatcgataagaagaacgggtgcgattcgatttaagatagtaatagagtattaaaatagtagtttggaa

SEQ ID NO: 24386 - DNA, 1470 bp, Artificial Sequence
  chemically treated genomic DNA (Homo sapiens) CpG-island No: 24386
ttccaaactactattttaatactctattactatcttaaatcgaatcgcacccgttcttcttatcgataaataaaaaactacgctccaaattacgcgaccacactacgaaaaataaacgaaaacgataacttaattaccacccgcgcgcttcacatcgataaaaccgaccaacgcccaaacgcaacgcacaacgcccctaaataaccgctccgaacgccttctccctaccccgccgcgtctcgcctacgcgaactccaaacgcaaccttaacaaactccgaaacttaaatcaacgccccgatcccgaaaaaactcttccttcgaccccatcactcccacaataaaaaaacgaccgcctccgaaaaaccgtccgcccccgcgtcctcgcaccgaccgaaccccgcgcgacgccgaaaaaatataaataaccgaacgccaaaaaaatcgaaccccgcctacgccgaaaatccgcgcgcgctaaccgacctaaaacgcgcgtccgacgcaaaaaaacgacgaaacgaaaccgcgaccgctcgcaaaatatccccgcccccgccccccgacgttccgcgatcgccgtaacaaccgaaacgacgacaacgacgacgaactaacaaatccgacgcgcctcccgcgatactaccaaccaaacaacaaccgcccgacctccacgatctccccgcctcccgacccgcgaaaaaaacgaacccgccctccaccctccgcccgcccgcccgctaaaaaataaactacgcccaaccgcccaaccaacccgccgttctctaaccgccgtccgaacgacgcaacgaacgaacgcgactataccaaaataatcctacaaacgcgaaacaaacaccgaaaaacgactcccaaaccgccccaaccaccccgcgcctcacaatcgccgctaaaaaaaacgtcgaacgtcgacgccgaaaaaccgaaacccgaacgcgcgcccctatccccgaacgcaaaaacccgcgaacaaaaaaaaaaaccccgaaccgaacaaaccgcccgaaaacgaccataaaaacgcctaacgcccgactactaaacgctaaacatacgcgcgaaacgcgaccgaacctaaaccacgctcatattaaataaacaaccactaatcaacgacgccgtaacgcgaaactttaaaacgctaacctcctccgctcccctccccttcgttcccctctcgctcccgttccgccgcgccgaaccccgccaaccgaaccaaccaatttacaaccctctccgactttttctctaaaacattcttaccttctcctccccgcaactccctaactcaactctcctcgcacgcttcccacccgcgctctacctaaactttaaaaaaataacccgaaaatcatacaaatacccgacctaaccgcgaacaacaaatctacgctaacgaaacttaaacgctactaattaatacgactaaccgccttcccgttatctcgac

SEQ ID NO: 24387 - DNA, 1470 bp, Artificial Sequence
  chemically treated genomic DNA (Homo sapiens) CpG-island No: 24387
ttttaggttgttattttaatattttgttattattttaaatcgggtcgtattcgttttttttgtcggtgagtgaggggttgcgttttaagttgcgcgattatattgcggggagtaaacggagacggtgatttgattgttattcgcgcgttttatatcggtggggtcgattagcgtttaggcgtagcgtatagcgtttttaagtggtcgtttcgggcgttttttttttgtttcgtcgcgtttcgtttgcgcgggttttaagcgtagttttaataggtttcgaaatttgaattagcgtttcgatttcgagagggtttttttttcggttttattatttttataatggaagggcggtcgttttcggaaggtcgttcgttttcgcgttttcgtatcggtcgagtttcgcgcggcgtcgaagaggtgtgggtagtcgggcgttagaggggtcgggtttcgtttgcgtcggaagttcgcgcgcgttggtcggtttggagcgcgcgttcggcgtagaggggcggcggggcggggtcgcggtcgttcgtagggtgttttcgttttcgtttttcggcgtttcgcggtcgtcgtgataatcggagcggcggtaacggcggcgggttagtaagttcggcgcgtttttcgcggtattgttagttaggtagtagtcgttcggtttttacgattttttcgtttttcggttcgcgggagggacgagttcgttttttatttttcgttcgttcgttcgttggagagtgagttgcgtttagtcgtttagttagttcgtcgttttttggtcgtcgttcgggcggcgtagcgagcgggcgcgattatgttaagatggttttgtaggcgcggaataagtatcgggaggcggtttttaagtcgttttagttatttcgcgttttatagtcgtcgttgaggggggcgtcggacgtcggcgtcggggagtcggggttcgagcgcgcgtttttgttttcgggcgtaagggttcgcgggtaggaagagggatttcgagtcggatagatcgttcgggggcggttatgggggcgtttggcgttcggttgttgggcgttgggtatgcgcgcggggcgcggtcggatttggattacgtttatgttaggtgagtagttattagttagcgacgtcgtgacgcggaattttgaggcgttggtttttttcgtttttttttttttcgtttttttttcgttttcgtttcgtcgcgtcgagtttcgttagtcggattagttagtttgtagtttttttcgattttttttttgggatatttttattttttttttttcgtaattttttggtttagtttttttcgtacgttttttattcgcgttttgtttgggttttaaaagaatggttcggggattatataagtgttcggtttggtcgcgggtagtaggtttgcgttaacgagatttgagcgttgttgattggtacgattggtcgttttttcgttatttcggt

SEQ ID NO: 24388 - DNA, 1470 bp, Artificial Sequence
  chemically treated genomic DNA (Homo sapiens) CpG-island No: 24388
accgaaataacgaaaaaacgaccaatcgtaccaatcaacaacgctcaaatctcgttaacgcaaacctactacccgcgaccaaaccgaacacttatataatccccgaaccattcttttaaaacccaaacaaaacgcgaataaaaaacgtacgaaaaaaactaaaccaaaaaattacgaaaaaaaaaaaataaaaatatcccaaaaaaaaaatcgaaaaaaactacaaactaactaatccgactaacgaaactcgacgcgacgaaacgaaaacgaaaaaaaaacgaaaaaaaaaaaaacgaaaaaaaccaacgcctcaaaattccgcgtcacgacgtcgctaactaataactactcacctaacataaacgtaatccaaatccgaccgcgccccgcgcgcatacccaacgcccaacaaccgaacgccaaacgcccccataaccgcccccgaacgatctatccgactcgaaatccctcttcctacccgcgaacccttacgcccgaaaacaaaaacgcgcgctcgaaccccgactccccgacgccgacgtccgacgcccccctcaacgacgactataaaacgcgaaataactaaaacgacttaaaaaccgcctcccgatacttattccgcgcctacaaaaccatcttaacataatcgcgcccgctcgctacgccgcccgaacgacgaccaaaaaacgacgaactaactaaacgactaaacgcaactcactctccaacgaacgaacgaacgaaaaataaaaaacgaactcgtccctcccgcgaaccgaaaaacgaaaaaatcgtaaaaaccgaacgactactacctaactaacaataccgcgaaaaacgcgccgaacttactaacccgccgccgttaccgccgctccgattatcacgacgaccgcgaaacgccgaaaaacgaaaacgaaaacaccctacgaacgaccgcgaccccgccccgccgcccctctacgccgaacgcgcgctccaaaccgaccaacgcgcgcgaacttccgacgcaaacgaaacccgacccctctaacgcccgactacccacacctcttcgacgccgcgcgaaactcgaccgatacgaaaacgcgaaaacgaacgaccttccgaaaacgaccgcccttccattataaaaataataaaaccgaaaaaaaaaccctctcgaaatcgaaacgctaattcaaatttcgaaacctattaaaactacgcttaaaacccgcgcaaacgaaacgcgacgaaacaaaaaaaaaacgcccgaaacgaccacttaaaaacgctatacgctacgcctaaacgctaatcgaccccaccgatataaaacgcgcgaataacaatcaaatcaccgtctccgtttactccccgcaatataatcgcgcaacttaaaacgcaacccctcactcaccgacaaaaaaaacgaatacgacccgatttaaaataataacaaaatattaaaataacaacctaaaa

SEQ ID NO: 24389 - DNA, 715 bp, Artificial Sequence
  chemically treated genomic DNA (Homo sapiens) CpG-island No: 24389
tagggtttcgtagtaaggcgttaaagttgggggaagcgtatttttgttttttcgcgagtacgacgcggtgttttttagttttttttcggtttttttttttcgttttttcggttcgcgagcgttcgggttttttttagtggttcgcggtaggtggcgttgtttgcggcgtcgtagcggttcgggttgtagtagagacgatttttcggcggttgtgcggttcggtttttcggcggtagcgagtgttacgttttaagtgttacgcggaggattagagtaggcggtgcgttgggggcgggagtagcgcggagttcggttcggttatatcgatcgttcgtcgttatgggtttttcgtaaagcgtcgagatttcgggcgggggtatcgagggttattacgttttgcgggtaagggtttcgacggcggtcggggagttgcgggttggaggcggggtcggtcgcggggaggcggaggttttatgggtttttttacggggtagttaggttcgatttcgcgaaggagcggcggtcgcggcgttgttttggtcgaggttggtttcggaggtcgttcgtattttattttcgcggagcgttttgggtacggggttcgcggttgtaggaggacgggttggagttggaggcggttgtcggcgattcggttagggggcggttttgggaaggggggataattttgtttttttttcgtacggttttttttttt

SEQ ID NO: 24390 - DNA, 715 bp, Artificial Sequence
  chemically treated genomic DNA (Homo sapiens) CpG-island No: 24390
aaaaaaaaaaaccgtacgaaaaaaaaacaaaattatccccccttcccaaaaccgccccctaaccgaatcgccgacaaccgcctccaactccaacccgtcctcctacaaccgcgaaccccgtacccaaaacgctccgcgaaaataaaatacgaacgacctccgaaaccaacctcgaccaaaacaacgccgcgaccgccgctccttcgcgaaatcgaacctaactaccccgtaaaaaaacccataaaacctccgcctccccgcgaccgaccccgcctccaacccgcaactccccgaccgccgtcgaaacccttacccgcaaaacgtaataaccctcgatacccccgcccgaaatctcgacgctttacgaaaaacccataacgacgaacgatcgatataaccgaaccgaactccgcgctactcccgcccccaacgcaccgcctactctaatcctccgcgtaacacttaaaacgtaacactcgctaccgccgaaaaaccgaaccgcacaaccgccgaaaaatcgtctctactacaacccgaaccgctacgacgccgcaaacaacgccacctaccgcgaaccactaaaaaaaacccgaacgctcgcgaaccgaaaaaacgaaaaaaaaaaaccgaaaaaaaactaaaaaacaccgcgtcgtactcgcgaaaaaacaaaaatacgcttcccccaactttaacgccttactacgaaacccta

SEQ ID NO: 24391 - DNA, 715 bp, Artificial Sequence
  chemically treated genomic DNA (Homo sapiens) CpG-island No: 24391
gagagagaaggtcgtgcggaaaaagagtaaggttgttttttttttttagggtcgttttttggtcgagtcgtcggtagtcgtttttagttttagttcgtttttttatagtcgcggatttcgtgtttagggcgtttcgcggaggtgggatgcgagcggttttcggaattagtttcgattaaggtagcgtcgcgatcgtcgttttttcgcgggatcgggtttggttgtttcgtgaaggagtttatggggttttcgttttttcgcggtcggtttcgtttttagttcgtagtttttcggtcgtcgtcggagtttttattcgtagaacgtggtagttttcggtgttttcgttcgggatttcgacgttttgcgaggagtttatggcggcgggcgatcggtgtggtcgagtcgggtttcgcgttgttttcgtttttagcgtatcgtttgttttaatttttcgcgtagtatttgggacgtggtattcgttgtcgtcggagagtcgggtcgtatagtcgtcgggagatcgtttttgttgtagttcgggtcgttgcgacgtcgtagatagcgttatttgtcgcgagttattggaaggggttcgagcgttcgcgggtcgggagggcggagagggagggtcggaggaggattgggaggtatcgcgtcgtgttcgcgagagaatagaaatgcgttttttttagttttggcgttttgttacggggttttg

SEQ ID NO: 24392 - DNA, 715 bp, Artificial Sequence
  chemically treated genomic DNA (Homo sapiens) CpG-island No: 24392
caaaaccccgtaacaaaacgccaaaactaaaaaaaacgcatttctattctctcgcgaacacgacgcgatacctcccaatcctcctccgaccctccctctccgccctcccgacccgcgaacgctcgaaccccttccaataactcgcgacaaataacgctatctacgacgtcgcaacgacccgaactacaacaaaaacgatctcccgacgactatacgacccgactctccgacgacaacgaataccacgtcccaaatactacgcgaaaaattaaaacaaacgatacgctaaaaacgaaaacaacgcgaaacccgactcgaccacaccgatcgcccgccgccataaactcctcgcaaaacgtcgaaatcccgaacgaaaacaccgaaaactaccacgttctacgaataaaaactccgacgacgaccgaaaaactacgaactaaaaacgaaaccgaccgcgaaaaaacgaaaaccccataaactccttcacgaaacaaccaaacccgatcccgcgaaaaaacgacgatcgcgacgctaccttaatcgaaactaattccgaaaaccgctcgcatcccacctccgcgaaacgccctaaacacgaaatccgcgactataaaaaaacgaactaaaactaaaaacgactaccgacgactcgaccaaaaaacgaccctaaaaaaaaaaaacaaccttactctttttccgcacgaccttctctctc

SEQ ID NO: 24393 - DNA, 501 bp, Artificial Sequence
  chemically treated genomic DNA (Homo sapiens) CpG-island No: 24393
gttatgttcggggcgttcgtaggttcgcggcggagttcgggttgcgggagttatttgtcgggaaagtttttagttttttagcgcggttttttatatttagggtcgggtttcggggcgaggttagttcggcgtttcgcggttgtttttttttcggttttcgaggcggtcgtcgttttagtagttgttatagtaaagttttcgtttcggttcgttttttcgttttgttcggtttatatcggggttttattggtagcgcgaattttcgtttttgcgcgtgttttcgaaggtatttttttttcgcgcgttcgtttcggtcgcgtttttcgcgttttttttcgtttcgggttgcggcggatttagggatcggttggagcgcggagcgcgaatttttcgcggggtttgggcgcgaggtttttttgtttcgtttttcggcgttaggttcgggtttgaagtattttattatttttttgggtatcgggtttttcgggttgcgtttaggtt

SEQ ID NO: 24394 - DNA, 501 bp, Artificial Sequence
  chemically treated genomic DNA (Homo sapiens) CpG-island No: 24394
aacctaaacgcaacccgaaaaacccgatacccaaaaaaataataaaatacttcaaacccgaacctaacgccgaaaaacgaaacaaaaaaacctcgcgcccaaaccccgcgaaaaattcgcgctccgcgctccaaccgatccctaaatccgccgcaacccgaaacgaaaaaaaacgcgaaaaacgcgaccgaaacgaacgcgcgaaaaaaaaataccttcgaaaacacgcgcaaaaacgaaaattcgcgctaccaataaaaccccgatataaaccgaacaaaacgaaaaaacgaaccgaaacgaaaactttactataacaactactaaaacgacgaccgcctcgaaaaccgaaaaaaaaacaaccgcgaaacgccgaactaacctcgccccgaaacccgaccctaaatataaaaaaccgcgctaaaaaactaaaaactttcccgacaaataactcccgcaacccgaactccgccgcgaacctacgaacgccccgaacataac

SEQ ID NO: 24395 - DNA, 501 bp, Artificial Sequence
  chemically treated genomic DNA (Homo sapiens) CpG-island No: 24395
ggtttaggcgtagttcgggggattcggtgtttagagggatggtagggtgttttaggttcggatttggcgtcgagaggcgggataaggggatttcgcgtttaagtttcgcggaaagttcgcgtttcgcgttttagtcggtttttggattcgtcgtagttcggggcggggaggggcgcgggaggcgcggtcggggcgggcgcgcgagaggaaggtgttttcgggaatacgcgtaagggcggggattcgcgttgttaatgaggtttcggtgtgggtcgagtaaggcggggggacgggtcggagcggaggttttgttgtggtagttgttggagcggcggtcgtttcgggagtcggaggagaggtagtcgcggagcgtcgagttggtttcgtttcgaggttcggttttgggtgtggggaatcgcgttgaggagttggaaattttttcggtaggtaattttcgtagttcggatttcgtcgcgggtttgcgagcgtttcgggtatggt

SEQ ID NO: 24396 - DNA, 501 bp, Artificial Sequence
  chemically treated genomic DNA (Homo sapiens) CpG-island No: 24396
accatacccgaaacgctcgcaaacccgcgacgaaatccgaactacgaaaattacctaccgaaaaaatttccaactcctcaacgcgattccccacacccaaaaccgaacctcgaaacgaaaccaactcgacgctccgcgactacctctcctccgactcccgaaacgaccgccgctccaacaactaccacaacaaaacctccgctccgacccgtccccccgccttactcgacccacaccgaaacctcattaacaacgcgaatccccgcccttacgcgtattcccgaaaacaccttcctctcgcgcgcccgccccgaccgcgcctcccgcgcccctccccgccccgaactacgacgaatccaaaaaccgactaaaacgcgaaacgcgaactttccgcgaaacttaaacgcgaaatccccttatcccgcctctcgacgccaaatccgaacctaaaacaccctaccatccctctaaacaccgaatcccccgaactacgcctaaacc

SEQ ID NO: 24397 - DNA, 596 bp, Artificial Sequence
  chemically treated genomic DNA (Homo sapiens) CpG-island No: 24397
gtaacgttcgtttttttcgtttgtttttacgaggtttaagtcgtagttacggcgggagtgtcggggtcgggattagagtcgttgcgcgtttttaggtcggttgcgcggggtacggagcgggtcgttttttagtagtaggagtttattcgcggattttaggcggcggttttatttcgtcggggtagttgttttcgagttcgtagcggtttttgagattttttattattaaattttgtttcggtggtttgacgattttcggttttatagtatatagtaatcgtattagttttttcgggaatcgcgtttattaaattcgcggcgttacgcggtcgtagtgcgttacgacgtgttagatttcgttttttcgaggtacgtacggcggtagggaaagggcggggcggggcgattcggagattgtagttcggtttgttagcgcgttttttaagtttttcgtgttagtattatatatttcgtaattgagtagtattgtattttttcgcgatagttttgtttcggttgtttgggtgttacgggttgaggggtatcgaggtttcgtatttgtttgtagcgtttcgttttagttttatttaatttgt

SEQ ID NO: 24398 - DNA, 596 bp, Artificial Sequence
  chemically treated genomic DNA (Homo sapiens) CpG-island No: 24398
acaaattaaataaaactaaaacgaaacgctacaaacaaatacgaaacctcgatacccctcaacccgtaacacccaaacaaccgaaacaaaactatcgcgaaaaaatacaatactactcaattacgaaatatataatactaacacgaaaaacttaaaaaacgcgctaacaaaccgaactacaatctccgaatcgccccgccccgccctttccctaccgccgtacgtacctcgaaaaaacgaaatctaacacgtcgtaacgcactacgaccgcgtaacgccgcgaatttaataaacgcgattcccgaaaaaactaatacgattactatatactataaaaccgaaaatcgtcaaaccaccgaaacaaaatttaataataaaaaatctcaaaaaccgctacgaactcgaaaacaactaccccgacgaaataaaaccgccgcctaaaatccgcgaataaactcctactactaaaaaacgacccgctccgtaccccgcgcaaccgacctaaaaacgcgcaacgactctaatcccgaccccgacactcccgccgtaactacgacttaaacctcgtaaaaacaaacgaaaaaaacgaacgttac

SEQ ID NO: 24399 - DNA, 596 bp, Artificial Sequence
  chemically treated genomic DNA (Homo sapiens) CpG-island No: 24399
ataggttaaatggagttggagcggagcgttgtaggtaggtgcggggtttcggtgttttttaattcgtggtatttaggtagtcggggtaggattatcgcggggagatgtaatattatttagttacgaggtgtgtagtgttagtacgagaaatttggaggacgcgttgataagtcgggttgtagttttcgggtcgtttcgtttcgttttttttttgtcgtcgtgcgtgtttcgggggggcggggtttggtacgtcgtgacgtattgcggtcgcgtagcgtcgcgggtttgatgaacgcggttttcggggagattggtacggttgttgtgtgttatggagtcgagggtcgttaagttatcggggtaggatttagtagtggagagttttaaaagtcgttacggattcgggggtagttgtttcgacgaggtgaagtcgtcgtttgaggttcgcgggtgggtttttgttgttggggggcggttcgtttcgtgtttcgcgtagtcggtttgggggcgcgtagcggttttggtttcggtttcggtattttcgtcgtggttgcggtttgggtttcgtggaagtaggcgggaggggcgggcgttgt

SEQ ID NO: 24400 - DNA, 596 bp, Artificial Sequence
  chemically treated genomic DNA (Homo sapiens) CpG-island No: 24400
acaacgcccgcccctcccgcctacttccacgaaacccaaaccgcaaccacgacgaaaataccgaaaccgaaaccaaaaccgctacgcgcccccaaaccgactacgcgaaacacgaaacgaaccgccccccaacaacaaaaacccacccgcgaacctcaaacgacgacttcacctcgtcgaaacaactacccccgaatccgtaacgacttttaaaactctccactactaaatcctaccccgataacttaacgaccctcgactccataacacacaacaaccgtaccaatctccccgaaaaccgcgttcatcaaacccgcgacgctacgcgaccgcaatacgtcacgacgtaccaaaccccgcccccccgaaacacgcacgacgacaaaaaaaaaacgaaacgaaacgacccgaaaactacaacccgacttatcaacgcgtcctccaaatttctcgtactaacactacacacctcgtaactaaataatattacatctccccgcgataatcctaccccgactacctaaataccacgaattaaaaaacaccgaaaccccgcacctacctacaacgctccgctccaactccatttaacctat

SEQ ID NO: 24401 - DNA, 814 bp, Artificial Sequence
  chemically treated genomic DNA (Homo sapiens) CpG-island No: 24401
aagaaattcgtcgatatagtattcgggtgtttaagttttcgagaattaggtcgcgcgggtattacggggtgcgcgatcggttagaaagttcgggttaggggtgtttaggagcgagtatcgtcgggaataagcgtcgggaataagtcgggagaaagaggaagcgtcggcgttaaaggtttttcgtttatcgttgtttttttaggattttttatgcgtttgtaaggttacgtcgtttataggattgcgttagcggtcggcgttttaatagagcgcgttagggagtagcgtcgtcgggagttatgacgtttgagtagcgcgagtcgtcgttcggttaggtcgaggtcgtcggttttttcgagatttatttatttgtcgaggcgacggggtggagttttgtatcgaggcgatgtatcgttttacgttagttttgttgcgttttatcgcgtcgttaatttggttttcgaggcgcgtgagattagcgtttaggttcgtagtagtcgttatttttaagaggaaagcgtttgtaaattagtgacgtagcgtcgtagtcggcggaggattattgtgacgaatttgcggcgtagtcggcggaggattattgtgacgaatttgcgtattgcgttagtagtgtgcgttacgttggcgacgtcggcgttcgagttgtattcggttaggtttttggtagcgtcgcgtgttttgagggtgttttggtaagtcgggattagatttcggtcgttagtgtttatagtttagggcgtagatttttagtagataataatttgcgtgatgggtttttaagcgttttggttatttg

SEQ ID NO: 24402 - DNA, 814 bp, Artificial Sequence
  chemically treated genomic DNA (Homo sapiens) CpG-island No: 24402
caaataaccaaaacgcttaaaaacccatcacgcaaattattatctactaaaaatctacgccctaaactataaacactaacgaccgaaatctaatcccgacttaccaaaacaccctcaaaacacgcgacgctaccaaaaacctaaccgaatacaactcgaacgccgacgtcgccaacgtaacgcacactactaacgcaatacgcaaattcgtcacaataatcctccgccgactacgccgcaaattcgtcacaataatcctccgccgactacgacgctacgtcactaatttacaaacgctttcctcttaaaaataacgactactacgaacctaaacgctaatctcacgcgcctcgaaaaccaaattaacgacgcgataaaacgcaacaaaactaacgtaaaacgatacatcgcctcgatacaaaactccaccccgtcgcctcgacaaataaataaatctcgaaaaaaccgacgacctcgacctaaccgaacgacgactcgcgctactcaaacgtcataactcccgacgacgctactccctaacgcgctctattaaaacgccgaccgctaacgcaatcctataaacgacgtaaccttacaaacgcataaaaaatcctaaaaaaacaacgataaacgaaaaacctttaacgccgacgcttcctctttctcccgacttattcccgacgcttattcccgacgatactcgctcctaaacacccctaacccgaactttctaaccgatcgcgcaccccgtaatacccgcgcgacctaattctcgaaaacttaaacacccgaatactatatcgacgaatttctt

SEQ ID NO: 24403 - DNA, 814 bp, Artificial Sequence
  chemically treated genomic DNA (Homo sapiens) CpG-island No: 24403
taagtgattaaaacgtttaagagtttattacgtaaattgttatttgttggaaatttacgttttaggttgtggatattggcggtcgaaatttgatttcggtttgttaagatatttttagagtacgcggcgttgttaagagtttggtcgagtgtagttcgagcgtcgacgtcgttaacgtggcgtatattgttgacgtagtacgtaagttcgttatagtggtttttcgtcggttgcgtcgtaagttcgttatagtggtttttcgtcggttacggcgttgcgttattggtttgtaggcgttttttttttggaagtggcgattgttgcgggtttgagcgttggttttacgcgtttcgggagttaggttggcggcgcgatgaggcgtagtaaggttgacgtggagcggtatatcgtttcggtgtagggttttatttcgtcgtttcgataggtgagtgggtttcgaagagatcgacggtttcgatttggtcgggcggcggttcgcgttgtttaggcgttatggttttcgacggcgttgttttttggcgcgttttgttgaggcgtcggtcgttggcgtagttttgtgggcggcgtggttttgtaagcgtatgaagagttttggggggatagcggtgggcgggagatttttggcgtcggcgttttttttttttttcggtttgttttcgacgtttgttttcgacggtgttcgtttttgggtatttttggttcgggttttttggtcgatcgcgtatttcgtagtattcgcgcggtttagttttcgggggtttgggtattcgggtgttgtatcggcgggtttttt

SEQ ID NO: 24404 - DNA, 814 bp, Artificial Sequence
  chemically treated genomic DNA (Homo sapiens) CpG-island No: 24404
aaaaaacccgccgatacaacacccgaatacccaaacccccgaaaactaaaccgcgcgaatactacgaaatacgcgatcgaccaaaaaacccgaaccaaaaatacccaaaaacgaacaccgtcgaaaacaaacgtcgaaaacaaaccgaaaaaaaaaaaaaacgccgacgccaaaaatctcccgcccaccgctatccccccaaaactcttcatacgcttacaaaaccacgccgcccacaaaactacgccaacgaccgacgcctcaacaaaacgcgccaaaaaacaacgccgtcgaaaaccataacgcctaaacaacgcgaaccgccgcccgaccaaatcgaaaccgtcgatctcttcgaaacccactcacctatcgaaacgacgaaataaaaccctacaccgaaacgatataccgctccacgtcaaccttactacgcctcatcgcgccgccaacctaactcccgaaacgcgtaaaaccaacgctcaaacccgcaacaatcgccacttccaaaaaaaaaacgcctacaaaccaataacgcaacgccgtaaccgacgaaaaaccactataacgaacttacgacgcaaccgacgaaaaaccactataacgaacttacgtactacgtcaacaatatacgccacgttaacgacgtcgacgctcgaactacactcgaccaaactcttaacaacgccgcgtactctaaaaatatcttaacaaaccgaaatcaaatttcgaccgccaatatccacaacctaaaacgtaaatttccaacaaataacaatttacgtaataaactcttaaacgttttaatcactta

SEQ ID NO: 24405 - DNA, 927 bp, Artificial Sequence
  chemically treated genomic DNA (Homo sapiens) CpG-island No: 24405
ttcgttgcggatttgtgtttttttcgtcgtcgcggttttttgttcgtcgcgttttttgttatatattcgtcgtcgcgcgtttttgtttttttgtcgtcgcggttttttgtttttattttgtttcgggggggggttcgtcgcggttttttttttttattcgtcgttgttttttttgcgtttttatcgtcgtggttttttgttttatcgtcgtcgcggttttttgtttttatttcgtttcggttttttgttcgtcgcggttttttatttttcgtcgtcgcgcgtttttgttcgtcgcggttttgtgtttttttcgtcgtcgcggttttttgttcgtcgcgttttttgttatatatttttcgtcgcggttttttttttttttgtcgtcgcggttttttgttttatcgtcgatatagttttttgtatattcgtcgttttggttttttgtcgtcgcggttttttgttttttcgttgtcgcggttttttgttttttcgttatcgtcgtttttttttgttttatcgtcgtcgtggttttttgtttatcgcggttttttgttatcgcggttttttattcgttacggttttttattcgtcgcggttttttgcgtttcgttgttacggttttttgtttttttgtcgtagcgattttttcgtcgtcgcggtattttgttttcgtcgtcgtggttttttgtcgttgtcgtcgtcgttttttgttttcgtcgtagtggttttttgttttcgttatcgcggttttttgttgtcgcgattttttgtttcggttatcgtcgttttttgttatcgcgattttttgttttcgtcgtcgaggatttttgttttcgtcgttacggttttgagggcgggagcggtagattcggttgttagttttattggcgttttggtaagggtagcgttgaggggtgtttttggttt

SEQ ID NO: 24406 - DNA, 927 bp, Artificial Sequence
  chemically treated genomic DNA (Homo sapiens) CpG-island No: 24406
aaaccaaaaacacccctcaacgctacccttaccaaaacgccaataaaactaacaaccgaatctaccgctcccgccctcaaaaccgtaacgacgaaaacaaaaatcctcgacgacgaaaacaaaaaatcgcgataacaaaaaacgacgataaccgaaacaaaaaatcgcgacaacaaaaaaccgcgataacgaaaacaaaaaaccactacgacgaaaacaaaaaacgacgacgacaacgacaaaaaaccacgacgacgaaaacaaaataccgcgacgacgaaaaaatcgctacgacaaaaaaacaaaaaaccgtaacaacgaaacgcaaaaaaccgcgacgaataaaaaaccgtaacgaataaaaaaccgcgataacaaaaaaccgcgataaacaaaaaaccacgacgacgataaaacaaaaaaaaacgacgataacgaaaaaacaaaaaaccgcgacaacgaaaaaacaaaaaaccgcgacgacaaaaaaccaaaacgacgaatatacaaaaaactatatcgacgataaaacaaaaaaccgcgacgacaaaaaaaaaaaaaaccgcgacgaaaaatatataacaaaaaacgcgacgaacaaaaaaccgcgacgacgaaaaaaacacaaaaccgcgacgaacaaaaacgcgcgacgacgaaaaataaaaaaccgcgacgaacaaaaaaccgaaacgaaataaaaacaaaaaaccgcgacgacgataaaacaaaaaaccacgacgataaaaacgcaaaaaaaacaacgacgaataaaaaaaaaaaaccgcgacgaacccccccccgaaacaaaataaaaacaaaaaaccgcgacgacaaaaaaacaaaaacgcgcgacgacgaatatataacaaaaaacgcgacgaacaaaaaaccgcgacgacgaaaaaaacacaaatccgcaacgaa

SEQ ID NO: 24407 - DNA, 927 bp, Artificial Sequence
  chemically treated genomic DNA (Homo sapiens) CpG-island No: 24407
ggattaggagtattttttagcgttgtttttgttaggacgttagtagagttggtagtcgagtttgtcgttttcgtttttagagtcgtggcggcggggataaaaattttcggcggcgggggtaaaaagtcgcggtgataaaaagcggcggtgatcggggtaaaaagtcgcggtagtaaaaagtcgcggtggcggggataaaaagttattgcggcgggggtaaaaagcggcggcgatagcggtaaaaagttacggcggcgggggtaaaatgtcgcggcggcgaaaaagtcgttgcgataggggggtaaaaagtcgtgatagcggggcgtaaaaagtcgcggcgggtaaaaggtcgtggcgagtaaaaagtcgcgatggtaaaaagtcgcggtgggtaaaaagttacggcggcggtggggtaaaaaggagcggcggtggcggaggggtaaaaagtcgcggtagcgagggggtagaaagtcgcggcggtaaaaagttaaggcggcgagtgtgtaaaaagttgtgtcggcggtggggtaaaaagtcgcggcggtagagggggaaaaagtcgcggcggggggtgtgtggtagaaagcgcggcgggtaaaaagtcgcggcggcgaggggggtataaagtcgcggcgggtaaaaacgcgcggcggcggggggtaaaaagtcgcggcgggtaagaagtcgaggcggggtgggagtaaaaagtcgcggcggcggtggggtaaaaagttacggcggtgggggcgtaaaaagggtagcggcgggtgggggaagaaagtcgcggcgagttttttttcgaggtaaggtgggggtaaaaagtcgcggcggtagaggagtaaaaacgcgcggcggcgggtgtgtggtagaaagcgcggcgggtaaaaagtcgcggcggcgaggggggtataaattcgtagcggg

SEQ ID NO: 24408 - DNA, 927 bp, Artificial Sequence
  chemically treated genomic DNA (Homo sapiens) CpG-island No: 24408
cccgctacgaatttatacccccctcgccgccgcgactttttacccgccgcgctttctaccacacacccgccgccgcgcgtttttactcctctaccgccgcgactttttacccccaccttacctcgaaaaaaaactcgccgcgactttcttcccccacccgccgctaccctttttacgcccccaccgccgtaactttttaccccaccgccgccgcgactttttactcccaccccgcctcgacttcttacccgccgcgactttttaccccccgccgccgcgcgtttttacccgccgcgactttatacccccctcgccgccgcgactttttacccgccgcgctttctaccacacaccccccgccgcgactttttccccctctaccgccgcgactttttaccccaccgccgacacaactttttacacactcgccgccttaactttttaccgccgcgactttctaccccctcgctaccgcgactttttacccctccgccaccgccgctcctttttaccccaccgccgccgtaactttttacccaccgcgactttttaccatcgcgactttttactcgccacgaccttttacccgccgcgactttttacgccccgctatcacgactttttacccccctatcgcaacgactttttcgccgccgcgacattttacccccgccgccgtaactttttaccgctatcgccgccgctttttacccccgccgcaataactttttatccccgccaccgcgactttttactaccgcgactttttaccccgatcaccgccgctttttatcaccgcgactttttacccccgccgccgaaaatttttatccccgccgccacgactctaaaaacgaaaacgacaaactcgactaccaactctactaacgtcctaacaaaaacaacgctaaaaaatactcctaatcc

SEQ ID NO: 24409 - DNA, 870 bp, Artificial Sequence
  chemically treated genomic DNA (Homo sapiens) CpG-island No: 24409
gggggcgtttcgggcgcggagggggcgtgggtatttttttagcgtcgtttttgtttttggtgattggagtcgtttgtacgttcgggttttcgatttttcggttgggtcgtcgttcgggcggagtttacgcgaaggcgacgttttttaaagtttcgcggtcgggtgggggcggggagaggcgtagttacgtttaggttgttttcgttcgttttaatagcgcgtacgcggttatcgagttggaggaggcggcgggcgtgagatcgggaatgtttggggttttcgtttttttcgtagttatttagtattcggtgtacgtttcgcgaggttagcggttgttttttttcggggttattgttgttagtgtcgtgagtatcgtttagttattgtttttgtgttttcgttagtcgtgtcgagtcgcgtatttagaggcgagggcgcgtatggggagttttcgttgatgttgttcgttgtcgcgtcgtttttcgaggttgcgtttcggggagttcggtttttcgagcgtttcggtttggtcggcgtttcggatttgagtgttttttatggaggcgttcgggtttttaggcggtcgcggcggagagtaattttcgagaggtgacggaggatgtcgtcgattggacgttcgcgttttgttttagtttcgaggcgcggtcgtcggaggcgtttgtttatcgtttgtaggattgcgacgcgttggttattatgggtgagtgagtgcgcgcgggaattcggtttataggggttcgcggcgcggtcgggatttcgtagtaggataaagggtttcgggtgttcgttttttggggagggttttgtagcgggattttcgcgcggggttgtttttgcgttttgggtttt

SEQ ID NO: 24410 - DNA, 870 bp, Artificial Sequence
  chemically treated genomic DNA (Homo sapiens) CpG-island No: 24410
aaaacccaaaacgcaaaaacaaccccgcgcgaaaatcccgctacaaaaccctccccaaaaaacgaacacccgaaaccctttatcctactacgaaatcccgaccgcgccgcgaacccctataaaccgaattcccgcgcgcactcactcacccataataaccaacgcgtcgcaatcctacaaacgataaacaaacgcctccgacgaccgcgcctcgaaactaaaacaaaacgcgaacgtccaatcgacgacatcctccgtcacctctcgaaaattactctccgccgcgaccgcctaaaaacccgaacgcctccataaaaaacactcaaatccgaaacgccgaccaaaccgaaacgctcgaaaaaccgaactccccgaaacgcaacctcgaaaaacgacgcgacaacgaacaacatcaacgaaaactccccatacgcgccctcgcctctaaatacgcgactcgacacgactaacgaaaacacaaaaacaataactaaacgatactcacgacactaacaacaataaccccgaaaaaaaacaaccgctaacctcgcgaaacgtacaccgaatactaaataactacgaaaaaaacgaaaaccccaaacattcccgatctcacgcccgccgcctcctccaactcgataaccgcgtacgcgctattaaaacgaacgaaaacaacctaaacgtaactacgcctctccccgcccccacccgaccgcgaaactttaaaaaacgtcgccttcgcgtaaactccgcccgaacgacgacccaaccgaaaaatcgaaaacccgaacgtacaaacgactccaatcaccaaaaacaaaaacgacgctaaaaaaatacccacgccccctccgcgcccgaaacgccccc

SEQ ID NO: 24411 - DNA, 870 bp, Artificial Sequence
  chemically treated genomic DNA (Homo sapiens) CpG-island No: 24411
gagatttagggcgtaagggtagtttcgcgcggggatttcgttgtagggttttttttaggaagcgggtattcggggttttttgttttattacggggtttcggtcgcgtcgcgagtttttgtgggtcgagttttcgcgcgtatttatttatttatggtgattagcgcgtcgtagttttgtaggcggtaggtaggcgttttcggcgatcgcgtttcggggttggggtagagcgcgggcgtttagtcggcggtatttttcgttatttttcgggagttgtttttcgtcgcggtcgtttgggggttcgggcgtttttatggggagtatttaggttcggggcgtcggttaggtcggagcgttcgggaagtcggatttttcgggacgtagtttcggagggcggcgcggtagcgggtagtattaacggaggttttttatgcgcgttttcgtttttgggtgcgcggttcggtacggttgacggagatatagagataatggttgggcggtgtttacggtattagtagtaatagtttcgggagggagtagtcgttggtttcgcggggcgtgtatcgagtgttggatggttgcgaggaaggcgggggttttaagtattttcggttttacgttcgtcgttttttttagttcggtggtcgcgtgcgcgttgttggggcgggcggaagtagtttgggcgtgattacgttttttttcgtttttattcggtcgcggggttttggggggcgtcgttttcgcgtgggtttcgttcgggcggcgatttagtcgaggagtcggagattcgggcgtgtaggcgattttagttattaagggtaggggcggcgttggggaggtgtttacgtttttttcgcgttcggggcgttttt

SEQ ID NO: 24412 - DNA, 870 bp, Artificial Sequence
  chemically treated genomic DNA (Homo sapiens) CpG-island No: 24412
aaaaacgccccgaacgcgaaaaaaacgtaaacacctccccaacgccgcccctacccttaataactaaaatcgcctacacgcccgaatctccgactcctcgactaaatcgccgcccgaacgaaacccacgcgaaaacgacgccccccaaaaccccgcgaccgaataaaaacgaaaaaaaacgtaatcacgcccaaactacttccgcccgccccaacaacgcgcacgcgaccaccgaactaaaaaaaacgacgaacgtaaaaccgaaaatacttaaaacccccgccttcctcgcaaccatccaacactcgatacacgccccgcgaaaccaacgactactccctcccgaaactattactactaataccgtaaacaccgcccaaccattatctctatatctccgtcaaccgtaccgaaccgcgcacccaaaaacgaaaacgcgcataaaaaacctccgttaatactacccgctaccgcgccgccctccgaaactacgtcccgaaaaatccgacttcccgaacgctccgacctaaccgacgccccgaacctaaatactccccataaaaacgcccgaacccccaaacgaccgcgacgaaaaacaactcccgaaaaataacgaaaaataccgccgactaaacgcccgcgctctaccccaaccccgaaacgcgatcgccgaaaacgcctacctaccgcctacaaaactacgacgcgctaatcaccataaataaataaatacgcgcgaaaactcgacccacaaaaactcgcgacgcgaccgaaaccccgtaataaaacaaaaaaccccgaatacccgcttcctaaaaaaaaccctacaacgaaatccccgcgcgaaactacccttacgccctaaatctc

SEQ ID NO: 24413 - DNA, 746 bp, Artificial Sequence
  chemically treated genomic DNA (Homo sapiens) CpG-island No: 24413
cgtcgcgcgcgtttttagcgtcgtttttagtaatagcgttaggaggaaagtttgtcgggtttagttattgcgttttatgtcgtcgtcgtcgtcgtcgtcgtcgtcgtcgcgcgttttacgcgtcgttcgtttatttagttttggagacgtcgggacggaggagttacgcggagagaaggcgagaagaaggcggacgggagcggaacgggttcgggagcgggtttgggagcgggttttcgtcgagaagtttcgcgggagacggcggtttttaaagttattttgggtcgcgggagcgcgggatcggggttgcgggcgtcgagagcgcgtcgtttgtcgttttcgtgcgtcgtcgtcgtttttgcgcgacgtttttcggttaggtttgggaaagcgcgcgtttcgttttatatttttttaaagtttcgggcgtcgcgtttttttcgtcgtcgttatacgtgtttcggtcgttttttcgttttcgcgcgtcgtttcgttcgtttttcgttttttcgggttggttcggcggtatttcgcgcggcgaggggcgtacgcgttttcggagttttcggttagcgttcggttcgtattcgggaggatagggaggggcgtcgtcggggagcgggacggggacgttgtcgaggatcgttgagttcgcgatttttttgcgagggacgttaaagtttcgtagagggtatttttcgtttagttgtttgaaggggaaggttagtttttttggtcgttagtgt

SEQ ID NO: 24414 - DNA, 746 bp, Artificial Sequence
  chemically treated genomic DNA (Homo sapiens) CpG-island No: 24414
acactaacgaccaaaaaaactaaccttccccttcaaacaactaaacgaaaaataccctctacgaaactttaacgtccctcgcaaaaaaatcgcgaactcaacgatcctcgacaacgtccccgtcccgctccccgacgacgcccctccctatcctcccgaatacgaaccgaacgctaaccgaaaactccgaaaacgcgtacgcccctcgccgcgcgaaataccgccgaaccaacccgaaaaaacgaaaaacgaacgaaacgacgcgcgaaaacgaaaaaacgaccgaaacacgtataacgacgacgaaaaaaacgcgacgcccgaaactttaaaaaaatataaaacgaaacgcgcgctttcccaaacctaaccgaaaaacgtcgcgcaaaaacgacgacgacgcacgaaaacgacaaacgacgcgctctcgacgcccgcaaccccgatcccgcgctcccgcgacccaaaataactttaaaaaccgccgtctcccgcgaaacttctcgacgaaaacccgctcccaaacccgctcccgaacccgttccgctcccgtccgccttcttctcgccttctctccgcgtaactcctccgtcccgacgtctccaaaactaaataaacgaacgacgcgtaaaacgcgcgacgacgacgacgacgacgacgacgacgacataaaacgcaataactaaacccgacaaactttcctcctaacgctattactaaaaacgacgctaaaaacgcgcgcgacg

SEQ ID NO: 24415 - DNA, 746 bp, Artificial Sequence
  chemically treated genomic DNA (Homo sapiens) CpG-island No: 24415
atattgacggttaaaggggttggtttttttttttagatagttggacgggaggtgttttttgcggggttttgacgtttttcgtagaagagtcgcgggtttagcggttttcgatagcgttttcgtttcgtttttcggcggcgtttttttttgttttttcgggtgcgaatcgggcgttggtcggggatttcggggacgcgtgcgtttttcgtcgcgcgaggtgtcgtcgagttagttcgagagggcggggggcgggcggggcggcgcgcgggggcgggggagcggtcgggatacgtgtggcggcggcgggggggacgcggcgttcggggttttaagaaggtgtggagcggggcgcgcgtttttttaggtttggtcgaggggcgtcgcgtagaggcggcggcggcgtacggaggcggtagacgacgcgttttcggcgttcgtagtttcggtttcgcgttttcgcggtttaaagtaattttgggagtcgtcgtttttcgcggaatttttcggcgggggttcgtttttaggttcgttttcgagttcgtttcgttttcgttcgtttttttttcgtttttttttcgcgtggttttttcgtttcggcgtttttaaaattgaatgagcgagcggcgcgtagggcgcgcggcggcggcggcggcggcggcggcggcggtatggagcgtagtggttgggttcggtagattttttttttagcgttgttgttgggggcgacgttgagggcgcgcgcggcg

SEQ ID NO: 24416 - DNA, 746 bp, Artificial Sequence
  chemically treated genomic DNA (Homo sapiens) CpG-island No: 24416
cgccgcgcgcgccctcaacgtcgcccccaacaacaacgctaaaaaaaaaatctaccgaacccaaccactacgctccataccgccgccgccgccgccgccgccgccgccgcgcgccctacgcgccgctcgctcattcaattttaaaaacgccgaaacgaaaaaaccacgcgaaaaaaaaacgaaaaaaaaacgaacgaaaacgaaacgaactcgaaaacgaacctaaaaacgaacccccgccgaaaaattccgcgaaaaacgacgactcccaaaattactttaaaccgcgaaaacgcgaaaccgaaactacgaacgccgaaaacgcgtcgtctaccgcctccgtacgccgccgccgcctctacgcgacgcccctcgaccaaacctaaaaaaacgcgcgccccgctccacaccttcttaaaaccccgaacgccgcgtcccccccgccgccgccacacgtatcccgaccgctcccccgcccccgcgcgccgccccgcccgccccccgccctctcgaactaactcgacgacacctcgcgcgacgaaaaacgcacgcgtccccgaaatccccgaccaacgcccgattcgcacccgaaaaaacaaaaaaaaacgccgccgaaaaacgaaacgaaaacgctatcgaaaaccgctaaacccgcgactcttctacgaaaaacgtcaaaaccccgcaaaaaacacctcccgtccaactatctaaaaaaaaaaaccaacccctttaaccgtcaatat

SEQ ID NO: 24417 - DNA, 535 bp, Artificial Sequence
  chemically treated genomic DNA (Homo sapiens) CpG-island No: 24417
agcggtttatcgagtttattcgagtttttttcgcgttttcgtgttaaaaggtcgtaaaggaatttcgttcgttcgttcgtttattcgtttattcgtttattcgtttatttttaatttttgcgagtttatggtttttcgaggtcgggacgcggggttttggggattgtttcgtcgtagtttaaaggaagacgtagaatttagtttttttagttttcggacgttttagcgtttcgggtttagcgggaggggcggggttcgtcgcgattggttgtcggagggagaggcgggtttgtgtggcggggatcgtgttgtaatggagtaggggcggcggggattcggaggtgagggttgcgagggtcgttcgggagggttcgggttgggaaaaggttttcgtcggagagtgtagttggaaaaggaggttatattgggaaacggttgtttgaggatagtgggtgggcgggtcgaggaaatggaatttaggaataaaggaaacggagtatgaagaaggggaagtttgttttttgttattggttgt

SEQ ID NO: 24418 - DNA, 535 bp, Artificial Sequence
  chemically treated genomic DNA (Homo sapiens) CpG-island No: 24418
acaaccaataacaaaaaacaaacttccccttcttcatactccgtttcctttattcctaaattccatttcctcgacccgcccacccactatcctcaaacaaccgtttcccaatataacctccttttccaactacactctccgacgaaaaccttttcccaacccgaaccctcccgaacgaccctcgcaaccctcacctccgaatccccgccgcccctactccattacaacacgatccccgccacacaaacccgcctctccctccgacaaccaatcgcgacgaaccccgcccctcccgctaaacccgaaacgctaaaacgtccgaaaactaaaaaaactaaattctacgtcttcctttaaactacgacgaaacaatccccaaaaccccgcgtcccgacctcgaaaaaccataaactcgcaaaaattaaaaataaacgaataaacgaataaacgaataaacgaacgaacgaacgaaattcctttacgaccttttaacacgaaaacgcgaaaaaaactcgaataaactcgataaaccgct

SEQ ID NO: 24419 - DNA, 535 bp, Artificial Sequence
  chemically treated genomic DNA (Homo sapiens) CpG-island No: 24419
ataattagtgataggaaatagatttttttttttttatatttcgttttttttatttttgaattttattttttcggttcgtttatttattgtttttagatagtcgttttttagtgtgatttttttttttagttgtatttttcggcggaggtttttttttagttcggattttttcgggcgattttcgtagtttttattttcgggttttcgtcgtttttgttttattatagtacgattttcgttatataggttcgttttttttttcgatagttaatcgcggcggatttcgtttttttcgttgggttcggggcgttagagcgttcgagagttaggggagttgaattttgcgtttttttttaggttgcggcgagataatttttagagtttcgcgtttcggtttcggggagttatggattcgtaggaattgaaggtgagcgggtgagcgggtgagcgagtgagcgggcgggcgggcggagtttttttgcggttttttggtacgggggcgcggagggagttcgagtaggttcggtaggtcgtt

SEQ ID NO: 24420 - DNA, 535 bp, Artificial Sequence
  chemically treated genomic DNA (Homo sapiens) CpG-island No: 24420
aacgacctaccgaacctactcgaactccctccgcgcccccgtaccaaaaaaccgcaaaaaaactccgcccgcccgcccgctcactcgctcacccgctcacccgctcaccttcaattcctacgaatccataactccccgaaaccgaaacgcgaaactctaaaaattatctcgccgcaacctaaaaaaaaacgcaaaattcaactcccctaactctcgaacgctctaacgccccgaacccaacgaaaaaaacgaaatccgccgcgattaactatcgaaaaaaaaaacgaacctatataacgaaaatcgtactataataaaacaaaaacgacgaaaacccgaaaataaaaactacgaaaatcgcccgaaaaaatccgaactaaaaaaaaacctccgccgaaaaatacaactaaaaaaaaaaatcacactaaaaaacgactatctaaaaacaataaataaacgaaccgaaaaaataaaattcaaaaataaaaaaaacgaaatataaaaaaaaaaaaatctatttcctatcactaattat

SEQ ID NO: 24421 - DNA, 609 bp, Artificial Sequence
  chemically treated genomic DNA (Homo sapiens) CpG-island No: 24421
tgcgatcgagtggtcgacgtttttagtgggagtgaggtttagtacgcgagttcggtttttttttttggagttaggtgggtgcgcgtttttaggtttattcggcggcgtaagcgggagaagttaggtgtttttaataaatatggtcgttacgttagcgttaattcggttcgggaggtcgcgttgtcgtttgggaatcgtaggtttggcgttattcggttcggaattacgtgatgtaggaggtgttcgaggcggcggggttcgcgcgggtggagtcgtttcggcgttcgagcggggtgggggttgttcggttgagatttttcggcgggtttcggtttttgcgtgtacgcgtttgcgtgttcgcgttcgcggttttggcgttgtcggtgaggagtcggggagcgaggcggggaggttgggagcggggcgttttttttgaggttagagggggttgggtagggcggtcggcgggaagggggtcggtcgcgcgttattagcgtttggtttttgagtcgcggcgttggcggtgggggtttttcggttcggttttttttggtagggttcggttgtgtaggtggtcgggtagggcgagggtttcgtagtttatcgaga

SEQ ID NO: 24422 - DNA, 609 bp, Artificial Sequence
  chemically treated genomic DNA (Homo sapiens) CpG-island No: 24422
tctcgataaactacgaaaccctcgccctacccgaccacctacacaaccgaaccctaccaaaaaaaaccgaaccgaaaaacccccaccgccaacgccgcgactcaaaaaccaaacgctaataacgcgcgaccgacccccttcccgccgaccgccctacccaaccccctctaacctcaaaaaaaacgccccgctcccaacctccccgcctcgctccccgactcctcaccgacaacgccaaaaccgcgaacgcgaacacgcaaacgcgtacacgcaaaaaccgaaacccgccgaaaaatctcaaccgaacaacccccaccccgctcgaacgccgaaacgactccacccgcgcgaaccccgccgcctcgaacacctcctacatcacgtaattccgaaccgaataacgccaaacctacgattcccaaacgacaacgcgacctcccgaaccgaattaacgctaacgtaacgaccatatttattaaaaacacctaacttctcccgcttacgccgccgaataaacctaaaaacgcgcacccacctaactccaaaaaaaaaaaccgaactcgcgtactaaacctcactcccactaaaaacgtcgaccactcgatcgca

SEQ ID NO: 24423 - DNA, 609 bp, Artificial Sequence
  chemically treated genomic DNA (Homo sapiens) CpG-island No: 24423
tttcggtgggttgcggggttttcgttttgttcggttatttgtatagtcgggttttgttaggaggggtcgggtcgaaaagtttttatcgttagcgtcgcggtttagggattaggcgttgatagcgcgcggtcgatttttttttcgtcggtcgttttgtttagttttttttggttttagaagaggcgtttcgtttttagttttttcgtttcgtttttcggttttttatcggtagcgttagaatcgcgagcgcgagtacgtaggcgcgtgtacgtagaggtcgggattcgtcgggaaattttaatcgggtagtttttatttcgttcgaacgtcgaggcggttttattcgcgcgagtttcgtcgtttcgggtattttttgtattacgtggtttcgggtcgggtgacgttaaatttgcgatttttaagcggtagcgcggtttttcgagtcgggttgacgttggcgtggcggttatgtttattgagggtatttggtttttttcgtttgcgtcgtcgggtgagtttgaaggcgcgtatttatttggttttaggaagagggatcgagttcgcgtgttgggttttatttttattgggggcgtcggttattcgatcgta

SEQ ID NO: 24424 - DNA, 609 bp, Artificial Sequence
  chemically treated genomic DNA (Homo sapiens) CpG-island No: 24424
tacgatcgaataaccgacgcccccaataaaaataaaacccaacacgcgaactcgatccctcttcctaaaaccaaataaatacgcgccttcaaactcacccgacgacgcaaacgaaaaaaaccaaataccctcaataaacataaccgccacgccaacgtcaacccgactcgaaaaaccgcgctaccgcttaaaaatcgcaaatttaacgtcacccgacccgaaaccacgtaatacaaaaaatacccgaaacgacgaaactcgcgcgaataaaaccgcctcgacgttcgaacgaaataaaaactacccgattaaaatttcccgacgaatcccgacctctacgtacacgcgcctacgtactcgcgctcgcgattctaacgctaccgataaaaaaccgaaaaacgaaacgaaaaaactaaaaacgaaacgcctcttctaaaaccaaaaaaaactaaacaaaacgaccgacgaaaaaaaaatcgaccgcgcgctatcaacgcctaatccctaaaccgcgacgctaacgataaaaacttttcgacccgacccctcctaacaaaacccgactatacaaataaccgaacaaaacgaaaaccccgcaacccaccgaaa

SEQ ID NO: 24425 - DNA, 501 bp, Artificial Sequence
  chemically treated genomic DNA (Homo sapiens) CpG-island No: 24425
cgggcgggtttttttttttttaacggagtcggtttttggggcgcgtcgcgttacgggaatcgattttcgtcgcggacgcgttatttttcggttttcgtagttttcggttttatcgtcgcggttcgtcggaagttgttgtcgttggttttcggttttttgagattggggtttcgttcgttttcgattcggttgtaagtgttgcggtgggagaaagtcgcgttcgtatcggaggggaagcgtcgttatgtttaagtattatgaggataagtcgtagggcggcgcgtgcgcgggtttgaaggaggatttgggcgcgtgtttgttgtagtcggattgtgtggtttaggtagcgcggtcgggcgttttcggtggtgacgatttttgttttaggtaggtttggttcggcggagggtagcgggtcgttcgcggcggcggttggagttaattatttcgggcgtaggttatagttcgggtttattgaacgtgcgtagatttattgagttg

SEQ ID NO: 24426 - DNA, 501 bp, Artificial Sequence
  chemically treated genomic DNA (Homo sapiens) CpG-island No: 24426
caactcaataaatctacgcacgttcaataaacccgaactataacctacgcccgaaataattaactccaaccgccgccgcgaacgacccgctaccctccgccgaaccaaacctacctaaaacaaaaatcgtcaccaccgaaaacgcccgaccgcgctacctaaaccacacaatccgactacaacaaacacgcgcccaaatcctccttcaaacccgcgcacgcgccgccctacgacttatcctcataatacttaaacataacgacgcttcccctccgatacgaacgcgactttctcccaccgcaacacttacaaccgaatcgaaaacgaacgaaaccccaatctcaaaaaaccgaaaaccaacgacaacaacttccgacgaaccgcgacgataaaaccgaaaactacgaaaaccgaaaaataacgcgtccgcgacgaaaatcgattcccgtaacgcgacgcgccccaaaaaccgactccgttaaaaaaaaaaaaacccgcccg

SEQ ID NO: 24427 - DNA, 501 bp, Artificial Sequence
  chemically treated genomic DNA (Homo sapiens) CpG-island No: 24427
tagtttagtggatttgcgtacgtttagtgagttcgagttgtgatttacgttcgggatggttaattttaatcgtcgtcgcgggcgattcgttgtttttcgtcgagttaggtttgtttgggataggggtcgttattatcgggagcgttcggtcgcgttatttggattatatagttcgattgtagtagatacgcgtttaggtttttttttaggttcgcgtacgcgtcgttttgcggtttgtttttataatatttaggtatgacggcgtttttttttcgatgcggacgcgatttttttttatcgtaatatttgtaatcgggtcgggagcgagcgaggttttagttttaggggatcggaagttagcggtaataattttcggcgggtcgcggcggtagggtcgaggattacgggggtcgagaggtggcgcgttcgcggcggaagtcggttttcgtgacgcggcgcgttttaagggtcggtttcgttgagggaagggaagttcgttcg

SEQ ID NO: 24428 - DNA, 501 bp, Artificial Sequence
  chemically treated genomic DNA (Homo sapiens) CpG-island No: 24428
cgaacgaacttcccttccctcaacgaaaccgacccttaaaacgcgccgcgtcacgaaaaccgacttccgccgcgaacgcgccacctctcgacccccgtaatcctcgaccctaccgccgcgacccgccgaaaattattaccgctaacttccgatcccctaaaactaaaacctcgctcgctcccgacccgattacaaatattacgataaaaaaaaatcgcgtccgcatcgaaaaaaaaacgccgtcatacctaaatattataaaaacaaaccgcaaaacgacgcgtacgcgaacctaaaaaaaaacctaaacgcgtatctactacaatcgaactatataatccaaataacgcgaccgaacgctcccgataataacgacccctatcccaaacaaacctaactcgacgaaaaacaacgaatcgcccgcgacgacgattaaaattaaccatcccgaacgtaaatcacaactcgaactcactaaacgtacgcaaatccactaaacta

SEQ ID NO: 24429 - DNA, 705 bp, Artificial Sequence
  chemically treated genomic DNA (Homo sapiens) CpG-island No: 24429
aggtatcgcgtttgcgtttcgcggttacgcgttcgttcggtattcggttttttgttggggcggtcgcgtttttacggggttgggggtcggtcgggttcggattgtttttaaaagacgttatcgtaggtggattattggtatcgttaggtagtgtaatttttatgaaaatcgcgggcgtcgtttatattcgttttagcggggattttggacgcgttttcgcgttcgttgttcgttttcggtttcggttttcgcggcggtcgcgtcgttttttgttcggttcggtttatttatttggcgtttttcggttttcggcgttagtttcgttgtttcgtcgggttgcgcgttagagtttcgtagtagtagtagcgtcgtcgtttggttgtgaagtcgcgggttgcgggttcggttttaggtgttggtttttttgtttcggtttacggagttcgattcggcggtaaattagtagcgaattttttacgcgcgtcgtagttttagttagtcgtcgtcgttttagacgtcgggcgtagtttcgttttggtttcgtttttttgtcgcgtatgcgcgttgagggttcggttcgcgttttgcgattttcgttttattattagttcgagttgggttcgttttttgagatagtagggtcggtgatcgagttgttcgcgttaatttttattgttaggtttttataagattttattttatttt

SEQ ID NO: 24430 - DNA, 705 bp, Artificial Sequence
  chemically treated genomic DNA (Homo sapiens) CpG-island No: 24430
aaaataaaataaaatcttataaaaacctaacaataaaaattaacgcgaacaactcgatcaccgaccctactatctcaaaaaacgaacccaactcgaactaataataaaacgaaaatcgcaaaacgcgaaccgaaccctcaacgcgcatacgcgacaaaaaaacgaaaccaaaacgaaactacgcccgacgtctaaaacgacgacgactaactaaaactacgacgcgcgtaaaaaattcgctactaatttaccgccgaatcgaactccgtaaaccgaaacaaaaaaaccaacacctaaaaccgaacccgcaacccgcgacttcacaaccaaacgacgacgctactactactacgaaactctaacgcgcaacccgacgaaacaacgaaactaacgccgaaaaccgaaaaacgccaaataaataaaccgaaccgaacaaaaaacgacgcgaccgccgcgaaaaccgaaaccgaaaacgaacaacgaacgcgaaaacgcgtccaaaatccccgctaaaacgaatataaacgacgcccgcgattttcataaaaattacactacctaacgataccaataatccacctacgataacgtcttttaaaaacaatccgaacccgaccgacccccaaccccgtaaaaacgcgaccgccccaacaaaaaaccgaataccgaacgaacgcgtaaccgcgaaacgcaaacgcgatacct

SEQ ID NO: 24431 - DNA, 705 bp, Artificial Sequence
  chemically treated genomic DNA (Homo sapiens) CpG-island No: 24431
aggatagggtgggattttgtgggaatttagtagtaggaattggcgcgagtagttcggttatcggttttattgttttagagggcggatttagttcgggttggtagtggggcgggggtcgtagggcgcgggtcgggtttttagcgcgtatgcgcgataagggggcggggttagggcggggttgcgttcggcgtttagagcggcggcggttggttagggttgcggcgcgcgtggagggttcgttgttggtttgtcgtcgggtcgggtttcgtgggtcggggtaggaggattagtatttgaggtcgggttcgtagttcgcgattttatagttaggcggcggcgttgttgttgttgcggggttttggcgcgtagttcggcgggatagcggggttggcgtcgggggtcggggagcgttaggtaggtgggtcgggtcgggtaggaggcgacgcggtcgtcgcgggggtcggggtcggggacggatagcgggcgcgggggcgcgtttaaggttttcgttggggcggatgtggacggcgttcgcggtttttatggaaattgtattgtttaacggtgttagtggtttatttgcggtggcgttttttgagaataattcgagttcggtcgatttttagtttcgtgaagacgcggtcgttttagtagggagtcgggtgtcgagcgggcgcgtggtcgcgggacgtagacgcggtgttt

SEQ ID NO: 24432 - DNA, 705 bp, Artificial Sequence
  chemically treated genomic DNA (Homo sapiens) CpG-island No: 24432
aaacaccgcgtctacgtcccgcgaccacgcgcccgctcgacacccgactccctactaaaacgaccgcgtcttcacgaaactaaaaatcgaccgaactcgaattattctcaaaaaacgccaccgcaaataaaccactaacaccgttaaacaatacaatttccataaaaaccgcgaacgccgtccacatccgccccaacgaaaaccttaaacgcgcccccgcgcccgctatccgtccccgaccccgacccccgcgacgaccgcgtcgcctcctacccgacccgacccacctacctaacgctccccgacccccgacgccaaccccgctatcccgccgaactacgcgccaaaaccccgcaacaacaacaacgccgccgcctaactataaaatcgcgaactacgaacccgacctcaaatactaatcctcctaccccgacccacgaaacccgacccgacgacaaaccaacaacgaaccctccacgcgcgccgcaaccctaaccaaccgccgccgctctaaacgccgaacgcaaccccgccctaaccccgcccccttatcgcgcatacgcgctaaaaacccgacccgcgccctacgacccccgccccactaccaacccgaactaaatccgccctctaaaacaataaaaccgataaccgaactactcgcgccaattcctactactaaattcccacaaaatcccaccctatcct

SEQ ID NO: 24433 - DNA, 871 bp, Artificial Sequence
  chemically treated genomic DNA (Homo sapiens) CpG-island No: 24433
ggggtttcggtcgcgtcgcgagtttttgtgggtcgagttttcgcgcgtatttatttatttatggtgattagcgcgtcgtagttttgtaggcggtaggtaggcgttttcggcgatcgcgtttcggggttggggtagagcgcgggcgtttagtcggcggtatttttcgttatttttcgggagttgtttttcgtcgcggtcgtttgggtcggttcgggcgtttttatggggaggtatttaggttcggggcgtcgggttaggtcggagcgttcgggaagtcggatttttcgggacgtagtttcggagggcgcgcggtagtcgggtagttattaacggaggttttttatgcgcgtattcgtttttgggtgcgcggttcggtacggttgacggagatatagagataatggttgggcggtgtttacggtattagtagtaatagtttcgggatgagtagtcgttggtttcgcggggcgtgtatcgagtgttggatggttgcgaggaaggcgggggtttaagtattttcggttttacgttcgtcgttttttttagttcggtggtcgcgtgcgcgttgttggggcgggcggaagtagtttgggcgtgattacgttttttttcgtttttattcggtcgcggggttttggggggcgtcgttttcgcgtgggtttcgcgggcggcgatttagtcgaggagtcggagattcgggcgtgtaggcgattttagttattaagggtaggggcggcgttggggaggtgtttacgtttttttcgcgttcggggcgttttcggggtgggatttaggatgattttttttcggagtcgtattggcgggttattcgcgttgttgtatttaaattcggaagatggggaggttgggt

SEQ ID NO: 24434 - DNA, 871 bp, Artificial Sequence
  chemically treated genomic DNA (Homo sapiens) CpG-island No: 24434
acccaacctccccatcttccgaatttaaatacaacaacgcgaataacccgccaatacgactccgaaaaaaaatcatcctaaatcccaccccgaaaacgccccgaacgcgaaaaaaacgtaaacacctccccaacgccgcccctacccttaataactaaaatcgcctacacgcccgaatctccgactcctcgactaaatcgccgcccgcgaaacccacgcgaaaacgacgccccccaaaaccccgcgaccgaataaaaacgaaaaaaaacgtaatcacgcccaaactacttccgcccgccccaacaacgcgcacgcgaccaccgaactaaaaaaaacgacgaacgtaaaaccgaaaatacttaaacccccgccttcctcgcaaccatccaacactcgatacacgccccgcgaaaccaacgactactcatcccgaaactattactactaataccgtaaacaccgcccaaccattatctctatatctccgtcaaccgtaccgaaccgcgcacccaaaaacgaatacgcgcataaaaaacctccgttaataactacccgactaccgcgcgccctccgaaactacgtcccgaaaaatccgacttcccgaacgctccgacctaacccgacgccccgaacctaaatacctccccataaaaacgcccgaaccgacccaaacgaccgcgacgaaaaacaactcccgaaaaataacgaaaaataccgccgactaaacgcccgcgctctaccccaaccccgaaacgcgatcgccgaaaacgcctacctaccgcctacaaaactacgacgcgctaatcaccataaataaataaatacgcgcgaaaactcgacccacaaaaactcgcgacgcgaccgaaacccc

SEQ ID NO: 24435 - DNA, 871 bp, Artificial Sequence
  chemically treated genomic DNA (Homo sapiens) CpG-island No: 24435
atttagtttttttatttttcgggtttgggtgtagtaacgcgggtggttcgttagtgcgatttcggggagaagttattttgggttttatttcgggggcgtttcgggcgcggagggggcgtgggtatttttttagcgtcgtttttgtttttggtgattggagtcgtttgtacgttcgggttttcgatttttcggttgggtcgtcgttcgcggagtttacgcgaaggcgacgttttttaaagtttcgcggtcgggtgggggcggggagaggcgtagttacgtttaggttgttttcgttcgttttaatagcgcgtacgcggttatcgagttggaggaggcggcgggcgtgagatcgggaatgtttgggttttcgtttttttcgtagttatttagtattcggtgtacgtttcgcgaggttagcggttgtttatttcggggttattgttgttagtgtcgtgagtatcgtttagttattgtttttgtgttttcgttagtcgtgtcgagtcgcgtatttagaggcgagtgcgcgtatggggagttttcgttgatgattgttcggttgtcgcgcgtttttcgaggttgcgtttcggggagttcggtttttcgagcgtttcggtttggttcggcgtttcggatttgagtgtttttttatggaggcgttcgggtcggtttaggcggtcgcggcggagagtaattttcgagaggtgacggaggatgtcgtcgattgggcgttcgcgttttgttttagtttcgaggcgcggtcgtcggaggcgtttgtttatcgtttgtaggattgcgacgcgttggttattatgggtgagtgagtgcgcgcgggaattcggtttataggggttcgcggcgcggtcgggatttt

SEQ ID NO: 24436 - DNA, 871 bp, Artificial Sequence
  chemically treated genomic DNA (Homo sapiens) CpG-island No: 24436
aaaatcccgaccgcgccgcgaacccctataaaccgaattcccgcgcgcactcactcacccataataaccaacgcgtcgcaatcctacaaacgataaacaaacgcctccgacgaccgcgcctcgaaactaaaacaaaacgcgaacgcccaatcgacgacatcctccgtcacctctcgaaaattactctccgccgcgaccgcctaaaccgacccgaacgcctccataaaaaaacactcaaatccgaaacgccgaaccaaaccgaaacgctcgaaaaaccgaactccccgaaacgcaacctcgaaaaacgcgcgacaaccgaacaatcatcaacgaaaactccccatacgcgcactcgcctctaaatacgcgactcgacacgactaacgaaaacacaaaaacaataactaaacgatactcacgacactaacaacaataaccccgaaataaacaaccgctaacctcgcgaaacgtacaccgaatactaaataactacgaaaaaaacgaaaacccaaacattcccgatctcacgcccgccgcctcctccaactcgataaccgcgtacgcgctattaaaacgaacgaaaacaacctaaacgtaactacgcctctccccgcccccacccgaccgcgaaactttaaaaaacgtcgccttcgcgtaaactccgcgaacgacgacccaaccgaaaaatcgaaaacccgaacgtacaaacgactccaatcaccaaaaacaaaaacgacgctaaaaaaatacccacgccccctccgcgcccgaaacgcccccgaaataaaacccaaaataacttctccccgaaatcgcactaacgaaccacccgcgttactacacccaaacccgaaaaataaaaaaactaaat

SEQ ID NO: 24437 - DNA, 1182 bp, Artificial Sequence
  chemically treated genomic DNA (Homo sapiens) CpG-island No: 24437
attagttcggcgtcgggttttcgttcgcgttcgtgtttcggcgcgtttcggatttcgatatttttttcggttcgggattcgtcgtattttttttgtttgttttttcggggttagtcgcgtcgttttatttcgtagtcgcgcgcggtgtagcggtttcggtttttcgcgtttttttcgatttttgtagcgtcgtattcgtaggttttcgggtttttagtttcggcgtagcgcgagttgtcgtttcgtatttcgcgggcgcgaggttttagtttagttcgtttttttatagtttcggcggcggtcgtagatttttattttgtttattttttcgtcggagtaggggtcgtcgggaaggttttttgcggttttattttttcgtacgtttcggtttagttttttcggttgaggtagcggtagcgtttatttaggtttcggagttattttcgcggcgaacgttcgtagcgttcggttcgcgtcgttttttcgttcggtacgcgtagcgttcgttttcggcgcgagggcgcgagggcggagggcggagggcggatgggcgggcgcgcgtttagcgcgagcgcgcggtcgggggcgtggttttcgcgcgcggggagggggcgggagcggtcgagtaatttttttttatttcgttttcgcggtcgcgtttcgtttatcggtcgtcggcgggtttcgggtaggcgggaagttggttttatttaggtttttttcgttcgttggcgtcgggtcgggtgtttttttattcgtaggtattcgtcggcggggtgttcggttcgacgtgattattcgataaagaatgtaaagagttatttcgtgaattatttttcgcgtttgggttataagtttgtgttcgagtgattttcgtgaatttcgtaagttagtttagtcgcggcgtgcgtttcgcgttgtattaggtgtttgtgggcgtacgattacggttacggcgtttgggttcgaggcgttttaaatttagcggggaaaatagttatgtatataattaagttcgatgattcgtgtagagttaagttacggtgcgatgttggtatagaagttagagacgatttttgtttggacgtcgtagagggttagaggcggtatttatggttaatttcgaaggaagaaaaagaagttttaggaggaaaaagggaggatattagggttgggaaaata

SEQ ID NO: 24438 - DNA, 1182 bp, Artificial Sequence
  chemically treated genomic DNA (Homo sapiens) CpG-island No: 24438
tattttcccaaccctaatatcctccctttttcctcctaaaacttctttttcttccttcgaaattaaccataaataccgcctctaaccctctacgacgtccaaacaaaaatcgtctctaacttctataccaacatcgcaccgtaacttaactctacacgaatcatcgaacttaattatatacataactattttccccgctaaatttaaaacgcctcgaacccaaacgccgtaaccgtaatcgtacgcccacaaacacctaatacaacgcgaaacgcacgccgcgactaaactaacttacgaaattcacgaaaatcactcgaacacaaacttataacccaaacgcgaaaaataattcacgaaataactctttacattctttatcgaataatcacgtcgaaccgaacaccccgccgacgaatacctacgaataaaaaaacacccgacccgacgccaacgaacgaaaaaaacctaaataaaaccaacttcccgcctacccgaaacccgccgacgaccgataaacgaaacgcgaccgcgaaaacgaaataaaaaaaaattactcgaccgctcccgccccctccccgcgcgcgaaaaccacgcccccgaccgcgcgctcgcgctaaacgcgcgcccgcccatccgccctccgccctccgccctcgcgccctcgcgccgaaaacgaacgctacgcgtaccgaacgaaaaaacgacgcgaaccgaacgctacgaacgttcgccgcgaaaataactccgaaacctaaataaacgctaccgctacctcaaccgaaaaaactaaaccgaaacgtacgaaaaaataaaaccgcaaaaaaccttcccgacgacccctactccgacgaaaaaataaacaaaataaaaatctacgaccgccgccgaaactataaaaaaacgaactaaactaaaacctcgcgcccgcgaaatacgaaacgacaactcgcgctacgccgaaactaaaaacccgaaaacctacgaatacgacgctacaaaaatcgaaaaaaacgcgaaaaaccgaaaccgctacaccgcgcgcgactacgaaataaaacgacgcgactaaccccgaaaaaacaaacaaaaaaaatacgacgaatcccgaaccgaaaaaaatatcgaaatccgaaacgcgccgaaacacgaacgcgaacgaaaacccgacgccgaactaat

SEQ ID NO: 24439 - DNA, 1182 bp, Artificial Sequence
  chemically treated genomic DNA (Homo sapiens) CpG-island No: 24439
tgtttttttagttttaatgttttttttttttttttttaggattttttttttttttttcgaggttgattataaatgtcgtttttagttttttgcggcgtttaagtagaagtcgtttttagtttttgtgttagtatcgtatcgtggtttggttttgtacgggttatcggatttggttgtgtatatggttgtttttttcgttaagtttggggcgtttcgagtttaggcgtcgtgatcgtgatcgtgcgtttataggtatttggtgtagcgcggggcgtacgtcgcggttgggttagtttgcggagtttacgggggttattcgggtataggtttgtgatttaggcgcggagaatgatttacggggtggttttttgtattttttgtcgggtagttacgtcgggtcgggtatttcgtcgacggatatttgcggatggaaagatattcggttcgacgttagcgagcgggagaagtttggatggagttagtttttcgtttgttcggaattcgtcggcgatcggtgggcggggcgcggtcgcgggggcggggtggaggggggttgttcggtcgttttcgtttttttttcgcgcgcggaagttacgttttcggtcgcgcgttcgcgttgggcgcgcgttcgtttattcgtttttcgtttttcgttttcgcgttttcgcgtcgggggcgggcgttgcgcgtgtcgggcggagaagcggcgcgagtcgggcgttgcgaacgttcgtcgcgggggtggtttcggggtttgagtaggcgttgtcgttgttttagtcgagggggttgggtcggagcgtgcggaggagtgaggtcgtaggagattttttcgacgatttttgtttcggcggggaagtgagtaaggtgggggtttgcggtcgtcgtcggggttgtggggagacgagttgggttggagtttcgcgttcgcgaggtgcgggacggtagttcgcgttgcgtcgggattggggattcgggagtttgcgggtgcggcgttgtaggagtcggggagggcgcggggagtcggggtcgttgtatcgcgcgcggttgcgaggtgggacggcgcggttagtttcggagggataggtagaggggatgcggcggatttcgggtcgggaggggtatcggggttcggaacgcgtcggggtacgggcgcgagcgggggttcggcgtcgggttgat

SEQ ID NO: 24440 - DNA, 1182 bp, Artificial Sequence
  chemically treated genomic DNA (Homo sapiens) CpG-island No: 24440
atcaacccgacgccgaacccccgctcgcgcccgtaccccgacgcgttccgaaccccgatacccctcccgacccgaaatccgccgcatcccctctacctatccctccgaaactaaccgcgccgtcccacctcgcaaccgcgcgcgatacaacgaccccgactccccgcgccctccccgactcctacaacgccgcacccgcaaactcccgaatccccaatcccgacgcaacgcgaactaccgtcccgcacctcgcgaacgcgaaactccaacccaactcgtctccccacaaccccgacgacgaccgcaaacccccaccttactcacttccccgccgaaacaaaaatcgtcgaaaaaatctcctacgacctcactcctccgcacgctccgacccaaccccctcgactaaaacaacgacaacgcctactcaaaccccgaaaccacccccgcgacgaacgttcgcaacgcccgactcgcgccgcttctccgcccgacacgcgcaacgcccgcccccgacgcgaaaacgcgaaaacgaaaaacgaaaaacgaataaacgaacgcgcgcccaacgcgaacgcgcgaccgaaaacgtaacttccgcgcgcgaaaaaaaaacgaaaacgaccgaacaacccccctccaccccgcccccgcgaccgcgccccgcccaccgatcgccgacgaattccgaacaaacgaaaaactaactccatccaaacttctcccgctcgctaacgtcgaaccgaatatctttccatccgcaaatatccgtcgacgaaatacccgacccgacgtaactacccgacaaaaaatacaaaaaaccaccccgtaaatcattctccgcgcctaaatcacaaacctatacccgaataacccccgtaaactccgcaaactaacccaaccgcgacgtacgccccgcgctacaccaaatacctataaacgcacgatcacgatcacgacgcctaaactcgaaacgccccaaacttaacgaaaaaaacaaccatatacacaaccaaatccgataacccgtacaaaaccaaaccacgatacgatactaacacaaaaactaaaaacgacttctacttaaacgccgcaaaaaactaaaaacgacatttataatcaacctcgaaaaaaaaaaaaaaaatcctaaaaaaaaaaaaaaaaaacattaaaactaaaaaaaca

SEQ ID NO: 24441 - DNA, 1236 bp, Artificial Sequence
  chemically treated genomic DNA (Homo sapiens) CpG-island No: 24441
gttatatttcggggtaaatggcgcgggggaagagttttttttttagttttttcgttttcgatcgtttcgtaaattttagagcgaggtacgcgtttttaaaggtaggttcgcggtttttttacgttttggcgttcggtttttcgtatttagtgtttttatagttgtgttcgggtatagaggcgcggttagatcgtatttcgcgggttgtaggtgtttcggtttttggcggcgtcggtgcggttcggaggtgggagttcgcggagttattgtagtagttggagtttcgtcgagtttttagttttaaggtagggtaggagcgcgtatcggtcggaggtttatgttgagtatcgttcgcgtcggtgttcggtagtttttttaattgtgtggttttcgcgttggtagagaggtacggattgtaggtcgtgggtagttttattttttcgcgttttttttttttggcgttgttcgttgtttttcgttttttttttgtttttttttcgttttcgttttagcgtttcgttgatttcgtttttttttttttgttttttgtttttgtattttttttttttcggttttttgattttttcgtttttatttttttttttttttttttttttgttcgtttcgcgtttttttatcgttttcgtcgttttcgtcgtcgcggttgttatttcgtttttcgcgtcgtacggagttttagtaataatttcggcgcggcggcggagtcgttgtggggaattttttcgcgttttgtttgggtcgggttttttttgttcgttcgtacgttgtcggtcggggatttttcggtggtttttagtttttcggagcgtttttggatgaagtttcgcgcgcgcggatggcggggtttggcggcgttgtggatgttgttggcgtaggtggtcgagtaggtgagtttcgggcgtttttattagcgcggaaatcgcgggttcggatagttggaggcgagtttttcgcggtttttttttcgcggatttcgtcgttttatcgcgatgtcgtcgttgtttttcgtaggtatttgcgtgcgttatgggattcgtagcggtagcgtttgggagttcgagcgtttcgcgtttttttttattcgcggagcggtcgggttggatggaaaagggcggtaagttcgtgaggtgggggtttttaatttttgttatttagtagttcgtaattttcgtgtcgttggtttattaggtgtagtgaatgtttatgattttgtgg

SEQ ID NO: 24442 - DNA, 1236 bp, Artificial Sequence
  chemically treated genomic DNA (Homo sapiens) CpG-island No: 24442
ccacaaaatcataaacattcactacacctaataaaccaacgacacgaaaattacgaactactaaataacaaaaattaaaaacccccacctcacgaacttaccgcccttttccatccaacccgaccgctccgcgaataaaaaaaaacgcgaaacgctcgaactcccaaacgctaccgctacgaatcccataacgcacgcaaatacctacgaaaaacaacgacgacatcgcgataaaacgacgaaatccgcgaaaaaaaaaccgcgaaaaactcgcctccaactatccgaacccgcgatttccgcgctaataaaaacgcccgaaactcacctactcgaccacctacgccaacaacatccacaacgccgccaaaccccgccatccgcgcgcgcgaaacttcatccaaaaacgctccgaaaaactaaaaaccaccgaaaaatccccgaccgacaacgtacgaacgaacaaaaaaaacccgacccaaacaaaacgcgaaaaaattccccacaacgactccgccgccgcgccgaaattattactaaaactccgtacgacgcgaaaaacgaaataacaaccgcgacgacgaaaacgacgaaaacgataaaaaaacgcgaaacgaacaaaaaaaaaaaaaaaaaaaaaaataaaaacgaaaaaatcaaaaaaccgaaaaaaaaaaaatacaaaaacaaaaaacaaaaaaaaaaaaacgaaatcaacgaaacgctaaaacgaaaacgaaaaaaaaacaaaaaaaaaacgaaaaacaacgaacaacgccaaaaaaaaaaaacgcgaaaaaataaaactacccacgacctacaatccgtacctctctaccaacgcgaaaaccacacaattaaaaaaactaccgaacaccgacgcgaacgatactcaacataaacctccgaccgatacgcgctcctaccctaccttaaaactaaaaactcgacgaaactccaactactacaataactccgcgaactcccacctccgaaccgcaccgacgccgccaaaaaccgaaacacctacaacccgcgaaatacgatctaaccgcgcctctatacccgaacacaactataaaaacactaaatacgaaaaaccgaacgccaaaacgtaaaaaaaccgcgaacctacctttaaaaacgcgtacctcgctctaaaatttacgaaacgatcgaaaacgaaaaaactaaaaaaaaaactcttcccccgcgccatttaccccgaaatataac

SEQ ID NO: 24443 - DNA, 1236 bp, Artificial Sequence
  chemically treated genomic DNA (Homo sapiens) CpG-island No: 24443
ttatagagttatgaatatttattgtatttaataaattagcggtacggagattacgagttgttaaatggtaaggattagaagtttttattttacggatttatcgtttttttttatttagttcggtcgtttcgcgggtggaggaggacgcgggacgttcgggtttttaggcgttgtcgttgcgggttttatggcgtacgtaggtgtttgcggaaaatagcggcgatatcgcggtgagacggcggggttcgcgggagaggagtcgcgggggattcgtttttagttgttcggattcgcggttttcgcgttggtgggagcgttcgggatttatttgttcggttatttgcgttagtagtatttatagcgtcgttaagtttcgttattcgcgcgcgcggggttttatttaggagcgtttcgaggggttaggggttatcggagggttttcggtcggtagcgtgcgagcgggtagggaggattcgatttaggtagagcgcgggaggattttttatagcgatttcgtcgtcgcgtcggggttattattgaagtttcgtgcggcgcggggggcggagtggtagtcgcggcggcgggggcggcgggagcggtgggagagcgcggggcgggtaggggagagaggaggggaggaggtgagggcgggggggttagaggatcgaggaggggagagtgtagggataaagagtagaggggaggaggcgaggttagcggggcgttgaggcggaggcgagaggggagtagagggaaggcgggagatagcgggtagcgttagaggaggaggacgcgggaagatggagttgtttacggtttgtagttcgtgtttttttgttagcgcggggattatatagttggagaggttgtcgggtatcggcgcgggcgatgtttagtatggattttcggtcggtgcgcgtttttgttttgttttggggttggggattcggcgggattttagttattgtagtggtttcgcgggtttttattttcgggtcgtatcggcgtcgttagaggtcgggatatttgtagttcgcggagtgcggtttggtcgcgtttttgtgttcgggtatagttgtggggatattgggtgcggaaaatcgggcgttaggacgtgggagagtcgcggatttgtttttaaaggcgcgtgtttcgttttggagtttgcggagcgatcggagacggggaggttgaggaggaaatttttttttcgcgttatttgtttcgagatgtggt

SEQ ID NO: 24444 - DNA, 1236 bp, Artificial Sequence
  chemically treated genomic DNA (Homo sapiens) CpG-island No: 24444
accacatctcgaaacaaataacgcgaaaaaaaaatttcctcctcaacctccccgtctccgatcgctccgcaaactccaaaacgaaacacgcgcctttaaaaacaaatccgcgactctcccacgtcctaacgcccgattttccgcacccaatatccccacaactatacccgaacacaaaaacgcgaccaaaccgcactccgcgaactacaaatatcccgacctctaacgacgccgatacgacccgaaaataaaaacccgcgaaaccactacaataactaaaatcccgccgaatccccaaccccaaaacaaaacaaaaacgcgcaccgaccgaaaatccatactaaacatcgcccgcgccgatacccgacaacctctccaactatataatccccgcgctaacaaaaaaacacgaactacaaaccgtaaacaactccatcttcccgcgtcctcctcctctaacgctacccgctatctcccgccttccctctactcccctctcgcctccgcctcaacgccccgctaacctcgcctcctcccctctactctttatccctacactctcccctcctcgatcctctaacccccccgccctcacctcctcccctcctctctcccctacccgccccgcgctctcccaccgctcccgccgcccccgccgccgcgactaccactccgccccccgcgccgcacgaaacttcaataataaccccgacgcgacgacgaaatcgctataaaaaatcctcccgcgctctacctaaatcgaatcctccctacccgctcgcacgctaccgaccgaaaaccctccgataacccctaacccctcgaaacgctcctaaataaaaccccgcgcgcgcgaataacgaaacttaacgacgctataaatactactaacgcaaataaccgaacaaataaatcccgaacgctcccaccaacgcgaaaaccgcgaatccgaacaactaaaaacgaatcccccgcgactcctctcccgcgaaccccgccgtctcaccgcgatatcgccgctattttccgcaaacacctacgtacgccataaaacccgcaacgacaacgcctaaaaacccgaacgtcccgcgtcctcctccacccgcgaaacgaccgaactaaataaaaaaaaacgataaatccgtaaaataaaaacttctaatccttaccatttaacaactcgtaatctccgtaccgctaatttattaaatacaataaatattcataactctataa

SEQ ID NO: 24445 - DNA, 518 bp, Artificial Sequence
  chemically treated genomic DNA (Homo sapiens) CpG-island No: 24445
atgtcgttaacgtggttaacgattagcggaatttcggttttttttgtcgtttttagtagattttttgttagacgtgttgttagtttatttagcgtttcgtgaacgttcggttgcgcgattttatttagataggcgaaattcgttgttatcgtaatcgggttatcggaaagcgtattcgtttgatagatcggattcgtcggggttagcgtatttattatattacgacgattatcgaatgcgtttatcggtattttatcgtcgatgattttgtcgaggtaggttaaatttggtattacgtcgtaataattttgtgcgttagttagcgttacgcggaaatcggttattattttatcgatgattagtaacgcgttaaattcgtcgtatagcgcgcgtagatttggtaggaattttggtagcggcggaatatagtttatattgtttgttatcggttcgacgataatataggtaattttttgcgggtattgtttaaatgcggcgcgtatagaagttagattttt

SEQ ID NO: 24446 - DNA, 518 bp, Artificial Sequence
  chemically treated genomic DNA (Homo sapiens) CpG-island No: 24446
aaaaatctaacttctatacgcgccgcatttaaacaatacccgcaaaaaattacctatattatcgtcgaaccgataacaaacaatataaactatattccgccgctaccaaaattcctaccaaatctacgcgcgctatacgacgaatttaacgcgttactaatcatcgataaaataataaccgatttccgcgtaacgctaactaacgcacaaaattattacgacgtaataccaaatttaacctacctcgacaaaatcatcgacgataaaataccgataaacgcattcgataatcgtcgtaatataataaatacgctaaccccgacgaatccgatctatcaaacgaatacgctttccgataacccgattacgataacaacgaatttcgcctatctaaataaaatcgcgcaaccgaacgttcacgaaacgctaaataaactaacaacacgtctaacaaaaaatctactaaaaacgacaaaaaaaaccgaaattccgctaatcgttaaccacgttaacgacat

SEQ ID NO: 24447 - DNA, 518 bp, Artificial Sequence
  chemically treated genomic DNA (Homo sapiens) CpG-island No: 24447
agagatttggtttttgtacgcgtcgtatttgagtaatattcgtaagagattgtttgtattatcgtcgagtcggtggtaggtaatatgaattgtgtttcgtcgttgttagagtttttgttaggtttgcgcgcgttgtgcgacgaatttggcgcgttgttgattatcgatgaagtgatgatcggttttcgcgtagcgttagttggcgtataggattattacggcgtagtgttagatttaatttgtttcggtaaaattatcggcggtggaatgtcggtaggcgtattcggtggtcgtcgtgatgtaatggatgcgttggtttcgacgggttcggtttattaggcgggtacgtttttcggtaattcgattgcgatggtagcgggtttcgtttgtttgaatgaagtcgcgtagtcgggcgtttacgaaacgttggatgagttgataatacgtttggtagaaggtttgttggaagcggtagaagaagtcggaatttcgttggtcgttaattacgttggcggtat

SEQ ID NO: 24448 - DNA, 518 bp, Artificial Sequence
  chemically treated genomic DNA (Homo sapiens) CpG-island No: 24448
ataccgccaacgtaattaacgaccaacgaaattccgacttcttctaccgcttccaacaaaccttctaccaaacgtattatcaactcatccaacgtttcgtaaacgcccgactacgcgacttcattcaaacaaacgaaacccgctaccatcgcaatcgaattaccgaaaaacgtacccgcctaataaaccgaacccgtcgaaaccaacgcatccattacatcacgacgaccaccgaatacgcctaccgacattccaccgccgataattttaccgaaacaaattaaatctaacactacgccgtaataatcctatacgccaactaacgctacgcgaaaaccgatcatcacttcatcgataatcaacaacgcgccaaattcgtcgcacaacgcgcgcaaacctaacaaaaactctaacaacgacgaaacacaattcatattacctaccaccgactcgacgataatacaaacaatctcttacgaatattactcaaatacgacgcgtacaaaaaccaaatctct

SEQ ID NO: 24449 - DNA, 715 bp, Artificial Sequence
  chemically treated genomic DNA (Homo sapiens) CpG-island No: 24449
gttttgttgcgtagcgttgttggaattttatcgttgacgttgcgtaacgttggaagcggcgggcgattatattgcgcgtttggtatttgtttggaagagtagaaatcgttgtcgtggtacggcggtttgggaaatgtattgttaacgttacgatacgttagtaggtagcgaatggttggagagcgtgcgggtttatgagaaagaatattttgagtcgtcgcgggtaaatattgtcggatgcggcgtgaacgttttattcggtttacgggtcggtaatagttgtaggtttgataagacgcgttagcgtcgtattaggtattgattgtcggatgcggtataagtgttttattcggtttataggtcggtaatagttgtaggtttgataagacgttgatagcgtttgtattaggtattgattgtcggatgcggtataagtgttttattcggtttataggtcggtaatagttgtaggtttgataagacgcgatagcgtcgtatttaggtattgattgtcggatgcggtataagtgttttattaggtttataggtcggtaatagttgtaggtttgataagacgcgatagcgtcgtattaggtattgattgtcggatgcggcgcgagcgttttattcggtttacgggtcgtgtattcgataatatcgaatttataggaatatagaatatgtaaaatattatttagttttggtttgttttagg

SEQ ID NO: 24450 - DNA, 715 bp, Artificial Sequence
  chemically treated genomic DNA (Homo sapiens) CpG-island No: 24450
cctaaaacaaaccaaaactaaataatattttacatattctatattcctataaattcgatattatcgaatacacgacccgtaaaccgaataaaacgctcgcgccgcatccgacaatcaatacctaatacgacgctatcgcgtcttatcaaacctacaactattaccgacctataaacctaataaaacacttataccgcatccgacaatcaatacctaaatacgacgctatcgcgtcttatcaaacctacaactattaccgacctataaaccgaataaaacacttataccgcatccgacaatcaatacctaatacaaacgctatcaacgtcttatcaaacctacaactattaccgacctataaaccgaataaaacacttataccgcatccgacaatcaatacctaatacgacgctaacgcgtcttatcaaacctacaactattaccgacccgtaaaccgaataaaacgttcacgccgcatccgacaatatttacccgcgacgactcaaaatattctttctcataaacccgcacgctctccaaccattcgctacctactaacgtatcgtaacgttaacaatacatttcccaaaccgccgtaccacgacaacgatttctactcttccaaacaaataccaaacgcgcaatataatcgcccgccgcttccaacgttacgcaacgtcaacgataaaattccaacaacgctacgcaacaaaac

SEQ ID NO: 24451 - DNA, 715 bp, Artificial Sequence
  chemically treated genomic DNA (Homo sapiens) CpG-island No: 24451
tttgggataaattaggattgagtaatgttttgtatgttttgtgtttttgtaaattcggtgttgtcggatgtacgattcgtaggtcggataaggcgttcgcgtcgtattcggtaattaatgtttgatgcgacgttgtcgcgttttattaggtttataattattgtcgatttgtaggtttgataaggtatttgtgtcgtattcggtaattaatgtttagatgcgacgttgtcgcgttttattaggtttataattgttgtcgatttgtaggtcggataaggtatttgtgtcgtattcggtaattaatgtttgatgtagacgttgttagcgttttattaggtttataattattgtcgatttgtaggtcggataaggtatttgtgtcgtattcggtaattaatgtttgatgcgacgttgacgcgttttattaggtttataattgttgtcgattcgtaggtcggataaggcgtttacgtcgtattcggtagtgtttattcgcggcgatttaaaatatttttttttataagttcgtacgttttttagttattcgttatttgttggcgtatcgtgacgttggtaatatattttttagatcgtcgtgttacggtaacgatttttgtttttttagatagatgttagacgcgtagtgtaatcgttcgtcgtttttagcgttgcgtagcgttagcggtaggattttagtaacgttacgtagtagggt

SEQ ID NO: 24452 - DNA, 715 bp, Artificial Sequence
  chemically treated genomic DNA (Homo sapiens) CpG-island No: 24452
accctactacgtaacgttactaaaatcctaccgctaacgctacgcaacgctaaaaacgacgaacgattacactacgcgtctaacatctatctaaaaaaacaaaaatcgttaccgtaacacgacgatctaaaaaatatattaccaacgtcacgatacgccaacaaataacgaataactaaaaaacgtacgaacttataaaaaaaaatattttaaatcgccgcgaataaacactaccgaatacgacgtaaacgccttatccgacctacgaatcgacaacaattataaacctaataaaacgcgtcaacgtcgcatcaaacattaattaccgaatacgacacaaataccttatccgacctacaaatcgacaataattataaacctaataaaacgctaacaacgtctacatcaaacattaattaccgaatacgacacaaataccttatccgacctacaaatcgacaacaattataaacctaataaaacgcgacaacgtcgcatctaaacattaattaccgaatacgacacaaataccttatcaaacctacaaatcgacaataattataaacctaataaaacgcgacaacgtcgcatcaaacattaattaccgaatacgacgcgaacgccttatccgacctacgaatcgtacatccgacaacaccgaatttacaaaaacacaaaacatacaaaacattactcaatcctaatttatcccaaa

SEQ ID NO: 24453 - DNA, 500 bp, Artificial Sequence
  chemically treated genomic DNA (Homo sapiens) CpG-island No: 24453
ggcggggattagcgtaattgcgatttaattttgcgttggggattggagaaattaaaatttggggcgggtttttatcgcgagggtttcgtgtaagtgggtagaattaggttcgggcggagtcgggagatgtttacgtgttgcgtatttttatttcgttcgtaggggattagttgttgagtgttcgagtgtttttcgagaattttaagtacgaggacgtattacgtttgttgtaatgcgtcgagttttataaagtttttttttgtttgaagcgtattgtgtttatcggggatttggttttgcggttcgggatcgtgtttggttacgagattaagggttcgcgggttaaggtggttaagttggtacgcgtgtttagttcggtttcggttttggattgttttagcgattcggtttttgcgtcgtgagttttatttttcgttatcgtgggttagttttgttttttgttttgttattaatttaagttaattttattttttgttttt

SEQ ID NO: 24454 - DNA, 500 bp, Artificial Sequence
  chemically treated genomic DNA (Homo sapiens) CpG-island No: 24454
aaaaacaaaaaataaaattaacttaaattaataacaaaacaaaaaacaaaactaacccacgataacgaaaaataaaactcacgacgcaaaaaccgaatcgctaaaacaatccaaaaccgaaaccgaactaaacacgcgtaccaacttaaccaccttaacccgcgaacccttaatctcgtaaccaaacacgatcccgaaccgcaaaaccaaatccccgataaacacaatacgcttcaaacaaaaaaaaactttataaaactcgacgcattacaacaaacgtaatacgtcctcgtacttaaaattctcgaaaaacactcgaacactcaacaactaatcccctacgaacgaaataaaaatacgcaacacgtaaacatctcccgactccgcccgaacctaattctacccacttacacgaaaccctcgcgataaaaacccgccccaaattttaatttctccaatccccaacgcaaaattaaatcgcaattacgctaatccccgcc

SEQ ID NO: 24455 - DNA, 500 bp, Artificial Sequence
  chemically treated genomic DNA (Homo sapiens) CpG-island No: 24455
aggggtagagggtggaattagtttgggttagtgataagatagagggtaaggttggtttacgatggcggggaatggggtttacggcgtagagatcggatcgttggggtagtttagggtcggggtcgggttaagtacgcgtattagtttggttattttggttcgcgggtttttgatttcgtagttagatacggtttcgggtcgtagagttaggttttcggtgggtatagtgcgttttaggtagaaggagattttgtaaggttcggcgtattgtagtaggcgtagtgcgttttcgtatttgaagttttcgaagaatattcgggtatttagtagttggttttttgcgggcgaggtggaggtgcgtagtacgtgggtatttttcggtttcgttcgggtttagttttgtttatttgtacggagttttcgcggtgaggattcgttttaaattttagtttttttaatttttagcgtaggattaagtcgtagttacgttagttttcgtt

SEQ ID NO: 24456 - DNA, 500 bp, Artificial Sequence
  chemically treated genomic DNA (Homo sapiens) CpG-island No: 24456
aacgaaaactaacgtaactacgacttaatcctacgctaaaaattaaaaaaactaaaatttaaaacgaatcctcaccgcgaaaactccgtacaaataaacaaaactaaacccgaacgaaaccgaaaaatacccacgtactacgcacctccacctcgcccgcaaaaaaccaactactaaatacccgaatattcttcgaaaacttcaaatacgaaaacgcactacgcctactacaatacgccgaaccttacaaaatctccttctacctaaaacgcactatacccaccgaaaacctaactctacgacccgaaaccgtatctaactacgaaatcaaaaacccgcgaaccaaaataaccaaactaatacgcgtacttaacccgaccccgaccctaaactaccccaacgatccgatctctacgccgtaaaccccattccccgccatcgtaaaccaaccttaccctctatcttatcactaacccaaactaattccaccctctacccct

SEQ ID NO: 24457 - DNA, 527 bp, Artificial Sequence
  chemically treated genomic DNA (Homo sapiens) CpG-island No: 24457
tattttacgttttttatttcgagatttagttttatacgtattttttaggttgtattttcgtttgacggttttttttagtcgcgcgtaggcgtattacggttagattgtaggtcggcgggggttaggtatgcgttttttttattggtcgcgtcgtttgttagtttcgggcggaggggagcgtcgggtcgacggtgggcggttacgtgacggttacgattgtattttcgttggtgtcggtgggcggttacgtgatggttatggtcgtattttcgttggtggcggtttgttggggtagagcggtcgcggacgagttagtttagttttcggcggtgagaggatgttttcggggcgggtagttcgggtcgggggaggagtgtttgatagttggcgtcgtcgggagggagggcgggcggcgcgagtgggcgcgggttcggtgggttaggtgaggcgcgggtcgggggtggtgggattgggtcggttgcggtagggacgggtggcgttcgggtgtttggatttagttcgggttt

SEQ ID NO: 24458 - DNA, 527 bp, Artificial Sequence
  chemically treated genomic DNA (Homo sapiens) CpG-island No: 24458
aaacccgaactaaatccaaacacccgaacgccacccgtccctaccgcaaccgacccaatcccaccacccccgacccgcgcctcacctaacccaccgaacccgcgcccactcgcgccgcccgccctccctcccgacgacgccaactatcaaacactcctcccccgacccgaactacccgccccgaaaacatcctctcaccgccgaaaactaaactaactcgtccgcgaccgctctaccccaacaaaccgccaccaacgaaaatacgaccataaccatcacgtaaccgcccaccgacaccaacgaaaatacaatcgtaaccgtcacgtaaccgcccaccgtcgacccgacgctcccctccgcccgaaactaacaaacgacgcgaccaataaaaaaaacgcatacctaacccccgccgacctacaatctaaccgtaatacgcctacgcgcgactaaaaaaaaccgtcaaacgaaaatacaacctaaaaaatacgtataaaactaaatctcgaaataaaaaacgtaaaata

SEQ ID NO: 24459 - DNA, 527 bp, Artificial Sequence
  chemically treated genomic DNA (Homo sapiens) CpG-island No: 24459
gagttcgaattgagtttagatattcggacgttattcgtttttatcgtaatcggtttagttttattattttcggttcgcgttttatttggtttatcgggttcgcgtttattcgcgtcgttcgttttttttttcggcggcgttaattgttagatatttttttttcggttcgggttgttcgtttcggaagtatttttttatcgtcggaagttgaattgattcgttcgcggtcgttttattttaataggtcgttattagcgagagtgcggttataattattacgtgatcgtttatcgatattagcgagagtgtagtcgtaatcgttacgtgatcgtttatcgtcggttcggcgttttttttcgttcgaagttagtaagcggcgcggttaatgagaaaggcgtatgtttggttttcgtcggtttgtagtttagtcgtagtgcgtttgcgcgcggttaggaggggtcgttaggcggggatatagtttggaaggtgcgtgtggggttgggtttcggagtgggagacgtggagtg

SEQ ID NO: 24460 - DNA, 527 bp, Artificial Sequence
  chemically treated genomic DNA (Homo sapiens) CpG-island No: 24460
cactccacgtctcccactccgaaacccaaccccacacgcaccttccaaactatatccccgcctaacgacccctcctaaccgcgcgcaaacgcactacgactaaactacaaaccgacgaaaaccaaacatacgcctttctcattaaccgcgccgcttactaacttcgaacgaaaaaaaacgccgaaccgacgataaacgatcacgtaacgattacgactacactctcgctaatatcgataaacgatcacgtaataattataaccgcactctcgctaataacgacctattaaaataaaacgaccgcgaacgaatcaattcaacttccgacgataaaaaaatacttccgaaacgaacaacccgaaccgaaaaaaaaatatctaacaattaacgccgccgaaaaaaaaaacgaacgacgcgaataaacgcgaacccgataaaccaaataaaacgcgaaccgaaaataataaaactaaaccgattacgataaaaacgaataacgtccgaatatctaaactcaattcgaactc

SEQ ID NO: 24461 - DNA, 656 bp, Artificial Sequence
  chemically treated genomic DNA (Homo sapiens) CpG-island No: 24461
ggcgcgtcgatttcgggacgtttcgggttgttagcggagatcggagggaggtcggagaaagtgtattttgagcgattcggtcggtcgttgtttttcggatcggttttttatcgagcgttgggtacgtttatcggtttaaggtcgtcgtcgtcgtcggggtcggttagtacgttttcgtcgtattttttttttatttcggggtttacgagtcgtcgtcgttgtttttgtcgcggggtttttttatgtttcgtcgttgtcgcggaatagcgggtgtaggcgcgttatttttttatggtagagatttcgtcgggtttttgtaggtcgggtcgttattgtcgtcgtcgtcggtttcggtttattagtatatacgcgtcgggattaggtcgcgattagtttcggcggcgttaggttttcgggaagtagcggcggtagggacgttgttaagttacgttattaggtttagtaatttttattttcgggggagtgtttagttttgcgtttgcgtaagtagaatattcgttttttttcgttttttaggtttttttcgttacgttgtgtcgtattgaagtttcgttttttattagttttttcgggtggcgttttttgtgtatttatttgtttttatagtgttatttatgggtcgttagaagtatagt

SEQ ID NO: 24462 - DNA, 656 bp, Artificial Sequence
  chemically treated genomic DNA (Homo sapiens) CpG-island No: 24462
actatacttctaacgacccataaataacactataaaaacaaataaatacacaaaaaacgccacccgaaaaaactaataaaaaacgaaacttcaatacgacacaacgtaacgaaaaaaacctaaaaaacgaaaaaaaacgaatattctacttacgcaaacgcaaaactaaacactcccccgaaaataaaaattactaaacctaataacgtaacttaacaacgtccctaccgccgctacttcccgaaaacctaacgccgccgaaactaatcgcgacctaatcccgacgcgtatatactaataaaccgaaaccgacgacgacgacaataacgacccgacctacaaaaacccgacgaaatctctaccataaaaaaataacgcgcctacacccgctattccgcgacaacgacgaaacataaaaaaaccccgcgacaaaaacaacgacgacgactcgtaaaccccgaaataaaaaaaaaatacgacgaaaacgtactaaccgaccccgacgacgacgacgaccttaaaccgataaacgtacccaacgctcgataaaaaaccgatccgaaaaacaacgaccgaccgaatcgctcaaaatacactttctccgacctccctccgatctccgctaacaacccgaaacgtcccgaaatcgacgcgcc

SEQ ID NO: 24463 - DNA, 656 bp, Artificial Sequence
  chemically treated genomic DNA (Homo sapiens) CpG-island No: 24463
gttgtatttttgacggtttataggtggtattgtagggataggtaagtgtatagggagcgttattcggagaggttgataggaggcggagttttaatgcgatataacgtggcgggaggagtttaagggacgaggaaaggcgagtgttttgtttgcgtagacgtaaggttgggtattttttcgggagtgagggttgttgggtttgatgacgtggtttggtaacgtttttatcgtcgttgtttttcgggaatttggcgtcgtcggaattgatcgcggtttagtttcgacgcgtgtgtgttagtgagtcggagtcggcgacggcggtagtggcggttcggtttgtaggagttcgacggggtttttgttatgggggagtgacgcgtttgtattcgttgtttcgcggtagcggcgagatatgaggagatttcgcgataggggtagcggcggcggttcgtgagtttcgggatggaggagaaatacggcggggacgtgttggtcggtttcggcggcggcggcggttttgggtcggtggacgtatttagcgttcggtaagggatcgattcggaaggtagcgatcggtcgggtcgtttaggatgtatttttttcggttttttttcggttttcgttgatagttcgggacgtttcggggtcggcgcgtt

SEQ ID NO: 24464 - DNA, 656 bp, Artificial Sequence
  chemically treated genomic DNA (Homo sapiens) CpG-island No: 24464
aacgcgccgaccccgaaacgtcccgaactatcaacgaaaaccgaaaaaaaaccgaaaaaaatacatcctaaacgacccgaccgatcgctaccttccgaatcgatcccttaccgaacgctaaatacgtccaccgacccaaaaccgccgccgccgccgaaaccgaccaacacgtccccgccgtatttctcctccatcccgaaactcacgaaccgccgccgctacccctatcgcgaaatctcctcatatctcgccgctaccgcgaaacaacgaatacaaacgcgtcactcccccataacaaaaaccccgtcgaactcctacaaaccgaaccgccactaccgccgtcgccgactccgactcactaacacacacgcgtcgaaactaaaccgcgatcaattccgacgacgccaaattcccgaaaaacaacgacgataaaaacgttaccaaaccacgtcatcaaacccaacaaccctcactcccgaaaaaatacccaaccttacgtctacgcaaacaaaacactcgcctttcctcgtcccttaaactcctcccgccacgttatatcgcattaaaactccgcctcctatcaacctctccgaataacgctccctatacacttacctatccctacaataccacctataaaccgtcaaaaatacaac

SEQ ID NO: 24465 - DNA, 707 bp, Artificial Sequence
  chemically treated genomic DNA (Homo sapiens) CpG-island No: 24465
acgtgcgggcgtgtcggttttaatattacgaacgcggtggatatagttataatcgtgggcgtgacgattatcgtgacgtatatcgttatttttgatgcgattattatttagtttgttaaggatttgtttcggcgtttcgtttagattaatttttagatggtttattagcgttagtttgtcgtttttatttatacgcgcgaataacgatatttcggtatacgtcgggttacgttgtattagcgagtcgtcggagttgttataaatatcgtcgatgatcgatgcgtttatatacgatgatttaattattgagtgcggttcgcgttttagcggtttgagggttttttttagcgaatagagcgtggtgttcggataggttagtatttgttcgtttttgttaagaacgtgtagtttgtcgagacgtagggtgttgatgataacgatatcgcgattataatcgttatcgtttggcgtcgatttttcggttaggtttgtattggcggtttgtattagaataattttgtcggcggtgacgtaggtttttagtattcgttataattttagtagtgagttagggaaaacgatagttagcgcgtcgttttgattagaacggaagtttttgcgatagcgggtcgtttttgcgggatcggtgagtaggtgtgaagaatttattagacgagtaagtttatttaaaaaggttttattattag

SEQ ID NO: 24466 - DNA, 707 bp, Artificial Sequence
  chemically treated genomic DNA (Homo sapiens) CpG-island No: 24466
ctaataataaaacctttttaaataaacttactcgtctaataaattcttcacacctactcaccgatcccgcaaaaacgacccgctatcgcaaaaacttccgttctaatcaaaacgacgcgctaactatcgttttccctaactcactactaaaattataacgaatactaaaaacctacgtcaccgccgacaaaattattctaatacaaaccgccaatacaaacctaaccgaaaaatcgacgccaaacgataacgattataatcgcgatatcgttatcatcaacaccctacgtctcgacaaactacacgttcttaacaaaaacgaacaaatactaacctatccgaacaccacgctctattcgctaaaaaaaaccctcaaaccgctaaaacgcgaaccgcactcaataattaaatcatcgtatataaacgcatcgatcatcgacgatatttataacaactccgacgactcgctaatacaacgtaacccgacgtataccgaaatatcgttattcgcgcgtataaataaaaacgacaaactaacgctaataaaccatctaaaaattaatctaaacgaaacgccgaaacaaatccttaacaaactaaataataatcgcatcaaaaataacgatatacgtcacgataatcgtcacgcccacgattataactatatccaccgcgttcgtaatattaaaaccgacacgcccgcacgt

SEQ ID NO: 24467 - DNA, 707 bp, Artificial Sequence
  chemically treated genomic DNA (Homo sapiens) CpG-island No: 24467
ttgataataaagtttttttgaatgaatttgttcgtttggtgggttttttatatttgtttatcgatttcgtaaaaacggttcgttatcgtaagggttttcgttttggttagggcgacgcgttggttgtcgttttttttggtttattattagaattgtggcgggtgttgaaagtttgcgttatcgtcgataaaattattttgatgtaggtcgttaatataggtttgatcgaaggatcgacgttaaacggtaacgattatgatcgcgatgtcgttattattagtattttgcgtttcgataagttgtacgtttttggtaagggcgaataggtgttggtttattcgggtattacgttttattcgttggaaaaagtttttaaatcgttgggacgcgaatcgtatttagtgattggattatcgtgtataggcgtatcggttatcggcggtatttgtaataatttcggcggttcgttggtgtaacgtggttcggcgtatatcgaaatgtcgttattcgcgcgtataaatgaagacggtaaattgacgttggtgaattatttggggattgatttgggcgaaacgtcggagtagatttttagtaagttggatgatgatcgtattaaagatgacgatgtgcgttacgatggtcgttacgtttacgattatgattatgtttatcgcgttcgtgatattgaagtcgatacgttcgtacgt

SEQ ID NO: 24468 - DNA, 707 bp, Artificial Sequence
  chemically treated genomic DNA (Homo sapiens) CpG-island No: 24468
acgtacgaacgtatcgacttcaatatcacgaacgcgataaacataatcataatcgtaaacgtaacgaccatcgtaacgcacatcgtcatctttaatacgatcatcatccaacttactaaaaatctactccgacgtttcgcccaaatcaatccccaaataattcaccaacgtcaatttaccgtcttcatttatacgcgcgaataacgacatttcgatatacgccgaaccacgttacaccaacgaaccgccgaaattattacaaataccgccgataaccgatacgcctatacacgataatccaatcactaaatacgattcgcgtcccaacgatttaaaaactttttccaacgaataaaacgtaatacccgaataaaccaacacctattcgcccttaccaaaaacgtacaacttatcgaaacgcaaaatactaataataacgacatcgcgatcataatcgttaccgtttaacgtcgatccttcgatcaaacctatattaacgacctacatcaaaataattttatcgacgataacgcaaactttcaacacccgccacaattctaataataaaccaaaaaaaacgacaaccaacgcgtcgccctaaccaaaacgaaaacccttacgataacgaaccgtttttacgaaatcgataaacaaatataaaaaacccaccaaacgaacaaattcattcaaaaaaactttattatcaa

SEQ ID NO: 24469 - DNA, 549 bp, Artificial Sequence
  chemically treated genomic DNA (Homo sapiens) CpG-island No: 24469
ttgcgtacggtttgggcggaatgatcgttagcgatggtggttgtattacgtcgggcgatgtggcgaaagtttttggcggcggtgtgtcgatattcgttatgtttgtgcggtatgtttggcgggttacgacgacgacgcggcggtcgtttcgttgacggacgatatcggcgacgataattttatgtttgttttatcgggtattgacgtttcgacgttttgcgattgataacgttacgtttggcggcgttgcgggaattatttcgcgtacgtagatcggttaatattcgttaacgttggttcggtttgcgacgtgggtcgggtttgataaataatttgcgcgacgaattatatatggggcggggttggcgttttacggtttgtaatataacgtttggggggttatatcgtttttgataaagaaggttgagttaatatcgttatattacggttttacgtatcggtgttggtagggtataaggaaatacgtcggtttttttttatataattttgagtaaatttttttaaacgatttggggggatgtgaggatt

SEQ ID NO: 24470 - DNA, 549 bp, Artificial Sequence
  chemically treated genomic DNA (Homo sapiens) CpG-island No: 24470
aatcctcacatccccccaaatcgtttaaaaaaatttactcaaaattatataaaaaaaaaccgacgtatttccttataccctaccaacaccgatacgtaaaaccgtaatataacgatattaactcaaccttctttatcaaaaacgatataaccccccaaacgttatattacaaaccgtaaaacgccaaccccgccccatatataattcgtcgcgcaaattatttatcaaacccgacccacgtcgcaaaccgaaccaacgttaacgaatattaaccgatctacgtacgcgaaataattcccgcaacgccgccaaacgtaacgttatcaatcgcaaaacgtcgaaacgtcaatacccgataaaacaaacataaaattatcgtcgccgatatcgtccgtcaacgaaacgaccgccgcgtcgtcgtcgtaacccgccaaacataccgcacaaacataacgaatatcgacacaccgccgccaaaaactttcgccacatcgcccgacgtaatacaaccaccatcgctaacgatcattccgcccaaaccgtacgcaa

SEQ ID NO: 24471 - DNA, 549 bp, Artificial Sequence
  chemically treated genomic DNA (Homo sapiens) CpG-island No: 24471
ggtttttatatttttttaggtcgtttgggaagatttatttagggttgtgtggaagaaggtcggcgtgtttttttgtgttttgttaatatcggtacgtaaaatcgtggtgtggcggtgttggtttagttttttttgttaagggcggtatagttttttaaacgttatgttataagtcgtgaaacgttagtttcgttttatatatagttcgtcgcgtaggttatttgttaaattcggtttacgtcgtaagtcgggttagcgttaacgggtgttgatcggtttgcgtgcgcggagtagttttcgtaacgtcgttaaacgtgacgttgttagtcgtaagacgtcggagcgttaatgttcggtagaataagtataaagttgtcgtcgtcggtgtcgttcgttaacgaggcgatcgtcgcgtcgtcgtcgtggttcgttaagtatgtcgtataagtatgacgaatatcggtatatcgtcgttaaaggttttcgttatatcgttcggcgtggtgtagttattatcgttgacgattatttcgtttagatcgtgcgtag

SEQ ID NO: 24472 - DNA, 549 bp, Artificial Sequence
  chemically treated genomic DNA (Homo sapiens) CpG-island No: 24472
ctacgcacgatctaaacgaaataatcgtcaacgataataactacaccacgccgaacgatataacgaaaacctttaacgacgatataccgatattcgtcatacttatacgacatacttaacgaaccacgacgacgacgcgacgatcgcctcgttaacgaacgacaccgacgacgacaactttatacttattctaccgaacattaacgctccgacgtcttacgactaacaacgtcacgtttaacgacgttacgaaaactactccgcgcacgcaaaccgatcaacacccgttaacgctaacccgacttacgacgtaaaccgaatttaacaaataacctacgcgacgaactatatataaaacgaaactaacgtttcacgacttataacataacgtttaaaaaactataccgcccttaacaaaaaaaactaaaccaacaccgccacaccacgattttacgtaccgatattaacaaaacacaaaaaaacacgccgaccttcttccacacaaccctaaataaatcttcccaaacgacctaaaaaaatataaaaacc

SEQ ID NO: 24473 - DNA, 524 bp, Artificial Sequence
  chemically treated genomic DNA (Homo sapiens) CpG-island No: 24473
tatcgatcgggagttgacgatttgttagacggttaatttttaatatgtcgtaagagaatatcgatatcgatatatcgattatggtgatcggcgtggaaggaatggcgacgattagcgggttagtgtttatgcgatatttttttgcgttttacggcggtattacggcgatggagttggtttagtaaatgttaatatagttttttttcgtcgtttgttagtcgtagttgtcgtcgcgtatttagtggttggtattacgtagtgttatagattaatacgtgatcgggagttagttaatggcgttatttattattttgttcgttgttaggttatcgatcgaacgtcgggcgtttttcggtttatttgtttacgttgggttcggttgggtttgcgtggaatgtttttcggtatcgcgttgacgtatcgggattattattcgtgagttatcgtattcgggcgggttatttttaggttttatggttagcgttattattatagggttaggtagatttcgtttgttgtttggg

SEQ ID NO: 24474 - DNA, 524 bp, Artificial Sequence
  chemically treated genomic DNA (Homo sapiens) CpG-island No: 24474
cccaaacaacaaacgaaatctacctaaccctataataataacgctaaccataaaacctaaaaataacccgcccgaatacgataactcacgaataataatcccgatacgtcaacgcgataccgaaaaacattccacgcaaacccaaccgaacccaacgtaaacaaataaaccgaaaaacgcccgacgttcgatcgataacctaacaacgaacaaaataataaataacgccattaactaactcccgatcacgtattaatctataacactacgtaataccaaccactaaatacgcgacgacaactacgactaacaaacgacgaaaaaaaactatattaacatttactaaaccaactccatcgccgtaataccgccgtaaaacgcaaaaaaatatcgcataaacactaacccgctaatcgtcgccattccttccacgccgatcaccataatcgatatatcgatatcgatattctcttacgacatattaaaaattaaccgtctaacaaatcgtcaactcccgatcgata

SEQ ID NO: 24475 - DNA, 524 bp, Artificial Sequence
  chemically treated genomic DNA (Homo sapiens) CpG-island No: 24475
tttaggtaataggcgaggtttgtttaattttgtggtaataacgttaattatgagatttgaagatggttcgttcggatgcggtaatttacgggtaatggtttcggtgcgttaacgcggtatcgggaaatattttacgtaaatttaatcgaatttagcgtgggtaaatggatcgggagacgttcggcgttcgatcggtaatttgatagcgaataagatgatggatggcgttattgattggttttcgattacgtattggtttgtggtattacgtaatgttaattattggatgcgcggcgatagttacggttggtaggcggcggaaaaaggttatattggtatttgttggattaattttatcgtcgtaatgtcgtcgtggggcgtaaaagagtgtcgtataggtattaattcgttgatcgtcgttattttttttacgtcgattattatggtcgatatgtcgatgtcgatgtttttttacggtatgttagaagttaatcgtttggtaggtcgttagttttcggtcgatg

SEQ ID NO: 24476 - DNA, 524 bp, Artificial Sequence
  chemically treated genomic DNA (Homo sapiens) CpG-island No: 24476
catcgaccgaaaactaacgacctaccaaacgattaacttctaacataccgtaaaaaaacatcgacatcgacatatcgaccataataatcgacgtaaaaaaaataacgacgatcaacgaattaatacctatacgacactcttttacgccccacgacgacattacgacgataaaattaatccaacaaataccaatataacctttttccgccgcctaccaaccgtaactatcgccgcgcatccaataattaacattacgtaataccacaaaccaatacgtaatcgaaaaccaatcaataacgccatccatcatcttattcgctatcaaattaccgatcgaacgccgaacgtctcccgatccatttacccacgctaaattcgattaaatttacgtaaaatatttcccgataccgcgttaacgcaccgaaaccattacccgtaaattaccgcatccgaacgaaccatcttcaaatctcataattaacgttattaccacaaaattaaacaaacctcgcctattacctaaa

SEQ ID NO: 24477 - DNA, 563 bp, Artificial Sequence
  chemically treated genomic DNA (Homo sapiens) CpG-island No: 24477
tttatcgtcgtttgaatgttaaagttggaagaaagtatatatttatcgggtagattatttagcgtttaggttacgcggtttttagcgtttagtttttttagttcggcgttagttttcgttagcgttagaatgcgatttattttcggtagttcgtttagggcgtttagatcgagtttggatataagattttttattggtttgttttgtttgatgcgacgtttacgcgtttttattaggtttataagatcgggttgatggttaattttataaattacgcgtcggatcgagtatcgggcgaatgatgttcgtacgtatcgtaaagtcgtcgaagtttttattcgtttcgcgttttttcgtttagcgttttattagtttattaagcgacgttaggattttcggttcggtgatgttttttttatatattcgtgggatacgtgtttaatgcggttgtcgttaagatgtaggttgtagcgattcgggtttaattattaggttattttcgtaaatgcgcgatataatcgtcgggtagttgttaacgtatacgaatggttatggtgattatg

SEQ ID NO: 24478 - DNA, 563 bp, Artificial Sequence
  chemically treated genomic DNA (Homo sapiens) CpG-island No: 24478
cataatcaccataaccattcgtatacgttaacaactacccgacgattatatcgcgcatttacgaaaataacctaataattaaacccgaatcgctacaacctacatcttaacgacaaccgcattaaacacgtatcccacgaatatataaaaaaaacatcaccgaaccgaaaatcctaacgtcgcttaataaactaataaaacgctaaacgaaaaaacgcgaaacgaataaaaacttcgacgactttacgatacgtacgaacatcattcgcccgatactcgatccgacgcgtaatttataaaattaaccatcaacccgatcttataaacctaataaaaacgcgtaaacgtcgcatcaaacaaaacaaaccaataaaaaatcttatatccaaactcgatctaaacgccctaaacgaactaccgaaaataaatcgcattctaacgctaacgaaaactaacgccgaactaaaaaaactaaacgctaaaaaccgcgtaacctaaacgctaaataatctacccgataaatatatactttcttccaactttaacattcaaacgacgataaa

SEQ ID NO: 24479 - DNA, 563 bp, Artificial Sequence
  chemically treated genomic DNA (Homo sapiens) CpG-island No: 24479
tatggttattatgattattcgtatgcgttaatagttgttcgacggttgtgtcgcgtatttgcggaagtggtttggtggttaagttcgggtcgttataatttgtattttggcggtaatcgtattggatacgtattttacggatgtataaagaaaatattatcgagtcggaaattttggcgtcgtttgatgaattgatagggcgttgggcgaaagagcgcgaagcgggtgaaggtttcggcgattttacggtgcgtgcgggtattattcgttcggtgttcgattcggcgcgtgatttgtgggattaattattagttcggttttgtaggtttgataagaacgcgtgagcgtcgtattaggtaaggtaaattagtgaggaattttatgtttaaattcgatttaaacgttttgaacgaattgtcgaaggtagatcgtattttggcgttggcggaaattaacgtcgaattggaaaaattggacgttgaaggtcgcgtagtttgggcgttggataatttgttcggtgaatatgtatttttttttagttttggtatttaggcggcggtgag

SEQ ID NO: 24480 - DNA, 563 bp, Artificial Sequence
  chemically treated genomic DNA (Homo sapiens) CpG-island No: 24480
ctcaccgccgcctaaataccaaaactaaaaaaaaatacatattcaccgaacaaattatccaacgcccaaactacgcgaccttcaacgtccaatttttccaattcgacgttaatttccgccaacgccaaaatacgatctaccttcgacaattcgttcaaaacgtttaaatcgaatttaaacataaaattcctcactaatttaccttacctaatacgacgctcacgcgttcttatcaaacctacaaaaccgaactaataattaatcccacaaatcacgcgccgaatcgaacaccgaacgaataatacccgcacgcaccgtaaaatcgccgaaaccttcacccgcttcgcgctctttcgcccaacgccctatcaattcatcaaacgacgccaaaatttccgactcgataatattttctttatacatccgtaaaatacgtatccaatacgattaccgccaaaatacaaattataacgacccgaacttaaccaccaaaccacttccgcaaatacgcgacacaaccgtcgaacaactattaacgcatacgaataatcataataaccata

SEQ ID NO: 24481 - DNA, 552 bp, Artificial Sequence
  chemically treated genomic DNA (Homo sapiens) CpG-island No: 24481
aaattaaagtttagatcggtagagaaaacggtttcgcgcgtttataagtcggtttttagtttacgcggatagcggtagcggttcgttagtagtaggttatcggttatgtttttgagtattttttttttgttgcgttagtcgttttttagtgtgatgtattcggcggtgattagcggtgcgttttgttgggttatgcggaattgcgttagtaggtgttttatttttagcgaagtacggtaggttattgtttggttgagtaatttgcggtatttacggttattaagttgcgttattcgagttttcgtcgtcggaattgatggtgcgtttatgttgagtttatttagttttaagtcgattagtaacggtagtacggaatttttcgtttttagtttatcgtatagattaatttatttgttttggcgatgtatcgtttgtacggcgtaatcgagcgttcgtaagaatgtcggatttaggttgttgtagtgacgagtaattttaggcgtttcgcgatttatcgttagtagatattgcgttaggttattattattaata

SEQ ID NO: 24482 - DNA, 552 bp, Artificial Sequence
  chemically treated genomic DNA (Homo sapiens) CpG-island No: 24482
tattaataataataacctaacgcaatatctactaacgataaatcgcgaaacgcctaaaattactcgtcactacaacaacctaaatccgacattcttacgaacgctcgattacgccgtacaaacgatacatcgccaaaacaaataaattaatctatacgataaactaaaaacgaaaaattccgtactaccgttactaatcgacttaaaactaaataaactcaacataaacgcaccatcaattccgacgacgaaaactcgaataacgcaacttaataaccgtaaataccgcaaattactcaaccaaacaataacctaccgtacttcgctaaaaataaaacacctactaacgcaattccgcataacccaacaaaacgcaccgctaatcaccgccgaatacatcacactaaaaaacgactaacgcaacaaaaaaaaaatactcaaaaacataaccgataacctactactaacgaaccgctaccgctatccgcgtaaactaaaaaccgacttataaacgcgcgaaaccgttttctctaccgatctaaactttaattt

SEQ ID NO: 24483 - DNA, 552 bp, Artificial Sequence
  chemically treated genomic DNA (Homo sapiens) CpG-island No: 24483
tattggtagtaatgatttgacgtagtatttgttggcggtggatcgcgaaacgtttaaggttattcgttattataatagtttgaattcggtatttttgcgggcgttcgattacgtcgtgtaagcggtgtatcgttagggtaaatggattggtttgtgcggtgagttgggagcgaaaggtttcgtgttgtcgttgttggtcggtttagggttggatgaatttagtatgagcgtattattaatttcggcggcgaaagttcggatggcgtaatttgatagtcgtgagtgtcgtaagttgtttaattaggtaatggtttgtcgtatttcgttggaagtagaatatttgttggcgtaatttcgtatgatttaataagacgtatcgttggttatcgtcgagtgtattatattggaaagcgattggcgtagtaaagaagaagtgtttaaaggtatgatcgataatttgttgttggcgggtcgttgtcgttattcgcgtaaattggaagtcgatttgtgggcgcgcgaggtcgttttttttatcggtttgggttttagttt

SEQ ID NO: 24484 - DNA, 552 bp, Artificial Sequence
  chemically treated genomic DNA (Homo sapiens) CpG-island No: 24484
aaactaaaacccaaaccgataaaaaaaacgacctcgcgcgcccacaaatcgacttccaatttacgcgaataacgacaacgacccgccaacaacaaattatcgatcatacctttaaacacttcttctttactacgccaatcgctttccaatataatacactcgacgataaccaacgatacgtcttattaaatcatacgaaattacgccaacaaatattctacttccaacgaaatacgacaaaccattacctaattaaacaacttacgacactcacgactatcaaattacgccatccgaactttcgccgccgaaattaataatacgctcatactaaattcatccaaccctaaaccgaccaacaacgacaacacgaaacctttcgctcccaactcaccgcacaaaccaatccatttaccctaacgatacaccgcttacacgacgtaatcgaacgcccgcaaaaataccgaattcaaactattataataacgaataaccttaaacgtttcgcgatccaccgccaacaaatactacgtcaaatcattactaccaata

SEQ ID NO: 24485 - DNA, 604 bp, Artificial Sequence
  chemically treated genomic DNA (Homo sapiens) CpG-island No: 24485
tggcggtaggaattattattagcgcgggaattagcgttagatttagtaacgtttttttataatcgtttaaacggtaattgacgtagtacgcgagaacgttaattaagttgtcgataattagcgataacgtattatttgcggtatcgcgaaagttttttattagcgttagtaataggttgttttaggcgatttttatttgtattagcgttattaaacgtattagtttttgatagtcggtattattaaataatttttggttgattggcgtagttgttagtataaaaattagcgttattagcgtagagaaattaagtattatcgttgatgaagtgtcgattacgcggcgtagttgttgcggattattatggtattgggtaacgtatttggttatatcgttaaagatgttagtttcggtaagtacgtcgagtacggtaattaattggcggaaatttgtcgttagtttaagtttcgtcggattaaatgatatcgttagtaatttatcgattagtaattcggtattaattttgattagtgtattggtcgtcgtttataaggacgtttttgttaacgatatattaggaaaagtagtttaataaagtcgtaa

SEQ ID NO: 24486 - DNA, 604 bp, Artificial Sequence
  chemically treated genomic DNA (Homo sapiens) CpG-island No: 24486
ttacgactttattaaactacttttcctaatatatcgttaacaaaaacgtccttataaacgacgaccaatacactaatcaaaattaataccgaattactaatcgataaattactaacgatatcatttaatccgacgaaacttaaactaacgacaaatttccgccaattaattaccgtactcgacgtacttaccgaaactaacatctttaacgatataaccaaatacgttacccaataccataataatccgcaacaactacgccgcgtaatcgacacttcatcaacgataatacttaatttctctacgctaataacgctaatttttatactaacaactacgccaatcaaccaaaaattatttaataataccgactatcaaaaactaatacgtttaataacgctaatacaaataaaaatcgcctaaaacaacctattactaacgctaataaaaaactttcgcgataccgcaaataatacgttatcgctaattatcgacaacttaattaacgttctcgcgtactacgtcaattaccgtttaaacgattataaaaaaacgttactaaatctaacgctaattcccgcgctaataataattcctaccgcca

SEQ ID NO: 24487 - DNA, 604 bp, Artificial Sequence
  chemically treated genomic DNA (Homo sapiens) CpG-island No: 24487
ttgcgattttgttgaattattttttttgatatgtcgttggtaaaagcgtttttgtggacggcggttagtatattggttaagattggtgtcgggttattggtcggtaagttgttggcggtgttatttggttcggcggggtttgggttggcggtaaattttcgttagttgattatcgtgttcggcgtgtttgtcggggttggtatttttaacggtgtaattaaatacgttgtttagtattatgataattcgtaatagttgcgtcgcgtggtcggtattttattagcgatggtatttggtttttttacgttgatggcgttggtttttgtgttggtagttgcgttaattagttagggattgtttggtaatatcgattattaggggttggtgcgtttagtggcgttggtgtaaatggggatcgtttggggtaatttgttattggcgttgatgaaaggttttcgcgatgtcgtaggtaatgcgttatcgttgattgtcggtagtttgattggcgttttcgcgtattacgttagttatcgtttgggcggttatgaaggggcgttgttgggtttggcgttgattttcgcgttggtggtaatttttgtcgtta

SEQ ID NO: 24488 - DNA, 604 bp, Artificial Sequence
  chemically treated genomic DNA (Homo sapiens) CpG-island No: 24488
taacgacaaaaattaccaccaacgcgaaaatcaacgccaaacccaacaacgccccttcataaccgcccaaacgataactaacgtaatacgcgaaaacgccaatcaaactaccgacaatcaacgataacgcattacctacgacatcgcgaaaacctttcatcaacgccaataacaaattaccccaaacgatccccatttacaccaacgccactaaacgcaccaacccctaataatcgatattaccaaacaatccctaactaattaacgcaactaccaacacaaaaaccaacgccatcaacgtaaaaaaaccaaataccatcgctaataaaataccgaccacgcgacgcaactattacgaattatcataatactaaacaacgtatttaattacaccgttaaaaataccaaccccgacaaacacgccgaacacgataatcaactaacgaaaatttaccgccaacccaaaccccgccgaaccaaataacaccgccaacaacttaccgaccaataacccgacaccaatcttaaccaatatactaaccgccgtccacaaaaacgcttttaccaacgacatatcaaaaaaaataattcaacaaaatcgcaa

SEQ ID NO: 24489 - DNA, 690 bp, Artificial Sequence
  chemically treated genomic DNA (Homo sapiens) CpG-island No: 24489
tagttagatattgaattaataggcggtaatcgttagtaatttggttaatgttttaacgttcggttttcgcgcgtagttgaatgttttacgcgcggtgttagtggaagggttttttttgtttacgcgtacgttggttacggcgttaacgtcgggcgtagatatacgttcggtaaaatggattatatttcgcgttcgttggacgtcgcgttgtagtaggatggttggttggtcgtgtagatcgttgacggtagcgaagggtatacgcgtaatggtagtatttacgttgattttatcgggtaattgataatttaggggtattcggtgataggcgaggttgggttaattgttgtgtcggaaggggcggaaattattattgttgtcgattgtataatttcggcgtttaattcgggcgattcggcgaatacggttgcgtttagtagggcgttttaatattggtgaaagttacgggttagcggtaagtgttagttgcgtgtgtacgacggtaatttttttgtttaagcgtagaaatttaggttacgtttgggtcggtattgtacggtagatttaattttgcgtggtgatgtcgggggttttggaacgtagtaacgtcgatgtcgttgcggtaatgagcgatatgattgttagcgcgcggcgttttgaaatgtagattaatgttattagtagcgttta

SEQ ID NO: 24490 - DNA, 690 bp, Artificial Sequence
  chemically treated genomic DNA (Homo sapiens) CpG-island No: 24490
taaacgctactaataacattaatctacatttcaaaacgccgcgcgctaacaatcatatcgctcattaccgcaacgacatcgacgttactacgttccaaaacccccgacatcaccacgcaaaattaaatctaccgtacaataccgacccaaacgtaacctaaatttctacgcttaaacaaaaaaattaccgtcgtacacacgcaactaacacttaccgctaacccgtaactttcaccaatattaaaacgccctactaaacgcaaccgtattcgccgaatcgcccgaattaaacgccgaaattatacaatcgacaacaataataatttccgccccttccgacacaacaattaacccaacctcgcctatcaccgaatacccctaaattatcaattacccgataaaatcaacgtaaatactaccattacgcgtatacccttcgctaccgtcaacgatctacacgaccaaccaaccatcctactacaacgcgacgtccaacgaacgcgaaatataatccattttaccgaacgtatatctacgcccgacgttaacgccgtaaccaacgtacgcgtaaacaaaaaaaacccttccactaacaccgcgcgtaaaacattcaactacgcgcgaaaaccgaacgttaaaacattaaccaaattactaacgattaccgcctattaattcaatatctaacta

SEQ ID NO: 24491 - DNA, 690 bp, Artificial Sequence
  chemically treated genomic DNA (Homo sapiens) CpG-island No: 24491
tagacgttgttgataatattaatttgtattttaaaacgtcgcgcgttggtaattatgtcgtttattgtcgtaacggtatcgacgttattgcgttttagaattttcgatattattacgtaaggttggatttgtcgtgtagtatcggtttaagcgtggtttgggtttttgcgtttaaatagaaaaattgtcgtcgtatatacgtagttagtatttatcgttgattcgtggtttttattagtattaagacgttttattaggcgtaatcgtattcgtcggatcgttcggattgagcgtcgagattgtgtaatcggtagtaatagtgattttcgtttttttcggtatagtaattggtttagtttcgtttattatcggatgtttttgaattgttagttgttcggtgggattaacgtgaatgttgttattacgcgtatatttttcgttgtcgttagcggtttgtacggttagttagttattttgttgtaacgcgacgtttagcgggcgcgaggtgtaatttattttgtcgggcgtatatttgcgttcggcgttgacgtcgtgattaacgtgcgcgtgggtagagaaagtttttttattggtatcgcgcgtaaagtatttaattgcgcgcgaaaatcgggcgttgaggtattggttagattattggcggttatcgtttgttgatttagtgtttggttg

SEQ ID NO: 24492 - DNA, 690 bp, Artificial Sequence
  chemically treated genomic DNA (Homo sapiens) CpG-island No: 24492
caaccaaacactaaatcaacaaacgataaccgccaataatctaaccaatacctcaacgcccgattttcgcgcgcaattaaatactttacgcgcgataccaataaaaaaactttctctacccacgcgcacgttaatcacgacgtcaacgccgaacgcaaatatacgcccgacaaaataaattacacctcgcgcccgctaaacgtcgcgttacaacaaaataactaactaaccgtacaaaccgctaacgacaacgaaaaatatacgcgtaataacaacattcacgttaatcccaccgaacaactaacaattcaaaaacatccgataataaacgaaactaaaccaattactataccgaaaaaaacgaaaatcactattactaccgattacacaatctcgacgctcaatccgaacgatccgacgaatacgattacgcctaataaaacgtcttaatactaataaaaaccacgaatcaacgataaatactaactacgtatatacgacgacaatttttctatttaaacgcaaaaacccaaaccacgcttaaaccgatactacacgacaaatccaaccttacgtaataatatcgaaaattctaaaacgcaataacgtcgataccgttacgacaataaacgacataattaccaacgcgcgacgttttaaaatacaaattaatattatcaacaacgtcta

SEQ ID NO: 24493 - DNA, 540 bp, Artificial Sequence
  chemically treated genomic DNA (Homo sapiens) CpG-island No: 24493
ttcggttattattcgttagatcgttaatatttattgtatatggttgcgtggcgaattaacgtttgtttcgttatttacgtttttcgttgatgtagtggaagagtattagtaatatcgcgaaagcgaagtttggtagcgtgatgcggtattttgggtagaatagcgtcgttaattgtcgtcgttcgcgttatttttttcggtatttttatcggggcgtagcgtttcggtagatattttgcgtttgaaattggaatttatcgacggggaatttcgttagttggttacgtaatttttaggtgtgtagcgtatcgatttagtttttgcgttggtagttttgtggttggggcgattgtgtaatcggtatggattacgtcgtcgatttatttttatgcgtttgattgggttcgtgcggcgtttacggttatcggattcgtgtttaacgttttcgtcgttgtggtatttatattgtcggcgtaagaaattttgttcggaattggtaattcgtattggtagattataattgaaaaaaatgcgtcgtta

SEQ ID NO: 24494 - DNA, 540 bp, Artificial Sequence
  chemically treated genomic DNA (Homo sapiens) CpG-island No: 24494
taacgacgcatttttttcaattataatctaccaatacgaattaccaattccgaacaaaatttcttacgccgacaatataaataccacaacgacgaaaacgttaaacacgaatccgataaccgtaaacgccgcacgaacccaatcaaacgcataaaaataaatcgacgacgtaatccataccgattacacaatcgccccaaccacaaaactaccaacgcaaaaactaaatcgatacgctacacacctaaaaattacgtaaccaactaacgaaattccccgtcgataaattccaatttcaaacgcaaaatatctaccgaaacgctacgccccgataaaaataccgaaaaaaataacgcgaacgacgacaattaacgacgctattctacccaaaataccgcatcacgctaccaaacttcgctttcgcgatattactaatactcttccactacatcaacgaaaaacgtaaataacgaaacaaacgttaattcgccacgcaaccatatacaataaatattaacgatctaacgaataataaccgaa

SEQ ID NO: 24495 - DNA, 540 bp, Artificial Sequence
  chemically treated genomic DNA (Homo sapiens) CpG-island No: 24495
tgacgacgtattttttttagttgtagtttgttagtgcgggttgttagtttcggatagagttttttgcgtcgataatgtgaatattataacggcgaaaacgttgagtacgggttcggtagtcgtaagcgtcgtacgagtttagttagacgtataaagataaatcggcggcgtagtttatatcgattgtataatcgttttagttataaggttgttagcgtaagggttaaatcggtacgttgtatatttgaaagttgcgtagttagttggcggaatttttcgtcggtaaattttagttttaggcgtagaatatttgtcgaggcgttgcgtttcggtaaaggtgtcggagaaagtgacgcgggcggcggtagttgacgacgttgttttgtttagaatgtcgtattacgttgttaggtttcgttttcgcggtattgttggtatttttttattatattagcgaaaggcgtaaatggcgaagtaggcgttggttcgttacgtagttatgtgtagtaaatattggcgatttggcgggtaatggtcggg

SEQ ID NO: 24496 - DNA, 540 bp, Artificial Sequence
  chemically treated genomic DNA (Homo sapiens) CpG-island No: 24496
cccgaccattacccgccaaatcgccaatatttactacacataactacgtaacgaaccaacgcctacttcgccatttacgcctttcgctaatataataaaaaaataccaacaataccgcgaaaacgaaacctaacaacgtaatacgacattctaaacaaaacaacgtcgtcaactaccgccgcccgcgtcactttctccgacacctttaccgaaacgcaacgcctcgacaaatattctacgcctaaaactaaaatttaccgacgaaaaattccgccaactaactacgcaactttcaaatatacaacgtaccgatttaacccttacgctaacaaccttataactaaaacgattatacaatcgatataaactacgccgccgatttatctttatacgtctaactaaactcgtacgacgcttacgactaccgaacccgtactcaacgttttcgccgttataatattcacattatcgacgcaaaaaactctatccgaaactaacaacccgcactaacaaactacaactaaaaaaaatacgtcgtca

SEQ ID NO: 24497 - DNA, 556 bp, Artificial Sequence
  chemically treated genomic DNA (Homo sapiens) CpG-island No: 24497
tgtacggttacggttttggttttttgttttttcggtgttatcggtttgttattcgcgtacgggtaaatttttattatacggatgcgggattgggtcgatttttttataggggtattaagacgggtggaatttacgtcgttttagttaggtagcgttttttttacgataatcgcggtattacgtatatcgcggattttattaattggttcgtttatcgttagacgatgcgttatttttattagcggacgtttatcgttattaaatattagtatgtcggttttcgaatttattagtacggaacggcgtacggtatcggattagtaattataatgcgcggtacggcgtagattagttttaatatcgacgaggattatcggtatatttttttacgtttttttataacgttgggtataaattagtgtggcgcgattcgggcgtttattcgcgacgttattcggcgtgtaggtatcgttatgacgtaaacggcgatcggcggtataacggttgattatcgaatttatgttgttagtagtaatattcgaagaatagattcggt

SEQ ID NO: 24498 - DNA, 556 bp, Artificial Sequence
  chemically treated genomic DNA (Homo sapiens) CpG-island No: 24498
accgaatctattcttcgaatattactactaacaacataaattcgataatcaaccgttataccgccgatcgccgtttacgtcataacgatacctacacgccgaataacgtcgcgaataaacgcccgaatcgcgccacactaatttatacccaacgttataaaaaaacgtaaaaaaatataccgataatcctcgtcgatattaaaactaatctacgccgtaccgcgcattataattactaatccgataccgtacgccgttccgtactaataaattcgaaaaccgacatactaatatttaataacgataaacgtccgctaataaaaataacgcatcgtctaacgataaacgaaccaattaataaaatccgcgatatacgtaataccgcgattatcgtaaaaaaaacgctacctaactaaaacgacgtaaattccacccgtcttaatacccctataaaaaaatcgacccaatcccgcatccgtataataaaaatttacccgtacgcgaataacaaaccgataacaccgaaaaaacaaaaaaccaaaaccgtaaccgtaca

SEQ ID NO: 24499 - DNA, 556 bp, Artificial Sequence
  chemically treated genomic DNA (Homo sapiens) CpG-island No: 24499
atcgaatttgtttttcgggtgttattgttggtaatatggattcgatgattaatcgttatatcgtcgatcgtcgtttacgttatgacgatgtttatacgtcggataacgtcgcgggtaagcgttcggatcgcgttatattggtttatatttagcgttgtaaagaggcgtggaaagatgtatcggtgattttcgtcggtattgaggttagtttgcgtcgtatcgcgtattatgattattggttcgatatcgtgcgtcgtttcgtgttggtggattcgaaagtcgatatgttgatgtttggtaacggtgagcgttcgttggtggaagtggcgtatcgtttggcgatgggcgagttaattagtgaaattcgcgatgtgcgtaatatcgcgattatcgtgaaagaggcgttgtttggttggagcggcgtggattttattcgttttgatatttttgtggaaaaatcgatttaatttcgtattcgtatggtgaagatttgttcgtgcgcggataataaatcggtggtatcgaaaaagtaggaagttaaagtcgtaatcgtgta

SEQ ID NO: 24500 - DNA, 556 bp, Artificial Sequence
  chemically treated genomic DNA (Homo sapiens) CpG-island No: 24500
tacacgattacgactttaacttcctactttttcgataccaccgatttattatccgcgcacgaacaaatcttcaccatacgaatacgaaattaaatcgatttttccacaaaaatatcaaaacgaataaaatccacgccgctccaaccaaacaacgcctctttcacgataatcgcgatattacgcacatcgcgaatttcactaattaactcgcccatcgccaaacgatacgccacttccaccaacgaacgctcaccgttaccaaacatcaacatatcgactttcgaatccaccaacacgaaacgacgcacgatatcgaaccaataatcataatacgcgatacgacgcaaactaacctcaataccgacgaaaatcaccgatacatctttccacgcctctttacaacgctaaatataaaccaatataacgcgatccgaacgcttacccgcgacgttatccgacgtataaacatcgtcataacgtaaacgacgatcgacgatataacgattaatcatcgaatccatattaccaacaataacacccgaaaaacaaattcgat

SEQ ID NO: 24501 - DNA, 693 bp, Artificial Sequence
  chemically treated genomic DNA (Homo sapiens) CpG-island No: 24501
  unsure (9, 39, 55, 57, 66..67, 98..99, 115, 159, 175, 193, 198, 200)
  unsure (205, 259, 304, 369, 382, 401, 415, 456, 525, 546, 558..559)
  unsure (586, 595, 651, 662, 669, 687..)
tcgtatagnagacgtcggcgagtcgagagcgagaacgangagttagaagtaagtnanaagttattnntatatattcgtgtattatttggggagaatanntttttttgttatcganaggtttatcgtatagcgtagacgaggagagttttaattttattnttatatgcggtacgtnttttttttacgatcgttntttantnatatnggttttacgatatttaagttcggttgatatatagtagttgttattcgtatattntttttcgatttagatttatgtcgtcgacgagcgcgcgtgttgagncggttatatcgtttgcggcgttgggcgacgaacgcgattattgtattagcgattgtgttttatgntgatacgtttatnttagttagacggtagtttncgttaattagtcgngcgttacggcgcgagtttcgttttttcgcgagcgtttgtgntttagattcgcgtcgtattttttcgcgtatatatagtttttttgttcgggggcggatgtttttttgaangtttattaatttatgtttcgnaggtacgttttnncgtttattttttttatattagttattntttattttncgtcgtttatagttttgaatcgggtgtcgtttcgtgtattgtattattattagttntatttattgtntaattantttatgattttttttatnnnttag

SEQ ID NO: 24502 - DNA, 693 bp, Artificial Sequence
  chemically treated genomic DNA (Homo sapiens) CpG-island No: 24502
  unsure (5..6, 25, 32, 43, 99, 108, 135..136, 148, 169, 238, 279, 293)
  unsure (312, 325, 390, 435, 489, 494, 496, 501, 519, 535, 579, 595..596)
  unsure (627..628, 637, 639, 655, 685)
ctaannnataaaaaaaatcataaantaattanacaataaatanaactaataataatacaatacacgaaacgacacccgattcaaaactataaacgacgnaaaataaanaataactaatataaaaaaaataaacgnnaaaacgtacctncgaaacataaattaataaacnttcaaaaaaacatccgcccccgaacaaaaaaactatatatacgcgaaaaaatacgacgcgaatctaaancacaaacgctcgcgaaaaaacgaaactcgcgccgtaacgcncgactaattaacgnaaactaccgtctaactaanataaacgtatcancataaaacacaatcgctaatacaataatcgcgttcgtcgcccaacgccgcaaacgatataaccgnctcaacacgcgcgctcgtcgacgacataaatctaaatcgaaaaanaatatacgaataacaactactatatatcaaccgaacttaaatatcgtaaaaccnatatnantaaanaacgatcgtaaaaaaaanacgtaccgcatataanaataaaattaaaactctcctcgtctacgctatacgataaacctntcgataacaaaaaaanntattctccccaaataatacacgaatatatannaataacttntnacttacttctaactcntcgttctcgctctcgactcgccgacgtctnctatacga

SEQ ID NO: 24503 - DNA, 693 bp, Artificial Sequence
  chemically treated genomic DNA (Homo sapiens) CpG-island No: 24503
  unsure (5..6, 25, 32, 43, 99, 108, 135..136, 148, 169, 238, 279, 293)
  unsure (312, 325, 390, 435, 489, 494, 496, 501, 519, 535, 579, 595..596)
  unsure (627..628, 637, 639, 655, 685)
ttggnnngtaggagagattatgagntgattgngtagtaaatangattgatggtggtgtagtgtacgaggcgatattcgatttagggttatggacggcgnagagtggangatagttggtgtgaggagggtgagcgnngggacgtgtttncgagatataagttagtgagtntttaggagagtattcgttttcgagtaaaggaattatgtgtgcgcggagaggtgcgacgcgagtttggantataggcgttcgcgagagggcgaggttcgcgtcgtagcgtncggttgattgacgnaaattatcgtttgattagngtgagcgtgttantataagatatagtcgttgatgtagtaatcgcgttcgtcgtttagcgtcgtaagcgatgtgatcgntttaatacgcgcgttcgtcgacgatatagatttggatcggagagnagtatgcgggtgatagttgttgtgtattagtcgggtttgggtatcgtgaggttngtgtngntgggnggcggtcgtgaggaggangcgtatcgtatgtagnagtggggttggggtttttttcgtttgcgttgtgcggtgagtttntcgataatagggaggnntgttttttttaagtgatgtacgggtgtgtgnnagtagtttntngtttgtttttggtttntcgttttcgttttcggttcgtcggcgtttnttatgcgg

SEQ ID NO: 24504 - DNA, 693 bp, Artificial Sequence
  chemically treated genomic DNA (Homo sapiens) CpG-island No: 24504
  unsure (9, 39, 55, 57, 66..67, 98..99, 115, 159, 175, 193, 198, 200)
  unsure (205, 259, 304, 369, 382, 401, 415, 456, 525, 546, 558..559)
  unsure (586, 595, 651, 662, 669, 687..)
ccgcataanaaacgccgacgaaccgaaaacgaaaacganaaaccaaaaacaaacnanaaactactnncacacacccgtacatcacttaaaaaaaacanncctccctattatcganaaactcaccgcacaacgcaaacgaaaaaaaccccaaccccactnctacatacgatacgcntcctcctcacgaccgccncccancnacacnaacctcacgatacccaaacccgactaatacacaacaactatcacccgcatactnctctccgatccaaatctatatcgtcgacgaacgcgcgtattaaancgatcacatcgcttacgacgctaaacgacgaacgcgattactacatcaacgactatatcttatantaacacgctcacnctaatcaaacgataatttncgtcaatcaaccgnacgctacgacgcgaacctcgccctctcgcgaacgcctatantccaaactcgcgtcgcacctctccgcgcacacataattcctttactcgaaaacgaatactctcctaaanactcactaacttatatctcgnaaacacgtcccnncgctcaccctcctcacaccaactatcntccactctncgccgtccataaccctaaatcgaatatcgcctcgtacactacaccaccatcaatcntatttactacncaatcanctcataatctctcctacnnnccaa

SEQ ID NO: 24505 - DNA, 543 bp, Artificial Sequence
  chemically treated genomic DNA (Homo sapiens) CpG-island No: 24505
  unsure (45, 123, 191, 206, 372, 481)
atatcgtataataacgatttttattttagattacgatttcgtttnaggaggttttgcggttatttttaggttttacgtagtatgtattacgtattttatgatatcggaagaatacgtttgagnatattcgtttaagtgcgcgtcgtagatcgtttgttagtcgcgagtttttattttgacgcgagtgtttnatgggattttatttngtgacggttatagatagtcggatttatatacgtcgcgttgtgacgattttgttttttgtcgcgtttttcgttttattcgagaatatgtgatacgtacgatttagtagtttcgcggtggcggtcgttagttttaggtttcggtattcgtatttttcgagtattattncgtcgtttatttattatttaatatgttttttatttatcggatttttatagttttttttgatgtgacgtcgttttagatttttttttttattgtttgcgtaggtattgancgcgttagggagtagcgtgtttatattttttttcgatgatatttatagttattcgtatattt

SEQ ID NO: 24506 - DNA, 543 bp, Artificial Sequence
  chemically treated genomic DNA (Homo sapiens) CpG-island No: 24506
  unsure (63, 172, 338, 353, 421, 499)
aaatatacgaataactataaatatcatcgaaaaaaaatataaacacgctactccctaacgcgntcaatacctacgcaaacaataaaaaaaaaaatctaaaacgacgtcacatcaaaaaaaactataaaaatccgataaataaaaaacatattaaataataaataaacgacgnaataatactcgaaaaatacgaataccgaaacctaaaactaacgaccgccaccgcgaaactactaaatcgtacgtatcacatattctcgaataaaacgaaaaacgcgacaaaaaacaaaatcgtcacaacgcgacgtatataaatccgactatctataaccgtcacnaaataaaatcccatnaaacactcgcgtcaaaataaaaactcgcgactaacaaacgatctacgacgcgcacttaaacgaatatnctcaaacgtattcttccgatatcataaaatacgtaatacatactacgtaaaacctaaaaataaccgcaaaacctcctnaaacgaaatcgtaatctaaaataaaaatcgttattatacgatat

SEQ ID NO: 24507 - DNA, 543 bp, Artificial Sequence
  chemically treated genomic DNA (Homo sapiens) CpG-island No: 24507
  unsure (63, 172, 338, 353, 421, 499)
ggatgtacgaatagttataagtattatcgaagaagagtataagtacgttgttttttggcgcgnttagtatttacgtaaatagtgaagggggggatttgggacgacgttatattaggagaggttgtggagattcggtaggtggagaatatattgagtgatggatgggcgacgnagtagtattcggagggtgcgagtgtcggagtttgaggttggcggtcgttatcgcgaagttattaggtcgtacgtgttatatattttcgggtgaggcgagggacgcgatagaggatagaatcgttatagcgcggcgtgtgtgagttcgattgtttatgatcgttatnagatgagattttatnaggtattcgcgttaaagtaggagttcgcgattgataagcggtttacgacgcgtatttaggcgaatatntttaagcgtgttttttcggtgttatgaggtgcgtaatgtatattacgtgaagtttgggagtggtcgtagagttttttngggcggggtcgtggtttagggtggagatcgttgttgtgcggtgt

SEQ ID NO: 24508 - DNA, 543 bp, Artificial Sequence
  chemically treated genomic DNA (Homo sapiens) CpG-island No: 24508
  unsure (45, 123, 191, 206, 372, 481)
acaccgcacaacaacgatctccaccctaaaccacgaccccgcccnaaaaaactctacgaccactcccaaacttcacgtaatatacattacgcacctcataacaccgaaaaaacacgcttaaanatattcgcctaaatacgcgtcgtaaaccgcttatcaatcgcgaactcctactttaacgcgaatacctnataaaatctcatctnataacgatcataaacaatcgaactcacacacgccgcgctataacgattctatcctctatcgcgtccctcgcctcacccgaaaatatataacacgtacgacctaataacttcgcgataacgaccgccaacctcaaactccgacactcgcaccctccgaatactactncgtcgcccatccatcactcaatatattctccacctaccgaatctccacaacctctcctaatataacgtcgtcccaaatcccccccttcactatttacgtaaatactaancgcgccaaaaaacaacgtacttatactcttcttcgataatacttataactattcgtacatcc

SEQ ID NO: 24509 - DNA, 743 bp, Artificial Sequence
  chemically treated genomic DNA (Homo sapiens) CpG-island No: 24509
  unsure (124, 228, 247, 300, 316, 504, 507, 597, 631, 653, 663, 701)
  unsure (722, 729)
cgtcgttttcgtgtatttatttaatcgttaacgtcgttttttattatcgtttcgtgtttcgtttgatattattcgtgttttttcgttacgttattattatatcggttgcgatgtttttcgttanatcgatgttttttttttaattcgtaatcgtttttcgtattattttaacgcgttttatagtgagcgttttttgttgatgtaattagtgttcgttttcgttttttncgtttatttttttaatttntgttttcggtttcgagatttatatttcgttattattttttatttattcgtttnttttttatggttttanatttcgtagtgtatgttgtgagagggagcgttttggtatggttttttgtttttcgttcggcgtagttattattttagtgttttttacggatcgtttttagttgttttttattggatacgttcgtagttcgttattattaacggaagtttattgcgaatttgtcgacgtagatagcgtcggattagcgnatnggtgtttattgttttttttattatggtgttattttcgtttgtttattattgttagatatcgcgttacgtgcgtttttttttgacgtacgnttgagcggcgatttttagatatcgtatttttgangtgttttttatcgatcgatcgnattttacgtnatgagatataatttagattattcgatttcgcgtttttntgtttttttttttattgcgtnttatttnatttttatttatgt

SEQ ID NO: 24510 - DNA, 743 bp, Artificial Sequence
  chemically treated genomic DNA (Homo sapiens) CpG-island No: 24510
  unsure (15, 22, 43, 81, 91, 113, 147, 237, 240, 428, 444, 497, 516)
  unsure (620)
acataaataaaaatnaaataanacgcaataaaaaaaaaaacanaaaaacgcgaaatcgaataatctaaattatatctcatnacgtaaaatncgatcgatcgataaaaaacacntcaaaaatacgatatctaaaaatcgccgctcaancgtacgtcaaaaaaaaacgcacgtaacgcgatatctaacaataataaacaaacgaaaataacaccataataaaaaaaacaataaacaccnatncgctaatccgacgctatctacgtcgacaaattcgcaataaacttccgttaataataacgaactacgaacgtatccaataaaaaacaactaaaaacgatccgtaaaaaacactaaaataataactacgccgaacgaaaaacaaaaaaccataccaaaacgctccctctcacaacatacactacgaaatntaaaaccataaaaaanaaacgaataaataaaaaataataacgaaatataaatctcgaaaccgaaaacanaaattaaaaaaataaacgnaaaaaacgaaaacgaacactaattacatcaacaaaaaacgctcactataaaacgcgttaaaataatacgaaaaacgattacgaattaaaaaaaaaacatcgatntaacgaaaaacatcgcaaccgatataataataacgtaacgaaaaaacacgaataatatcaaacgaaacacgaaacgataataaaaaacgacgttaacgattaaataaatacacgaaaacgacg

SEQ ID NO: 24511 - DNA, 743 bp, Artificial Sequence
  chemically treated genomic DNA (Homo sapiens) CpG-island No: 24511
  unsure (15, 22, 43, 81, 91, 113, 147, 237, 240, 428, 444, 497, 516)
  unsure (620)
gtatagatgagggtnaggtganacgtagtggaaggagaagtangggagcgcgggatcgagtaatttgagttgtattttatnacgtagggtncggtcgatcgatgaggaatatnttaggagtacggtgtttaaaggtcgtcgtttagncgtgcgttagggaaggacgtacgtggcgcggtgtttgatagtgatgagtaggcgaagatggtattatggtggagaagataatggatattnatncgttagttcgacgttgtttgcgtcgataggttcgtagtggattttcgttgatggtggcgggttgcggacgtgtttagtagagagtagttagagacgattcgtagagggtattgagatagtgattgcgtcgagcggggggtaaagaattatattagagcgtttttttttataatatatattacgggatntggagttatagagganggacgaatgggtaggggatagtggcgagatgtagatttcggggtcgggaatanaagttaagggagtgggcgngaggagcgggagcgggtattaattgtattaataaagggcgtttattatagagcgcgttgggatggtacggggagcggttacgagttgagagggaagtatcggtntagcgaagagtatcgtaatcgatgtggtaatagcgtgacgggggggtacgggtggtgttaggcggagtacggagcggtagtgagaagcgacgttggcgattgagtgggtgtacggaagcggcg

SEQ ID NO: 24512 - DNA, 743 bp, Artificial Sequence
  chemically treated genomic DNA (Homo sapiens) CpG-island No: 24512
  unsure (124, 228, 247, 300, 316, 504, 507, 597, 631, 653, 663, 701)
  unsure (722, 729)
cgccgcttccgtacacccactcaatcgccaacgtcgcttctcactaccgctccgtactccgcctaacaccacccgtacccccccgtcacgctattaccacatcgattacgatactcttcgctanaccgatacttccctctcaactcgtaaccgctccccgtaccatcccaacgcgctctataataaacgccctttattaatacaattaatacccgctcccgctcctcncgcccactcccttaacttntattcccgaccccgaaatctacatctcgccactatcccctacccattcgtccntcctctataactccanatcccgtaatatatattataaaaaaaaacgctctaatataattctttaccccccgctcgacgcaatcactatctcaataccctctacgaatcgtctctaactactctctactaaacacgtccgcaacccgccaccatcaacgaaaatccactacgaacctatcgacgcaaacaacgtcgaactaacgnatnaatatccattatcttctccaccataataccatcttcgcctactcatcactatcaaacaccgcgccacgtacgtccttccctaacgcacgnctaaacgacgacctttaaacaccgtactcctaanatattcctcatcgatcgaccgnaccctacgtnataaaatacaactcaaattactcgatcccgcgctcccntacttctccttccactacgtntcacctnaccctcatctatac

SEQ ID NO: 24513 - DNA, 560 bp, Artificial Sequence
  chemically treated genomic DNA (Homo sapiens) CpG-island No: 24513
  unsure (9, 20, 89, 140, 163, 195, 228, 231, 539)
gttttcgtnatatcgattangcgtcgcgagtcgcgtttggttcgtcgattattttagttgtatcggcgttttttttttatgatacgttntttgtacgcgttcgttttagtttaattacgtaggcgtattttttattatanatattattgttatttcgtttagnacgttagtttattatttgtagtttcgacggtnaggtggtcgtatcggtattaagtcgttcgaatngtntttattttattcgaatacgattgcgcgagttacgtatatacgagttgatttcgtaggtgtatcgtttaagttttgtcgtgattgcgtagtttagatttttattatttgtttttataagtgattatgttagtttagattttattttacgggtcgtttttatacgagttgagcgagcgatattcgcggatattgtacgtttgtatgtagaatagttagcggatcgtagagcgcgttgttgtgcgagataattacgttttagtttgacgttaatatataatgatgagttatttacgggcgacgcgtttttntacgtatagatgagttagtat

SEQ ID NO: 24514 - DNA, 560 bp, Artificial Sequence
  chemically treated genomic DNA (Homo sapiens) CpG-island No: 24514
  unsure (22, 330, 333, 366, 398, 421, 472, 541, 552)
atactaactcatctatacgtanaaaaacgcgtcgcccgtaaataactcatcattatatattaacgtcaaactaaaacgtaattatctcgcacaacaacgcgctctacgatccgctaactattctacatacaaacgtacaatatccgcgaatatcgctcgctcaactcgtataaaaacgacccgtaaaataaaatctaaactaacataatcacttataaaaacaaataataaaaatctaaactacgcaatcacgacaaaacttaaacgatacacctacgaaatcaactcgtatatacgtaactcgcgcaatcgtattcgaataaaataaanacnattcgaacgacttaataccgatacgaccacctnaccgtcgaaactacaaataataaactaacgtnctaaacgaaataacaataatatntataataaaaaatacgcctacgtaattaaactaaaacgaacgcgtacaaanaacgtatcataaaaaaaaaacgccgatacaactaaaataatcgacgaaccaaacgcgactcgcgacgcntaatcgatatnacgaaaac

SEQ ID NO: 24515 - DNA, 560 bp, Artificial Sequence
  chemically treated genomic DNA (Homo sapiens) CpG-island No: 24515
  unsure (22, 330, 333, 366, 398, 421, 472, 541, 552)
gtattaatttatttgtacgtanggagacgcgtcgttcgtgaatgatttattattatgtattggcgttaggttggagcgtagttatttcgtataatagcgcgttttgcgattcgttgattgttttgtatgtaggcgtgtagtattcgcgggtgtcgttcgtttaattcgtgtaggggcggttcgtggagtgggatttaggttggtatgattatttgtgggagtaggtggtggagatttaagttacgtagttacggtaagatttggacgatgtatttacggaattaattcgtgtatgcgtgattcgcgtagtcgtgttcggatgagataagnatngttcgagcggtttagtatcggtacgattatttnatcgtcggggttgtaagtagtaaattgacgtnttgagcgaggtagtagtgatgtntgtagtggagagtgcgtttacgtagttaggttgaggcgaacgcgtgtaggngacgtgttatgagaaggaggcgtcgatgtagttaggatgatcggcgagttaggcgcggttcgcgacgtntagtcgatatngcgagggt

SEQ ID NO: 24516 - DNA, 560 bp, Artificial Sequence
  chemically treated genomic DNA (Homo sapiens) CpG-island No: 24516
  unsure (9, 20, 89, 140, 163, 195, 228, 231, 539)
accctcgcnatatcgactanacgtcgcgaaccgcgcctaactcgccgatcatcctaactacatcgacgcctccttctcataacacgtcncctacacgcgttcgcctcaacctaactacgtaaacgcactctccactacanacatcactactacctcgctcaanacgtcaatttactacttacaaccccgacgatnaaataatcgtaccgatactaaaccgctcgaacnatncttatctcatccgaacacgactacgcgaatcacgcatacacgaattaattccgtaaatacatcgtccaaatcttaccgtaactacgtaacttaaatctccaccacctactcccacaaataatcataccaacctaaatcccactccacgaaccgcccctacacgaattaaacgaacgacacccgcgaatactacacgcctacatacaaaacaatcaacgaatcgcaaaacgcgctattatacgaaataactacgctccaacctaacgccaatacataataataaatcattcacgaacgacgcgtctccntacgtacaaataaattaatac

SEQ ID NO: 24517 - DNA, 615 bp, Artificial Sequence
  chemically treated genomic DNA (Homo sapiens) CpG-island No: 24517
gcgtagtatagcgcgggttttgttacgggtttcgtcggttttcgattgcggaatagaattaaggattatattagtattcgtttgtacggtggcgatatcgttttttattagcgtcgagcggattataagtgtacggtagtcgacgattagtcgatgtagacggtagataataatttttatttgtagtcgttcgatacgtatgcgttgcgtggcgaatagattattgtttgcgtatcgcgtcgaagtttataatattgttagttatggtagttcgcgttagttttgtttttacgaggatagtattaagttgtagagttttttttaatacgttcggcggtataatattttcgaacgattaacgatttattttaaagataagatattaacgtcgggagattagggatttcgggaaagatttgaacgtatcggcgtttcggttttttggttattcgaatcgtacggggggttttttacggcggatttcgcgtaagaatacggcgaaaagaattgtttacgcgagatttggcgaaaatatttagagattttaaaaaggataattttatttatttttaggtttattattttcggtgttaaaaaatcgcgtttttaaagttt

SEQ ID NO: 24518 - DNA, 615 bp, Artificial Sequence
  chemically treated genomic DNA (Homo sapiens) CpG-island No: 24518
aaactttaaaaacgcgattttttaacaccgaaaataataaacctaaaaataaataaaattatcctttttaaaatctctaaatattttcgccaaatctcgcgtaaacaattcttttcgccgtattcttacgcgaaatccgccgtaaaaaaccccccgtacgattcgaataaccaaaaaaccgaaacgccgatacgttcaaatctttcccgaaatccctaatctcccgacgttaatatcttatctttaaaataaatcgttaatcgttcgaaaatattataccgccgaacgtattaaaaaaaactctacaacttaatactatcctcgtaaaaacaaaactaacgcgaactaccataactaacaatattataaacttcgacgcgatacgcaaacaataatctattcgccacgcaacgcatacgtatcgaacgactacaaataaaaattattatctaccgtctacatcgactaatcgtcgactaccgtacacttataatccgctcgacgctaataaaaaacgatatcgccaccgtacaaacgaatactaatataatccttaattctattccgcaatcgaaaaccgacgaaacccgtaacaaaacccgcgctatactacgc

SEQ ID NO: 24519 - DNA, 615 bp, Artificial Sequence
  chemically treated genomic DNA (Homo sapiens) CpG-island No: 24519
gggttttaaaagcgcggttttttggtatcgggggtggtgggtttgggggtaagtgaggttgttttttttggggtttttgggtgttttcgttaaatttcgcgtgggtaatttttttcgtcgtgtttttgcgcgaaattcgtcgtggggagtttttcgtgcggttcgggtagttaaggggtcggggcgtcggtgcgtttaagtttttttcggggtttttggtttttcgacgttggtgttttatttttgggatgaatcgttaatcgttcggaggtgttgtatcgtcgggcgtgttaagaagggttttgtagtttggtgttgttttcgtgaggataaggttaacgcggattgttataattagtaatgttataaatttcggcgcgatgcgtaggtaatggtttgttcgttacgtagcgtatgcgtatcggacggttgtaggtaaggattattgtttatcgtttgtatcggttgatcgtcgattatcgtgtatttgtgattcgttcggcgttggtggaaaacggtatcgttatcgtgtaagcgggtgttggtgtagtttttgattttgtttcgtagtcggaagtcgacgaaattcgtaataaagttcgcgttgtattgcgt

SEQ ID NO: 24520 - DNA, 615 bp, Artificial Sequence
  chemically treated genomic DNA (Homo sapiens) CpG-island No: 24520
acgcaatacaacgcgaactttattacgaatttcgtcgacttccgactacgaaacaaaatcaaaaactacaccaacacccgcttacacgataacgataccgttttccaccaacgccgaacgaatcacaaatacacgataatcgacgatcaaccgatacaaacgataaacaataatccttacctacaaccgtccgatacgcatacgctacgtaacgaacaaaccattacctacgcatcgcgccgaaatttataacattactaattataacaatccgcgttaaccttatcctcacgaaaacaacaccaaactacaaaacccttcttaacacgcccgacgatacaacacctccgaacgattaacgattcatcccaaaaataaaacaccaacgtcgaaaaaccaaaaaccccgaaaaaaacttaaacgcaccgacgccccgaccccttaactacccgaaccgcacgaaaaactccccacgacgaatttcgcgcaaaaacacgacgaaaaaaattacccacgcgaaatttaacgaaaacacccaaaaaccccaaaaaaaacaacctcacttacccccaaacccaccacccccgataccaaaaaaccgcgcttttaaaaccc

SEQ ID NO: 24521 - DNA, 594 bp, Artificial Sequence
  chemically treated genomic DNA (Homo sapiens) CpG-island No: 24521
tgtttcgttgtttaaggagtagttatgatttggtttcgtcgttagttttttatcggcgtcggcgtgttggtagtcgttagcggtatcgtagggcgcgtggtggttaatacgttgaatattaatggggtgcgttacggtatggtgtatgacgagtcgttatgtatcggttgtatcgtttgtatggatgtttgtcgggaagtgaataaggtgtcggaaggcgtttcgcgtttgacgattattcgtagcgagtcgtagggcgaattttttgatgtgaaatatcgtttttttcgtaagttttgttagtattgcgattatgcgtcgtgcgttgacgtttgttcgatcggtgcgttttttcgcgatgtttgtagtgggattgttttatgtttattttcggatttttgcgttcggtcgtttattggttcgttttttgttcgtatcgcgtttgttttttatttttttcggtttttaataacgcggattacgcgaatttcgtcgaaaatttattgtcgggcggaagtttttcggtgtaaacgtcgttacgaacgttatcgagattgtaatatataagattataagtgggttaattattaacgt

SEQ ID NO: 24522 - DNA, 594 bp, Artificial Sequence
  chemically treated genomic DNA (Homo sapiens) CpG-island No: 24522
acgttaataattaacccacttataatcttatatattacaatctcgataacgttcgtaacgacgtttacaccgaaaaacttccgcccgacaataaattttcgacgaaattcgcgtaatccgcgttattaaaaaccgaaaaaaataaaaaacaaacgcgatacgaacaaaaaacgaaccaataaacgaccgaacgcaaaaatccgaaaataaacataaaacaatcccactacaaacatcgcgaaaaaacgcaccgatcgaacaaacgtcaacgcacgacgcataatcgcaatactaacaaaacttacgaaaaaaacgatatttcacatcaaaaaattcgccctacgactcgctacgaataatcgtcaaacgcgaaacgccttccgacaccttattcacttcccgacaaacatccatacaaacgatacaaccgatacataacgactcgtcatacaccataccgtaacgcaccccattaatattcaacgtattaaccaccacgcgccctacgataccgctaacgactaccaacacgccgacgccgataaaaaactaacgacgaaaccaaatcataactactccttaaacaacgaaaca

SEQ ID NO: 24523 - DNA, 594 bp, Artificial Sequence
  chemically treated genomic DNA (Homo sapiens) CpG-island No: 24523
gcgttggtggttggtttatttgtgattttgtgtgttgtagtttcgatggcgttcgtggcgacgtttatatcggggaattttcgttcggtagtgggttttcggcggaattcgcgtggttcgcgttgttgggggtcgggagggataaagggtaagcgcggtgcggatagggggcgagttagtgggcgatcggacgtagagattcgggaataaatatgggataattttattgtaagtatcgcgagaagacgtatcggtcgggtagacgttaacgtacggcgtatgatcgtagtgttggtaagatttacggaagaagcgatattttatattaggaaattcgttttgcggttcgttacgaataatcgttaggcgcgagacgtttttcggtattttgtttatttttcgataagtatttatataggcggtatagtcgatgtataacgattcgttatgtattatgtcgtaacgtattttattgatatttaacgtgttggttattacgcgttttgcggtgtcgttgacggttgttagtacgtcgacgtcggtgagaaattggcgacgagattaggttatggttgttttttaagtaacggaata

SEQ ID NO: 24524 - DNA, 594 bp, Artificial Sequence
  chemically treated genomic DNA (Homo sapiens) CpG-island No: 24524
tattccgttacttaaaaaacaaccataacctaatctcgtcgccaatttctcaccgacgtcgacgtactaacaaccgtcaacgacaccgcaaaacgcgtaataaccaacacgttaaatatcaataaaatacgttacgacataatacataacgaatcgttatacatcgactataccgcctatataaatacttatcgaaaaataaacaaaataccgaaaaacgtctcgcgcctaacgattattcgtaacgaaccgcaaaacgaatttcctaatataaaatatcgcttcttccgtaaatcttaccaacactacgatcatacgccgtacgttaacgtctacccgaccgatacgtcttctcgcgatacttacaataaaattatcccatatttattcccgaatctctacgtccgatcgcccactaactcgccccctatccgcaccgcgcttaccctttatccctcccgacccccaacaacgcgaaccacgcgaattccgccgaaaacccactaccgaacgaaaattccccgatataaacgtcgccacgaacgccatcgaaactacaacacacaaaatcacaaataaaccaaccaccaacgc

SEQ ID NO: 24525 - DNA, 738 bp, Artificial Sequence
  chemically treated genomic DNA (Homo sapiens) CpG-island No: 24525
ttatgttagtattagcgttcgatgtaataacggtatgttatttgtttgtttcgcgtagttgtcgagtatatgttgttagtatttcggttgttgcgttacgtcgatcgtttggttggtttgttagtcggcgtattatgtttatgtcgtaaggaaggcgttattattgttatttttattttattaggtaaagcgcgtttcgggtttcgttagttgtattagtcgtagacggttattttgaattatttgacgaatgtcgttagcggcggtattttgatgatcggtaagcgaacgttaggcgagattgagcgggattagacggttatcggtgttgattacgttattttacggtttatcgattaacgtattaagattgttgcggaaaattttttgcggcgttttattattttgtagtcggatattgttcgtttggtcgggtaatattagcgcgtttatcgtattacgagtatgattttttacggcgtttatcggcgtttcgttattatatatagacgtttcgggtatacgtcgttttgtttgtttattcgtcgtattcgttttatcgtttttcgttatattcgtttcgatataatcgttatgcgcgttcgtttgttattaagcgatacgagttcgtcgtttaatcgtgatataatcgcgcggcgtataaagggatattcgtttttttatttttttattttttatttcgtatagacgtcgcgtcgtcgacgcgcggcgcgtttt

SEQ ID NO: 24526 - DNA, 738 bp, Artificial Sequence
  chemically treated genomic DNA (Homo sapiens) CpG-island No: 24526
aaaacgcgccgcgcgtcgacgacgcgacgtctatacgaaataaaaaataaaaaaataaaaaaacgaatatccctttatacgccgcgcgattatatcacgattaaacgacgaactcgtatcgcttaataacaaacgaacgcgcataacgattatatcgaaacgaatataacgaaaaacgataaaacgaatacgacgaataaacaaacaaaacgacgtatacccgaaacgtctatatataataacgaaacgccgataaacgccgtaaaaaatcatactcgtaatacgataaacgcgctaatattacccgaccaaacgaacaatatccgactacaaaataataaaacgccgcaaaaaattttccgcaacaatcttaatacgttaatcgataaaccgtaaaataacgtaatcaacaccgataaccgtctaatcccgctcaatctcgcctaacgttcgcttaccgatcatcaaaataccgccgctaacgacattcgtcaaataattcaaaataaccgtctacgactaatacaactaacgaaacccgaaacgcgctttacctaataaaataaaaataacaataataacgccttccttacgacataaacataatacgccgactaacaaaccaaccaaacgatcgacgtaacgcaacaaccgaaatactaacaacatatactcgacaactacgcgaaacaaacaaataacataccgttattacatcgaacgctaatactaacataa

SEQ ID NO: 24527 - DNA, 738 bp, Artificial Sequence
  chemically treated genomic DNA (Homo sapiens) CpG-island No: 24527
ggggcgcgtcgcgcgtcggcggcgcggcgtttgtgcggggtggggggtgggggggtggggggacgggtgtttttttgtgcgtcgcgcggttgtgttacggttgggcggcgggttcgtgtcgtttgatggtaggcgggcgcgtatggcggttgtgtcggggcgggtgtggcggggggcggtggggcgggtgcggcgggtgggtaggtagggcggcgtatgttcggggcgtttgtgtgtggtagcggggcgtcggtgggcgtcgtgggaggttatgttcgtggtgcggtgagcgcgttgatgttgttcgattaggcgagtaatattcggttataaagtagtgaaacgtcgtaggagatttttcgtaataattttgatgcgttagtcgatgaatcgtggggtggcgtaattaatatcggtagtcgtttgatttcgtttagtttcgtttggcgttcgtttgtcgattattaaagtgtcgtcgttaacgatattcgttagatgatttaggataatcgtttgcggttgatgtaattggcggggttcggagcgcgttttatttggtggggtgaagatggtaatggtgacgttttttttacggtatgggtatggtacgtcgattggtaggttagttaggcgatcggcgtaacgtaataatcggaatattggtagtatatgttcgatagttacgcggagtaggtagataatatgtcgttattgtatcgggcgttggtgttggtatgg

SEQ ID NO: 24528 - DNA, 738 bp, Artificial Sequence
  chemically treated genomic DNA (Homo sapiens) CpG-island No: 24528
ccataccaacaccaacgcccgatacaataacgacatattatctacctactccgcgtaactatcgaacatatactaccaatattccgattattacgttacgccgatcgcctaactaacctaccaatcgacgtaccatacccataccgtaaaaaaaacgtcaccattaccatcttcaccccaccaaataaaacgcgctccgaaccccgccaattacatcaaccgcaaacgattatcctaaatcatctaacgaatatcgttaacgacgacactttaataatcgacaaacgaacgccaaacgaaactaaacgaaatcaaacgactaccgatattaattacgccaccccacgattcatcgactaacgcatcaaaattattacgaaaaatctcctacgacgtttcactactttataaccgaatattactcgcctaatcgaacaacatcaacgcgctcaccgcaccacgaacataacctcccacgacgcccaccgacgccccgctaccacacacaaacgccccgaacatacgccgccctacctacccacccgccgcacccgccccaccgccccccgccacacccgccccgacacaaccgccatacgcgcccgcctaccatcaaacgacacgaacccgccgcccaaccgtaacacaaccgcgcgacgcacaaaaaaacacccgtccccccacccccccaccccccaccccgcacaaacgccgcgccgccgacgcgcgacgcgcccc

SEQ ID NO: 24529 - DNA, 837 bp, Artificial Sequence
  chemically treated genomic DNA (Homo sapiens) CpG-island No: 24529
ggcgggggacgtaacggattttagtgtcggggagcgtattattttataattgtgcgtagatgtttgatgcgacgttagcgcgttttattatgtttataaatttgtgtcggatcggtaggtcggataaggcgtttatgtcgtattcggtagttatgcgtagatgtttgatgcgacgttggcgcgttttattatgtttataaatttgtgtttgaacggtaggacggataaggcgtttacgtcgtattcggtagttgtgtattaatgttggatatttatattaacgtttttataatttttaattttagtttattcggtatttcgttatacgatagtatatgtagtttcggcgtaaataattttgtataacgcgttagtaaagggcgtagttgcggtggtattagtagtatcgggttttttttcgtcgtttttatttgtttttttatttgtggtatcgtattttggaattggttgagtatattcggatcgatcggtacgttgtcgagtattattttttcgttttgttgcgtttgatttattacgttggttagtagattttttagtttattatttagcgtatatatcgttagtttttgtttgcgaacgaacggatgggtaatgttgcgtcgtaatgttagggggtatatcgggcggtagtagaatatgatttttcgttatcgtgttattggggattagtacgggggcgaatgtgacgaattttcgtaagggaacgttttcggtagtaagcgtcggtgattttattattggtgtattagcgcgggttaaatttcgtcgaacgtgcgttagatacggttttacgcgtaatttcgttatatttga

SEQ ID NO: 24530 - DNA, 837 bp, Artificial Sequence
  chemically treated genomic DNA (Homo sapiens) CpG-island No: 24530
tcaaatataacgaaattacgcgtaaaaccgtatctaacgcacgttcgacgaaatttaacccgcgctaatacaccaataataaaatcaccgacgcttactaccgaaaacgttcccttacgaaaattcgtcacattcgcccccgtactaatccccaataacacgataacgaaaaatcatattctactaccgcccgatataccccctaacattacgacgcaacattacccatccgttcgttcgcaaacaaaaactaacgatatatacgctaaataataaactaaaaaatctactaaccaacgtaataaatcaaacgcaacaaaacgaaaaaataatactcgacaacgtaccgatcgatccgaatatactcaaccaattccaaaatacgataccacaaataaaaaaacaaataaaaacgacgaaaaaaaacccgatactactaataccaccgcaactacgccctttactaacgcgttatacaaaattatttacgccgaaactacatatactatcgtataacgaaataccgaataaactaaaattaaaaattataaaaacgttaatataaatatccaacattaatacacaactaccgaatacgacgtaaacgccttatccgtcctaccgttcaaacacaaatttataaacataataaaacgcgccaacgtcgcatcaaacatctacgcataactaccgaatacgacataaacgccttatccgacctaccgatccgacacaaatttataaacataataaaacgcgctaacgtcgcatcaaacatctacgcacaattataaaataatacgctccccgacactaaaatccgttacgtcccccgcc

SEQ ID NO: 24531 - DNA, 837 bp, Artificial Sequence
  chemically treated genomic DNA (Homo sapiens) CpG-island No: 24531
ttaagtgtagcggaattacgcgtgaaatcgtatttgacgtacgttcggcgaaatttgattcgcgttaatatattagtggtaaggttatcggcgtttgttgtcgaaggcgtttttttgcgagaattcgttatattcgttttcgtgttggtttttagtagtacggtgacgaaagattatattttgttgtcgttcgatgtgttttttggtattgcggcgtagtattatttattcgttcgttcgtaagtaggagttgacggtgtatacgttgaataatgagttggaaaatttgttgattaacgtggtgaattaggcgtaatagggcgggaaagtgatgttcgatagcgtgtcggtcgattcgaatatgtttaattagttttagagtacgatgttataggtgaaagagtagatgaaagcggcggggaaagattcggtgttgttggtgttatcgtagttgcgttttttgttggcgcgttatgtaaggttgtttgcgtcggggttgtatgtgttgtcgtataacgaagtgtcggatgagttggagttgaagattatgggggcgttgatgtaagtatttagtattggtgtataattgtcggatgcggcgtgaacgttttattcgttttatcgtttaggtataagtttgtaggtatgataagacgcgttagcgtcgtattaggtatttgcgtataattgtcggatgcggtataaacgttttattcggtttatcgattcggtataagtttgtaggtatgataagacgcgttagcgtcgtattaggtatttgcgtataattatgaaatgatacgtttttcggtattaaaattcgttacgtttttcgtt

SEQ ID NO: 24532 - DNA, 837 bp, Artificial Sequence
  chemically treated genomic DNA (Homo sapiens) CpG-island No: 24532
aacgaaaaacgtaacgaattttaataccgaaaaacgtatcatttcataattatacgcaaatacctaatacgacgctaacgcgtcttatcatacctacaaacttataccgaatcgataaaccgaataaaacgtttataccgcatccgacaattatacgcaaatacctaatacgacgctaacgcgtcttatcatacctacaaacttatacctaaacgataaaacgaataaaacgttcacgccgcatccgacaattatacaccaatactaaatacttacatcaacgcccccataatcttcaactccaactcatccgacacttcgttatacgacaacacatacaaccccgacgcaaacaaccttacataacgcgccaacaaaaaacgcaactacgataacaccaacaacaccgaatctttccccgccgctttcatctactctttcacctataacatcgtactctaaaactaattaaacatattcgaatcgaccgacacgctatcgaacatcactttcccgccctattacgcctaattcaccacgttaatcaacaaattttccaactcattattcaacgtatacaccgtcaactcctacttacgaacgaacgaataaataatactacgccgcaataccaaaaaacacatcgaacgacaacaaaatataatctttcgtcaccgtactactaaaaaccaacacgaaaacgaatataacgaattctcgcaaaaaaacgccttcgacaacaaacgccgataaccttaccactaatatattaacgcgaatcaaatttcgccgaacgtacgtcaaatacgatttcacgcgtaattccgctacacttaa

SEQ ID NO: 24533 - DNA, 505 bp, Artificial Sequence
  chemically treated genomic DNA (Homo sapiens) CpG-island No: 24533
gttttgtgcgtaatattttcgatcgttttgaagcgcgttttagtttggttgaagtaatttaaagttcgtttttgttgttgtaggggatggtgggttcgtaaatgtcgattgttgttttttatggtgaagggcgcgtggaagtgcgtgatgcggcgtatttggcggtattggaaagtaaagggttggtggtattgcgttatgtcgataatttcggtaaagttattgaaatttattcggttaattcgaacggtttatcgaacggtattacggtagttacgattgaaagtggtcgagttattattatgatgtcgtattcggaacgtgtttttcgtattgttagtaatttttggtattcggaaaattggggcgaggatggtttatggatgcgtatttttcgtaatgcgcgtaagtagttggggtaagtcgttagtttattggttttgtagttcggatgcggtattaagtattaattattattataagtttttaatttcgggagtttttt

SEQ ID NO: 24534 - DNA, 505 bp, Artificial Sequence
  chemically treated genomic DNA (Homo sapiens) CpG-island No: 24534
aaaaaactcccgaaattaaaaacttataataataattaatacttaataccgcatccgaactacaaaaccaataaactaacgacttaccccaactacttacgcgcattacgaaaaatacgcatccataaaccatcctcgccccaattttccgaataccaaaaattactaacaatacgaaaaacacgttccgaatacgacatcataataataactcgaccactttcaatcgtaactaccgtaataccgttcgataaaccgttcgaattaaccgaataaatttcaataactttaccgaaattatcgacataacgcaataccaccaaccctttactttccaataccgccaaatacgccgcatcacgcacttccacgcgcccttcaccataaaaaacaacaatcgacatttacgaacccaccatcccctacaacaacaaaaacgaactttaaattacttcaaccaaactaaaacgcgcttcaaaacgatcgaaaatattacgcacaaaac

SEQ ID NO: 24535 - DNA, 505 bp, Artificial Sequence
  chemically treated genomic DNA (Homo sapiens) CpG-island No: 24535
aaaaagttttcggagttgggagtttatgatagtggttggtgtttaatgtcgtattcgggttgtaaaattaatgggttgacgatttattttaattgtttacgcgtattgcggaaaatgcgtatttatgggttattttcgttttagtttttcggatgttaggagttgttgatagtacggaaaatacgtttcgggtgcggtattataatggtgattcgattatttttagtcgtgattgtcgtaatatcgttcggtgaatcgttcgggttagtcgggtaggttttagtgattttgtcgaagttatcgatatagcgtagtgttattagttttttgttttttagtgtcgttagatgcgtcgtattacgtatttttacgcgttttttattatgagagatagtaatcggtatttgcgagtttattattttttgtaatagtagagacgggttttgggttattttaattaggttgaaacgcgttttaaagcgatcggaggtattgcgtataaaat

SEQ ID NO: 24536 - DNA, 505 bp, Artificial Sequence
  chemically treated genomic DNA (Homo sapiens) CpG-island No: 24536
attttatacgcaatacctccgatcgctttaaaacgcgtttcaacctaattaaaataacccaaaacccgtctctactattacaaaaaataataaactcgcaaataccgattactatctctcataataaaaaacgcgtaaaaatacgtaatacgacgcatctaacgacactaaaaaacaaaaaactaataacactacgctatatcgataacttcgacaaaatcactaaaacctacccgactaacccgaacgattcaccgaacgatattacgacaatcacgactaaaaataatcgaatcaccattataataccgcacccgaaacgtattttccgtactatcaacaactcctaacatccgaaaaactaaaacgaaaataacccataaatacgcattttccgcaatacgcgtaaacaattaaaataaatcgtcaacccattaattttacaacccgaatacgacattaaacaccaaccactatcataaactcccaactccgaaaacttttt

SEQ ID NO: 24537 - DNA, 506 bp, Artificial Sequence
  chemically treated genomic DNA (Homo sapiens) CpG-island No: 24537
  unsure (183, 233..234, 267)
cgtcgttggcgcggtattcgcgtagtaggaaagtagtttttcgcggttggtcgggtttaagatcgttaggttaatttcgtttaggtagagataatttaaattcgttagtttttcgtaaatcgtcgtagattgtttattttttagttagaattgtggcggcggtttcgtttcgttagtagtagnaacgtacgttcgtcggtgcgtgtcggttttaagtgtagtaataggttcgnngtagacggttttttatttcgttggtgttagggnaagtattaacgttttcgtcgtgttaggcgtttagtatttgttggttaaaattgttcgtttttagcgtcgttacgtaatgaacggttaatgtcgtaggatcgatttgacgggcgatatagacggaagtgtttagggtatcgtcgtcgaaatcgcgtttaacgttcgcgtttttttcggaaagtttaattatgtattcgttaattacggtaatttttttggatatagtcgtgaatttgatt

SEQ ID NO: 24538 - DNA, 506 bp, Artificial Sequence
  chemically treated genomic DNA (Homo sapiens) CpG-island No: 24538
  unsure (240, 273..274, 324)
aatcaaattcacgactatatccaaaaaaattaccgtaattaacgaatacataattaaactttccgaaaaaaacgcgaacgttaaacgcgatttcgacgacgataccctaaacacttccgtctatatcgcccgtcaaatcgatcctacgacattaaccgttcattacgtaacgacgctaaaaacgaacaattttaaccaacaaatactaaacgcctaacacgacgaaaacgttaatacttnccctaacaccaacgaaataaaaaaccgtctacnncgaacctattactacacttaaaaccgacacgcaccgacgaacgtacgttnctactactaacgaaacgaaaccgccgccacaattctaactaaaaaataaacaatctacgacgatttacgaaaaactaacgaatttaaattatctctacctaaacgaaattaacctaacgatcttaaacccgaccaaccgcgaaaaactactttcctactacgcgaataccgcgccaacgacg

SEQ ID NO: 24539 - DNA, 506 bp, Artificial Sequence
  chemically treated genomic DNA (Homo sapiens) CpG-island No: 24539
  unsure (240, 273..274, 324)
gattaggtttacgattatgtttaaaaagattgtcgtgattggcgaatgtatgattgagtttttcgagaaaggcgcggacgttaagcgcggtttcggcggcgatattttgaatattttcgtttatatcgttcgttaggtcgattttgcggtattaatcgtttattacgtaacggcgttgggaacggatagttttagttagtagatgttggacgtttggtacggcgagaacgttgatatttnttttgatattaacggaatggaaaatcgtttgtnncgggtttgttattatatttgaaatcgatacgtatcggcgagcgtacgttnttattattggcggaacgaagtcgtcgttataattttggttggagagtgagtagtttgcggcgatttgcgaagagttggcgaatttggattatttttatttgagcgggattagtttggcgattttaagttcgattagtcgcgaaaagttgtttttttgttgcgcgaatgtcgcgttaacggcg

SEQ ID NO: 24540 - DNA, 506 bp, Artificial Sequence
  chemically treated genomic DNA (Homo sapiens) CpG-island No: 24540
  unsure (183, 233..234, 267)
cgccgttaacgcgacattcgcgcaacaaaaaaacaacttttcgcgactaatcgaacttaaaatcgccaaactaatcccgctcaaataaaaataatccaaattcgccaactcttcgcaaatcgccgcaaactactcactctccaaccaaaattataacgacgacttcgttccgccaataataanaacgtacgctcgccgatacgtatcgatttcaaatataataacaaacccgnnacaaacgattttccattccgttaatatcaaaanaaatatcaacgttctcgccgtaccaaacgtccaacatctactaactaaaactatccgttcccaacgccgttacgtaataaacgattaataccgcaaaatcgacctaacgaacgatataaacgaaaatattcaaaatatcgccgccgaaaccgcgcttaacgtccgcgcctttctcgaaaaactcaatcatacattcgccaatcacgacaatctttttaaacataatcgtaaacctaatc

SEQ ID NO: 24541 - DNA, 529 bp, Artificial Sequence
  chemically treated genomic DNA (Homo sapiens) CpG-island No: 24541
cgatatcgtcgtcgttatcgtttatggtaaaggatgggcgaataatgtacgggaagtttacgttagcggtaatcgttagcgttttttttatcgtgtgtgcgatatcggaacgcgcggtttttagattaattttttttatcgttacgtcgaaacgacggcggttttttgttttattaatcgtatcggtagtggtattaattatggtgatatcgaatttttttaatacgttttgacgttttagttttagcgcgtagtttagcgtcgtttgatcgtttatcgttggtagtatcgcgttcgggcgtttttttttaataattttgcgtataattttttagtgaatcggttcgatgtaggttgtattagttattttcgggtcggttatgatggtcgtcgggttggagtttattagaatgacgcggtaattttttttacgtagggttttatacgtttgcgcgttagagtagtttaatttatacgtttgatcgataataatcgggttcggatttagaattcggatatttttgaaatt

SEQ ID NO: 24542 - DNA, 529 bp, Artificial Sequence
  chemically treated genomic DNA (Homo sapiens) CpG-island No: 24542
aatttcaaaaatatccgaattctaaatccgaacccgattattatcgatcaaacgtataaattaaactactctaacgcgcaaacgtataaaaccctacgtaaaaaaaattaccgcgtcattctaataaactccaacccgacgaccatcataaccgacccgaaaataactaatacaacctacatcgaaccgattcactaaaaaattatacgcaaaattattaaaaaaaaacgcccgaacgcgatactaccaacgataaacgatcaaacgacgctaaactacgcgctaaaactaaaacgtcaaaacgtattaaaaaaattcgatatcaccataattaataccactaccgatacgattaataaaacaaaaaaccgccgtcgtttcgacgtaacgataaaaaaaattaatctaaaaaccgcgcgttccgatatcgcacacacgataaaaaaaacgctaacgattaccgctaacgtaaacttcccgtacattattcgcccatcctttaccataaacgataacgacgacgatatcg

SEQ ID NO: 24543 - DNA, 529 bp, Artificial Sequence
  chemically treated genomic DNA (Homo sapiens) CpG-island No: 24543
gattttaaaagtattcggattttgggttcgggttcgattgttatcggttaggcgtgtgagttagattattttggcgcgtaagcgtgtaaagttttgcgtgaagagggttatcgcgttattttggtgaattttaattcggcgattattatgatcgattcggaaatggttgatgtaatttatatcgagtcgatttattgggaagttgtacgtaagattattgaaaaagagcgttcggacgcggtgttgttaacgatgggcggttagacggcgttgaattgcgcgttggagttggaacgttagggcgtgttggaagagttcggtgttattatgattggtgttattgtcgatgcgattgataaagtagaagatcgtcgtcgtttcgacgtagcgatgaagaaaattggtttggaaatcgcgcgtttcggtatcgtatatacgatggaagaagcgttggcggttgtcgttgacgtgggtttttcgtgtattattcgtttattttttattatgggcggtagcggcggcggtatcg

SEQ ID NO: 24544 - DNA, 529 bp, Artificial Sequence
  chemically treated genomic DNA (Homo sapiens) CpG-island No: 24544
cgataccgccgccgctaccgcccataataaaaaataaacgaataatacacgaaaaacccacgtcaacgacaaccgccaacgcttcttccatcgtatatacgataccgaaacgcgcgatttccaaaccaattttcttcatcgctacgtcgaaacgacgacgatcttctactttatcaatcgcatcgacaataacaccaatcataataacaccgaactcttccaacacgccctaacgttccaactccaacgcgcaattcaacgccgtctaaccgcccatcgttaacaacaccgcgtccgaacgctctttttcaataatcttacgtacaacttcccaataaatcgactcgatataaattacatcaaccatttccgaatcgatcataataatcgccgaattaaaattcaccaaaataacgcgataaccctcttcacgcaaaactttacacgcttacgcgccaaaataatctaactcacacgcctaaccgataacaatcgaacccgaacccaaaatccgaatacttttaaaatc

SEQ ID NO: 24545 - DNA, 535 bp, Artificial Sequence
  chemically treated genomic DNA (Homo sapiens) CpG-island No: 24545
gcgggtttcgtaaatcgttagcggcgtatcgataaatatttcgataaagcgttttttttttacgcgttcgcgaattatttggcgttcggcgcggtgtggcgagataaatgcggttagtattattagttcggttttaattattaaattcgttattttatcgacgcgacggatattttttttacgatcggtatcgttaaaagcgagatcgttgtataattcgtggcgaatattgtcgttatttagtagatacgtagttgacggcgagtttatgtgacggtttttgtagggttcggtgaacggtgtttatcggattcggaaaggcgggtaattcgggattatttcgttgatcggtttaattttttgtttttcggtcgttgtttgtaaagttggtaggggggtttgtttcgcgtggggtttatgttggtgggaacgtcgttttgatgtatatagtttgcgtattttgttatgggtttaatacgtggattttcggtgattttattgttgtagggtgcggagatgattagtattttttgtt

SEQ ID NO: 24546 - DNA, 535 bp, Artificial Sequence
  chemically treated genomic DNA (Homo sapiens) CpG-island No: 24546
aacaaaaaatactaatcatctccgcaccctacaacaataaaatcaccgaaaatccacgtattaaacccataacaaaatacgcaaactatatacatcaaaacgacgttcccaccaacataaaccccacgcgaaacaaacccccctaccaactttacaaacaacgaccgaaaaacaaaaaattaaaccgatcaacgaaataatcccgaattacccgcctttccgaatccgataaacaccgttcaccgaaccctacaaaaaccgtcacataaactcgccgtcaactacgtatctactaaataacgacaatattcgccacgaattatacaacgatctcgcttttaacgataccgatcgtaaaaaaaatatccgtcgcgtcgataaaataacgaatttaataattaaaaccgaactaataatactaaccgcatttatctcgccacaccgcgccgaacgccaaataattcgcgaacgcgtaaaaaaaaaacgctttatcgaaatatttatcgatacgccgctaacgatttacgaaacccgc

SEQ ID NO: 24547 - DNA, 535 bp, Artificial Sequence
  chemically treated genomic DNA (Homo sapiens) CpG-island No: 24547
agtaagaggtattaattattttcgtattttgtaatagtggaattatcggggatttacgtgttgagtttatagtagaatacgtagattatatgtattaggacgacgtttttattaatatgggttttacgcgggataagtttttttgttaattttgtaaataacggtcgggaaataaggagttaaatcggttaacggggtaatttcgagttattcgttttttcgagttcggtaaatatcgtttatcgggttttgtaggagtcgttatataaattcgtcgttagttacgtatttgttggatggcgataatgttcgttacggattatgtagcgatttcgtttttagcgatgtcgatcgtaaagagaatattcgtcgcgtcggtgaagtggcgaatttgatggttgaagtcggattggtggtgttgatcgtatttatttcgttatatcgcgtcgaacgttagatggttcgcgaacgcgtaggagaagggcgttttatcgaagtgtttgtcgatacgtcgttggcgatttgcgaagttcgt

SEQ ID NO: 24548 - DNA, 535 bp, Artificial Sequence
  chemically treated genomic DNA (Homo sapiens) CpG-island No: 24548
acgaacttcgcaaatcgccaacgacgtatcgacaaacacttcgataaaacgcccttctcctacgcgttcgcgaaccatctaacgttcgacgcgatataacgaaataaatacgatcaacaccaccaatccgacttcaaccatcaaattcgccacttcaccgacgcgacgaatattctctttacgatcgacatcgctaaaaacgaaatcgctacataatccgtaacgaacattatcgccatccaacaaatacgtaactaacgacgaatttatataacgactcctacaaaacccgataaacgatatttaccgaactcgaaaaaacgaataactcgaaattaccccgttaaccgatttaactccttatttcccgaccgttatttacaaaattaacaaaaaaacttatcccgcgtaaaacccatattaataaaaacgtcgtcctaatacatataatctacgtattctactataaactcaacacgtaaatccccgataattccactattacaaaatacgaaaataattaatacctcttact

SEQ ID NO: 24549 - DNA, 557 bp, Artificial Sequence
  chemically treated genomic DNA (Homo sapiens) CpG-island No: 24549
  unsure (395, 535)
attcgcgtaatggatcggtacgataacgcgcgttttgtcggtgatcgtcgttttaattagcgtttcgtcgatgtttatggtgttcgggcgaatatttataaaaacgatttttgcgttacgtagtataaaggtattggcggtggagataaaggtgtagttcggtatgattattttatcgttaggttggatatcgagtagtagcgtcgttatttttagcgaagcggtgtaggacggcgttagtaatattttggcgttgataaaacgttgttttaggtattgttggtagcgacgggttaaatcgttatcgttatatagtgttgcggtaattattggcgattgcgtattgtttagttcggtttttattatcgggggtgcgtttaatggagtatgtgatnttcgtttaataggtcgcggaggtttttagtcggatacgtgtgtgtttcgtagcgcggcgggttgttattgggtgttatcgtaggtgtttttagagtattattacgataacgggtgttagttaaatcgaacgttttattanggaaatagtcgtgtttaggttt

SEQ ID NO: 24550 - DNA, 557 bp, Artificial Sequence
  chemically treated genomic DNA (Homo sapiens) CpG-island No: 24550
  unsure (23, 163)
aaacctaaacacgactatttccntaataaaacgttcgatttaactaacacccgttatcgtaataatactctaaaaacacctacgataacacccaataacaacccgccgcgctacgaaacacacacgtatccgactaaaaacctccgcgacctattaaacgaanatcacatactccattaaacgcacccccgataataaaaaccgaactaaacaatacgcaatcgccaataattaccgcaacactatataacgataacgatttaacccgtcgctaccaacaatacctaaaacaacgttttatcaacgccaaaatattactaacgccgtcctacaccgcttcgctaaaaataacgacgctactactcgatatccaacctaacgataaaataatcataccgaactacacctttatctccaccgccaatacctttatactacgtaacgcaaaaatcgtttttataaatattcgcccgaacaccataaacatcgacgaaacgctaattaaaacgacgatcaccgacaaaacgcgcgttatcgtaccgatccattacgcgaat

SEQ ID NO: 24551 - DNA, 557 bp, Artificial Sequence
  chemically treated genomic DNA (Homo sapiens) CpG-island No: 24551
  unsure (23, 163)
gaatttaaatacggttgtttttntggtaagacgttcggtttaattagtattcgttatcgtggtaatgttttgaaaatatttgcggtggtatttagtggtaattcgtcgcgttacgaaatatatacgtgttcgattagagattttcgcgatttgttaaacgggnattatatattttattaaacgtattttcggtggtgggaatcgaattggataatacgtagtcgttaatggttatcgtaatattgtgtggcgatggcggtttaattcgtcgttgttagtagtgtttggagtaacgttttgttagcgttaaagtgttattgacgtcgttttgtatcgtttcgttggagatggcggcgttgttgttcgatatttagtttggcgatgaagtgattatgtcgagttatatttttgtttttatcgttaatgtttttgtgttgcgtggcgtaaaaatcgtttttgtggatgttcgttcggatattatgaatatcgacgaaacgttgattgaagcggcgattatcgataaaacgcgcgttatcgtgtcggtttattacgcgggt

SEQ ID NO: 24552 - DNA, 557 bp, Artificial Sequence
  chemically treated genomic DNA (Homo sapiens) CpG-island No: 24552
  unsure (395, 535)
acccgcgtaataaaccgacacgataacgcgcgttttatcgataatcgccgcttcaatcaacgtttcgtcgatattcataatatccgaacgaacatccacaaaaacgatttttacgccacgcaacacaaaaacattaacgataaaaacaaaaatataactcgacataatcacttcatcgccaaactaaatatcgaacaacaacgccgccatctccaacgaaacgatacaaaacgacgtcaataacactttaacgctaacaaaacgttactccaaacactactaacaacgacgaattaaaccgccatcgccacacaatattacgataaccattaacgactacgtattatccaattcgattcccaccaccgaaaatacgtttaataaaatatataatncccgtttaacaaatcgcgaaaatctctaatcgaacacgtatatatttcgtaacgcgacgaattaccactaaataccaccgcaaatattttcaaaacattaccacgataacgaatactaattaaaccgaacgtcttaccanaaaaacaaccgtatttaaattc

SEQ ID NO: 24553 - DNA, 823 bp, Artificial Sequence
  chemically treated genomic DNA (Homo sapiens) CpG-island No: 24553
  unsure (747)
ggaggtgttggggatgcgtttgatttggaataaacgttatattacgttggtatcgattgcgatcgtgtttgggttggcgtttaaatttttcgattcggaaaaattattcggcggtgtagaagatttaggtattatttgtgcgttgattttaattattacgtcgggcgtggaaattggtcgtcgttatttttcgttgaacgtatcgttttagaacggatcgacgcgcggtaaagatgttttcgtgtcgatcgattatattatcggcgggtcgaaaatggtcgggtaaggttggcggatgttggtggagtgtttttcggtaggtcgcggtattattttgttttttaatttaatcggcggcgtgaaatcggtagcgttggtaatcggcgcgtatgtttatattcgtcgttagtttaaaatttttattggtaagatggaagggattgaagagtcgttggcgcgtattgtcggtaatgtttacgtgatggatgttgcggtatcgttgattatttacggtattatgttcggcgaaaaatttgtcgtgttgtcggttatcgttaagtattattgtatttatcgcgggtagtagtcgattattgatgcgatggatattatcggcggtaaaggtattatgttcgggtaaagtaattttttggcgcgtgtttattagggcgtatcgattgttattatcgttgaaggggttaatattttgattcgtagtatgatgattttcggataagagagcgattncgttgttatttcgtacgtgttggaagagatggaagcggcgaagaataatgacgttaacgcgttcgataaattgttg

SEQ ID NO: 24554 - DNA, 823 bp, Artificial Sequence
  chemically treated genomic DNA (Homo sapiens) CpG-island No: 24554
  unsure (77)
caacaatttatcgaacgcgttaacgtcattattcttcgccgcttccatctcttccaacacgtacgaaataacaacgnaatcgctctcttatccgaaaatcatcatactacgaatcaaaatattaaccccttcaacgataataacaatcgatacgccctaataaacacgcgccaaaaaattactttacccgaacataatacctttaccgccgataatatccatcgcatcaataatcgactactacccgcgataaatacaataatacttaacgataaccgacaacacgacaaatttttcgccgaacataataccgtaaataatcaacgataccgcaacatccatcacgtaaacattaccgacaatacgcgccaacgactcttcaatcccttccatcttaccaataaaaattttaaactaacgacgaatataaacatacgcgccgattaccaacgctaccgatttcacgccgccgattaaattaaaaaacaaaataataccgcgacctaccgaaaaacactccaccaacatccgccaaccttacccgaccattttcgacccgccgataatataatcgatcgacacgaaaacatctttaccgcgcgtcgatccgttctaaaacgatacgttcaacgaaaaataacgacgaccaatttccacgcccgacgtaataattaaaatcaacgcacaaataatacctaaatcttctacaccgccgaataatttttccgaatcgaaaaatttaaacgccaacccaaacacgatcgcaatcgataccaacgtaatataacgtttattccaaatcaaacgcatccccaacacctcc

SEQ ID NO: 24555 - DNA, 823 bp, Artificial Sequence
  chemically treated genomic DNA (Homo sapiens) CpG-island No: 24555
  unsure (77)
taatagtttatcgaacgcgttgacgttattgtttttcgtcgtttttattttttttagtacgtacggagtggtaacgnaatcgtttttttgttcgaagattattatgttgcgggttagaatgttagtttttttaacggtgatggtaatcggtgcgttttggtaagtacgcgttaggaagttgttttgttcgagtataatgtttttatcgtcggtaatatttatcgtattaataatcgattgttgttcgcggtgggtatagtgatatttaacgatagtcgatagtacggtaggtttttcgtcgagtataatgtcgtaggtaattagcgatgtcgtagtatttattacgtaggtattatcggtaatacgcgttagcggttttttaattttttttattttattaatagagattttgaattgacggcgaatgtgagtatacgcgtcggttgttagcgttatcgattttacgtcgtcggttgagttggaaggtagggtgatgtcgcggtttatcgagaggtattttattagtattcgttagttttgttcggttattttcggttcgtcgatgatgtaatcgatcggtacgaagatatttttatcgcgcgtcggttcgttttggaacggtacgtttagcgggaagtggcgacgattaatttttacgttcggcgtggtggttgggattagcgtataggtaatgtttaaattttttgtatcgtcgagtaattttttcgggtcggagagtttaaacgttagtttaagtacggtcgtaatcggtgttagcgtaatgtagcgtttgttttaggttagacgtatttttagtattttt

SEQ ID NO: 24556 - DNA, 823 bp, Artificial Sequence
  chemically treated genomic DNA (Homo sapiens) CpG-island No: 24556
  unsure (747)
aaaaatactaaaaatacgtctaacctaaaacaaacgctacattacgctaacaccgattacgaccgtacttaaactaacgtttaaactctccgacccgaaaaaattactcgacgatacaaaaaatttaaacattacctatacgctaatcccaaccaccacgccgaacgtaaaaattaatcgtcgccacttcccgctaaacgtaccgttccaaaacgaaccgacgcgcgataaaaatatcttcgtaccgatcgattacatcatcgacgaaccgaaaataaccgaacaaaactaacgaatactaataaaatacctctcgataaaccgcgacatcaccctaccttccaactcaaccgacgacgtaaaatcgataacgctaacaaccgacgcgtatactcacattcgccgtcaattcaaaatctctattaataaaataaaaaaaattaaaaaaccgctaacgcgtattaccgataatacctacgtaataaatactacgacatcgctaattacctacgacattatactcgacgaaaaacctaccgtactatcgactatcgttaaatatcactatacccaccgcgaacaacaatcgattattaatacgataaatattaccgacgataaaaacattatactcgaacaaaacaacttcctaacgcgtacttaccaaaacgcaccgattaccatcaccgttaaaaaaactaacattctaacccgcaacataataatcttcgaacaaaaaaacgattncgttaccactccgtacgtactaaaaaaaataaaaacgacgaaaaacaataacgtcaacgcgttcgataaactatta

SEQ ID NO: 24557 - DNA, 976 bp, Artificial Sequence
  chemically treated genomic DNA (Homo sapiens) CpG-island No: 24557
cgaatggggcgtgatgattaacgacgcgcgttagtatatttggatttagtcgttgtaaatgttttggtcggggttggcgttgtttattagcgtgatggtttttaatttggtgggtgacgtattgcgcgattatttggatttttatttggtgacggagtacgtatattaatgtcgtaatagattgaattacgtaatatcgcgttataggtcgcgtagtcgttggtatacggtgtatcgttaattttgtaacgcgggcgcgtgttggcgttagtcggcggtagcggtagcgggaaattattaatttgcgtcgtaacgttgggtattttgttcgttggcgttcgttagacggcgggggaaattttagtcgatggtaaatcggtttcgttttgcgttttgcgcggtattaaaattgttattattatgtagaattcgcgtagcgtttttaatttattgtatattatgtatatttacgcgcgggaaatttgtttggcgttagggaaattcgtcgatgacgttacgtttatcgttgttatagaagcggtggggttggaaaacgtcgcgcgcgtgttgaagttgtattcgttcgagatgagcggcggtatgttgtagcgtatgatgattgcgatggcggtgttgtgtgaattatcgtttattatcgtcgatgaatcgattatcgattttgacgtggtagtataggcgcgtattttcgatttgttggaaagtattatgtaaaaataagcgtcgggaatgttgttggtgaatttagatattgggcgttagggcggtttgcggaataattgcggggaattcgacggtagaatgttgatagggggtgtgaaacgcgtttaaggttttagaattatgaggcgcgttgggttcgcgaattgttttaaggatgaggggtataaggatataatacgggggtttttaatagcggggggatgggataatattcggggggaaaatcgtttcgagg

SEQ ID NO: 24558 - DNA, 976 bp, Artificial Sequence
  chemically treated genomic DNA (Homo sapiens) CpG-island No: 24558
cctcgaaacgattttccccccgaatattatcccatccccccgctattaaaaacccccgtattatatccttatacccctcatccttaaaacaattcgcgaacccaacgcgcctcataattctaaaaccttaaacgcgtttcacaccccctatcaacattctaccgtcgaattccccgcaattattccgcaaaccgccctaacgcccaatatctaaattcaccaacaacattcccgacgcttatttttacataatactttccaacaaatcgaaaatacgcgcctatactaccacgtcaaaatcgataatcgattcatcgacgataataaacgataattcacacaacaccgccatcgcaatcatcatacgctacaacataccgccgctcatctcgaacgaatacaacttcaacacgcgcgcgacgttttccaaccccaccgcttctataacaacgataaacgtaacgtcatcgacgaatttccctaacgccaaacaaatttcccgcgcgtaaatatacataatatacaataaattaaaaacgctacgcgaattctacataataataacaattttaataccgcgcaaaacgcaaaacgaaaccgatttaccatcgactaaaatttcccccgccgtctaacgaacgccaacgaacaaaatacccaacgttacgacgcaaattaataatttcccgctaccgctaccgccgactaacgccaacacgcgcccgcgttacaaaattaacgatacaccgtataccaacgactacgcgacctataacgcgatattacgtaattcaatctattacgacattaatatacgtactccgtcaccaaataaaaatccaaataatcgcgcaatacgtcacccaccaaattaaaaaccatcacgctaataaacaacgccaaccccgaccaaaacatttacaacgactaaatccaaatatactaacgcgcgtcgttaatcatcacgccccattcg

SEQ ID NO: 24559 - DNA, 976 bp, Artificial Sequence
  chemically treated genomic DNA (Homo sapiens) CpG-island No: 24559
tttcggggcggtttttttttcgggtgttgttttattttttcgttattggggattttcgtgttatatttttgtgttttttatttttggggtaattcgcggatttagcgcgttttatgattttggggttttaaacgcgttttatattttttgttagtattttgtcgtcggatttttcgtagttatttcgtagatcgttttaacgtttaatatttgggtttattagtagtattttcggcgtttgtttttgtataatgttttttagtagatcgagaatgcgcgtttgtgttattacgttaaggtcggtggtcggtttatcggcgatgataaacggtgatttatatagtatcgttatcgtaattattatgcgttgtaatatgtcgtcgtttatttcgaacgggtatagttttagtacgcgcgcggcgttttttagttttatcgtttttatggtagcggtaagcgtagcgttatcggcgggtttttttaacgttaggtaggtttttcgcgcgtgggtgtgtatggtgtgtagtggattaaaggcgttgcgcgggttttgtatgatggtggtaattttgatgtcgcgtagggcgtaaggcgaaatcggtttgttatcggttaaaatttttttcgtcgtttggcgaacgttagcgggtaaaatgtttagcgttgcggcgtaggttaatgatttttcgttgtcgttatcgtcgattaacgttagtacgcgttcgcgttgtagggttaacgatatatcgtgtattagcggttgcgcggtttgtagcgcgatattacgtagtttaatttgttgcggtattagtgtgcgtgtttcgttattagatgagggtttagatgatcgcgtagtgcgttatttattaggttaaaggttattacgttgataaatagcgttagtttcggttagaatatttgtagcggttgggtttagatatattggcgcgcgtcgttaattattacgttttattcg

SEQ ID NO: 24560 - DNA, 976 bp, Artificial Sequence
  chemically treated genomic DNA (Homo sapiens) CpG-island No: 24560
cgaataaaacgtaataattaacgacgcgcgccaatatatctaaacccaaccgctacaaatattctaaccgaaactaacgctatttatcaacgtaataacctttaacctaataaataacgcactacgcgatcatctaaaccctcatctaataacgaaacacgcacactaataccgcaacaaattaaactacgtaatatcgcgctacaaaccgcgcaaccgctaatacacgatatatcgttaaccctacaacgcgaacgcgtactaacgttaatcgacgataacgacaacgaaaaatcattaacctacgccgcaacgctaaacattttacccgctaacgttcgccaaacgacgaaaaaaattttaaccgataacaaaccgatttcgccttacgccctacgcgacatcaaaattaccaccatcatacaaaacccgcgcaacgcctttaatccactacacaccatacacacccacgcgcgaaaaacctacctaacgttaaaaaaacccgccgataacgctacgcttaccgctaccataaaaacgataaaactaaaaaacgccgcgcgcgtactaaaactatacccgttcgaaataaacgacgacatattacaacgcataataattacgataacgatactatataaatcaccgtttatcatcgccgataaaccgaccaccgaccttaacgtaataacacaaacgcgcattctcgatctactaaaaaacattatacaaaaacaaacgccgaaaatactactaataaacccaaatattaaacgttaaaacgatctacgaaataactacgaaaaatccgacgacaaaatactaacaaaaaatataaaacgcgtttaaaaccccaaaatcataaaacgcgctaaatccgcgaattaccccaaaaataaaaaacacaaaaatataacacgaaaatccccaataacgaaaaaataaaacaacacccgaaaaaaaaaccgccccgaaa

SEQ ID NO: 24561 - DNA, 638 bp, Artificial Sequence
  chemically treated genomic DNA (Homo sapiens) CpG-island No: 24561
tatttcgtggatcgttatgcgtttttgatagtcggattgatggtaatgagggtagtttacgggagtgttaattgttgttatcgcgagttgatgatatttaaatatttgcgtttgttggggtgatacgggcgtgaattgtcggtattgcggatataggcgacgaattagacgttgcgcgataatttttgttagggaagacgaaagtaggaatgattcgacgtttatgtcgcggagtcgggttattgcgtttgatgtattgttagtgtggagtgttgagagtattagatggtcggtgagcgaggtttgaatcgtaatttgcgcggtttttgtattacgaattttttttattatgacgatattcgggttttggcgaagtatggcgcgtaggtcgcgagcgaaagatatatttatacgggtatttatttgcgtttgtttaatgttttttagtttatattttacgggattttttatcgttagaatattgcggtcgggagtatttagcgtcgaaaggatggcgtagagcgtggtgtttttatcggagtttgtcggttttgttattaggataatatcgtgcggaagttgaatgagattttttaaattttgtttattcgttgtcgttatttttaggttgtttatat

SEQ ID NO: 24562 - DNA, 638 bp, Artificial Sequence
  chemically treated genomic DNA (Homo sapiens) CpG-island No: 24562
atataaacaacctaaaaataacgacaacgaataaacaaaatttaaaaaatctcattcaacttccgcacgatattatcctaataacaaaaccgacaaactccgataaaaacaccacgctctacgccatcctttcgacgctaaatactcccgaccgcaatattctaacgataaaaaatcccgtaaaatataaactaaaaaacattaaacaaacgcaaataaatacccgtataaatatatctttcgctcgcgacctacgcgccatacttcgccaaaacccgaatatcgtcataataaaaaaaattcgtaatacaaaaaccgcgcaaattacgattcaaacctcgctcaccgaccatctaatactctcaacactccacactaacaatacatcaaacgcaataacccgactccgcgacataaacgtcgaatcattcctactttcgtcttccctaacaaaaattatcgcgcaacgtctaattcgtcgcctatatccgcaataccgacaattcacgcccgtatcaccccaacaaacgcaaatatttaaatatcatcaactcgcgataacaacaattaacactcccgtaaactaccctcattaccatcaatccgactatcaaaaacgcataacgatccacgaaata

SEQ ID NO: 24563 - DNA, 638 bp, Artificial Sequence
  chemically treated genomic DNA (Homo sapiens) CpG-island No: 24563
atatgaataatttggggatgacggtagcggataagtaggatttagaaaattttatttagttttcgtacggtattattttggtgatagggtcgataggtttcggtaaaagtattacgttttacgttattttttcggcgttgaatattttcggtcgtaatattttgacggtagaagatttcgtggaatatgagttggaaggtattgggtaaacgtaggtgaatattcgtgtggatatgtttttcgttcgcggtttgcgcgttatatttcgttaggattcggatgtcgttatggtgggggaaattcgtgatatagaaatcgcgtagattgcggtttaggtttcgtttatcggttatttggtatttttaatattttatattaatagtgtattaggcgtagtgattcggtttcgcgatatgggcgtcgaattatttttgttttcgttttttttggtagggattatcgcgtaacgtttggttcgtcgtttgtgttcgtaatgtcgataatttacgttcgtattattttaataagcgtagatgtttaaatattattagttcgcggtgataataattggtattttcgtaggttgtttttattgttattaattcggttattaggggcgtatggcgatttacgaaatg

SEQ ID NO: 24564 - DNA, 638 bp, Artificial Sequence
  chemically treated genomic DNA (Homo sapiens) CpG-island No: 24564
catttcgtaaatcgccatacgcccctaataaccgaattaataacaataaaaacaacctacgaaaataccaattattatcaccgcgaactaataatatttaaacatctacgcttattaaaataatacgaacgtaaattatcgacattacgaacacaaacgacgaaccaaacgttacgcgataatccctaccaaaaaaaacgaaaacaaaaataattcgacgcccatatcgcgaaaccgaatcactacgcctaatacactattaatataaaatattaaaaataccaaataaccgataaacgaaacctaaaccgcaatctacgcgatttctatatcacgaatttcccccaccataacgacatccgaatcctaacgaaatataacgcgcaaaccgcgaacgaaaaacatatccacacgaatattcacctacgtttacccaataccttccaactcatattccacgaaatcttctaccgtcaaaatattacgaccgaaaatattcaacgccgaaaaaataacgtaaaacgtaatacttttaccgaaacctatcgaccctatcaccaaaataataccgtacgaaaactaaataaaattttctaaatcctacttatccgctaccgtcatccccaaattattcatat

SEQ ID NO: 24565 - DNA, 932 bp, Artificial Sequence
  chemically treated genomic DNA (Homo sapiens) CpG-island No: 24565
tcggcgagtaattgatcgattggggcggggcgttacgttggttgaaatcgatagtcgaggataattaaatttatcgtatcgttcgtaacgttggcggttatgcgattcgttttagtgtcggagaggggggttttgtttcgttatcggtttttttatttcgttattattagtagtttaaatagtagttcgatttttgcggcgtgtttaatttcggtcgtatgtacgcggaattttgaggagtaggttatgtaaatttaattaattgaagagatgcggtagaacgcgcgcgcgttggaagtcgatagtattttgcgcgtttgtgtttattgcggattttgtatcgtaatttggttaatttattagtttttgggcgatgaattggacgggtcgcgcgggcgtatttatttgattaaataggtgttggaaggtaaacgaatttacgtttaaaaatataggagtaattcgaatcggggttttacgttggttcgattcgcgtatattatcggatttttcggggcggtattataatttgcggtaatcgggttataaacggtagtttataggtaagtttaggtcggattaaaacgcgtaacgatttttcgtaagtttattcggttatcgattaattcgcggttcgtttttatcgtttcgcgaaggatattacgcgtttaagtaagaatttttcggtttatacgtattacgtacgtttttattcgtttatcgtcgtagttttcgatttttacgcgcggtatattatacgtattcgcgcgttatgcgttgagaagtagcgtatagtgttttttttcgtcgttttttcgttttttcggttcgagcgtcggcgttcgcgcgcgtacggtcgtttcgtttcgttcgggtttcgacgaacgaaaggtggattcgttcgtattttttcgggttttcgcgtttcgata

SEQ ID NO: 24566 - DNA, 932 bp, Artificial Sequence
  chemically treated genomic DNA (Homo sapiens) CpG-island No: 24566
tatcgaaacgcgaaaacccgaaaaaatacgaacgaatccacctttcgttcgtcgaaacccgaacgaaacgaaacgaccgtacgcgcgcgaacgccgacgctcgaaccgaaaaaacgaaaaaacgacgaaaaaaaacactatacgctacttctcaacgcataacgcgcgaatacgtataatataccgcgcgtaaaaatcgaaaactacgacgataaacgaataaaaacgtacgtaatacgtataaaccgaaaaattcttacttaaacgcgtaatatccttcgcgaaacgataaaaacgaaccgcgaattaatcgataaccgaataaacttacgaaaaatcgttacgcgttttaatccgacctaaacttacctataaactaccgtttataacccgattaccgcaaattataataccgccccgaaaaatccgataatatacgcgaatcgaaccaacgtaaaaccccgattcgaattactcctatatttttaaacgtaaattcgtttaccttccaacacctatttaatcaaataaatacgcccgcgcgacccgtccaattcatcgcccaaaaactaataaattaaccaaattacgatacaaaatccgcaataaacacaaacgcgcaaaatactatcgacttccaacgcgcgcgcgttctaccgcatctcttcaattaattaaatttacataacctactcctcaaaattccgcgtacatacgaccgaaattaaacacgccgcaaaaatcgaactactatttaaactactaataataacgaaataaaaaaaccgataacgaaacaaaacccccctctccgacactaaaacgaatcgcataaccgccaacgttacgaacgatacgataaatttaattatcctcgactatcgatttcaaccaacgtaacgccccgccccaatcgatcaattactcgccga

SEQ ID NO: 24567 - DNA, 932 bp, Artificial Sequence
  chemically treated genomic DNA (Homo sapiens) CpG-island No: 24567
tgtcggggcgcgggggttcgggggggtgcgggcgagtttatttttcgttcgtcggggttcgggcggggcggggcggtcgtgcgcgcgcgggcgtcggcgttcgggtcgggggggcgggggggcggcgggggggggtattatgcgttgttttttaacgtatggcgcgcgagtgcgtgtggtgtgtcgcgcgtgggggtcggaggttgcggcggtgggcgggtgggggcgtgcgtggtgcgtgtgggtcggggggtttttgtttgggcgcgtggtgtttttcgcggagcggtgggggcgggtcgcgggttggtcggtggtcgggtgggtttgcgggggatcgttgcgcgttttggttcggtttgggtttgtttgtgggttgtcgtttgtggttcggttgtcgtaggttgtgatgtcgtttcgggaggttcggtggtgtgcgcgagtcgggttaacgtgaggtttcgattcgagttgtttttgtgtttttaagcgtgagttcgtttgttttttagtatttgtttaattagatagatgcgttcgcgcggttcgtttagtttatcgtttagaagttgataggttggttaggttgcggtataaaattcgtagtgaatataggcgcgtaggatgttgtcggtttttagcgcgcgcgcgttttgtcgtatttttttagttaattgggtttgtatagtttgttttttaaagtttcgcgtatatgcgatcggggttaaatacgtcgtaagggtcgagttgttgtttaagttgttggtgatagcggaataaaggagtcgatagcggggtaaagttttttttttcggtattaaagcgggtcgtatgatcgttagcgttgcgggcgatgcgatggatttgattgttttcggttgtcgattttagttagcgtaacgtttcgttttagtcgattagttgttcgtcgg

SEQ ID NO: 24568 - DNA, 932 bp, Artificial Sequence
  chemically treated genomic DNA (Homo sapiens) CpG-island No: 24568
ccgacgaacaactaatcgactaaaacgaaacgttacgctaactaaaatcgacaaccgaaaacaatcaaatccatcgcatcgcccgcaacgctaacgatcatacgacccgctttaataccgaaaaaaaaaactttaccccgctatcgactcctttattccgctatcaccaacaacttaaacaacaactcgacccttacgacgtatttaaccccgatcgcatatacgcgaaactttaaaaaacaaactatacaaacccaattaactaaaaaaatacgacaaaacgcgcgcgcgctaaaaaccgacaacatcctacgcgcctatattcactacgaattttataccgcaacctaaccaacctatcaacttctaaacgataaactaaacgaaccgcgcgaacgcatctatctaattaaacaaatactaaaaaacaaacgaactcacgcttaaaaacacaaaaacaactcgaatcgaaacctcacgttaacccgactcgcgcacaccaccgaacctcccgaaacgacatcacaacctacgacaaccgaaccacaaacgacaacccacaaacaaacccaaaccgaaccaaaacgcgcaacgatcccccgcaaacccacccgaccaccgaccaacccgcgacccgcccccaccgctccgcgaaaaacaccacgcgcccaaacaaaaaccccccgacccacacgcaccacgcacgcccccacccgcccaccgccgcaacctccgacccccacgcgcgacacaccacacgcactcgcgcgccatacgttaaaaaacaacgcataatacccccccccgccgcccccccgcccccccgacccgaacgccgacgcccgcgcgcgcacgaccgccccgccccgcccgaaccccgacgaacgaaaaataaactcgcccgcacccccccgaacccccgcgccccgaca

SEQ ID NO: 24569 - DNA, 551 bp, Artificial Sequence
  chemically treated genomic DNA (Homo sapiens) CpG-island No: 24569
gtcgcggtaggaaaagtaaaagttacggcgtataaatgcgatttttgtgcggggcgcgaaaacggttttgtttgtgttgagaattgttcggcggacgcgttgtaattggttattgacgtcgtatttttcggtatggcgaaatttcgtcgtttgcgtatcgcgcgttaggaatattaatcgtggtatgttagtatcgcggcgtaagaaatgtcggtaatgagtaaagtcgaatagatgtaggtaacgttcgcgcgtggcgagtcggatagattggcgattgaagcgcgtaaaatcggtttgatgattttatttgttatttcgggcggataggtttaagggaagtttgagttgttttagtgcgcgagttcgagttgtgatggattgtcgtgattattttttcgagtgattgacggtgaagcgaatatgagtcgacgtagttttttaaataagttgcggaattcggtttgtttaaacgtgttagggcgttaacgaggtcggggttacggtaaggttaataagggggaggtgggttaacgttaagacgggtaaga

SEQ ID NO: 24570 - DNA, 551 bp, Artificial Sequence
  chemically treated genomic DNA (Homo sapiens) CpG-island No: 24570
tcttacccgtcttaacgttaacccacctcccccttattaaccttaccgtaaccccgacctcgttaacgccctaacacgtttaaacaaaccgaattccgcaacttatttaaaaaactacgtcgactcatattcgcttcaccgtcaatcactcgaaaaaataatcacgacaatccatcacaactcgaactcgcgcactaaaacaactcaaacttcccttaaacctatccgcccgaaataacaaataaaatcatcaaaccgattttacgcgcttcaatcgccaatctatccgactcgccacgcgcgaacgttacctacatctattcgactttactcattaccgacatttcttacgccgcgatactaacataccacgattaatattcctaacgcgcgatacgcaaacgacgaaatttcgccataccgaaaaatacgacgtcaataaccaattacaacgcgtccgccgaacaattctcaacacaaacaaaaccgttttcgcgccccgcacaaaaatcgcatttatacgccgtaacttttacttttcctaccgcgac

SEQ ID NO: 24571 - DNA, 551 bp, Artificial Sequence
  chemically treated genomic DNA (Homo sapiens) CpG-island No: 24571
ttttattcgttttgacgttagtttattttttttttattggttttgtcgtaatttcggtttcgttagcgttttaatacgtttggataagtcggatttcgtagtttgtttggaaagttacgtcggtttatgttcgttttatcgttaattattcggaaaggtaattacggtagtttattataattcgggttcgcgtattaaagtagtttaggttttttttgggtttgttcgttcggaatggtagataaggttattaaatcggttttgcgcgttttaatcgttagtttattcggttcgttacgcgcgggcgttgtttgtatttgttcgattttatttattatcggtattttttgcgtcgcggtattggtatgttacggttgatgtttttgacgcgcggtgcgtaagcggcgggatttcgttatgtcggagagtgcgacgttagtgattagttgtagcgcgttcgtcgggtaatttttaatataggtaggatcgttttcgcgtttcgtataaaggtcgtatttatgcgtcgtggtttttattttttttgtcgcgat

SEQ ID NO: 24572 - DNA, 551 bp, Artificial Sequence
  chemically treated genomic DNA (Homo sapiens) CpG-island No: 24572
atcgcgacaaaaaaaataaaaaccacgacgcataaatacgacctttatacgaaacgcgaaaacgatcctacctatattaaaaattacccgacgaacgcgctacaactaatcactaacgtcgcactctccgacataacgaaatcccgccgcttacgcaccgcgcgtcaaaaacatcaaccgtaacataccaataccgcgacgcaaaaaataccgataataaataaaatcgaacaaatacaaacaacgcccgcgcgtaacgaaccgaataaactaacgattaaaacgcgcaaaaccgatttaataaccttatctaccattccgaacgaacaaacccaaaaaaaacctaaactactttaatacgcgaacccgaattataataaactaccgtaattacctttccgaataattaacgataaaacgaacataaaccgacgtaactttccaaacaaactacgaaatccgacttatccaaacgtattaaaacgctaacgaaaccgaaattacgacaaaaccaataaaaaaaaaataaactaacgtcaaaacgaataaaa

SEQ ID NO: 24573 - DNA, 544 bp, Artificial Sequence
  chemically treated genomic DNA (Homo sapiens) CpG-island No: 24573
gttttcgttaatgttttcgttagcggtattaatcggaattgtcgttatcgtttggatgtcgatatttaatttttttaggttatttatttgacgtatcgcgtcgtaaatgattagatttttttatttattttgtattgttagacgcgttagtttagtatcgattagtgcgcgacgaatagaattaacggtatcgacgataagaatacgattacgggtattttgttcgagtagatcgtatagtaattcgtggttttcgaaatatttatcgtgattattgtcggtaaagagtcgttcgtaaagtggtaatcggttttacgtttttatttgttattttacgcggggtatttttcggggtatcgggggcgagatttattacgcgcggggggagtttttggtgatagtgggtcgcggattttacggggatcgtagatttggtggttatagggatcgtggttttttattgaggcgtttttcgtcgtttggtcgcgcgtatagttacgcgcggttttcggaagcgcgagagagtatagcgtagcggttacgt

SEQ ID NO: 24574 - DNA, 544 bp, Artificial Sequence
  chemically treated genomic DNA (Homo sapiens) CpG-island No: 24574
acgtaaccgctacgctatactctctcgcgcttccgaaaaccgcgcgtaactatacgcgcgaccaaacgacgaaaaacgcctcaataaaaaaccacgatccctataaccaccaaatctacgatccccgtaaaatccgcgacccactatcaccaaaaactccccccgcgcgtaataaatctcgcccccgataccccgaaaaataccccgcgtaaaataacaaataaaaacgtaaaaccgattaccactttacgaacgactctttaccgacaataatcacgataaatatttcgaaaaccacgaattactatacgatctactcgaacaaaatacccgtaatcgtattcttatcgtcgataccgttaattctattcgtcgcgcactaatcgatactaaactaacgcgtctaacaatacaaaataaataaaaaaatctaatcatttacgacgcgatacgtcaaataaataacctaaaaaaattaaatatcgacatccaaacgataacgacaattccgattaataccgctaacgaaaacattaacgaaaac

SEQ ID NO: 24575 - DNA, 544 bp, Artificial Sequence
  chemically treated genomic DNA (Homo sapiens) CpG-island No: 24575
gcgtggtcgttgcgttgtgttttttcgcgttttcgggggtcgcgcgtggttgtgcgcgcggttaaacgacggaaggcgttttaataagggattacgatttttgtggttattaagtttgcgattttcgtgagattcgcgatttattattattaggggtttttttcgcgcgtagtgagtttcgttttcgatgtttcgaaaaatatttcgcgtggaatggtaagtgggaacgtgggatcggttgttattttgcggacggttttttgtcgataataattacggtaaatgtttcgaggattacgggttgttgtacgatttgttcgaatagaatgttcgtggtcgtgtttttgtcgtcgatgtcgttggttttgttcgtcgcgtattggtcgatgttgaattggcgcgtttggtagtataaaatgaatgggaaggtttggttatttacggcgcggtgcgttaggtagatgatttggaagagttggatatcggtatttaggcgatggcggtaatttcggttggtgtcgttggcgaaggtattggcgaaagt

SEQ ID NO: 24576 - DNA, 544 bp, Artificial Sequence
  chemically treated genomic DNA (Homo sapiens) CpG-island No: 24576
actttcgccaataccttcgccaacgacaccaaccgaaattaccgccatcgcctaaataccgatatccaactcttccaaatcatctacctaacgcaccgcgccgtaaataaccaaaccttcccattcattttatactaccaaacgcgccaattcaacatcgaccaatacgcgacgaacaaaaccaacgacatcgacgacaaaaacacgaccacgaacattctattcgaacaaatcgtacaacaacccgtaatcctcgaaacatttaccgtaattattatcgacaaaaaaccgtccgcaaaataacaaccgatcccacgttcccacttaccattccacgcgaaatatttttcgaaacatcgaaaacgaaactcactacgcgcgaaaaaaacccctaataataataaatcgcgaatctcacgaaaatcgcaaacttaataaccacaaaaatcgtaatcccttattaaaacgccttccgtcgtttaaccgcgcgcacaaccacgcgcgacccccgaaaacgcgaaaaaacacaacgcaacgaccacgc

SEQ ID NO: 24577 - DNA, 700 bp, Artificial Sequence
  chemically treated genomic DNA (Homo sapiens) CpG-island No: 24577
gttaagcgttttgtggcgattgttttgcgtaatcgttggcgtcgtatgtagtttaacgaatagttgcgttatgaagtgatttcgaaaaaatattttgatgatcggtttcgattcggttgtcgcgttaaatattgaaatcgttcgtcgtttggttaagttggcgaatgcgtcgtttattaaagttgaagcgattaattatatcgaatcgggttacgtcggtaacgtagtggtattttattatttcgcgtattttgtcgatgtcgtcgcggattattgggtatcgcgttttagtttattcgtagaatattcgttatcgggtcgagtaatcggtatatatcgtatttcgtacgcgtcgattttttcgttttattatttttggtatatttaaacgttttcgaatcgtcgcgtttacgttatttttataatcgcgcgtacgtttacgttatcgtcgttatatcgcgttttttcgtttttatcgtttcgcgataattatttcgttcgtcgttattttataacgttcgcgttcgattttcgtacgttatagtacgtttttatattttttcgtagttatatatcgtcgtttcgttttttttatagtatcgttagatattattttatattttatatatattatttattttcgacgttaatttatttttttatttataattattttatatttttacgtttttatatataa

SEQ ID NO: 24578 - DNA, 700 bp, Artificial Sequence
  chemically treated genomic DNA (Homo sapiens) CpG-island No: 24578
ttatatataaaaacgtaaaaatataaaataattataaataaaaaaataaattaacgtcgaaaataaataatatatataaaatataaaataatatctaacgatactataaaaaaaacgaaacgacgatatataactacgaaaaaatataaaaacgtactataacgtacgaaaatcgaacgcgaacgttataaaataacgacgaacgaaataattatcgcgaaacgataaaaacgaaaaaacgcgatataacgacgataacgtaaacgtacgcgcgattataaaaataacgtaaacgcgacgattcgaaaacgtttaaatataccaaaaataataaaacgaaaaaatcgacgcgtacgaaatacgatatataccgattactcgacccgataacgaatattctacgaataaactaaaacgcgatacccaataatccgcgacgacatcgacaaaatacgcgaaataataaaataccactacgttaccgacgtaacccgattcgatataattaatcgcttcaactttaataaacgacgcattcgccaacttaaccaaacgacgaacgatttcaatatttaacgcgacaaccgaatcgaaaccgatcatcaaaatattttttcgaaatcacttcataacgcaactattcgttaaactacatacgacgccaacgattacgcaaaacaatcgccacaaaacgcttaac

SEQ ID NO: 24579 - DNA, 700 bp, Artificial Sequence
  chemically treated genomic DNA (Homo sapiens) CpG-island No: 24579
ttgtgtgtgggggcgtgggggtgtggggtggttgtgggtgggggggtgggttggcgtcgggggtgggtggtgtgtgtggggtgtggggtggtgtttagcgatgttgtgagaggggcggagcgacggtgtgtggttgcgggggggtgtgggggcgtgttgtggcgtgcgggggtcgggcgcgggcgttgtggggtggcggcgagcggggtggttgtcgcggggcggtgggggcgggggggcgcggtgtggcggcggtggcgtgggcgtgcgcgcggttgtgggaatggcgtgggcgcggcggttcgggggcgtttgggtgtgttaggggtggtggggcgggggggtcggcgcgtgcgggatgcggtgtgtgtcggttgttcggttcgatggcgggtgttttgcgagtaggttgggacgcggtatttagtggttcgcggcggtatcggtagagtgcgcggagtaataggatgttattgcgttgtcgacgtagttcggttcggtgtagttggtcgttttagttttgatgggcggcgtattcgttagtttagttagacgacgggcgattttagtgtttagcgcgatagtcgggtcggggtcgattattaggatattttttcggggttattttatggcgtagttgttcgttgagttgtatgcgacgttagcggttacgtagagtaatcgttatagaacgtttggt

SEQ ID NO: 24580 - DNA, 700 bp, Artificial Sequence
  chemically treated genomic DNA (Homo sapiens) CpG-island No: 24580
accaaacgttctataacgattactctacgtaaccgctaacgtcgcatacaactcaacgaacaactacgccataaaataaccccgaaaaaatatcctaataatcgaccccgacccgactatcgcgctaaacactaaaatcgcccgtcgtctaactaaactaacgaatacgccgcccatcaaaactaaaacgaccaactacaccgaaccgaactacgtcgacaacgcaataacatcctattactccgcgcactctaccgataccgccgcgaaccactaaataccgcgtcccaacctactcgcaaaacacccgccatcgaaccgaacaaccgacacacaccgcatcccgcacgcgccgacccccccgccccaccacccctaacacacccaaacgcccccgaaccgccgcgcccacgccattcccacaaccgcgcgcacgcccacgccaccgccgccacaccgcgcccccccgcccccaccgccccgcgacaaccaccccgctcgccgccaccccacaacgcccgcgcccgacccccgcacgccacaacacgcccccacacccccccgcaaccacacaccgtcgctccgcccctctcacaacatcgctaaacaccaccccacaccccacacacaccacccacccccgacgccaacccacccccccacccacaaccaccccacacccccacgcccccacacacaa

SEQ ID NO: 24581 - DNA, 648 bp, Artificial Sequence
  chemically treated genomic DNA (Homo sapiens) CpG-island No: 24581
cgcggagtttcggtttatcgcgtgtggaatttgttttgtgttcgattcgggttaatgaggttggttttagcgtttttatcgggagggttattatattgggtcggttttgtgttcggggtttatgatgttttcgaggtttttttattgcgggttagttatacgtcggtcggtatcggtatttcgtcgttatatttcggtattttttaagttttcgcggttggtttttcgcgcggttgttttcgttgtgtttaagtagcgtaatggcgtagtcgatttttttttggacggcgaaaggacgattgtagacgcggtagttgtatagcgcgaagcgggattgttgtaggaagtttttttttttttatatcgttagttcgtatttttgcgatagtttgatcgtcgtcgtcgggtagattttttcgtagcgtttatagaagatgtagtgtttaagattaaatttttaggtaagtttttttgtggcgaggttagttttaatcgttaaggcgtttgacgggtaggtattgacgtaggtcgcgtagtcgatgtattgttgcgggttttgttttggtttattacggaagtttttattaatcgtaatcggttttagcggataagacgaggtcgtcgtgtcggttttgatgatttttttga

SEQ ID NO: 24582 - DNA, 648 bp, Artificial Sequence
  chemically treated genomic DNA (Homo sapiens) CpG-island No: 24582
tcaaaaaaatcatcaaaaccgacacgacgacctcgtcttatccgctaaaaccgattacgattaataaaaacttccgtaataaaccaaaacaaaacccgcaacaatacatcgactacgcgacctacgtcaatacctacccgtcaaacgccttaacgattaaaactaacctcgccacaaaaaaacttacctaaaaatttaatcttaaacactacatcttctataaacgctacgaaaaaatctacccgacgacgacgatcaaactatcgcaaaaatacgaactaacgatataaaaaaaaaaaaacttcctacaacaatcccgcttcgcgctatacaactaccgcgtctacaatcgtcctttcgccgtccaaaaaaaaatcgactacgccattacgctacttaaacacaacgaaaacaaccgcgcgaaaaaccaaccgcgaaaacttaaaaaataccgaaatataacgacgaaataccgataccgaccgacgtataactaacccgcaataaaaaaacctcgaaaacatcataaaccccgaacacaaaaccgacccaatataataaccctcccgataaaaacgctaaaaccaacctcattaacccgaatcgaacacaaaacaaattccacacgcgataaaccgaaactccgcg

SEQ ID NO: 24583 - DNA, 648 bp, Artificial Sequence
  chemically treated genomic DNA (Homo sapiens) CpG-island No: 24583
ttaaaaaagttattaaaatcggtacggcgatttcgttttattcgttggagtcgattgcggttgataaaaattttcgtggtaagttagagtagaattcgtagtagtgtatcggttgcgcggtttgcgttaatgtttgttcgttaaacgttttaacggttgaaattgatttcgttataggagagtttgtttgggagtttaattttgggtattgtattttttgtggacgttgcgaagaagtttgttcgacggcggcgattaaattgtcgtaagagtacgaattggcggtgtggaagaaagaagattttttgtaatagtttcgtttcgcgttgtgtaattgtcgcgtttgtaatcgttttttcgtcgtttagaaagagatcgattacgttattgcgttgtttaagtataacggggatagtcgcgcggagaattaatcgcgaaagtttggagaatgtcggaatgtagcggcgaaatgtcggtgtcgatcgacgtatgattgattcgtaatgaagaggtttcgagagtattataggtttcggatataggatcggtttaatatggtgattttttcgataagggcgttggaattaattttattgattcggatcgggtataggataagttttatacgcgataagtcgaagtttcgcg

SEQ ID NO: 24584 - DNA, 648 bp, Artificial Sequence
  chemically treated genomic DNA (Homo sapiens) CpG-island No: 24584
cgcgaaacttcgacttatcgcgtataaaacttatcctatacccgatccgaatcaataaaattaattccaacgcccttatcgaaaaaatcaccatattaaaccgatcctatatccgaaacctataatactctcgaaacctcttcattacgaatcaatcatacgtcgatcgacaccgacatttcgccgctacattccgacattctccaaactttcgcgattaattctccgcgcgactatccccgttatacttaaacaacgcaataacgtaatcgatctctttctaaacgacgaaaaaacgattacaaacgcgacaattacacaacgcgaaacgaaactattacaaaaaatcttctttcttccacaccgccaattcgtactcttacgacaatttaatcgccgccgtcgaacaaacttcttcgcaacgtccacaaaaaatacaatacccaaaattaaactcccaaacaaactctcctataacgaaatcaatttcaaccgttaaaacgtttaacgaacaaacattaacgcaaaccgcgcaaccgatacactactacgaattctactctaacttaccacgaaaatttttatcaaccgcaatcgactccaacgaataaaacgaaatcgccgtaccgattttaataacttttttaa

SEQ ID NO: 24585 - DNA, 628 bp, Artificial Sequence
  chemically treated genomic DNA (Homo sapiens) CpG-island No: 24585
tggttagtatgtgttgttgattatggatttttttattcgttacgcgatggtttagcgtgaaattgcgttggcgattggcgaatttttcgttattaaaggttatttatcgtcggtgtttgttaaattatcggtattggtcgagcgtgtcggaaatggtattagcggcggcggttcgattatcgcgttttatatcgtgtttattgaaggcgatgattagtaggattcgattgtcgatttcgcgcgggcgattttcgacggttatattgtgttgtttcgtcgattggcggaagtcgggtattattcggttatcgatattgaagcgtcgattagtcgcgtaatgacggcgttgattagtgagtaatattacgcgcgagtgcgtatttttaaatagttgttgtcgagtttttagcgtaatcgcgatttggttagcgtcggcgcgtatgttaaaggtagcgattcgatgttcgataaagttatcgttttgtggtcgtagttggagggttatttgtaataaggtatttttgaacgcgcggattgggaagcgtttttttaggggttggagcgtatttttcgatagtgttatatttaggagataacggtagaggtagattttgtgttttgcgatttt

SEQ ID NO: 24586 - DNA, 628 bp, Artificial Sequence
  chemically treated genomic DNA (Homo sapiens) CpG-island No: 24586
aaaatcgcaaaacacaaaatctacctctaccgttatctcctaaatataacactatcgaaaaatacgctccaacccctaaaaaaacgcttcccaatccgcgcgttcaaaaataccttattacaaataaccctccaactacgaccacaaaacgataactttatcgaacatcgaatcgctacctttaacatacgcgccgacgctaaccaaatcgcgattacgctaaaaactcgacaacaactatttaaaaatacgcactcgcgcgtaatattactcactaatcaacgccgtcattacgcgactaatcgacgcttcaatatcgataaccgaataatacccgacttccgccaatcgacgaaacaacacaatataaccgtcgaaaatcgcccgcgcgaaatcgacaatcgaatcctactaatcatcgccttcaataaacacgatataaaacgcgataatcgaaccgccgccgctaataccatttccgacacgctcgaccaataccgataatttaacaaacaccgacgataaataacctttaataacgaaaaattcgccaatcgccaacgcaatttcacgctaaaccatcgcgtaacgaataaaaaaatccataatcaacaacacatactaacca

SEQ ID NO: 24587 - DNA, 628 bp, Artificial Sequence
  chemically treated genomic DNA (Homo sapiens) CpG-island No: 24587
agggtcgtagggtataaggtttgtttttgtcgttattttttgggtatgatattgtcgggaaatacgttttagtttttggagagacgttttttagttcgcgcgtttaaaaatgttttgttgtaaatagttttttagttgcggttatagggcgatggttttatcgagtatcggatcgttgtttttggtatacgcgtcgacgttaattagatcgcggttacgttgaaaattcgataatagttgtttgaaggtgcgtattcgcgcgtaatgttgtttattgattaacgtcgttattgcgcggttgatcgacgttttaatatcgatagtcggatagtgttcggttttcgttagtcggcgagatagtataatgtgatcgtcgaggatcgttcgcgcggagtcggtaatcggattttgttggttatcgtttttagtgagtacggtataaaacgcggtaatcgagtcgtcgtcgttaatgttattttcggtacgttcgattagtgtcggtaatttggtaaatatcgacggtggataatttttggtggcggggggttcgttaatcgttagcgtaattttacgttgggttatcgcgtagcgggtgagggagtttataattagtaatatatgttgatta

SEQ ID NO: 24588 - DNA, 628 bp, Artificial Sequence
  chemically treated genomic DNA (Homo sapiens) CpG-island No: 24588
taatcaacatatattactaattataaactccctcacccgctacgcgataacccaacgtaaaattacgctaacgattaacgaaccccccgccaccaaaaattatccaccgtcgatatttaccaaattaccgacactaatcgaacgtaccgaaaataacattaacgacgacgactcgattaccgcgttttataccgtactcactaaaaacgataaccaacaaaatccgattaccgactccgcgcgaacgatcctcgacgatcacattatactatctcgccgactaacgaaaaccgaacactatccgactatcgatattaaaacgtcgatcaaccgcgcaataacgacgttaatcaataaacaacattacgcgcgaatacgcaccttcaaacaactattatcgaattttcaacgtaaccgcgatctaattaacgtcgacgcgtataccaaaaacaacgatccgatactcgataaaaccatcgccctataaccgcaactaaaaaactatttacaacaaaacatttttaaacgcgcgaactaaaaaacgtctctccaaaaactaaaacgtatttcccgacaatatcatacccaaaaaataacgacaaaaacaaaccttataccctacgaccct

SEQ ID NO: 24589 - DNA, 742 bp, Artificial Sequence
  chemically treated genomic DNA (Homo sapiens) CpG-island No: 24589
cgtttggtaaagtgtttatcgggatacgttattcggtgtggcgtttatgtatggttttaggtcgaataacgattatcgagcgtttgttaatatcgtgcggtagtttattaggcgtattaggttgaggattacgttatcgtattggcggtttggtagaaaattagtttttacgatatgagtaatgaggatttgtttgttgttgttaatatcgtttaggcggtaggaaatggtgcggttcgcgatcgttggttataataggtagataaacgtggattgggaagtaatgttttttattggtggttgtatgcgtaacgttatatttttggttagtcggaattcgtattgaacgattttacgcgtttaattaatattgcgttttttgttaacgtttacgttgcgcgggcgataatttatcgttaacgttataatgtttcggtcgcggtgagtgatttgcgcgtcgcgttggaattggaatcgaataatagtaatatttaggtagcgtttggttacgttttgtgggatagcggtgatatcgtatagtcgcgggaaatgttcgaatcggcgtataaagggttttcggacgattcggtattgattcgataattggtttacgtgaattagcgtttggatgatatgtttgcgacgtagtattacgttcggttggtgattgatgatattgataattaggcgttgataattttattgattttagaataaaattaataacgttttaattttcgtt

SEQ ID NO: 24590 - DNA, 742 bp, Artificial Sequence
  chemically treated genomic DNA (Homo sapiens) CpG-island No: 24590
aacgaaaattaaaacgttattaattttattctaaaatcaataaaattatcaacgcctaattatcaatatcatcaatcaccaaccgaacgtaatactacgtcgcaaacatatcatccaaacgctaattcacgtaaaccaattatcgaatcaataccgaatcgtccgaaaaccctttatacgccgattcgaacatttcccgcgactatacgatatcaccgctatcccacaaaacgtaaccaaacgctacctaaatattactattattcgattccaattccaacgcgacgcgcaaatcactcaccgcgaccgaaacattataacgttaacgataaattatcgcccgcgcaacgtaaacgttaacaaaaaacgcaatattaattaaacgcgtaaaatcgttcaatacgaattccgactaaccaaaaatataacgttacgcatacaaccaccaataaaaaacattacttcccaatccacgtttatctacctattataaccaacgatcgcgaaccgcaccatttcctaccgcctaaacgatattaacaacaacaaacaaatcctcattactcatatcgtaaaaactaattttctaccaaaccgccaatacgataacgtaatcctcaacctaatacgcctaataaactaccgcacgatattaacaaacgctcgataatcgttattcgacctaaaaccatacataaacgccacaccgaataacgtatcccgataaacactttaccaaacg

SEQ ID NO: 24591 - DNA, 742 bp, Artificial Sequence
  chemically treated genomic DNA (Homo sapiens) CpG-island No: 24591
ggcggaaattgaagcgttgttgattttgttttggggttagtggggttattagcgtttgattattaatgttattaattattagtcgggcgtagtgttgcgtcgtaggtatgttatttagacgttggtttacgtaggttagttgtcggattagtgtcggatcgttcggaagttttttatgcgtcggttcgagtatttttcgcgattgtgcgatattatcgttattttataaggcgtaattaagcgttgtttgggtgttgttattattcggttttagttttagcgcggcgcgtaaattatttatcgcggtcgggatattatgacgttggcgataaattgtcgttcgcgtaacgtaagcgttggtagaaggcgtaatattgattgagcgcgtgagatcgtttagtgcgagtttcggttgattaggaatgtaacgttgcgtatgtagttattagtagagggtattgttttttagtttacgtttgtttgtttgttgtagttagcgatcgcgagtcgtattattttttgtcgtttgggcggtattggtagtagtaagtagatttttattgtttatgtcgtgaagattgattttttgttaggtcgttagtgcggtggcgtagtttttaatttgatacgtttgataggttatcgtacgatgttgataggcgttcggtagtcgttgttcggtttgaagttatgtataaacgttatatcgggtagcgtgtttcgataaatattttgttagacg

SEQ ID NO: 24592 - DNA, 742 bp, Artificial Sequence
  chemically treated genomic DNA (Homo sapiens) CpG-island No: 24592
cgtctaacaaaatatttatcgaaacacgctacccgatataacgtttatacataacttcaaaccgaacaacgactaccgaacgcctatcaacatcgtacgataacctatcaaacgtatcaaattaaaaactacgccaccgcactaacgacctaacaaaaaatcaatcttcacgacataaacaataaaaatctacttactactaccaataccgcccaaacgacaaaaaataatacgactcgcgatcgctaactacaacaaacaaacaaacgtaaactaaaaaacaataccctctactaataactacatacgcaacgttacattcctaatcaaccgaaactcgcactaaacgatctcacgcgctcaatcaatattacgccttctaccaacgcttacgttacgcgaacgacaatttatcgccaacgtcataatatcccgaccgcgataaataatttacgcgccgcgctaaaactaaaaccgaataataacaacacccaaacaacgcttaattacgccttataaaataacgataatatcgcacaatcgcgaaaaatactcgaaccgacgcataaaaaacttccgaacgatccgacactaatccgacaactaacctacgtaaaccaacgtctaaataacatacctacgacgcaacactacgcccgactaataattaataacattaataatcaaacgctaataaccccactaaccccaaaacaaaatcaacaacgcttcaatttccgcc

SEQ ID NO: 24593 - DNA, 538 bp, Artificial Sequence
  chemically treated genomic DNA (Homo sapiens) CpG-island No: 24593
ttttttaaagagtaacggaggagtacgaaggtcggttaattttggcggatattaggaggttagtgtaatggtataagttagtttgattgcgagttgacggcgcgagtaggtgcgaaagtaggttatagtgattcggtggttttaatggaagggttatcgtttaacggataaaaggtatttcggggataatagttgatatcgtttaagagtttatatcgacggcggtgtttggtatttcgattcggtttattatattttggggttgaagtaggttttaagggtatggttgtcgttatttaaagtggtacgcgagttgggtttagaacgtcgtgagatagtcggtttttatttgtcgtgggcgttggagaattgaggggggttgtttttatacgagaggatcggagtggacgtattattggtgttcgggttgttatgttatggtattgttcggtagttaaatgcggaagagataagtgttgaaagtattaagtacgaaatttgtttcgagatgagttttttttgattttttaagggtttg

SEQ ID NO: 24594 - DNA, 538 bp, Artificial Sequence
  chemically treated genomic DNA (Homo sapiens) CpG-island No: 24594
caaacccttaaaaaatcaaaaaaaactcatctcgaaacaaatttcgtacttaatactttcaacacttatctcttccgcatttaactaccgaacaataccataacataacaacccgaacaccaataatacgtccactccgatcctctcgtataaaaacaacccccctcaattctccaacgcccacgacaaataaaaaccgactatctcacgacgttctaaacccaactcgcgtaccactttaaataacgacaaccatacccttaaaacctacttcaaccccaaaatataataaaccgaatcgaaataccaaacaccgccgtcgatataaactcttaaacgatatcaactattatccccgaaataccttttatccgttaaacgataacccttccattaaaaccaccgaatcactataacctactttcgcacctactcgcgccgtcaactcgcaatcaaactaacttataccattacactaacctcctaatatccgccaaaattaaccgaccttcgtactcctccgttactctttaaaaaa

SEQ ID NO: 24595 - DNA, 538 bp, Artificial Sequence
  chemically treated genomic DNA (Homo sapiens) CpG-island No: 24595
tagatttttaaagggttagggagaatttatttcggggtaagtttcgtgtttaatgtttttagtatttatttttttcgtatttagttatcgggtagtgttatggtatgataattcgaatattagtgatgcgtttatttcggttttttcgtataggagtagttttttttagttttttagcgtttacggtagatagggatcgattgttttacgacgttttaaatttagttcgcgtattattttaaatggcgatagttatatttttgggatttattttagttttaggatgtgatgagtcgaatcgaggtgttaaatatcgtcgtcgatatgaatttttgggcggtattagttgttattttcggagtattttttattcgttgagcgatggtttttttattagaattatcggattattatgatttgttttcgtatttgttcgcgtcgttagttcgtagttaagttggtttatgttattgtattaattttttgatgttcgttaggattagtcgattttcgtgttttttcgttattttttaggagg

SEQ ID NO: 24596 - DNA, 538 bp, Artificial Sequence
  chemically treated genomic DNA (Homo sapiens) CpG-island No: 24596
cctcctaaaaaataacgaaaaaacacgaaaatcgactaatcctaacgaacatcaaaaaattaatacaataacataaaccaacttaactacgaactaacgacgcgaacaaatacgaaaacaaatcataataatccgataattctaataaaaaaaccatcgctcaacgaataaaaaatactccgaaaataacaactaataccgcccaaaaattcatatcgacgacgatatttaacacctcgattcgactcatcacatcctaaaactaaaataaatcccaaaaatataactatcgccatttaaaataatacgcgaactaaatttaaaacgtcgtaaaacaatcgatccctatctaccgtaaacgctaaaaaactaaaaaaaactactcctatacgaaaaaaccgaaataaacgcatcactaatattcgaattatcataccataacactacccgataactaaatacgaaaaaaataaatactaaaaacattaaacacgaaacttaccccgaaataaattctccctaaccctttaaaaatcta

SEQ ID NO: 24597 - DNA, 748 bp, Artificial Sequence
  chemically treated genomic DNA (Homo sapiens) CpG-island No: 24597
gatatcggcgttttcgtacgtttcgtcgcgttaggtttttagaagatttatcgatatttgcggggtaagttgtcgttcgtcgatatcgtttcgtcgtcgtcgagtagtagggtatgaatagatgatcgtcgtagtcgtagagtacggtgaagtgcggatgggtattttgacggtatggattatgttgcgtaggtgggcgacggagtcgatggttttttgatgtcgataatattgttgcgcgagtcggcgagggtttttattacgtcggagttagattttgttcggttagcgtcgggaagttatagagtatttcggtagcgtgacgttgtcggttatttgttcgaaatagcggattaggttgttttcgatattttttagtagtaggggttgattattacgatgtcgttcggttcgtttgttgcgcgtgttggttgagttcgatggtttttcgggcgttgtgtcgtcggtgtcgattagtatcggtacgcgacgatcgatatgatcgatgtaaagcgggtaatggttttacgtttttcggcgtcgagttgggagaattgttatcgttgtttaggaagaataggtcgttaacgtttgttttgattagacgtcgattagcgcggcggtgttcggtttatcgagttggtcgtcggcggtaaaatggtggagatagggggaatgattttcgtgaataagcggattgcggatgagattttttgtcgaattatttggtttatattatagtatagcg

SEQ ID NO: 24598 - DNA, 748 bp, Artificial Sequence
  chemically treated genomic DNA (Homo sapiens) CpG-island No: 24598
cgctatactataatataaaccaaataattcgacaaaaaatctcatccgcaatccgcttattcacgaaaatcattccccctatctccaccattttaccgccgacgaccaactcgataaaccgaacaccgccgcgctaatcgacgtctaatcaaaacaaacgttaacgacctattcttcctaaacaacgataacaattctcccaactcgacgccgaaaaacgtaaaaccattacccgctttacatcgatcatatcgatcgtcgcgtaccgatactaatcgacaccgacgacacaacgcccgaaaaaccatcgaactcaaccaacacgcgcaacaaacgaaccgaacgacatcgtaataatcaacccctactactaaaaaatatcgaaaacaacctaatccgctatttcgaacaaataaccgacaacgtcacgctaccgaaatactctataacttcccgacgctaaccgaacaaaatctaactccgacgtaataaaaaccctcgccgactcgcgcaacaatattatcgacatcaaaaaaccatcgactccgtcgcccacctacgcaacataatccataccgtcaaaatacccatccgcacttcaccgtactctacgactacgacgatcatctattcataccctactactcgacgacgacgaaacgatatcgacgaacgacaacttaccccgcaaatatcgataaatcttctaaaaacctaacgcgacgaaacgtacgaaaacgccgatatc

SEQ ID NO: 24599 - DNA, 748 bp, Artificial Sequence
  chemically treated genomic DNA (Homo sapiens) CpG-island No: 24599
cgttgtgttataatgtggattaaatgattcggtaagagattttattcgtagttcgtttgtttacgggaattattttttttgtttttattattttatcgtcgacggttagttcgataagtcgggtatcgtcgcgttgatcgacgtttgattaaagtaggcgttgacggtttgttttttttgggtagcggtggtagtttttttagttcggcgtcgaagagcgtaaagttattgttcgttttgtatcgattatgtcgatcgtcgcgtgtcggtgttgatcggtatcggcggtataacgttcgggaaattatcgaatttagttagtacgcgtagtaggcgggtcggacggtatcgtggtgattaatttttattattggaaagtgtcggaagtaatttgattcgttatttcgagtaggtggtcgatagcgttacgttgtcgggatgttttataatttttcggcgttgatcgggtaggatttgatttcggcgtggtgaaaattttcgtcgattcgcgtagtaatattatcggtattaaagaattatcgatttcgtcgtttatttgcgtagtatgatttatatcgttaaagtgtttattcgtattttatcgtgttttgcggttacgacgattatttgtttatattttgttgttcggcggcgacggggcgatatcggcgagcggtaatttgtttcgtaggtgtcggtgaattttttgaaagtttggcgcgacgggacgtgcgaaagcgtcggtatt

SEQ ID NO: 24600 - DNA, 748 bp, Artificial Sequence
  chemically treated genomic DNA (Homo sapiens) CpG-island No: 24600
aataccgacgctttcgcacgtcccgtcgcgccaaactttcaaaaaattcaccgacacctacgaaacaaattaccgctcgccgatatcgccccgtcgccgccgaacaacaaaatataaacaaataatcgtcgtaaccgcaaaacacgataaaatacgaataaacactttaacgatataaatcatactacgcaaataaacgacgaaatcgataattctttaataccgataatattactacgcgaatcgacgaaaattttcaccacgccgaaatcaaatcctacccgatcaacgccgaaaaattataaaacatcccgacaacgtaacgctatcgaccacctactcgaaataacgaatcaaattacttccgacactttccaataataaaaattaatcaccacgataccgtccgacccgcctactacgcgtactaactaaattcgataatttcccgaacgttataccgccgataccgatcaacaccgacacgcgacgatcgacataatcgatacaaaacgaacaataactttacgctcttcgacgccgaactaaaaaaactaccaccgctacccaaaaaaaacaaaccgtcaacgcctactttaatcaaacgtcgatcaacgcgacgatacccgacttatcgaactaaccgtcgacgataaaataataaaaacaaaaaaaataattcccgtaaacaaacgaactacgaataaaatctcttaccgaatcatttaatccacattataacacaacg

SEQ ID NO: 24601 - DNA, 696 bp, Artificial Sequence
  chemically treated genomic DNA (Homo sapiens) CpG-island No: 24601
ttatcgcgttttgttcgtttcggcgttgtcggaagtggattattcgattatttaggtggttacgttttatttaggtgttagttcggatgttatgatttttgtcgttatcgcgtcgttagaacgttagttcgggtagatgtttggtttgaaatagatgtcgtcgtaaagtttcggcggtgcgttagttattattttgtagttttagttaatattatcgttcgatgtcgtcgagtaggaagtgtaggtcgcgattaacgttgcgattaatttgttgtcgagcgatttgtttaattcgtcggtttatagtaaagtgaattcggtagattcgtcgattatgacgttcgtcgttattttaatcgttatgtcgatgacgtaagtggaagatatggtggaaattcgcgtcgcgtagaaaatttcgtagattttcggcgtcggtttggtgacgtttttcggcggttagcgttcggttgttcgcgttaaatttaacgtttaggcgattgtcgttttcggtttgattagcgaaatcgtgcgtatcgttattatcggcgttaacgttaattcggtaaaaggtagtttcgacggtttttttcgtgcggttacgtttttcgcgaacgattagatgtttagtgtaatgtatgtattattttattagtatcgagttttattagagattttcgatttagggcgtatcgttta

SEQ ID NO: 24602 - DNA, 696 bp, Artificial Sequence
  chemically treated genomic DNA (Homo sapiens) CpG-island No: 24602
taaacgatacgccctaaatcgaaaatctctaataaaactcgatactaataaaataatacatacattacactaaacatctaatcgttcgcgaaaaacgtaaccgcacgaaaaaaaccgtcgaaactaccttttaccgaattaacgttaacgccgataataacgatacgcacgatttcgctaatcaaaccgaaaacgacaatcgcctaaacgttaaatttaacgcgaacaaccgaacgctaaccgccgaaaaacgtcaccaaaccgacgccgaaaatctacgaaattttctacgcgacgcgaatttccaccatatcttccacttacgtcatcgacataacgattaaaataacgacgaacgtcataatcgacgaatctaccgaattcactttactataaaccgacgaattaaacaaatcgctcgacaacaaattaatcgcaacgttaatcgcgacctacacttcctactcgacgacatcgaacgataatattaactaaaactacaaaataataactaacgcaccgccgaaactttacgacgacatctatttcaaaccaaacatctacccgaactaacgttctaacgacgcgataacgacaaaaatcataacatccgaactaacacctaaataaaacgtaaccacctaaataatcgaataatccacttccgacaacgccgaaacgaacaaaacgcgataa

SEQ ID NO: 24603 - DNA, 696 bp, Artificial Sequence
  chemically treated genomic DNA (Homo sapiens) CpG-island No: 24603
tagacgatacgttttgggtcgggagtttttgatagagttcgatattagtaaggtagtatatatattgtattgggtatttggtcgttcgcggaaagcgtgatcgtacgggaagggtcgtcgaggttattttttgtcgagttaacgttagcgtcggtaatggcggtgcgtacggtttcgttggttaggtcgagggcggtaatcgtttgagcgttaagtttgacgcgaatagtcggacgttgatcgtcggaaagcgttattaggtcgacgtcggaaatttgcgagattttttgcgcgacgcgggtttttattatattttttatttgcgttatcggtatggcggttgaggtgacggcgagcgttatgatcggcggatttgtcgggtttattttgttgtaaatcggcgggttaggtagatcgttcggtaataagttggtcgtagcgttaatcgcggtttgtattttttgttcggcgatatcgagcggtaatgttagttggaattgtaaagtgataattgacgtatcgtcggaattttgcgacgatatttgttttaggttagatatttgttcgaattggcgttttagcggcgcggtaacggtagaggttatgatattcgggttggtatttgggtagagcgtgattatttgaatggtcggatagtttattttcggtagcgtcgaaacgggtagggcgcgataa

SEQ ID NO: 24604 - DNA, 696 bp, Artificial Sequence
  chemically treated genomic DNA (Homo sapiens) CpG-island No: 24604
ttatcgcgccctacccgtttcgacgctaccgaaaataaactatccgaccattcaaataatcacgctctacccaaataccaacccgaatatcataacctctaccgttaccgcgccgctaaaacgccaattcgaacaaatatctaacctaaaacaaatatcgtcgcaaaattccgacgatacgtcaattatcactttacaattccaactaacattaccgctcgatatcgccgaacaaaaaatacaaaccgcgattaacgctacgaccaacttattaccgaacgatctacctaacccgccgatttacaacaaaataaacccgacaaatccgccgatcataacgctcgccgtcacctcaaccgccataccgataacgcaaataaaaaatataataaaaacccgcgtcgcgcaaaaaatctcgcaaatttccgacgtcgacctaataacgctttccgacgatcaacgtccgactattcgcgtcaaacttaacgctcaaacgattaccgccctcgacctaaccaacgaaaccgtacgcaccgccattaccgacgctaacgttaactcgacaaaaaataacctcgacgacccttcccgtacgatcacgctttccgcgaacgaccaaatacccaatacaatatatatactaccttactaatatcgaactctatcaaaaactcccgacccaaaacgtatcgtcta

SEQ ID NO: 24605 - DNA, 712 bp, Artificial Sequence
  chemically treated genomic DNA (Homo sapiens) CpG-island No: 24605
gcgcgttggcgttttgacggttagcgttttcgtttggtgcgttacgtcgtagaatttatttgcgataattggtatgggttagacgtttggtttacgttgtggattattcgttaaataaaatggcgggatatgtaggtcggataagacgttgtaggtcggataagacgcgttagcgtcgtattcggtaattagtattcggtaattattattaggtattttttatttttagtattttatgcgtttttgttataatattttcggcggtaaagttaaagaacgggaatagtttattcgtcggagtagatttttcgtaattcgttatttcgataattgttttttttagattaatatatttgtattagtaatcggtaatatttgtttttatcgttacgcgagtcgtaacgttagaaggtaatatcgattttcgatattttttattttgggcgtcgaaaatatcggtcgagggtagggaaattacgcgtatattgcgatttttttttgttaatttttttgtcgtttgtagggtaatttttatttttgaatcggtttgcgtttatttatcgggttatagattttatttaatttatagcgttttggtattttttttcggtgtcggcggttgttcgtttttaatttattgttcggttttggtaattcgattttggtttttgtttttttgttgttggggttaagtttgatgggtttgattttt

SEQ ID NO: 24606 - DNA, 712 bp, Artificial Sequence
  chemically treated genomic DNA (Homo sapiens) CpG-island No: 24606
aaaaatcaaacccatcaaacttaaccccaacaacaaaaaaacaaaaaccaaaatcgaattaccaaaaccgaacaataaattaaaaacgaacaaccgccgacaccgaaaaaaaataccaaaacgctataaattaaataaaatctataacccgataaataaacgcaaaccgattcaaaaataaaaattaccctacaaacgacaaaaaaattaacaaaaaaaaatcgcaatatacgcgtaatttccctaccctcgaccgatattttcgacgcccaaaataaaaaatatcgaaaatcgatattaccttctaacgttacgactcgcgtaacgataaaaacaaatattaccgattactaatacaaatatattaatctaaaaaaaacaattatcgaaataacgaattacgaaaaatctactccgacgaataaactattcccgttctttaactttaccgccgaaaatattataacaaaaacgcataaaatactaaaaataaaaaatacctaataataattaccgaatactaattaccgaatacgacgctaacgcgtcttatccgacctacaacgtcttatccgacctacatatcccgccattttatttaacgaataatccacaacgtaaaccaaacgtctaacccataccaattatcgcaaataaattctacgacgtaacgcaccaaacgaaaacgctaaccgtcaaaacgccaacgcgc

SEQ ID NO: 24607 - DNA, 712 bp, Artificial Sequence
  chemically treated genomic DNA (Homo sapiens) CpG-island No: 24607
gaaggttagatttattagatttaattttagtagtaggaaggtaaaaattagaatcgggttgttagaatcgagtagtgggttaaaggcgaatagtcgtcgatatcgagggaggatattagagcgttgtgggttggataggatttgtaattcggtgggtaaacgtaaatcggtttagagatggaaattattttgtaagcggtagagaaattagtaggagaaggtcgtaatgtacgcgtagtttttttgttttcgatcgatattttcgacgtttaggatgaggaatatcgggagtcggtgttgttttttaacgttgcggttcgcgtggcggtggaagtaggtattgtcgattattggtataagtatgttggtttgaaaggggtaattgtcgggatgacgggttacggggaatttgtttcggcggataagttgttttcgttttttggttttatcgtcgagaatattgtggtaaaagcgtataaggtgttgggagtgaaaggtgtttgatggtgattgtcggatgttgattgtcggatgcgacgttgacgcgttttattcggtttatagcgttttattcggtttatatgtttcgttattttgtttaacgggtgatttataacgtgggttaggcgtttggtttatgttagttatcgtaggtgggttttgcggcgtaacgtattaggcgaaaacgttgatcgttaaagcgttagcgcgt

SEQ ID NO: 24608 - DNA, 712 bp, Artificial Sequence
  chemically treated genomic DNA (Homo sapiens) CpG-island No: 24608
acgcgctaacgctttaacgatcaacgttttcgcctaatacgttacgccgcaaaacccacctacgataactaacataaaccaaacgcctaacccacgttataaatcacccgttaaacaaaataacgaaacatataaaccgaataaaacgctataaaccgaataaaacgcgtcaacgtcgcatccgacaatcaacatccgacaatcaccatcaaacacctttcactcccaacaccttatacgcttttaccacaatattctcgacgataaaaccaaaaaacgaaaacaacttatccgccgaaacaaattccccgtaacccgtcatcccgacaattacccctttcaaaccaacatacttataccaataatcgacaatacctacttccaccgccacgcgaaccgcaacgttaaaaaacaacaccgactcccgatattcctcatcctaaacgtcgaaaatatcgatcgaaaacaaaaaaactacgcgtacattacgaccttctcctactaatttctctaccgcttacaaaataatttccatctctaaaccgatttacgtttacccaccgaattacaaatcctatccaacccacaacgctctaatatcctccctcgatatcgacgactattcgcctttaacccactactcgattctaacaacccgattctaatttttaccttcctactactaaaattaaatctaataaatctaaccttc

SEQ ID NO: 24609 - DNA, 712 bp, Artificial Sequence
  chemically treated genomic DNA (Homo sapiens) CpG-island No: 24609
gcgtacgcgcgtcggggtgttggggattttatgggcgtgagtcggaaggaggttttatagcgtaaatgggcgggataagcgagttgacgaaatataggggcgcggtatgggcggtgcgatacgcggaaagggcggtgaggcgcgcggcgggagggggcgttatcgaggtatgggggcgggaggggcggggggaggaaagtaaagcggcgcgattgtcggtcggttcgtcggatcggcgggcgggcgagtcggcgggcgggcggggggtcgttaaggcgggggatgagttgacgcggcgggggggtgggtcgtgagggggaacgaatagcgcggatacgagtaagtcggcgagcgagggtcggtaatggtgtatgtgtgtaagtagaaatagggagtgcggtacggagggagcggttttgggtgagaaaggcggagacgaaaaagggagggtaaatagcgatagggtggggataacgtatattgtttacgggtttttgtcgcgattggcgggggggagtgaggtattgagatagtgtgggatgtattggagagtttatattatcgtaattagggaaatggcgaggcggggacgagtcggggtacgtaagttagcggggtttcgtggatgcgaatataaaagtaatattgagtaatagaagatagtggggtgatattaggatcgaagcgaatcgcgtgatattttcggtatgat

SEQ ID NO: 24610 - DNA, 712 bp, Artificial Sequence
  chemically treated genomic DNA (Homo sapiens) CpG-island No: 24610
atcataccgaaaatatcacgcgattcgcttcgatcctaatatcaccccactatcttctattactcaatattacttttatattcgcatccacgaaaccccgctaacttacgtaccccgactcgtccccgcctcgccatttccctaattacgataatataaactctccaatacatcccacactatctcaatacctcactcccccccgccaatcgcgacaaaaacccgtaaacaatatacgttatccccaccctatcgctatttaccctccctttttcgtctccgcctttctcacccaaaaccgctccctccgtaccgcactccctatttctacttacacacatacaccattaccgaccctcgctcgccgacttactcgtatccgcgctattcgttccccctcacgacccacccccccgccgcgtcaactcatcccccgccttaacgaccccccgcccgcccgccgactcgcccgcccgccgatccgacgaaccgaccgacaatcgcgccgctttactttcctccccccgcccctcccgcccccatacctcgataacgccccctcccgccgcgcgcctcaccgccctttccgcgtatcgcaccgcccataccgcgcccctatatttcgtcaactcgcttatcccgcccatttacgctataaaacctccttccgactcacgcccataaaatccccaacaccccgacgcgcgtacgc

SEQ ID NO: 24611 - DNA, 712 bp, Artificial Sequence
  chemically treated genomic DNA (Homo sapiens) CpG-island No: 24611
gttatatcgggagtattacgcggttcgtttcggttttggtgttattttattattttttgttgtttaatattatttttatattcgtatttacggggtttcgttgatttgcgtgtttcggttcgttttcgtttcgttatttttttagttgcggtagtatgggttttttaatatattttatattgttttaatgttttattttttttcgttagtcgcggtaaaggttcgtaggtagtatgcgttatttttattttgtcgttgtttattttttttttttcgttttcgttttttttatttaaaatcgtttttttcgtatcgtattttttatttttgtttatatatatgtattattatcggttttcgttcgtcggtttgttcgtgttcgcgttattcgtttttttttacggtttattttttcgtcgcgttaatttatttttcgttttagcgatttttcgttcgttcgtcggttcgttcgttcgtcggttcggcgggtcggtcggtagtcgcgtcgttttattttttttttttcgtttttttcgtttttatatttcggtaacgttttttttcgtcgcgcgttttatcgtttttttcgcgtgtcgtatcgtttatatcgcgtttttatatttcgttagttcgtttgtttcgtttatttgcgttgtaaagttttttttcggtttacgtttatagagtttttagtatttcggcgcgcgtgcgt

SEQ ID NO: 24612 - DNA, 712 bp, Artificial Sequence
  chemically treated genomic DNA (Homo sapiens) CpG-island No: 24612
acgcacgcgcgccgaaatactaaaaactctataaacgtaaaccgaaaaaaaactttacaacgcaaataaacgaaacaaacgaactaacgaaatataaaaacgcgatataaacgatacgacacgcgaaaaaaacgataaaacgcgcgacgaaaaaaaacgttaccgaaatataaaaacgaaaaaaacgaaaaaaaaaaaataaaacgacgcgactaccgaccgacccgccgaaccgacgaacgaacgaaccgacgaacgaacgaaaaatcgctaaaacgaaaaataaattaacgcgacgaaaaaataaaccgtaaaaaaaaacgaataacgcgaacacgaacaaaccgacgaacgaaaaccgataataatacatatatataaacaaaaataaaaaatacgatacgaaaaaaacgattttaaataaaaaaaacgaaaacgaaaaaaaaaaaataaacaacgacaaaataaaaataacgcatactacctacgaacctttaccgcgactaacgaaaaaaaataaaacattaaaacaatataaaatatattaaaaaacccatactaccgcaactaaaaaaataacgaaacgaaaacgaaccgaaacacgcaaatcaacgaaaccccgtaaatacgaatataaaaataatattaaacaacaaaaaataataaaataacaccaaaaccgaaacgaaccgcgtaatactcccgatataac

SEQ ID NO: 24613 - DNA, 569 bp, Artificial Sequence
  chemically treated genomic DNA (Homo sapiens) CpG-island No: 24613
tcgaggagggcgatggcggagagggatttacgggaggggggtgggggatggagcgcggggatggacggtttgggggtattaatagtggcggtaagtaggggagcgagggataacgtgttgtattagtggtgttgattatgtagttttgcgcgattatgcgagtgtaagtatatgataggttgggggtagcgtttggatttgaagatatttatgaattagatatttcggttatggtgtagttacgttgttgcgcgtcgcgtatttgcgtcggtacggatgggcgttaatcggtcgagagttttatttgcggtatttcgttcggcgcgttttatagggttttcgtttatattttttagtatgtattcgtttgtattatataaattcgacggcggtcgtaagtaattatattacgatgtatgtttatttatgggggaggtcgagtttgggttgtggtgggtgatggggattgcgagggcggggtcgtatatcggatgaagtatggtgaaaaattgattgttattgatttattgttatcgtatagcgtcgattttaggatttttgtttgtgga

SEQ ID NO: 24614 - DNA, 569 bp, Artificial Sequence
  chemically treated genomic DNA (Homo sapiens) CpG-island No: 24614
tccacaaacaaaaatcctaaaatcgacgctatacgataacaataaatcaataacaatcaatttttcaccatacttcatccgatatacgaccccgccctcgcaatccccatcacccaccacaacccaaactcgacctcccccataaataaacatacatcgtaatataattacttacgaccgccgtcgaatttatataatacaaacgaatacatactaaaaaatataaacgaaaaccctataaaacgcgccgaacgaaataccgcaaataaaactctcgaccgattaacgcccatccgtaccgacgcaaatacgcgacgcgcaacaacgtaactacaccataaccgaaatatctaattcataaatatcttcaaatccaaacgctacccccaacctatcatatacttacactcgcataatcgcgcaaaactacataatcaacaccactaatacaacacgttatccctcgctcccctacttaccgccactattaatacccccaaaccgtccatccccgcgctccatcccccacccccctcccgtaaatccctctccgccatcgccctcctcga

SEQ ID NO: 24615 - DNA, 569 bp, Artificial Sequence
  chemically treated genomic DNA (Homo sapiens) CpG-island No: 24615
tttataagtaaaggttttaaaatcggcgttatacgatggtagtaagttagtagtagttagttttttattatgttttattcggtatacggtttcgttttcgtaatttttattatttattatagtttaagttcggttttttttatgggtggatatgtatcgtggtgtggttgtttacgatcgtcgtcggatttgtatagtataagcgggtatatgttagaaggtgtaggcggaaattttataaaacgcgtcgaacggggtgtcgtaggtggggttttcggtcggttggcgtttattcgtatcggcgtaggtacgcggcgcgtaatagcgtaattgtattatagtcgaggtatttagtttatgggtatttttaagtttaagcgttgtttttaatttattatatatttatattcgtatggtcgcgtagagttgtatggttagtattattaatgtaatacgttatttttcgtttttttgtttgtcgttattattggtatttttaagtcgtttattttcgcgttttattttttatttttttttcgtggattttttttcgttatcgtttttttcgg

SEQ ID NO: 24616 - DNA, 569 bp, Artificial Sequence
  chemically treated genomic DNA (Homo sapiens) CpG-island No: 24616
ccgaaaaaaacgataacgaaaaaaaatccacgaaaaaaaaataaaaaataaaacgcgaaaataaacgacttaaaaataccaataataacgacaaacaaaaaaacgaaaaataacgtattacattaataatactaaccatacaactctacgcgaccatacgaatataaatatataataaattaaaaacaacgcttaaacttaaaaatacccataaactaaatacctcgactataatacaattacgctattacgcgccgcgtacctacgccgatacgaataaacgccaaccgaccgaaaaccccacctacgacaccccgttcgacgcgttttataaaatttccgcctacaccttctaacatatacccgcttatactatacaaatccgacgacgatcgtaaacaaccacaccacgatacatatccacccataaaaaaaaccgaacttaaactataataaataataaaaattacgaaaacgaaaccgtataccgaataaaacataataaaaaactaactactactaacttactaccatcgtataacgccgattttaaaacctttacttataaa

SEQ ID NO: 24617 - DNA, 540 bp, Artificial Sequence
  chemically treated genomic DNA (Homo sapiens) CpG-island No: 24617
gcggtgcgtcggcggtgattaaacgggaaaatttagagtgtgagagagtgtattaagtagtgtgtgtgataaataattatatttgttacgcgtttatagcggcggttggggtggcggcggtatagtttagagttttggaggtcgtgtttgttgtgtgcgataatagaattggatttgaatagtggagggttcgggtggtttatttatcgcggtagttacgatagcgttatttttgttttacgtttattgtttatttgattatttgcgggcggtcgcgattatgggaggtggggtgggtcgagagatatgttatcgtatcggtttggttcgggcgttattatgattttgggttacgggtggaaacgttgtggggagggaggtgtagaatcgaagaggttggggaggaggggagtgagataatatattgagtacgtgtgggagggagagaacgtagggagggagggaggagtgagggaggcggagtttgggatatagtggggcggaattggtaggacgatagattgtatatttttatggtag

SEQ ID NO: 24618 - DNA, 540 bp, Artificial Sequence
  chemically treated genomic DNA (Homo sapiens) CpG-island No: 24618
ctaccataaaaatatacaatctatcgtcctaccaattccgccccactatatcccaaactccgcctccctcactcctccctccctccctacgttctctccctcccacacgtactcaatatattatctcactcccctcctccccaacctcttcgattctacacctccctccccacaacgtttccacccgtaacccaaaatcataataacgcccgaaccaaaccgatacgataacatatctctcgacccaccccacctcccataatcgcgaccgcccgcaaataatcaaataaacaataaacgtaaaacaaaaataacgctatcgtaactaccgcgataaataaaccacccgaaccctccactattcaaatccaattctattatcgcacacaacaaacacgacctccaaaactctaaactataccgccgccaccccaaccgccgctataaacgcgtaacaaatataattatttatcacacacactacttaatacactctctcacactctaaattttcccgtttaatcaccgccgacgcaccgc

SEQ ID NO: 24619 - DNA, 540 bp, Artificial Sequence
  chemically treated genomic DNA (Homo sapiens) CpG-island No: 24619
ttgttataaaaatgtatagtttgtcgttttgttaatttcgttttattgtattttaggtttcgttttttttatttttttttttttttttgcgtttttttttttttatacgtatttaatgtgttattttattttttttttttttaattttttcggttttgtatttttttttttatagcgtttttattcgtagtttaaggttataatagcgttcgaattaagtcgatacggtaatatgtttttcggtttattttattttttatagtcgcggtcgttcgtaagtggttaaatgagtagtaagcgtagggtaggggtagcgttatcgtagttgtcgcggtaaataggttattcgggttttttattatttaagtttaattttgttatcgtatatagtaaatacggtttttagggttttaaattgtgtcgtcgttattttagtcgtcgttatgggcgcgtagtaagtatagttatttgttatatatattgtttggtatatttttttatattttaaattttttcgtttggttatcgtcggcgtatcgt

SEQ ID NO: 24620 - DNA, 540 bp, Artificial Sequence
  chemically treated genomic DNA (Homo sapiens) CpG-island No: 24620
acgatacgccgacgataaccaaacgaaaaaatttaaaatataaaaaaatataccaaacaatatatataacaaataactatacttactacgcgcccataacgacgactaaaataacgacgacacaatttaaaaccctaaaaaccgtatttactatatacgataacaaaattaaacttaaataataaaaaacccgaataacctatttaccgcgacaactacgataacgctacccctaccctacgcttactactcatttaaccacttacgaacgaccgcgactataaaaaataaaataaaccgaaaaacatattaccgtatcgacttaattcgaacgctattataaccttaaactacgaataaaaacgctataaaaaaaaaaatacaaaaccgaaaaaattaaaaaaaaaaaaaataaaataacacattaaatacgtataaaaaaaaaaaaacgcaaaaaaaaaaaaaaaaataaaaaaaacgaaacctaaaatacaataaaacgaaattaacaaaacgacaaactatacatttttataacaa

SEQ ID NO: 24621 - DNA, 615 bp, Artificial Sequence
  chemically treated genomic DNA (Homo sapiens) CpG-island No: 24621
  unsure (230, 249)
cgggttggaagagtacgggagtttaagatggggagaatacgtgtagagtgatattttggtataaggtgtgatggttggcgatagtagttgatatggcgttagtataagataacggcggtacgacggttaggtaggggtaaacggatagttttggtatcgtattcgatttatcgttgggtaagtattcgatgtaggtaaattattggtatatttagacgtgcggcgacgtntaagaggtttacgcgattnagacgacggtaaagtacgaaaatttcgtttaatttaaaaatcgcgggtcgtttatcgttaaaagagtcgttcggagtgcgattttaatcggaagttttttttttatagtcgtgaggttttttttcgcgggttgttttagcgtgttttagtacgttgtttggaataatgtggtttatcgtgtgggtaatttcgttttttttttttcgtgcgttatttttggggggattgttgtcgtaattgtggtggcgtgatttggacgtgttaatcgcggaggttagtagtggtgagggtgggggatagtgtgattgtatgtaggttagaaatgaattgggaagaaacgacggtttagcgatatagtgtttatag

SEQ ID NO: 24622 - DNA, 615 bp, Artificial Sequence
  chemically treated genomic DNA (Homo sapiens) CpG-island No: 24622
  unsure (367, 386)
ctataaacactatatcgctaaaccgtcgtttcttcccaattcatttctaacctacatacaatcacactatcccccaccctcaccactactaacctccgcgattaacacgtccaaatcacgccaccacaattacgacaacaatccccccaaaaataacgcacgaaaaaaaaaaaacgaaattacccacacgataaaccacattattccaaacaacgtactaaaacacgctaaaacaacccgcgaaaaaaaacctcacgactataaaaaaaaaacttccgattaaaatcgcactccgaacgactcttttaacgataaacgacccgcgatttttaaattaaacgaaattttcgtactttaccgtcgtctnaatcgcgtaaacctcttanacgtcgccgcacgtctaaatataccaataatttacctacatcgaatacttacccaacgataaatcgaatacgataccaaaactatccgtttacccctacctaaccgtcgtaccgccgttatcttatactaacgccatatcaactactatcgccaaccatcacaccttataccaaaatatcactctacacgtattctccccatcttaaactcccgtactcttccaacccg

SEQ ID NO: 24623 - DNA, 615 bp, Artificial Sequence
  chemically treated genomic DNA (Homo sapiens) CpG-island No: 24623
  unsure (367, 386)
ttatgagtattatgtcgttgagtcgtcgtttttttttaatttatttttagtttgtatataattatattattttttatttttattattattagttttcgcggttaatacgtttaaattacgttattatagttacggtaataatttttttaaaaatggcgtacgaaaagggggaagcgaaattatttatacggtgaattatattattttaaataacgtgttgggatacgttagagtaattcgcggggggaagttttacgattatagaggagggattttcgattggaatcgtatttcggacggtttttttagcggtaagcggttcgcggtttttaggttgggcggaattttcgtgttttatcgtcgtttnggtcgcgtgggttttttangcgtcgtcgtacgtttgggtgtgttaatggtttatttgtatcgggtatttgtttaacgataaatcgggtgcgatattaggattattcgtttatttttgtttgatcgtcgtgtcgtcgttattttgtattagcgttatgttagttgttatcgttagttattatattttgtattaaagtgttattttgtacgtgttttttttattttagattttcgtatttttttaattcg

SEQ ID NO: 24624 - DNA, 615 bp, Artificial Sequence
  chemically treated genomic DNA (Homo sapiens) CpG-island No: 24624
  unsure (230, 249)
cgaattaaaaaaatacgaaaatctaaaataaaaaaaacacgtacaaaataacactttaatacaaaatataataactaacgataacaactaacataacgctaatacaaaataacgacgacacgacgatcaaacaaaaataaacgaataatcctaatatcgcacccgatttatcgttaaacaaatacccgatacaaataaaccattaacacacccaaacgtacgacgacgcntaaaaaacccacgcgaccnaaacgacgataaaacacgaaaattccgcccaacctaaaaaccgcgaaccgcttaccgctaaaaaaaccgtccgaaatacgattccaatcgaaaatccctcctctataatcgtaaaacttccccccgcgaattactctaacgtatcccaacacgttatttaaaataatataattcaccgtataaataatttcgcttcccccttttcgtacgccatttttaaaaaaattattaccgtaactataataacgtaatttaaacgtattaaccgcgaaaactaataataataaaaataaaaaataatataattatatacaaactaaaaataaattaaaaaaaaacgacgactcaacgacataatactcataa

SEQ ID NO: 24625 - DNA, 507 bp, Artificial Sequence
  chemically treated genomic DNA (Homo sapiens) CpG-island No: 24625
gagatttcgtatataacgaaagtattgtagcgtttgttatcgcgtttatcgtcgttaaacgtcgagtattacgtaatttatatagtttttattcggcggtatgacgacgtagatgcggtgggcgggagcggtaattacgtaggtcgggaatagcggtggggcgtcgggggtgtacgtcggattgtcggggcgtgattatggtttttttgggggattttaatattatgtcgttggcggatcggtgggacgtgggtatttgtatgtagcggattagatatagtatttatagttgtttttatcgattttcgatggagttgtagagcggtttggcgggaacgtacgcggtcggcggcgtttagtgtatagtagattttatgataggttattgcgcgttaatagttatcgtatagcgtcgatttttgcgcgggtagttattatttgcgtttgtgttttattaattgtatagatttgtaggttgagaggaggatattttgcgttggtaggttt

SEQ ID NO: 24626 - DNA, 507 bp, Artificial Sequence
  chemically treated genomic DNA (Homo sapiens) CpG-island No: 24626
aaacctaccaacgcaaaatatcctcctctcaacctacaaatctatacaattaataaaacacaaacgcaaataataactacccgcgcaaaaatcgacgctatacgataactattaacgcgcaataacctatcataaaatctactatacactaaacgccgccgaccgcgtacgttcccgccaaaccgctctacaactccatcgaaaatcgataaaaacaactataaatactatatctaatccgctacatacaaatacccacgtcccaccgatccgccaacgacataatattaaaatcccccaaaaaaaccataatcacgccccgacaatccgacgtacacccccgacgccccaccgctattcccgacctacgtaattaccgctcccgcccaccgcatctacgtcgtcataccgccgaataaaaactatataaattacgtaatactcgacgtttaacgacgataaacgcgataacaaacgctacaatactttcgttatatacgaaatctc

SEQ ID NO: 24627 - DNA, 507 bp, Artificial Sequence
  chemically treated genomic DNA (Homo sapiens) CpG-island No: 24627
aagtttgttagcgtagggtgttttttttttagtttgtaagtttatgtaattgatagggtataagcgtaagtggtagttgttcgcgtaaaaatcggcgttatacgatggttgttggcgcgtagtagtttattatggggtttattgtatattaggcgtcgtcgatcgcgtgcgttttcgttaggtcgttttgtagttttatcgggaatcggtaaaggtaattgtaaatattgtgtttaattcgttgtatataagtgtttacgttttatcggttcgttaacgatatggtattgaggttttttaggggggttatgattacgtttcggtaattcgacgtatattttcggcgttttatcgttgttttcggtttgcgtagttgtcgttttcgtttatcgtatttacgtcgttatgtcgtcgggtaggggttatgtgagttacgtagtattcggcgtttagcggcggtaggcgcggtaataagcgttgtaatgttttcgttatgtacggggtttt

SEQ ID NO: 24628 - DNA, 507 bp, Artificial Sequence
  chemically treated genomic DNA (Homo sapiens) CpG-island No: 24628
aaaaccccgtacataacgaaaacattacaacgcttattaccgcgcctaccgccgctaaacgccgaatactacgtaactcacataacccctacccgacgacataacgacgtaaatacgataaacgaaaacgacaactacgcaaaccgaaaacaacgataaaacgccgaaaatatacgtcgaattaccgaaacgtaatcataacccccctaaaaaacctcaataccatatcgttaacgaaccgataaaacgtaaacacttatatacaacgaattaaacacaatatttacaattacctttaccgattcccgataaaactacaaaacgacctaacgaaaacgcacgcgatcgacgacgcctaatatacaataaaccccataataaactactacgcgccaacaaccatcgtataacgccgatttttacgcgaacaactaccacttacgcttataccctatcaattacataaacttacaaactaaaaaaaaaacaccctacgctaacaaactt

SEQ ID NO: 24629 - DNA, 686 bp, Artificial Sequence
  chemically treated genomic DNA (Homo sapiens) CpG-island No: 24629
ggacgttcgcgaggaaggggagtggaattatggttaatgcgattatcggagattgtcgagtatatcggtatacgcggggcggttgttcggtttaattatcgacgtcgtttgtacgtaacgcgggtgcggaacgaaggttgtatcgagcggtttgaaatgtcgatattgggtattgatatagcgtttatcgtcgcgtggcgtcggttacggattgagtcgtacgttgcgcggtattagcgttgattaatttgtatgtcggtatttggggttttacgcgttattaggcgcggttgttaaagagggcgtgtttagtacgtaattcgtaaggttatgttcgggattcgttatgtgtgcgttaaaagtgcgcggtgtaggtgcgatgcgaaaatatatcgggcgattaatattaaatgagagggtcgatttatcgttcggatatcgcggttagacgcgtagtgttatattatcgcgacgagacggggtagttcgcggtagttttcgtgtaggcggtacgtatcgatcgacgatagtttcgtcgaggttacgtaggaagcgagcgtttatattaatggttcgtgtcgatatggtcgacgtatatcgtaatatgatagggagggagtggagcggtaaaataatttggcgtggttttttataattcgtttattgtttttcgggatttgtcgtta

SEQ ID NO: 24630 - DNA, 686 bp, Artificial Sequence
  chemically treated genomic DNA (Homo sapiens) CpG-island No: 24630
taacgacaaatcccgaaaaacaataaacgaattataaaaaaccacgccaaattattttaccgctccactccctccctatcatattacgatatacgtcgaccatatcgacacgaaccattaatataaacgctcgcttcctacgtaacctcgacgaaactatcgtcgatcgatacgtaccgcctacacgaaaactaccgcgaactaccccgtctcgtcgcgataatataacactacgcgtctaaccgcgatatccgaacgataaatcgaccctctcatttaatattaatcgcccgatatattttcgcatcgcacctacaccgcgcacttttaacgcacacataacgaatcccgaacataaccttacgaattacgtactaaacacgccctctttaacaaccgcgcctaataacgcgtaaaaccccaaataccgacatacaaattaatcaacgctaataccgcgcaacgtacgactcaatccgtaaccgacgccacgcgacgataaacgctatatcaatacccaatatcgacatttcaaaccgctcgatacaaccttcgttccgcacccgcgttacgtacaaacgacgtcgataattaaaccgaacaaccgccccgcgtataccgatatactcgacaatctccgataatcgcattaaccataattccactccccttcctcgcgaacgtcc

SEQ ID NO: 24631 - DNA, 686 bp, Artificial Sequence
  chemically treated genomic DNA (Homo sapiens) CpG-island No: 24631
tagcggtaagtttcgaaaagtaataagcgggttatgaggggttacgttaagttattttatcgttttattttttttttattatattacggtatacgtcggttatgtcggtacgggttattagtgtgggcgttcgttttttacgtggtttcgacggggttgtcgtcggtcggtgcgtgtcgtttgtacgggggttatcgcgggttatttcgtttcgtcgcggtggtgtagtattgcgcgtttagtcgcggtgttcgggcggtaggtcggtttttttatttggtattaatcgttcggtatattttcgtatcgtatttgtatcgcgtatttttggcgtatatatggcgggtttcgggtataattttacggattacgtattggatacgttttttttaatagtcgcgtttggtggcgcgtaaagttttaagtatcggtatataaattaattagcgttagtgtcgcgtagcgtgcggtttagttcgtggtcggcgttacgcggcggtaagcgttgtgttagtatttagtgtcggtattttaagtcgttcggtgtaattttcgtttcgtattcgcgttgcgtataggcggcgtcggtaattaggtcgggtagtcgtttcgcgtgtgtcggtgtattcggtagttttcggtggtcgtattggttatggttttatttttttttttcgcgggcgttt

SEQ ID NO: 24632 - DNA, 686 bp, Artificial Sequence
  chemically treated genomic DNA (Homo sapiens) CpG-island No: 24632
aaacgcccgcgaaaaaaaaaaataaaaccataaccaatacgaccaccgaaaactaccgaatacaccgacacacgcgaaacgactacccgacctaattaccgacgccgcctatacgcaacgcgaatacgaaacgaaaattacaccgaacgacttaaaataccgacactaaatactaacacaacgcttaccgccgcgtaacgccgaccacgaactaaaccgcacgctacgcgacactaacgctaattaatttatataccgatacttaaaactttacgcgccaccaaacgcgactattaaaaaaaacgtatccaatacgtaatccgtaaaattatacccgaaacccgccatatatacgccaaaaatacgcgatacaaatacgatacgaaaatataccgaacgattaataccaaataaaaaaaccgacctaccgcccgaacaccgcgactaaacgcgcaatactacaccaccgcgacgaaacgaaataacccgcgataacccccgtacaaacgacacgcaccgaccgacgacaaccccgtcgaaaccacgtaaaaaacgaacgcccacactaataacccgtaccgacataaccgacgtataccgtaatataataaaaaaaaaataaaacgataaaataacttaacgtaacccctcataacccgcttattacttttcgaaacttaccgcta

SEQ ID NO: 24633 - DNA, 1039 bp, Artificial Sequence
  chemically treated genomic DNA (Homo sapiens) CpG-island No: 24633
taagcggtcggggtaggtggatgcgggtcgagttgatggtggtcgtggaggtcgatattgtgtgggggtattgatacgttatgttggtgttgggttttgggttagcgagggattgtgggcgacgtcggggttgtattgggggtatacggggaattggggtttgcgtatttataatatattgggttattgtgtaattatggggttggttcggtggggtatcggttaggacgtaaacgacggaacgtgcggtagtttaatgcgattatttaggagggggtattatacgttagggtcgttgataataggtttggattggtcggttagcgtttaacgaggggttatgcgtcggaattaggtagcggaggttgtaaacgcgtcggtgagggacgttacgatcgttacgggggtgtgttgtcgcggtatgacggttgtgtgtgtagatggagtttgggatggatggttgcggcgggcgagattcgcgaacggttatggtaaggacgggagggttaatcgcgtggtaagcgcggggggcggacggggtcggtgggtggatatattggcgggagattgtagtgacggggcgttgggatagataaacgaattatagttacgggtattgttcgcggatcggttggtaatcggggtgtttaatgtcgagaagattgcgtcggaattttggttagttggtttgttttggtgaatgggaatgtcgggatgcgcggtgtgggtaagtattatcgcggggttggttttggggggaggatttggatgttgtttacgtatttttggtatatgttcgtttcgcggtgtattagttgtgtcggttgtgggtaggggcgattgcggggttttattacggttggggttttaggagtgataggggagtttgttataatcggtgggtaggtaggggggttaaggcgtcgcgatcgtgttatgatgtggcgttgatatgggataagtagtagttttgggttgtgtgttgcggtgttaattgattatagttatgcgtatagcgtcgatttttaattatgagtaa

SEQ ID NO: 24634 - DNA, 1039 bp, Artificial Sequence
  chemically treated genomic DNA (Homo sapiens) CpG-island No: 24634
ttactcataattaaaaatcgacgctatacgcataactataatcaattaacaccgcaacacacaacccaaaactactacttatcccatatcaacgccacatcataacacgatcgcgacgccttaacccccctacctacccaccgattataacaaactcccctatcactcctaaaaccccaaccgtaataaaaccccgcaatcgcccctacccacaaccgacacaactaatacaccgcgaaacgaacatataccaaaaatacgtaaacaacatccaaatcctccccccaaaaccaaccccgcgataatacttacccacaccgcgcatcccgacattcccattcaccaaaacaaaccaactaaccaaaattccgacgcaatcttctcgacattaaacaccccgattaccaaccgatccgcgaacaatacccgtaactataattcgtttatctatcccaacgccccgtcactacaatctcccgccaatatatccacccaccgaccccgtccgccccccgcgcttaccacgcgattaaccctcccgtccttaccataaccgttcgcgaatctcgcccgccgcaaccatccatcccaaactccatctacacacacaaccgtcataccgcgacaacacacccccgtaacgatcgtaacgtccctcaccgacgcgtttacaacctccgctacctaattccgacgcataacccctcgttaaacgctaaccgaccaatccaaacctattatcaacgaccctaacgtataataccccctcctaaataatcgcattaaactaccgcacgttccgtcgtttacgtcctaaccgataccccaccgaaccaaccccataattacacaataacccaatatattataaatacgcaaaccccaattccccgtatacccccaatacaaccccgacgtcgcccacaatccctcgctaacccaaaacccaacaccaacataacgtatcaatacccccacacaatatcgacctccacgaccaccatcaactcgacccgcatccacctaccccgaccgctta

SEQ ID NO: 24635 - DNA, 1039 bp, Artificial Sequence
  chemically treated genomic DNA (Homo sapiens) CpG-island No: 24635
ttgtttatagttgaaaatcggcgttatacgtatggttgtagttagttggtatcgtaatatatagtttaagattgttatttattttatgttaacgttatattatagtacggtcgcgacgttttaatttttttatttatttatcgattataataaatttttttattatttttggagttttaatcgtagtagaatttcgtaatcgtttttatttataatcggtataattggtgtatcgcgaaacggatatgtattagaagtacgtggataatatttaaattttttttttaaaattagtttcgcgataatatttgtttatatcgcgtatttcggtatttttatttattaaggtaggttagttaattaaaatttcggcgtaattttttcggtattaaatatttcggttgttaatcggttcgcgggtagtgttcgtaattgtggttcgtttgtttattttaacgtttcgttattatagtttttcgttaatatgtttatttatcggtttcgttcgtttttcgcgtttgttacgcggttagttttttcgtttttattatagtcgttcgcggatttcgttcgtcgtagttatttattttaagttttatttgtatatatagtcgttatatcgcggtagtatattttcgtagcggtcgtaacgttttttatcggcgcgtttgtaattttcgttatttagtttcggcgtatggtttttcgttaagcgttagtcggttagtttaaatttattgttagcggttttagcgtataatatttttttttgggtggtcgtattaggttgtcgtacgtttcgtcgtttgcgttttggtcggtattttatcgggttagttttataattgtataatggtttaatatattataagtacgtaagttttaatttttcgtatgtttttagtgtaatttcggcgtcgtttataatttttcgttggtttaaggtttaatattaatatggcgtattaatatttttatataatgtcggtttttacggttattattagttcggttcgtatttatttatttcggtcgtttg

SEQ ID NO: 24636 - DNA, 1039 bp, Artificial Sequence
  chemically treated genomic DNA (Homo sapiens) CpG-island No: 24636
caaacgaccgaaataaataaatacgaaccgaactaataataaccgtaaaaaccgacattatataaaaatattaatacgccatattaatattaaaccttaaaccaacgaaaaattataaacgacgccgaaattacactaaaaacatacgaaaaattaaaacttacgtacttataatatattaaaccattatacaattataaaactaacccgataaaataccgaccaaaacgcaaacgacgaaacgtacgacaacctaatacgaccacccaaaaaaaaatattatacgctaaaaccgctaacaataaatttaaactaaccgactaacgcttaacgaaaaaccatacgccgaaactaaataacgaaaattacaaacgcgccgataaaaaacgttacgaccgctacgaaaatatactaccgcgatataacgactatatatacaaataaaacttaaaataaataactacgacgaacgaaatccgcgaacgactataataaaaacgaaaaaactaaccgcgtaacaaacgcgaaaaacgaacgaaaccgataaataaacatattaacgaaaaactataataacgaaacgttaaaataaacaaacgaaccacaattacgaacactacccgcgaaccgattaacaaccgaaatatttaataccgaaaaaattacgccgaaattttaattaactaacctaccttaataaataaaaataccgaaatacgcgatataaacaaatattatcgcgaaactaattttaaaaaaaaaatttaaatattatccacgtacttctaatacatatccgtttcgcgatacaccaattataccgattataaataaaaacgattacgaaattctactacgattaaaactccaaaaataataaaaaaatttattataatcgataaataaataaaaaaattaaaacgtcgcgaccgtactataatataacgttaacataaaataaataacaatcttaaactatatattacgataccaactaactacaaccatacgtataacgccgattttcaactataaacaa

SEQ ID NO: 24637 - DNA, 521 bp, Artificial Sequence
  chemically treated genomic DNA (Homo sapiens) CpG-island No: 24637
aattatacgtcgtttacgggtacgcggtttattgtgggtttttagtgttcggggaaaggggttttcgtatttcggcgcgttcgtagtttggaagaggttatgtagtagtagtcgagaggtggttatcgtgtagcgatcgtgatgtttacgcggttagtgaagggtaaagattcggtcggaagttgtcgggttttagttgcggttatagttttagatcgtagtgtagcggtacggttagggcggtaggcgtagttggttttagggtttcgggggtcgttagttttcggggtggtcgttatcgttagttcgcgtgtattgttgggtttcggggtggcgtcggtttttgtttgaggggaggggaagattcggtttttaagttttgagtttaggtagtttcgacggtgggacgcgttcgtagtggtcgtataagcggcgagtacggttagcgttagtaggagggcggttattagtttagttatagtagggttattgcgcggtttatatagaagtttgagttggaa

SEQ ID NO: 24638 - DNA, 521 bp, Artificial Sequence
  chemically treated genomic DNA (Homo sapiens) CpG-island No: 24638
ttccaactcaaacttctatataaaccgcgcaataaccctactataactaaactaataaccgccctcctactaacgctaaccgtactcgccgcttatacgaccactacgaacgcgtcccaccgtcgaaactacctaaactcaaaacttaaaaaccgaatcttcccctcccctcaaacaaaaaccgacgccaccccgaaacccaacaatacacgcgaactaacgataacgaccaccccgaaaactaacgacccccgaaaccctaaaaccaactacgcctaccgccctaaccgtaccgctacactacgatctaaaactataaccgcaactaaaacccgacaacttccgaccgaatctttacccttcactaaccgcgtaaacatcacgatcgctacacgataaccacctctcgactactactacataacctcttccaaactacgaacgcgccgaaatacgaaaacccctttccccgaacactaaaaacccacaataaaccgcgtacccgtaaacgacgtataatt

SEQ ID NO: 24639 - DNA, 521 bp, Artificial Sequence
  chemically treated genomic DNA (Homo sapiens) CpG-island No: 24639
ttttagtttaggtttttatgtgagtcgcgtagtggttttgttgtggttgggttggtagtcgtttttttgttggcgttggtcgtattcgtcgtttgtacggttattgcgagcgcgttttatcgtcggagttgtttggatttaggatttggaagtcgagtttttttttttttttaggtagaagtcgacgttatttcgaaatttagtagtgtacgcgagttagcggtgacgattatttcgagaattggcgattttcggggttttgggattagttacgtttgtcgttttggtcgtgtcgttgtattacgatttggagttgtggtcgtagttgaggttcgatagttttcggtcgggtttttgttttttattggtcgcgtgaatattacggtcgttgtacggtggttatttttcgattgttgttgtatagttttttttaggttgcgagcgcgtcgaggtgcggggattttttttttcgggtattgggaatttatagtgggtcgcgtgttcgtggacgacgtgtggtt

SEQ ID NO: 24640 - DNA, 521 bp, Artificial Sequence
  chemically treated genomic DNA (Homo sapiens) CpG-island No: 24640
aaccacacgtcgtccacgaacacgcgacccactataaattcccaatacccgaaaaaaaaaatccccgcacctcgacgcgctcgcaacctaaaaaaaactatacaacaacaatcgaaaaataaccaccgtacaacgaccgtaatattcacgcgaccaataaaaaacaaaaacccgaccgaaaactatcgaacctcaactacgaccacaactccaaatcgtaatacaacgacacgaccaaaacgacaaacgtaactaatcccaaaaccccgaaaatcgccaattctcgaaataatcgtcaccgctaactcgcgtacactactaaatttcgaaataacgtcgacttctacctaaaaaaaaaaaaaaactcgacttccaaatcctaaatccaaacaactccgacgataaaacgcgctcgcaataaccgtacaaacgacgaatacgaccaacgccaacaaaaaaacgactaccaacccaaccacaacaaaaccactacgcgactcacataaaaacctaaactaaaa

SEQ ID NO: 24641 - DNA, 580 bp, Artificial Sequence
  chemically treated genomic DNA (Homo sapiens) CpG-island No: 24641
cggttttaatcgcgatagataggcgatcgcgtcggtggtttttataaaaacgggtttgtgtcggatgggggtggatttggttgtgtacgtatgatttataggatttggtgtaaacggtcgtggtttgtcgtcgtattaacgttttgtcgtaatgataatgttatatttggtgagtacgcggttttgataaagggcggggtgtttttttattttattatgttttataggatttgtcgtaaattcgtttacgtttgtttgcgatgtacgttatgtcgtaatggcgttggtatcgtggtgacgacgggtttttattagtagggggagtgggggaagatattttgattattatttagttatagtattgttagtatttcgtttacgtttgtcgcggattttacggtttgtcgtttcgttaattgtacgtttcgcgaatttttgattcgggattttttattttaagtttgttcgcgaatttaattgcggtagttagttattatttatgtcgtatgtttatgtgttatgtcgttttaagtggcgtattcgtatggttatagttatatattttaatatttttattgga

SEQ ID NO: 24642 - DNA, 580 bp, Artificial Sequence
  chemically treated genomic DNA (Homo sapiens) CpG-island No: 24642
tccaataaaaatattaaaatatataactataaccatacgaatacgccacttaaaacgacataacacataaacatacgacataaataataactaactaccgcaattaaattcgcgaacaaacttaaaataaaaaatcccgaatcaaaaattcgcgaaacgtacaattaacgaaacgacaaaccgtaaaatccgcgacaaacgtaaacgaaatactaacaatactataactaaataataatcaaaatatcttcccccactccccctactaataaaaacccgtcgtcaccacgataccaacgccattacgacataacgtacatcgcaaacaaacgtaaacgaatttacgacaaatcctataaaacataataaaataaaaaaacaccccgccctttatcaaaaccgcgtactcaccaaatataacattatcattacgacaaaacgttaatacgacgacaaaccacgaccgtttacaccaaatcctataaatcatacgtacacaaccaaatccacccccatccgacacaaacccgtttttataaaaaccaccgacgcgatcgcctatctatcgcgattaaaaccg

SEQ ID NO: 24643 - DNA, 580 bp, Artificial Sequence
  chemically treated genomic DNA (Homo sapiens) CpG-island No: 24643
tttagtaaaggtgttggggtatgtggttatgattatacgaatgcgttatttgaagcgatatggtatatgagtatgcgatataagtggtgattgattgtcgtaattgaattcgcgagtagatttggggtaggaaatttcgggttaagagttcgcgaagcgtgtagttagcgaggcggtaaatcgtaaggttcgcggtaggcgtaggcgggatattagtaatgttgtaattgggtggtggttagggtatttttttttattttttttattaatgaaaattcgtcgttattacggtattaacgttattgcggtatggcgtatatcgtaggtaggcgtaggcgggtttacggtaaattttgtaagatatagtggagtgggaaggtatttcgttttttattaaaatcgcgtgtttattagatgtagtattgttattgcggtaaagcgttagtacggcggtaggttacggtcgtttatattaaattttgtaagttatacgtgtatagttaagtttatttttattcggtataaattcgtttttgtaggggttatcggcgcggtcgtttatttgtcgcggttagggtcg

SEQ ID NO: 24644 - DNA, 580 bp, Artificial Sequence
  chemically treated genomic DNA (Homo sapiens) CpG-island No: 24644
cgaccctaaccgcgacaaataaacgaccgcgccgataacccctacaaaaacgaatttataccgaataaaaataaacttaactatacacgtataacttacaaaatttaatataaacgaccgtaacctaccgccgtactaacgctttaccgcaataacaatactacatctaataaacacgcgattttaataaaaaacgaaataccttcccactccactatatcttacaaaatttaccgtaaacccgcctacgcctacctacgatatacgccataccgcaataacgttaataccgtaataacgacgaattttcattaataaaaaaaataaaaaaaaataccctaaccaccacccaattacaacattactaatatcccgcctacgcctaccgcgaaccttacgatttaccgcctcgctaactacacgcttcgcgaactcttaacccgaaatttcctaccccaaatctactcgcgaattcaattacgacaatcaatcaccacttatatcgcatactcatataccatatcgcttcaaataacgcattcgtataatcataaccacataccccaacacctttactaaa

SEQ ID NO: 24645 - DNA, 1039 bp, Artificial Sequence
  chemically treated genomic DNA (Homo sapiens) CpG-island No: 24645
  unsure (241)
tttacgttttttttttttcggtatttttttttattttcgttttggggttgtcgtgtatttttttcgttcgtttcgtttcgtttcgttttcgtttattcgtcgattcggattcggttatgcgatttcggttggggtcgcggttcgagtttgacgttcgagcgtttcggtgggttttgtttgtgagttgcgtgcgcggtagatttttggttttggcggttgttgtttggttgtgtgggggcgnatcggtgaagaattataaataatgagtagtcgcgtggggtcggcgggggttgttgtcggcggcggtcgggtgtcgcggcggcggtgttcgtcgttcgtcggcgcgtgggcgtgggcgtgttttttgtgtttggtttatatatagttatattatatcggtttgtcggttgtcggttggcggtgtttgttgttttggggttcgttgtttttgcgcggtcgtgtcggtttgtgtagcgtttttaacggacgcgattatacggggagagggagtatattaagtaggcgagcggaattagtaaagggtataaaaggatagcgggtatttatgttggttgtcgtttggcggattacggcgtgtaatatatgtacgacgcggcgatagcgggtttgttagatcgcgtaatttacggcggaatgaatgtagtgtatttaatttatgtatattgtaatattgtgtatggtgtattgattatgtttcgcgttataacgcgattataggtcgcgtagtaaagaaatttggtcgtaaggggggtgttagcgggaggtttcgttagtttatttggtttttttacgcgtgttttcgtttagggcgggcgagggtttgggtttgttacgacggggcgatttagattattattttttttatttacgttatataggatttgttgtaaatcgttttcgtttattatcgatgtcgttatgtcgcgatcgcgttgattattaggtgtttacggttttttatatagtagggggagtgggggggaagtttttttattattttttttttatagtatttgtt

SEQ ID NO: 24646 - DNA, 1039 bp, Artificial Sequence
  chemically treated genomic DNA (Homo sapiens) CpG-island No: 24646
  unsure (799)
aacaaatactataaaaaaaaaataataaaaaaacttcccccccactccccctactatataaaaaaccgtaaacacctaataatcaacgcgatcgcgacataacgacatcgataataaacgaaaacgatttacaacaaatcctatataacgtaaataaaaaaaataataatctaaatcgccccgtcgtaacaaacccaaaccctcgcccgccctaaacgaaaacacgcgtaaaaaaaccaaataaactaacgaaacctcccgctaacaccccccttacgaccaaatttctttactacgcgacctataatcgcgttataacgcgaaacataatcaatacaccatacacaatattacaatatacataaattaaatacactacattcattccgccgtaaattacgcgatctaacaaacccgctatcgccgcgtcgtacatatattacacgccgtaatccgccaaacgacaaccaacataaatacccgctatccttttataccctttactaattccgctcgcctacttaatatactccctctccccgtataatcgcgtccgttaaaaacgctacacaaaccgacacgaccgcgcaaaaacaacgaaccccaaaacaacaaacaccgccaaccgacaaccgacaaaccgatataatataactatatataaaccaaacacaaaaaacacgcccacgcccacgcgccgacgaacgacgaacaccgccgccgcgacacccgaccgccgccgacaacaacccccgccgaccccacgcgactactcattatttataattcttcaccgatncgcccccacacaaccaaacaacaaccgccaaaaccaaaaatctaccgcgcacgcaactcacaaacaaaacccaccgaaacgctcgaacgtcaaactcgaaccgcgaccccaaccgaaatcgcataaccgaatccgaatcgacgaataaacgaaaacgaaacgaaacgaaacgaacgaaaaaaatacacgacaaccccaaaacgaaaataaaaaaaaataccgaaaaaaaaaaaacgtaaa

SEQ ID NO: 24647 - DNA, 1039 bp, Artificial Sequence
  chemically treated genomic DNA (Homo sapiens) CpG-island No: 24647
  unsure (799)
agtaaatgttgtaagagggaggtggtgaggaagttttttttttattttttttattatatgaaaagtcgtggatatttggtaattaacgcgatcgcggtatggcgatatcggtggtaggcgaaggcggtttatagtaaattttgtatgacgtaggtggagagggtagtggtttaaatcgtttcgtcgtagtaaatttaggttttcgttcgttttaggcgaaagtacgcgtaaaggaattaggtgggttagcgggatttttcgttggtattttttttgcggttaagtttttttattgcgcggtttgtaatcgcgttgtggcgcggggtataattagtgtattatatatagtgttatagtgtgtatgagttgggtgtattgtatttatttcgtcgtgaattacgcggtttggtaaattcgttatcgtcgcgtcgtgtatgtgttgtacgtcgtggttcgttaggcggtaattaatataagtattcgttgtttttttgtattttttgttagtttcgttcgtttatttggtgtgtttttttttttcgtatggtcgcgttcgttaggaacgttatataggtcgatacggtcgcgtagaagtagcggattttagaataataggtatcgttaatcggtaatcgataaatcgatgtgatgtgattatgtgtggattaaatatagagagtacgtttacgtttacgcgtcgacgagcggcggatatcgtcgtcgcggtattcgatcgtcgtcggtagtagttttcgtcgattttacgcggttatttattatttataattttttatcggtncgtttttatataattaagtagtaatcgttagaattagagatttgtcgcgtacgtaatttatagatagggtttatcggaacgttcgggcgttagattcgagtcgcggttttagtcgggatcgtatagtcggattcgaatcgacgaatggacgggaacgaaacgaaacggaacgaacgaagagggtgtacgatagttttagagcgggagtgagaagggatatcggagaggagggggcgtagg

SEQ ID NO: 24648 - DNA, 1039 bp, Artificial Sequence
  chemically treated genomic DNA (Homo sapiens) CpG-island No: 24648
  unsure (241)
cctacgccccctcctctccgatatcccttctcactcccgctctaaaactatcgtacaccctcttcgttcgttccgtttcgtttcgttcccgtccattcgtcgattcgaatccgactatacgatcccgactaaaaccgcgactcgaatctaacgcccgaacgttccgataaaccctatctataaattacgtacgcgacaaatctctaattctaacgattactacttaattatataaaaacgnaccgataaaaaattataaataataaataaccgcgtaaaatcgacgaaaactactaccgacgacgatcgaataccgcgacgacgatatccgccgctcgtcgacgcgtaaacgtaaacgtactctctatatttaatccacacataatcacatcacatcgatttatcgattaccgattaacgatacctattattctaaaatccgctacttctacgcgaccgtatcgacctatataacgttcctaacgaacgcgaccatacgaaaaaaaaaaacacaccaaataaacgaacgaaactaacaaaaaatacaaaaaaacaacgaatacttatattaattaccgcctaacgaaccacgacgtacaacacatacacgacgcgacgataacgaatttaccaaaccgcgtaattcacgacgaaataaatacaatacacccaactcatacacactataacactatatataatacactaattataccccgcgccacaacgcgattacaaaccgcgcaataaaaaaacttaaccgcaaaaaaaataccaacgaaaaatcccgctaacccacctaattcctttacgcgtactttcgcctaaaacgaacgaaaacctaaatttactacgacgaaacgatttaaaccactaccctctccacctacgtcatacaaaatttactataaaccgccttcgcctaccaccgatatcgccataccgcgatcgcgttaattaccaaatatccacgacttttcatataataaaaaaaataaaaaaaaaacttcctcaccacctccctcttacaacatttact

SEQ ID NO: 24649 - DNA, 504 bp, Artificial Sequence
  chemically treated genomic DNA (Homo sapiens) CpG-island No: 24649
tcgtaatcgcgatgtttacgttggttatacgggttttgatatagtagggggagtgggggaagttttttatattatttcgatttataggatttgttagtatttcgtttacgtttgtcgcggatttaaggttttttttttgcgttatttgtacgtttggcgatgttttgaattgtatgtttattttcgtggcgtaggcgtattgatatggggggagggaggggcgaggagggaggggacgggaaaatggggggcgaggtgaaagtggggttgatggcgggtgatgagtacgtcggagagataggcgcggcgagtttggtttaaagagtgcgcggtggaagatataagatcgcgcgggaagggcgacgttaggtcggagaggtgtttacgggacgtacgtgtcgagtagatcgttataagttaattttgggtacgtaagagcgtaagtatacgaaatttatgtgttttgtattatttatatttatatatagaacgggtatcgttgga

SEQ ID NO: 24650 - DNA, 504 bp, Artificial Sequence
  chemically treated genomic DNA (Homo sapiens) CpG-island No: 24650
tccaacgatacccgttctatatataaatataaataatacaaaacacataaatttcgtatacttacgctcttacgtacccaaaattaacttataacgatctactcgacacgtacgtcccgtaaacacctctccgacctaacgtcgcccttcccgcgcgatcttatatcttccaccgcgcactctttaaaccaaactcgccgcgcctatctctccgacgtactcatcacccgccatcaaccccactttcacctcgccccccattttcccgtcccctccctcctcgcccctccctccccccatatcaatacgcctacgccacgaaaataaacatacaattcaaaacatcgccaaacgtacaaataacgcaaaaaaaaaaccttaaatccgcgacaaacgtaaacgaaatactaacaaatcctataaatcgaaataatataaaaaacttcccccactccccctactatatcaaaacccgtataaccaacgtaaacatcgcgattacga

SEQ ID NO: 24651 - DNA, 504 bp, Artificial Sequence
  chemically treated genomic DNA (Homo sapiens) CpG-island No: 24651
tttaacggtattcgttttgtgtgtgggtgtgggtggtgtaaaatatatggatttcgtgtatttacgtttttacgtgtttaaaattagtttgtggcggtttattcgatacgtgcgtttcgtaggtattttttcggtttaacgtcgtttttttcgcgcgattttgtgttttttatcgcgtattttttaggttagattcgtcgcgtttgttttttcggcgtatttattattcgttattagttttatttttatttcgttttttattttttcgtttttttttttttcgtttttttttttttttatattaatacgtttgcgttacgagggtaagtatatagtttaagatatcgttaagcgtgtagatggcgtaggggggaaattttagattcgcggtaggcgtaggcgggatattagtaaattttgtaagtcgaggtggtgtgggaagttttttttattttttttattatattaaaattcgtgtgattaacgtaagtatcgcgattgcgg

SEQ ID NO: 24652 - DNA, 504 bp, Artificial Sequence
  chemically treated genomic DNA (Homo sapiens) CpG-island No: 24652
ccgcaatcgcgatacttacgttaatcacacgaattttaatataataaaaaaaataaaaaaaacttcccacaccacctcgacttacaaaatttactaatatcccgcctacgcctaccgcgaatctaaaatttcccccctacgccatctacacgcttaacgatatcttaaactatatacttaccctcgtaacgcaaacgtattaatataaaaaaaaaaaaaaacgaaaaaaaaaaaaacgaaaaaataaaaaacgaaataaaaataaaactaataacgaataataaatacgccgaaaaaacaaacgcgacgaatctaacctaaaaaatacgcgataaaaaacacaaaatcgcgcgaaaaaaacgacgttaaaccgaaaaaatacctacgaaacgcacgtatcgaataaaccgccacaaactaattttaaacacgtaaaaacgtaaatacacgaaatccatatattttacaccacccacacccacacacaaaacgaataccgttaaa

SEQ ID NO: 24653 - DNA, 527 bp, Artificial Sequence
  chemically treated genomic DNA (Homo sapiens) CpG-island No: 24653
agttataggcggggcgcggttattggttggttttggggttattttttttcgggcgggtagcgaatgatgaaatgggaacggggaggggaaaggtcgcgacgtgagcgcgcgattttcggcgttattttgtagagaaataagcggagttaatcgaagagggggtcgaggagagtcggagtcggggatttaggagttttttgtgtttagcgttgtcggagtcgtttgaggtgaggcgggttggcgttaggggttagggtagggtggcggtgttagtttgggaacgcgagagtcggtgggaggaggaataggggtggatttggggttattggaagcgtttttcggagttttagggagtgagaggtagtcgggacggggaagtgggacgaggcgggagagggcggatttttttttatacggttttcggaggtttcgcgttttgaagatgagaggtttagcgagaaggttttaggaagcggagggtagagcgcggggtgagatttatggtggtttttgtttcgggtttggag

SEQ ID NO: 24654 - DNA, 527 bp, Artificial Sequence
  chemically treated genomic DNA (Homo sapiens) CpG-island No: 24654
ctccaaacccgaaacaaaaaccaccataaatctcaccccgcgctctaccctccgcttcctaaaaccttctcgctaaacctctcatcttcaaaacgcgaaacctccgaaaaccgtataaaaaaaaatccgccctctcccgcctcgtcccacttccccgtcccgactacctctcactccctaaaactccgaaaaacgcttccaataaccccaaatccacccctattcctcctcccaccgactctcgcgttcccaaactaacaccgccaccctaccctaacccctaacgccaacccgcctcacctcaaacgactccgacaacgctaaacacaaaaaactcctaaatccccgactccgactctcctcgaccccctcttcgattaactccgcttatttctctacaaaataacgccgaaaatcgcgcgctcacgtcgcgacctttcccctccccgttcccatttcatcattcgctacccgcccgaaaaaaaataaccccaaaaccaaccaataaccgcgccccgcctataact

SEQ ID NO: 24655 - DNA, 527 bp, Artificial Sequence
  chemically treated genomic DNA (Homo sapiens) CpG-island No: 24655
ttttaggttcgggatagagattattatgggttttatttcgcgttttatttttcgttttttggagttttttcgttgggttttttatttttagagcgcgaagttttcgagagtcgtgtggagaagagttcgttttttttcgtttcgttttattttttcgtttcggttgttttttattttttagagtttcgggaaacgtttttagtggttttaggtttatttttgtttttttttttatcggttttcgcgtttttaagttgatatcgttattttattttagtttttgacgttaattcgttttattttaggcggtttcggtagcgttggatataggaaatttttgggttttcgatttcggtttttttcgatttttttttcggttaatttcgtttgtttttttataaaatggcgtcggaggtcgcgcgtttacgtcgcggtttttttttttttcgtttttattttattattcgttgttcgttcgaggagggatggttttagagttagttaatggtcgcgtttcgtttgtggtt

SEQ ID NO: 24656 - DNA, 527 bp, Artificial Sequence
  chemically treated genomic DNA (Homo sapiens) CpG-island No: 24656
aaccacaaacgaaacgcgaccattaactaactctaaaaccatccctcctcgaacgaacaacgaataataaaataaaaacgaaaaaaaaaaaaaccgcgacgtaaacgcgcgacctccgacgccattttataaaaaaacaaacgaaattaaccgaaaaaaaaatcgaaaaaaaccgaaatcgaaaacccaaaaatttcctatatccaacgctaccgaaaccgcctaaaataaaacgaattaacgtcaaaaactaaaataaaataacgatatcaacttaaaaacgcgaaaaccgataaaaaaaaaaacaaaaataaacctaaaaccactaaaaacgtttcccgaaactctaaaaaataaaaaacaaccgaaacgaaaaaataaaacgaaacgaaaaaaaacgaactcttctccacacgactctcgaaaacttcgcgctctaaaaataaaaaacccaacgaaaaaactccaaaaaacgaaaaataaaacgcgaaataaaacccataataatctctatcccgaacctaaaa

SEQ ID NO: 24657 - DNA, 743 bp, Artificial Sequence
  chemically treated genomic DNA (Homo sapiens) CpG-island No: 24657
attgtgcggtgttacgcgcggtttagtgggtgtcggggtcgtcggttatttcgtttgcggcgttttcgattcgcgcggtttggtatatggttggtaggggttttgttgcgacggtgatgtattttatcgcggtgatcgttagttagatttggcgcgattattcggtggattgattgttgttcgttgttggtgtaaagtttgatagggttgtttttgggcgttggtatttagcggttgcgtgaacgtaattagtcgtttgtaaaaggaattggcgcgtaattagtatttggttgtacggttgttggaaatcgaagagagcgtgcgtcgtgatgtggcgcgtgagttgtatgatgatatcggttagattattattgttattcgtatttaggcgggtattgtttagcggttggcggtagagaacgttagcgtgaagtagagcgggtagtttatcgaataattatcgttgggcgtttacgacgcggtgcgtcgtttgttgggtcggttacgttcgcgttagttggatgattttattttggagtaggttattcgtttattgatgcgggaaatggagttggaagggcgcggtattgttagttatttcgaatggcgaatcgatgaattagcgttaagcgaaaattagcgcgtgacgttgtttcgtgtttgttaggaagggttgaataatattgtgaaatatgttgatgttagcgcggttattttgtaaggttggtagtaggatgaacggt

SEQ ID NO: 24658 - DNA, 743 bp, Artificial Sequence
  chemically treated genomic DNA (Homo sapiens) CpG-island No: 24658
accgttcatcctactaccaaccttacaaaataaccgcgctaacatcaacatatttcacaatattattcaacccttcctaacaaacacgaaacaacgtcacgcgctaattttcgcttaacgctaattcatcgattcgccattcgaaataactaacaataccgcgcccttccaactccatttcccgcatcaataaacgaataacctactccaaaataaaatcatccaactaacgcgaacgtaaccgacccaacaaacgacgcaccgcgtcgtaaacgcccaacgataattattcgataaactacccgctctacttcacgctaacgttctctaccgccaaccgctaaacaatacccgcctaaatacgaataacaataataatctaaccgatatcatcatacaactcacgcgccacatcacgacgcacgctctcttcgatttccaacaaccgtacaaccaaatactaattacgcgccaattccttttacaaacgactaattacgttcacgcaaccgctaaataccaacgcccaaaaacaaccctatcaaactttacaccaacaacgaacaacaatcaatccaccgaataatcgcgccaaatctaactaacgatcaccgcgataaaatacatcaccgtcgcaacaaaacccctaccaaccatataccaaaccgcgcgaatcgaaaacgccgcaaacgaaataaccgacgaccccgacacccactaaaccgcgcgtaacaccgcacaat

SEQ ID NO: 24659 - DNA, 743 bp, Artificial Sequence
  chemically treated genomic DNA (Homo sapiens) CpG-island No: 24659
atcgtttattttgttgttagttttgtagggtgatcgcgttggtattagtatgttttataatgttgtttagttttttttggtagatacgaaatagcgttacgcgttggttttcgtttaacgttgatttatcgattcgttattcgagatggttgataatatcgcgtttttttagttttatttttcgtattagtgagcggatggtttgttttagggtgagattatttaattggcgcggacgtaatcgatttaataaacggcgtatcgcgtcgtaaacgtttagcgatagttgttcgatgagttgttcgttttgttttacgttggcgttttttgtcgttagtcgttgaataatgttcgtttgagtacgaatagtagtgatggtttgatcgatattattatgtagtttacgcgttatattacggcgtacgtttttttcggtttttagtaatcgtatagttagatgttgattgcgcgttagttttttttgtaagcgattggttacgtttacgtaatcgttggatgttagcgtttagaaataattttgttagattttgtattagtagcgagtagtaattaatttatcggatgatcgcgttaggtttgattggcgattatcgcgatggagtatattatcgtcgtaatagggtttttgttaattatgtgttaggtcgcgcgaatcgggagcgtcgtagacggggtaatcgacggtttcggtatttattgagtcgcgcgtgatatcgtatagt

SEQ ID NO: 24660 - DNA, 743 bp, Artificial Sequence
  chemically treated genomic DNA (Homo sapiens) CpG-island No: 24660
actatacgatatcacgcgcgactcaataaataccgaaaccgtcgattaccccgtctacgacgctcccgattcgcgcgacctaacacataattaacaaaaaccctattacgacgataatatactccatcgcgataatcgccaatcaaacctaacgcgatcatccgataaattaattactactcgctactaatacaaaatctaacaaaattatttctaaacgctaacatccaacgattacgtaaacgtaaccaatcgcttacaaaaaaaactaacgcgcaatcaacatctaactatacgattactaaaaaccgaaaaaaacgtacgccgtaatataacgcgtaaactacataataatatcgatcaaaccatcactactattcgtactcaaacgaacattattcaacgactaacgacaaaaaacgccaacgtaaaacaaaacgaacaactcatcgaacaactatcgctaaacgtttacgacgcgatacgccgtttattaaatcgattacgtccgcgccaattaaataatctcaccctaaaacaaaccatccgctcactaatacgaaaaataaaactaaaaaaacgcgatattatcaaccatctcgaataacgaatcgataaatcaacgttaaacgaaaaccaacgcgtaacgctatttcgtatctaccaaaaaaaactaaacaacattataaaacatactaataccaacgcgatcaccctacaaaactaacaacaaaataaacgat

SEQ ID NO: 24661 - DNA, 1166 bp, Artificial Sequence
  chemically treated genomic DNA (Homo sapiens) CpG-island No: 24661
  unsure (51)
gatgtgcgaatggcggagatggacggtatcgttacgttgtaaagagattanaacgcgttaaattcgggtaatttcggtgttgattatgattgcgtattttagcgtcgagacggcggtagaggtattgaaaattggggcgttggattattttattaagtcgttggatttcgataatttataggcgacgttggaaaaagcgttcgcgtatacgtatagtattgatgttgaaatatttgcggtgattgttagttagttcggtatggtcggtaaaagttcggcgatgtaatatttgtttagtgaaatcgttttcgtcgcgttatcggaagttacggtattgatttacggcgatttcggtatcggtaaagagttggtcgttagggcgatttacgttagtagcgtacgtagcgaaaaatcgttggtaacgtttaattgtgcggtatttaacgaatttttgttggaatttgaattgttcggttacgaaaaaggggcgtttattggagtcgataaacgtcgggaagggcgttttgttgaggcggacggcggtacgttgtttttcgatgaaattcgtcgatattttttcgatgatttaggtgcgttttttgcgtgcgatttaggagcgcgaagtttagcgtgtcggtagtaattagattatttcggttgatgttcgtttgattgcggcgatttatcgcgattttgtcgtagaggtgaatgtcgggcgttttcgttaggatttttattatcgtttgaatgtggtggcgattgaagtattatcgttgcggtaacggcgggaagatatttttttgttggttggttattttttgtagcgttttgtcgagcgtaatcgtaaggcggtaaaaggttttacgttttaggcgatggatttgttgatttattacgattggtcgggaaatattcgtgagttggaaaacgcggtggaacgggtagtggtgttgttgatcggggaatatattttcgaacgcgagttgtcgttggcgattgttagtacgtcgatttcgttgggataaagttaggatatttagtcgttggtggaagtggaaaaagaggtgattttggcggcgttggagaaaacgggcggtaataaaatcgaagtcgttcgttagttagggattacgcgtaaaacgttattggtaaaattgtcgcgttag

SEQ ID NO: 24662 - DNA, 1166 bp, Artificial Sequence
  chemically treated genomic DNA (Homo sapiens) CpG-island No: 24662
  unsure (1116)
ctaacgcgacaattttaccaataacgttttacgcgtaatccctaactaacgaacgacttcgattttattaccgcccgttttctccaacgccgccaaaatcacctctttttccacttccaccaacgactaaatatcctaactttatcccaacgaaatcgacgtactaacaatcgccaacgacaactcgcgttcgaaaatatattccccgatcaacaacaccactacccgttccaccgcgttttccaactcacgaatatttcccgaccaatcgtaataaatcaacaaatccatcgcctaaaacgtaaaaccttttaccgccttacgattacgctcgacaaaacgctacaaaaaataaccaaccaacaaaaaaatatcttcccgccgttaccgcaacgataatacttcaatcgccaccacattcaaacgataataaaaatcctaacgaaaacgcccgacattcacctctacgacaaaatcgcgataaatcgccgcaatcaaacgaacatcaaccgaaataatctaattactaccgacacgctaaacttcgcgctcctaaatcgcacgcaaaaaacgcacctaaatcatcgaaaaaatatcgacgaatttcatcgaaaaacaacgtaccgccgtccgcctcaacaaaacgcccttcccgacgtttatcgactccaataaacgcccctttttcgtaaccgaacaattcaaattccaacaaaaattcgttaaataccgcacaattaaacgttaccaacgatttttcgctacgtacgctactaacgtaaatcgccctaacgaccaactctttaccgataccgaaatcgccgtaaatcaataccgtaacttccgataacgcgacgaaaacgatttcactaaacaaatattacatcgccgaacttttaccgaccataccgaactaactaacaatcaccgcaaatatttcaacatcaatactatacgtatacgcgaacgctttttccaacgtcgcctataaattatcgaaatccaacgacttaataaaataatccaacgccccaattttcaatacctctaccgccgtctcgacgctaaaatacgcaatcataatcaacaccgaaattacccgaatttaacgcgttntaatctctttacaacgtaacgataccgtccatctccgccattcgcacatc

SEQ ID NO: 24663 - DNA, 1166 bp, Artificial Sequence
  chemically treated genomic DNA (Homo sapiens) CpG-island No: 24663
  unsure (1116)
ttaacgcgatagttttgttaatagcgttttgcgcgtgatttttaattgacgggcggtttcggttttgttgtcgttcgttttttttagcgtcgttagaattatttttttttttatttttattaacggttgaatattttgattttgttttagcgggatcggcgtattggtaatcgttagcggtagttcgcgttcggaaatatatttttcggttagtagtattattgttcgttttatcgcgttttttagtttacgaatatttttcggttagtcgtaatgaattaatagatttatcgtttggggcgtaaaattttttatcgttttgcgattacgttcggtaaagcgttgtagaaaatggttagttagtagagggatattttttcgtcgttgtcgtagcgatggtattttaatcgttattatatttaggcgatagtagagattttggcgaaaacgttcggtatttatttttgcggtaagatcgcgatgggtcgtcgtaattaggcggatattaatcgagataatttggttgttatcgatacgttgaatttcgcgtttttgaatcgtacgtaggagacgtatttggattatcggagagatatcggcgaattttatcgagaaatagcgtgtcgtcgttcgttttaataaagcgtttttttcggcgtttatcggttttagtaaacgtttttttttcgtgatcgaataatttagattttagtaaggattcgttgagtgtcgtatagttgagcgttattagcggtttttcgttacgtgcgttattggcgtgaatcgttttggcgattagttttttatcggtgtcggaatcgtcgtggattagtatcgtggttttcgatggcgcgacgagggcgattttattgagtaggtgttgtatcgtcgggtttttatcgattatatcgaattggttggtagttatcgtaggtgttttagtattaatattgtgcgtatgcgcgagcgttttttttagcgtcgtttgtaggttatcgaaatttagcggtttgatgagataatttagcgttttagtttttagtgtttttatcgtcgtttcgacgttggagtacgtagttataattagtatcggaattgttcgggtttaacgcgttntgatttttttgtagcgtggcgatgtcgtttattttcgttattcgtatatt

SEQ ID NO: 24664 - DNA, 1166 bp, Artificial Sequence
  chemically treated genomic DNA (Homo sapiens) CpG-island No: 24664
  unsure (51)
aatatacgaataacgaaaataaacgacatcgccacgctacaaaaaaatcanaacgcgttaaacccgaacaattccgatactaattataactacgtactccaacgtcgaaacgacgataaaaacactaaaaactaaaacgctaaattatctcatcaaaccgctaaatttcgataacctacaaacgacgctaaaaaaaacgctcgcgcatacgcacaatattaatactaaaacacctacgataactaccaaccaattcgatataatcgataaaaacccgacgatacaacacctactcaataaaatcgccctcgtcgcgccatcgaaaaccacgatactaatccacgacgattccgacaccgataaaaaactaatcgccaaaacgattcacgccaataacgcacgtaacgaaaaaccgctaataacgctcaactatacgacactcaacgaatccttactaaaatctaaattattcgatcacgaaaaaaaaacgtttactaaaaccgataaacgccgaaaaaaacgctttattaaaacgaacgacgacacgctatttctcgataaaattcgccgatatctctccgataatccaaatacgtctcctacgtacgattcaaaaacgcgaaattcaacgtatcgataacaaccaaattatctcgattaatatccgcctaattacgacgacccatcgcgatcttaccgcaaaaataaataccgaacgttttcgccaaaatctctactatcgcctaaatataataacgattaaaataccatcgctacgacaacgacgaaaaaatatccctctactaactaaccattttctacaacgctttaccgaacgtaatcgcaaaacgataaaaaattttacgccccaaacgataaatctattaattcattacgactaaccgaaaaatattcgtaaactaaaaaacgcgataaaacgaacaataatactactaaccgaaaaatatatttccgaacgcgaactaccgctaacgattaccaatacgccgatcccgctaaaacaaaatcaaaatattcaaccgttaataaaaataaaaaaaaaaataattctaacgacgctaaaaaaaacgaacgacaacaaaaccgaaaccgcccgtcaattaaaaatcacgcgcaaaacgctattaacaaaactatcgcgttaa

SEQ ID NO: 24665 - DNA, 1150 bp, Artificial Sequence
  chemically treated genomic DNA (Homo sapiens) CpG-island No: 24665
tcgtgtattcggtttgttatttttacgttttcgggtatattatttgtatttatttattattgcgtagtatggcgggttgtcggacgtgtatttgtcggtgattaattttttatttatttggaaagtgtcggaagcgaatttgattcgttatttcgagtaggtggtcgatagcgttacgttgtcggtgatgttttataatttttcggcgttgatcgggtaggatttgatttcggcgttggtgaaaattttcgtcgattcgcgtagtaatattatcggtattaaagatattatcgatttcgtcgtttatttgcgtagtatgatttatatcgttaaaggtgtttattcgtattttatcgtgttttgcggttacgacgattatttgtttaatattttgttgttcggcggcgacggggcgatatcggcgagcggtaattttgtttcgtaggtgtcggtgaattttttgaaagtttggcgcgacggggacgtggcgaaagcggtcgggtattattagattttgttgtaaatttcgtagatgtattagttggatacgtcgtttgtgaacgtgattaaagaggcgatcgtgttttgcggtcgttttgtttttacgtacgtgttgtcgttcgtttcgtcgttggacgagtcgcgtaaggcgtagttgaaaattttgttgtaatagtttaagttttgttgagtcggacgataacgatgattattgagaaaatttttatttcgtagacgacgcgtttatgcggtgattatttacgcggaggggtcgtagggcgttttgtcgttgatttcgtagatgttgatggaattttttagcgtgtaatttgattcggtatgacgtagaacgtcgggatgggttggcgacgttaataagtttatcggtaaagagagtgttgattatcggtatttagggcggtattcgcgtcggagacggacgtttaatcgcgttgggttattatatcgggtattgggagatcggtatgtagatgtaggcggcggcgaaggagattattcgtaatggcgggattttagttcgcggttttcgttagcgattcgtgtagacggtgcgttcgtagggtacgtaacggtatgttcgattttttgtcgtatcgtaacgacgcggcgatcgtgtttcgtcgtttga

SEQ ID NO: 24666 - DNA, 1150 bp, Artificial Sequence
  chemically treated genomic DNA (Homo sapiens) CpG-island No: 24666
tcaaacgacgaaacacgatcgccgcgtcgttacgatacgacaaaaaatcgaacataccgttacgtaccctacgaacgcaccgtctacacgaatcgctaacgaaaaccgcgaactaaaatcccgccattacgaataatctccttcgccgccgcctacatctacataccgatctcccaatacccgatataataacccaacgcgattaaacgtccgtctccgacgcgaataccgccctaaataccgataatcaacactctctttaccgataaacttattaacgtcgccaacccatcccgacgttctacgtcataccgaatcaaattacacgctaaaaaattccatcaacatctacgaaatcaacgacaaaacgccctacgacccctccgcgtaaataatcaccgcataaacgcgtcgtctacgaaataaaaattttctcaataatcatcgttatcgtccgactcaacaaaacttaaactattacaacaaaattttcaactacgccttacgcgactcgtccaacgacgaaacgaacgacaacacgtacgtaaaaacaaaacgaccgcaaaacacgatcgcctctttaatcacgttcacaaacgacgtatccaactaatacatctacgaaatttacaacaaaatctaataatacccgaccgctttcgccacgtccccgtcgcgccaaactttcaaaaaattcaccgacacctacgaaacaaaattaccgctcgccgatatcgccccgtcgccgccgaacaacaaaatattaaacaaataatcgtcgtaaccgcaaaacacgataaaatacgaataaacacctttaacgatataaatcatactacgcaaataaacgacgaaatcgataatatctttaataccgataatattactacgcgaatcgacgaaaattttcaccaacgccgaaatcaaatcctacccgatcaacgccgaaaaattataaaacatcaccgacaacgtaacgctatcgaccacctactcgaaataacgaatcaaattcgcttccgacactttccaaataaataaaaaattaatcaccgacaaatacacgtccgacaacccgccatactacgcaataataaataaatacaaataatatacccgaaaacgtaaaaataacaaaccgaatacacga

SEQ ID NO: 24667 - DNA, 1150 bp, Artificial Sequence
  chemically treated genomic DNA (Homo sapiens) CpG-island No: 24667
ttaggcggcgaaatacgatcgtcgcgtcgttgcggtacggtagggaatcgaatatatcgttgcgtgttttgcgagcgtatcgtttgtacggatcgttgacgaaggtcgcgaattgggatttcgttattgcgggtgatttttttcgtcgtcgtttgtatttgtatgtcgattttttaatgttcggtgtggtagtttagcgcgattgggcgttcgttttcggcgcggatgtcgttttgagtgtcgataattagtattttttttgtcggtgagtttgttggcgtcgttagtttatttcggcgttttgcgttatgtcgaattaggttgtacgttgggagattttattagtatttgcggggttagcggtagagcgttttgcggttttttcgcgtgggtgattatcgtataaacgcgtcgtttgcggggtgaaaatttttttaatggttatcgttatcgttcggtttagtaaagtttgagttgttgtagtagggtttttagttgcgttttgcgcggttcgtttagcggcgaggcgggcggtagtacgtgcgtggagataggacgatcgtagagtacgatcgtttttttaattacgtttataaacggcgtatttagttgatatatttgcggaatttgtagtaaggtttgatgatattcggtcgttttcgttacgttttcgtcgcgttaggtttttagaagatttatcgatatttgcggggtaaagttgtcgttcgtcgatatcgtttcgtcgtcgtcgagtagtagggtattgaatagatgatcgtcgtagtcgtagagtacggtgaagtgcggatgggtatttttgacggtatggattatgttgcgtaggtgggcgacggagtcgatggtgtttttgatgtcgataatattgttgcgcgagtcggcgagggtttttattagcgtcggagttagattttgttcggttagcgtcgggaagttatagagtattatcggtagcgtgacgttgtcggttatttgttcgaaatagcggattaggttcgttttcgatattttttagatagatagagggttgattatcgatagatgtacgttcgatagttcgttatgttgcgtagtgatggatgagtataggtggtatattcgaggacgtaaggatgatagatcggatgtacga

SEQ ID NO: 24668 - DNA, 1150 bp, Artificial Sequence
  chemically treated genomic DNA (Homo sapiens) CpG-island No: 24668
tcgtacatccgatctatcatccttacgtcctcgaatataccacctatactcatccatcactacgcaacataacgaactatcgaacgtacatctatcgataatcaaccctctatctatctaaaaaatatcgaaaacgaacctaatccgctatttcgaacaaataaccgacaacgtcacgctaccgataatactctataacttcccgacgctaaccgaacaaaatctaactccgacgctaataaaaaccctcgccgactcgcgcaacaatattatcgacatcaaaaacaccatcgactccgtcgcccacctacgcaacataatccataccgtcaaaaatacccatccgcacttcaccgtactctacgactacgacgatcatctattcaataccctactactcgacgacgacgaaacgatatcgacgaacgacaactttaccccgcaaatatcgataaatcttctaaaaacctaacgcgacgaaaacgtaacgaaaacgaccgaatatcatcaaaccttactacaaattccgcaaatatatcaactaaatacgccgtttataaacgtaattaaaaaaacgatcgtactctacgatcgtcctatctccacgcacgtactaccgcccgcctcgccgctaaacgaaccgcgcaaaacgcaactaaaaaccctactacaacaactcaaactttactaaaccgaacgataacgataaccattaaaaaaattttcaccccgcaaacgacgcgtttatacgataatcacccacgcgaaaaaaccgcaaaacgctctaccgctaaccccgcaaatactaataaaatctcccaacgtacaacctaattcgacataacgcaaaacgccgaaataaactaacgacgccaacaaactcaccgacaaaaaaaatactaattatcgacactcaaaacgacatccgcgccgaaaacgaacgcccaatcgcgctaaactaccacaccgaacattaaaaaatcgacatacaaatacaaacgacgacgaaaaaaatcacccgcaataacgaaatcccaattcgcgaccttcgtcaacgatccgtacaaacgatacgctcgcaaaacacgcaacgatatattcgattccctaccgtaccgcaacgacgcgacgatcgtatttcgccgcctaa

SEQ ID NO: 24669 - DNA, 720 bp, Artificial Sequence
  chemically treated genomic DNA (Homo sapiens) CpG-island No: 24669
gtatattatacgcgtacgtattagcgtttgatgtttttacgtttaggtttcgtttttttgataatcggtaaatgtttttgcggatgttattagtattttcgtcgtttcggacggacgtagtcgagtatttattttatataaaatgtcggaagaggtacgcgtattgaatagatgtataatgcgttgcgttagacgtagattaaattgtcgttcgtcgatttttcgtttatcgttagttatcgtatttattgggtaattatggaggaagataaggttaagatcggaattgtagtttaatttttagtcgtttagtttgtcgtagtcgattatcgtaaaattacgtttttcgcgttcgtttaggtgattcggtttatcgtagcgggtaattatttgaatttacgtttgttgaacgacggtatttattatggttttcgttagttaggttaagtgatcgtttatttttattatcggtagcgtatcggcgatattcgttgcggcgatgcgtaatagttgcgtttgtttgaattgacgtagcgttttaagttgttgtttttcgttatttttcggtacgcgtagtaaatattggcgtaatttatcgcggtaggtatcggtcgtcgtcggttggtaaagggtgtttggatcgagtaatttatttagtaataatggataacgcgttagttggttggtaattatcggcgacgcggtatatagagaaattaa

SEQ ID NO: 24670 - DNA, 720 bp, Artificial Sequence
  chemically treated genomic DNA (Homo sapiens) CpG-island No: 24670
ttaatttctctatataccgcgtcgccgataattaccaaccaactaacgcgttatccattattactaaataaattactcgatccaaacaccctttaccaaccgacgacgaccgatacctaccgcgataaattacgccaatatttactacgcgtaccgaaaaataacgaaaaacaacaacttaaaacgctacgtcaattcaaacaaacgcaactattacgcatcgccgcaacgaatatcgccgatacgctaccgataataaaaataaacgatcacttaacctaactaacgaaaaccataataaataccgtcgttcaacaaacgtaaattcaaataattacccgctacgataaaccgaatcacctaaacgaacgcgaaaaacgtaattttacgataatcgactacgacaaactaaacgactaaaaattaaactacaattccgatcttaaccttatcttcctccataattacccaataaatacgataactaacgataaacgaaaaatcgacgaacgacaatttaatctacgtctaacgcaacgcattatacatctattcaatacgcgtacctcttccgacattttatataaaataaatactcgactacgtccgtccgaaacgacgaaaatactaataacatccgcaaaaacatttaccgattatcaaaaaaacgaaacctaaacgtaaaaacatcaaacgctaatacgtacgcgtataatatac

SEQ ID NO: 24671 - DNA, 720 bp, Artificial Sequence
  chemically treated genomic DNA (Homo sapiens) CpG-island No: 24671
ttgatttttttgtgtgtcgcgtcgtcgatgattgttagttagttggcgcgttatttattattgttggatgaattgttcgatttaaatattttttattagtcgacggcgatcgatgtttatcgcgatgagttgcgttagtatttgttgcgcgtgtcggaagatgacgaagagtaatagtttgaggcgttgcgttagtttaaataggcgtagttgttacgtatcgtcgtagcggatatcgtcggtacgttatcggtgatgaaagtgagcgattatttaatttggttggcggaagttatgatagatgtcgtcgtttagtaggcgtgggtttaaatggttgttcgttacggtaagtcgaattatttgaacgaacgcgaagggcgtggttttgcggtggtcggttacggtaagttgggcggttgggagttaggttatagtttcgattttgattttatttttttttatgattgtttaatggatgcgatgattgacggtgagcgggaaatcgacgggcggtagtttagtttgcgtttggcgtaacgtattatgtatttgtttagtacgcgtatttttttcggtattttgtatgaagtggatgttcgattgcgttcgttcggggcggcgggaatgttggtgatattcgtagaagtatttgtcgattattagaaaaacgaggtttggacgtgggaatattaggcgttggtgcgtgcgcgtgtagtgtat

SEQ ID NO: 24672 - DNA, 720 bp, Artificial Sequence
  chemically treated genomic DNA (Homo sapiens) CpG-island No: 24672
atacactacacgcgcacgcaccaacgcctaatattcccacgtccaaacctcgtttttctaataatcgacaaatacttctacgaatatcaccaacattcccgccgccccgaacgaacgcaatcgaacatccacttcatacaaaataccgaaaaaaatacgcgtactaaacaaatacataatacgttacgccaaacgcaaactaaactaccgcccgtcgatttcccgctcaccgtcaatcatcgcatccattaaacaatcataaaaaaaaataaaatcaaaatcgaaactataacctaactcccaaccgcccaacttaccgtaaccgaccaccgcaaaaccacgcccttcgcgttcgttcaaataattcgacttaccgtaacgaacaaccatttaaacccacgcctactaaacgacgacatctatcataacttccgccaaccaaattaaataatcgctcactttcatcaccgataacgtaccgacgatatccgctacgacgatacgtaacaactacgcctatttaaactaacgcaacgcctcaaactattactcttcgtcatcttccgacacgcgcaacaaatactaacgcaactcatcgcgataaacatcgatcgccgtcgactaataaaaaatatttaaatcgaacaattcatccaacaataataaataacgcgccaactaactaacaatcatcgacgacgcgacacacaaaaaaatcaa

SEQ ID NO: 24673 - DNA, 689 bp, Artificial Sequence
  chemically treated genomic DNA (Homo sapiens) CpG-island No: 24673
tttattcggatatttaggcgtattagttatagttttagcgtcgtttaggtgtcggtggtgtcgttttacggtgagtcgttatttatggttattcggttcggtaggtcgtaacgtttaaatacgttgattagttgttgttgtacggtttcgcgtcgtttatcggtatagtgcgttaggtatagggaaaaacgggagtggtcgtttagtagggtgagcggatggtagcgtttatcgttaaaaggaaagtggtttttaaaatttatttgttagaggcggttcggcgcgtcgtgttcgaatcggttcgtggcgggaatgttcggtgaagcgttcggtagtaggttatggcgggttattaggttatggacggtgttgaaggcgggtatggtgtgtttttggttttcgagttagcgtttaattttgcgggttttttagcgtttatgacggttatgggttatacgtagtagggtcgtgatgtcgttagatgagcggttcggggatgtcggatgcgcggcgttttgaagatcgcggtatttttttgagtttagcgttggagttatttgtagtcggtggtaggtgaatgtcgaagcgacgtagagggacggatgttcgttttttgcgagcgataaataatttagtacgtatgatatggtatttttcgtatttaggtataacgattttataacggtttt

SEQ ID NO: 24674 - DNA, 689 bp, Artificial Sequence
  chemically treated genomic DNA (Homo sapiens) CpG-island No: 24674
aaaaccgttataaaatcgttatacctaaatacgaaaaataccatatcatacgtactaaattatttatcgctcgcaaaaaacgaacatccgtccctctacgtcgcttcgacattcacctaccaccgactacaaataactccaacgctaaactcaaaaaaataccgcgatcttcaaaacgccgcgcatccgacatccccgaaccgctcatctaacgacatcacgaccctactacgtataacccataaccgtcataaacgctaaaaaacccgcaaaattaaacgctaactcgaaaaccaaaaacacaccatacccgccttcaacaccgtccataacctaataacccgccataacctactaccgaacgcttcaccgaacattcccgccacgaaccgattcgaacacgacgcgccgaaccgcctctaacaaataaattttaaaaaccactttccttttaacgataaacgctaccatccgctcaccctactaaacgaccactcccgtttttccctatacctaacgcactataccgataaacgacgcgaaaccgtacaacaacaactaatcaacgtatttaaacgttacgacctaccgaaccgaataaccataaataacgactcaccgtaaaacgacaccaccgacacctaaacgacgctaaaactataactaatacgcctaaatatccgaataaa

SEQ ID NO: 24675 - DNA, 689 bp, Artificial Sequence
  chemically treated genomic DNA (Homo sapiens) CpG-island No: 24675
aaaatcgttatggagtcgttatgtttggatgcgagagatattatgttatacgtattgagttgtttgtcgttcgtagagggcgaatattcgtttttttgcgtcgtttcggtatttatttgttatcggttataagtggttttagcgttgggtttaggaaggtgtcgcggtttttaggacgtcgcgtattcgatattttcgaatcgtttatttgacgatattacggttttgttgcgtatggtttatgatcgttatgaacgttggggagttcgtaagattaagcgttggttcgaggattaggggtatattatgttcgtttttagtatcgtttataatttgatggttcgttatggtttgttgtcgggcgttttatcgggtattttcgttacgggtcggttcgaatacgacgcgtcgaatcgtttttggtagatggattttaagggttattttttttttggcggtggacgttgttattcgtttattttgttggacgattattttcgtttttttttgtgtttggcgtattgtatcgatgaacggcgcgagatcgtgtagtagtagttggttagcgtgtttgagcgttacggtttgtcggatcggatgattatggataacggtttatcgtggggcgatattatcggtatttggacggcgttggagttgtggttgatgcgtttgggtattcgggtggg

SEQ ID NO: 24676 - DNA, 689 bp, Artificial Sequence
  chemically treated genomic DNA (Homo sapiens) CpG-island No: 24676
cccacccgaatacccaaacgcatcaaccacaactccaacgccgtccaaataccgataatatcgccccacgataaaccgttatccataatcatccgatccgacaaaccgtaacgctcaaacacgctaaccaactactactacacgatctcgcgccgttcatcgatacaatacgccaaacacaaaaaaaaacgaaaataatcgtccaacaaaataaacgaataacaacgtccaccgccaaaaaaaaaataacccttaaaatccatctaccaaaaacgattcgacgcgtcgtattcgaaccgacccgtaacgaaaatacccgataaaacgcccgacaacaaaccataacgaaccatcaaattataaacgatactaaaaacgaacataatatacccctaatcctcgaaccaacgcttaatcttacgaactccccaacgttcataacgatcataaaccatacgcaacaaaaccgtaatatcgtcaaataaacgattcgaaaatatcgaatacgcgacgtcctaaaaaccgcgacaccttcctaaacccaacgctaaaaccacttataaccgataacaaataaataccgaaacgacgcaaaaaaacgaatattcgccctctacgaacgacaaacaactcaatacgtataacataatatctctcgcatccaaacataacgactccataacgatttt

SEQ ID NO: 24677 - DNA, 759 bp, Artificial Sequence
  chemically treated genomic DNA (Homo sapiens) CpG-island No: 24677
  unsure (697)
tataatgtttgatgcgacgtttgtcgcgttttattatgtttataagtttgtgtcgaatcgtaggtcggataaggcgtttacgtcgtattcggtagtcggcgtataatgtttgatgcgacgtttgtcgcgttttattatgtttataggtttgtgtcgaatcgtaggtcggataaggcgttcgcgtcgtattcggtagttggcgtataatgtttgatgcgacgtttgacgcgttttattaggtttataagtttgtgtcgaatcgtaggtcgtattcggtatgttataaatagagcgtcggaaatattaatcggtttatttcgcgtatttttaacgtattagttaacggtttaacgtttttcggcgtggcgttcgtttagttttgcgtttcgttatatacgtcgtgggtatgaaacgcgtttaggcgtatcggaatatcgtcgagttttttgataaacgtcgttagtttttcgatgtgttgtaaataatttatttggttagggattattagtaaacgtagtttcgttagtttggcgcgttttggtagtaaatagatgttgcgtttaatttgttgattatcgcgttcggtgagttgttgatgatattcgttttttacgttttgagatcgagtattgcgtcgtcgtatatcggggggttattttttttcgtcggttttttttaatatgtcggtttttggttntttaatcgggggaatggcgttatatattttatagttgggaaatagatgtttagatgtatggg

SEQ ID NO: 24678 - DNA, 759 bp, Artificial Sequence
  chemically treated genomic DNA (Homo sapiens) CpG-island No: 24678
  unsure (63)
cccatacatctaaacatctatttcccaactataaaatatataacgccattcccccgattaaanaaccaaaaaccgacatattaaaaaaaaccgacgaaaaaaaataaccccccgatatacgacgacgcaatactcgatctcaaaacgtaaaaaacgaatatcatcaacaactcaccgaacgcgataatcaacaaattaaacgcaacatctatttactaccaaaacgcgccaaactaacgaaactacgtttactaataatccctaaccaaataaattatttacaacacatcgaaaaactaacgacgtttatcaaaaaactcgacgatattccgatacgcctaaacgcgtttcatacccacgacgtatataacgaaacgcaaaactaaacgaacgccacgccgaaaaacgttaaaccgttaactaatacgttaaaaatacgcgaaataaaccgattaatatttccgacgctctatttataacataccgaatacgacctacgattcgacacaaacttataaacctaataaaacgcgtcaaacgtcgcatcaaacattatacgccaactaccgaatacgacgcgaacgccttatccgacctacgattcgacacaaacctataaacataataaaacgcgacaaacgtcgcatcaaacattatacgccgactaccgaatacgacgtaaacgccttatccgacctacgattcgacacaaacttataaacataataaaacgcgacaaacgtcgcatcaaacattata

SEQ ID NO: 24679 - DNA, 759 bp, Artificial Sequence
  chemically treated genomic DNA (Homo sapiens) CpG-island No: 24679
  unsure (63)
tttatatatttaaatatttgttttttaattatggagtgtgtagcgttattttttcggttgggnggttaagaatcggtatgttgaagggaatcggcgggggaaaatggtttttcggtgtgcgacggcgtaatgttcgattttaaagcgtggggagcgaatgttattaataatttatcggacgcgataattagtagattaagcgtagtatttatttgttgttagagcgcgttaagttggcggaattgcgtttgttggtgatttttggttaggtggattatttgtaatatatcgaagaattggcggcgtttattaagggattcggcgatgtttcggtacgtttgaacgcgttttatgtttacggcgtgtatggcgaggcgtaaagttgggcgagcgttacgtcggaagacgttgagtcgttggttgatgcgttaaaggtgcgcggggtgagtcggttgatattttcggcgttttatttgtgatatgtcggatacggtttacggttcggtatagatttgtaggtttgataagacgcgttaagcgtcgtattaggtattgtgcgttaattgtcggatgcggcgcgaacgttttattcggtttacggttcggtataaatttgtaggtatgataagacgcgataagcgtcgtattaggtattatgcgtcgattgtcggatgcggcgtgaacgttttattcggtttacggttcggtatagatttgtaggtatgataagacgcgataagcgtcgtattaggtattgtg

SEQ ID NO: 24680 - DNA, 759 bp, Artificial Sequence
  chemically treated genomic DNA (Homo sapiens) CpG-island No: 24680
  unsure (697)
cacaatacctaatacgacgcttatcgcgtcttatcatacctacaaatctataccgaaccgtaaaccgaataaaacgttcacgccgcatccgacaatcgacgcataatacctaatacgacgcttatcgcgtcttatcatacctacaaatttataccgaaccgtaaaccgaataaaacgttcgcgccgcatccgacaattaacgcacaatacctaatacgacgcttaacgcgtcttatcaaacctacaaatctataccgaaccgtaaaccgtatccgacatatcacaaataaaacgccgaaaatatcaaccgactcaccccgcgcacctttaacgcatcaaccaacgactcaacgtcttccgacgtaacgctcgcccaactttacgcctcgccatacacgccgtaaacataaaacgcgttcaaacgtaccgaaacatcgccgaatcccttaataaacgccgccaattcttcgatatattacaaataatccacctaaccaaaaatcaccaacaaacgcaattccgccaacttaacgcgctctaacaacaaataaatactacgcttaatctactaattatcgcgtccgataaattattaataacattcgctccccacgctttaaaatcgaacattacgccgtcgcacaccgaaaaaccattttcccccgccgattcccttcaacataccgattcttaaccncccaaccgaaaaaataacgctacacactccataattaaaaaacaaatatttaaatatataaa

SEQ ID NO: 24681 - DNA, 751 bp, Artificial Sequence
  chemically treated genomic DNA (Homo sapiens) CpG-island No: 24681
  unsure (440, 451, 467, 665, 701)
attgcgttatagtttttcgggagacgtgggttttcggatttttttagtgtcggatttcgggtcgtaggtagtttcgcggtagtaggttataggtgaatagatggcgggtttgggttttttattggggttgcgtttttggcgattaggaggggcgttttcggcgaggttcgatttcggggttttttaagttattttttttttttcgtattttttaattttttatttcggtttcggttcggttgggtcgtatttttgtttttttggtttcgttttttggggtttcgtaatggggttttttttcgggaatgttttgtagttttcgtacgggttttttttcgtttcgtgggattagtttagttcgagttttcgtcgggtttggtttttaagcgttttattttttcgttatatcgtttcggttatatcgcgattagtgtgatttnatgggattttnttaaagtcgtatacgnttcgtgagtagcgggttgcgtgttgaagttaggtcgagttttgtcgtattttaggacggttcgtttttgtattattagtgaaaggagaaggtagtagcggacggttgagttggtggaggtggcgggttatagtggtataacgggtaagaagggcgatatgcgggagcgttgattttttcgtgggcgttcggcgtgtanagttgttttattttttgtggtatttggtggggatgngcgattgtggttttggagagttttcgggtcgtttgttttggttgcgattg

SEQ ID NO: 24682 - DNA, 751 bp, Artificial Sequence
  chemically treated genomic DNA (Homo sapiens) CpG-island No: 24682
  unsure (51, 87, 285, 301, 312)
caatcgcaaccaaaacaaacgacccgaaaactctccaaaaccacaatcgcncatccccaccaaataccacaaaaaataaaacaactntacacgccgaacgcccacgaaaaaatcaacgctcccgcatatcgcccttcttacccgttataccactataacccgccacctccaccaactcaaccgtccgctactaccttctcctttcactaataatacaaaaacgaaccgtcctaaaatacgacaaaactcgacctaacttcaacacgcaacccgctactcacgaancgtatacgactttaanaaaatcccatnaaatcacactaatcgcgatataaccgaaacgatataacgaaaaaataaaacgcttaaaaaccaaacccgacgaaaactcgaactaaactaatcccacgaaacgaaaaaaaacccgtacgaaaactacaaaacattcccgaaaaaaaaccccattacgaaaccccaaaaaacgaaaccaaaaaaacaaaaatacgacccaaccgaaccgaaaccgaaataaaaaattaaaaaatacgaaaaaaaaaaaataacttaaaaaaccccgaaatcgaacctcgccgaaaacgcccctcctaatcgccaaaaacgcaaccccaataaaaaacccaaacccgccatctattcacctataacctactaccgcgaaactacctacgacccgaaatccgacactaaaaaaatccgaaaacccacgtctcccgaaaaactataacgcaat

SEQ ID NO: 24683 - DNA, 751 bp, Artificial Sequence
  chemically treated genomic DNA (Homo sapiens) CpG-island No: 24683
  unsure (51, 87, 285, 301, 312)
taatcgtagttaagataggcgattcggagattttttaaggttataatcgtntatttttattaggtgttataaggggtaaggtaattntatacgtcgggcgtttacgaaggaattagcgttttcgtatgtcgttttttttgttcgttgtgttattgtggttcgttatttttattagtttagtcgttcgttattgttttttttttttattaatagtataagaacgggtcgttttaggatacgataaggttcggtttgattttagtacgtagttcgttatttacgggncgtatacgattttaangaggttttatnggattatattagtcgcgatatggtcggggcgatgtggcgggaagatagagcgtttgagggttaagttcggcgggggttcgggttgggttggttttacgaagcggagggaagttcgtacgggagttgtagggtattttcggagagaagttttattacgagattttagagagcggagttagggaggtaagagtgcgatttagtcgagtcgaagtcgggatgaagggttaagaggtgcggggagaggggagtggtttgaggggtttcgagatcgggtttcgtcggaagcgttttttttgatcgttaggaacgtagttttaatggagggtttaggttcgttatttgtttatttgtgatttgttgtcgcgggattgtttgcggttcggagttcggtattaaaaaggttcgagggtttacgtttttcgagaggttgtggcgtagt

SEQ ID NO: 24684 - DNA, 751 bp, Artificial Sequence
  chemically treated genomic DNA (Homo sapiens) CpG-island No: 24684
  unsure (440, 451, 467, 665, 701)
actacgccacaacctctcgaaaaacgtaaaccctcgaacctttttaataccgaactccgaaccgcaaacaatcccgcgacaacaaatcacaaataaacaaataacgaacctaaaccctccattaaaactacgttcctaacgatcaaaaaaaacgcttccgacgaaacccgatctcgaaacccctcaaaccactcccctctccccgcacctcttaacccttcatcccgacttcgactcgactaaatcgcactcttacctccctaactccgctctctaaaatctcgtaataaaacttctctccgaaaataccctacaactcccgtacgaacttccctccgcttcgtaaaaccaacccaacccgaacccccgccgaacttaaccctcaaacgctctatcttcccgccacatcgccccgaccatatcgcgactaatataatccnataaaacctcnttaaaatcgtatacgncccgtaaataacgaactacgtactaaaatcaaaccgaaccttatcgtatcctaaaacgacccgttcttatactattaataaaaaaaaaaaacaataacgaacgactaaactaataaaaataacgaaccacaataacacaacgaacaaaaaaaacgacatacgaaaacgctaattccttcgtaaacgcccgacgtatanaattaccttaccccttataacacctaataaaaatanacgattataaccttaaaaaatctccgaatcgcctatcttaactacgatta

SEQ ID NO: 24685 - DNA, 1187 bp, Artificial Sequence
  chemically treated genomic DNA (Homo sapiens) CpG-island No: 24685
ggggacggcgacgatataggttttcgtagaggggttttagtttaggggacggcgacgatataggttttcgtagaggggttttagttgacgggacggcgtcgatataggttttcgtagaggggtttagtttaggggacggcgacgatataggttttcgtagaggggtttagtttaggggacggcgacgatataggttttcgtagaggggtttagtttaggggacggcgacgatataggttttcgtagaggggtttagtttaggggacggcgtcgatataggttttcgtagaggggtttagttgacgggacggcgtcgatataggttttcgtagaggggtttagttgacgggacggcgtcgatataggttttcgtagaggggtttagttgacgggacggcgtcgatataggtttttcgtagaggggcgcggtttaggggacggcgacgatataggttttcgtagaggggttcggttgacgggacggcgacgatataggttttcgtagaggggtttagtttaggggacggcgacgatataggtttttcgtagaggggttcggttgacgggacggcgacgatataggttttcgtagaggggcgcggttgacgggacggcgacgatataggttttcgtagaggggtttagttgaggggacggcgtcgatataggtttttcgtagaggggcgcggtttaggggacggcgacgatataggttttcgtagaggggttcggttgacgggacggcgacgatataggttttcgtagaggggtttagtttaggggacggcgacgatataggtttttcgtagaggggttcggttgacgggacggcgacgatataggttttcgtagaggggcgcggttgacgggacggcgtcgatataggttttcgtagaggggtttagtttaggggacggcgacgatataggttttcgtagaggggtttagtttaggggacggcgacgatataggttttcgtagaggggtttagtttaggggacggcgacgatataggttttcgtagaggggtttagtttaggggacggcgacgatataggttttcgtagaggggcgcggttgaggggacggcgtcgatataggttttcgtaggggggtttagttgaggggacggcgtcgatataggttttcgtagaggggcgtagtcgtatttttatgtggttttagta

SEQ ID NO: 24686 - DNA, 1187 bp, Artificial Sequence
  chemically treated genomic DNA (Homo sapiens) CpG-island No: 24686
tactaaaaccacataaaaatacgactacgcccctctacgaaaacctatatcgacgccgtcccctcaactaaacccccctacgaaaacctatatcgacgccgtcccctcaaccgcgcccctctacgaaaacctatatcgtcgccgtcccctaaactaaacccctctacgaaaacctatatcgtcgccgtcccctaaactaaacccctctacgaaaacctatatcgtcgccgtcccctaaactaaacccctctacgaaaacctatatcgtcgccgtcccctaaactaaacccctctacgaaaacctatatcgacgccgtcccgtcaaccgcgcccctctacgaaaacctatatcgtcgccgtcccgtcaaccgaacccctctacgaaaaacctatatcgtcgccgtcccctaaactaaacccctctacgaaaacctatatcgtcgccgtcccgtcaaccgaacccctctacgaaaacctatatcgtcgccgtcccctaaaccgcgcccctctacgaaaaacctatatcgacgccgtcccctcaactaaacccctctacgaaaacctatatcgtcgccgtcccgtcaaccgcgcccctctacgaaaacctatatcgtcgccgtcccgtcaaccgaacccctctacgaaaaacctatatcgtcgccgtcccctaaactaaacccctctacgaaaacctatatcgtcgccgtcccgtcaaccgaacccctctacgaaaacctatatcgtcgccgtcccctaaaccgcgcccctctacgaaaaacctatatcgacgccgtcccgtcaactaaacccctctacgaaaacctatatcgacgccgtcccgtcaactaaacccctctacgaaaacctatatcgacgccgtcccgtcaactaaacccctctacgaaaacctatatcgacgccgtcccctaaactaaacccctctacgaaaacctatatcgtcgccgtcccctaaactaaacccctctacgaaaacctatatcgtcgccgtcccctaaactaaacccctctacgaaaacctatatcgtcgccgtcccctaaactaaacccctctacgaaaacctatatcgacgccgtcccgtcaactaaaacccctctacgaaaacctatatcgtcgccgtcccctaaactaaaacccctctacgaaaacctatatcgtcgccgtcccc

SEQ ID NO: 24687 - DNA, 1187 bp, Artificial Sequence
  chemically treated genomic DNA (Homo sapiens) CpG-island No: 24687
tgttggggttatatggaaatgcggttgcgtttttttgcgggggtttgtgtcggcgtcgtttttttagttgaatttttttgcgggggtttgtgtcggcgtcgtttttttagtcgcgtttttttgcgggggtttgtgtcgtcgtcgttttttgagttgaatttttttgcgggggtttgtgtcgtcgtcgttttttgagttgaatttttttgcgggggtttgtgtcgtcgtcgttttttgagttgaatttttttgcgggggtttgtgtcgtcgtcgttttttgagttgaatttttttgcgggggtttgtgtcggcgtcgtttcgttagtcgcgtttttttgcgggggtttgtgtcgtcgtcgtttcgttagtcgagtttttttgcggggagtttgtgtcgtcgtcgttttttgagttgaatttttttgcgggggtttgtgtcgtcgtcgtttcgttagtcgagtttttttgcgggggtttgtgtcgtcgtcgttttttgagtcgcgtttttttgcggggagtttgtgtcggcgtcgtttttttagttgaatttttttgcgggggtttgtgtcgtcgtcgtttcgttagtcgcgtttttttgcgggggtttgtgtcgtcgtcgtttcgttagtcgagtttttttgcggggagtttgtgtcgtcgtcgttttttgagttgaatttttttgcgggggtttgtgtcgtcgtcgtttcgttagtcgagtttttttgcgggggtttgtgtcgtcgtcgttttttgagtcgcgtttttttgcggggagtttgtgtcggcgtcgtttcgttagttgaatttttttgcgggggtttgtgtcggcgtcgtttcgttagttgaatttttttgcgggggtttgtgtcggcgtcgtttcgttagttgaatttttttgcgggggtttgtgtcggcgtcgttttttgagttgaatttttttgcgggggtttgtgtcgtcgtcgttttttgagttgaatttttttgcgggggtttgtgtcgtcgtcgttttttgagttgaatttttttgcgggggtttgtgtcgtcgtcgttttttgagttgaatttttttgcgggggtttgtgtcggcgtcgtttcgttagttgaagtttttttgcgggggtttgtgtcgtcgtcgttttttgagttgaagtttttttgcgggggtttgtgtcgtcgtcgttttt

SEQ ID NO: 24688 - DNA, 1187 bp, Artificial Sequence
  chemically treated genomic DNA (Homo sapiens) CpG-island No: 24688
aaaaacgacgacgacacaaacccccgcaaaaaaacttcaactcaaaaaacgacgacgacacaaacccccgcaaaaaaacttcaactaacgaaacgacgccgacacaaacccccgcaaaaaaattcaactcaaaaaacgacgacgacacaaacccccgcaaaaaaattcaactcaaaaaacgacgacgacacaaacccccgcaaaaaaattcaactcaaaaaacgacgacgacacaaacccccgcaaaaaaattcaactcaaaaaacgacgccgacacaaacccccgcaaaaaaattcaactaacgaaacgacgccgacacaaacccccgcaaaaaaattcaactaacgaaacgacgccgacacaaacccccgcaaaaaaattcaactaacgaaacgacgccgacacaaactccccgcaaaaaaacgcgactcaaaaaacgacgacgacacaaacccccgcaaaaaaactcgactaacgaaacgacgacgacacaaacccccgcaaaaaaattcaactcaaaaaacgacgacgacacaaactccccgcaaaaaaactcgactaacgaaacgacgacgacacaaacccccgcaaaaaaacgcgactaacgaaacgacgacgacacaaacccccgcaaaaaaattcaactaaaaaaacgacgccgacacaaactccccgcaaaaaaacgcgactcaaaaaacgacgacgacacaaacccccgcaaaaaaactcgactaacgaaacgacgacgacacaaacccccgcaaaaaaattcaactcaaaaaacgacgacgacacaaactccccgcaaaaaaactcgactaacgaaacgacgacgacacaaacccccgcaaaaaaacgcgactaacgaaacgacgccgacacaaacccccgcaaaaaaattcaactcaaaaaacgacgacgacacaaacccccgcaaaaaaattcaactcaaaaaacgacgacgacacaaacccccgcaaaaaaattcaactcaaaaaacgacgacgacacaaacccccgcaaaaaaattcaactcaaaaaacgacgacgacacaaacccccgcaaaaaaacgcgactaaaaaaacgacgccgacacaaacccccgcaaaaaaattcaactaaaaaaacgacgccgacacaaacccccgcaaaaaaacgcaaccgcatttccatataaccccaaca

SEQ ID NO: 24689 - DNA, 660 bp, Artificial Sequence
  chemically treated genomic DNA (Homo sapiens) CpG-island No: 24689
ggcgtcgtaggagagtttttgtgtttcgtagtttattttagggcgatggcgcgggggatttggtaaggttcggtaggttgcggggcgtgggggggtcgtgcgtttttttttagtatcgttttcggtcggttcgttagtgttcgtcggggtcgcgcgttttttttttcgttttcggggatagttcggtcggttacgtcgtcgaattcgttatgggttttttttcgtattcgtatgtgtattcgtaatcgttttcgtttcgttgagcgtacgaattttttcgtttttgtttttttcgtttcgttcgtttcgttcgtttcggacgtttttgttgcggtgttttagcggttcgcggataggcgatttttttcgtggacgtttttttttcggtcgtcgtttcgtttcgcgtttcgttttttcgcgtttttgggtcgagattttcggtcgtttcgtttcgttttcggttacgaaaggcgttgcggatttggcggttacgcgcgaagttagtggttttttttcgttcggggtttcgggattcgggtattaatagattcggagggatcgcgtcgtttcgggtaaattcgtttatttcgttgtttaatataattggaagtattaaaatcgaatttaatcgtgtgtagagattagtttagcgttttggga

SEQ ID NO: 24690 - DNA, 660 bp, Artificial Sequence
  chemically treated genomic DNA (Homo sapiens) CpG-island No: 24690
tcccaaaacgctaaactaatctctacacacgattaaattcgattttaatacttccaattatattaaacaacgaaataaacgaatttacccgaaacgacgcgatccctccgaatctattaatacccgaatcccgaaaccccgaacgaaaaaaaaccactaacttcgcgcgtaaccgccaaatccgcaacgcctttcgtaaccgaaaacgaaacgaaacgaccgaaaatctcgacccaaaaacgcgaaaaaacgaaacgcgaaacgaaacgacgaccgaaaaaaaaacgtccacgaaaaaaatcgcctatccgcgaaccgctaaaacaccgcaacaaaaacgtccgaaacgaacgaaacgaacgaaacgaaaaaaacaaaaacgaaaaaattcgtacgctcaacgaaacgaaaacgattacgaatacacatacgaatacgaaaaaaaacccataacgaattcgacgacgtaaccgaccgaactatccccgaaaacgaaaaaaaaaacgcgcgaccccgacgaacactaacgaaccgaccgaaaacgatactaaaaaaaaacgcacgacccccccacgccccgcaacctaccgaaccttaccaaatcccccgcgccatcgccctaaaataaactacgaaacacaaaaactctcctacgacgcc

SEQ ID NO: 24691 - DNA, 660 bp, Artificial Sequence
  chemically treated genomic DNA (Homo sapiens) CpG-island No: 24691
ttttagagcgttgggttggtttttgtatacggttggattcggttttagtgtttttagttgtgttgggtaacggggtgggcgggtttgttcggggcggcgcggttttttcgggtttgttggtgttcggatttcggagtttcgggcggggggaggttattggtttcgcgcgtgatcgttaggttcgtagcgtttttcgtggtcggagacggggcgaggcgatcggaggtttcggtttaggggcgcgggggagcggggcgcggggcggggcggcggtcgggagaggggcgtttacgggggaggtcgtttgttcgcggatcgttaagatatcgtagtagaggcgttcggggcgggcggggcgggcggggcgggagggataggagcgagagggttcgtgcgtttagcgggacggaagcggttgcggatgtatatgcggatgcggagagaggtttatggcgagttcggcggcgtggtcggtcgggttgttttcgagggcggaagggaggacgcgcgatttcgacgggtattgacgggtcggtcggggacggtgttgggagggagcgtacgatttttttacgtttcgtagtttgtcgggttttgttaggtttttcgcgttatcgttttggggtggattgcggggtatagagatttttttgcggcgtt

SEQ ID NO: 24692 - DNA, 660 bp, Artificial Sequence
  chemically treated genomic DNA (Homo sapiens) CpG-island No: 24692
aacgccgcaaaaaaatctctataccccgcaatccaccccaaaacgataacgcgaaaaacctaacaaaacccgacaaactacgaaacgtaaaaaaatcgtacgctccctcccaacaccgtccccgaccgacccgtcaatacccgtcgaaatcgcgcgtcctcccttccgccctcgaaaacaacccgaccgaccacgccgccgaactcgccataaacctctctccgcatccgcatatacatccgcaaccgcttccgtcccgctaaacgcacgaaccctctcgctcctatccctcccgccccgcccgccccgcccgccccgaacgcctctactacgatatcttaacgatccgcgaacaaacgacctcccccgtaaacgcccctctcccgaccgccgccccgccccgcgccccgctcccccgcgcccctaaaccgaaacctccgatcgcctcgccccgtctccgaccacgaaaaacgctacgaacctaacgatcacgcgcgaaaccaataacctccccccgcccgaaactccgaaatccgaacaccaacaaacccgaaaaaaccgcgccgccccgaacaaacccgcccaccccgttacccaacacaactaaaaacactaaaaccgaatccaaccgtatacaaaaaccaacccaacgctctaaaa

SEQ ID NO: 24693 - DNA, 634 bp, Artificial Sequence
  chemically treated genomic DNA (Homo sapiens) CpG-island No: 24693
cgtagtcgcgtcgtaatattttgcgttagcgtatcgttaagggaatattttagtaggtaataagggttatgcggttgttgtttaagtaacgttgttagatgcgtttcgtagattttatttaggtttgtcgtcgtttgtatggggttattggggcgcggtgattgaatgtcgataatcgattattgtggatcgagataacgcgagagtacgttgaattgttaggtaaaatcggacgtaggatggaaataaaatagcgtcgggttattatttttacgtaacggtagaatggtttcgaattttatacgtcgggtgttgttttttttagtattaataatcgttgttagtttggcgatagttgacgcgattattatttgtttcggcgttatttggcgggtaatttgtcgatttaattgcgttgttagttttattgttagtagcgaatgatcgttaagcgcgaagaaattagtatcggtattttgtacgttatattttagtaacgacgagaatgtcgcggcgataatcgttttattgttcgttttcggcgtacgttttggcgtttgtgtttttagtttaggtaacggggaagggattggaatttagttgggtcgaggggttaaagggaaagggggatatt

SEQ ID NO: 24694 - DNA, 634 bp, Artificial Sequence
  chemically treated genomic DNA (Homo sapiens) CpG-island No: 24694
aatatccccctttccctttaacccctcgacccaactaaattccaatcccttccccgttacctaaactaaaaacacaaacgccaaaacgtacgccgaaaacgaacaataaaacgattatcgccgcgacattctcgtcgttactaaaatataacgtacaaaataccgatactaatttcttcgcgcttaacgatcattcgctactaacaataaaactaacaacgcaattaaatcgacaaattacccgccaaataacgccgaaacaaataataatcgcgtcaactatcgccaaactaacaacgattattaatactaaaaaaaacaacacccgacgtataaaattcgaaaccattctaccgttacgtaaaaataataacccgacgctattttatttccatcctacgtccgattttacctaacaattcaacgtactctcgcgttatctcgatccacaataatcgattatcgacattcaatcaccgcgccccaataaccccatacaaacgacgacaaacctaaataaaatctacgaaacgcatctaacaacgttacttaaacaacaaccgcataacccttattacctactaaaatattcccttaacgatacgctaacgcaaaatattacgacgcgactacg

SEQ ID NO: 24695 - DNA, 634 bp, Artificial Sequence
  chemically treated genomic DNA (Homo sapiens) CpG-island No: 24695
aatgtttttttttttttttggtttttcggtttaattgggttttaatttttttttcgttgtttgaattgaaggtataagcgttagggcgtgcgtcgaaagcgggtagtgaaacgattatcgtcgcggtattttcgtcgttgttggggtgtgacgtgtaggatgtcgatgttgattttttcgcgtttggcggttattcgttattggtaatgaaattggtagcgtagttaagtcggtaggttgttcgttaggtgacgtcggggtaagtgatggtcgcgttaattgtcgttaaattggtaacgattattgatgttgaagaagatagtattcggcgtatgggattcgaaattattttgtcgttgcgtgaaggtaatggttcgacgttgttttgtttttattttgcgttcggttttgtttggtagtttagcgtgttttcgcgttatttcgatttataatggtcgattatcggtatttagttatcgcgttttaatggttttatgtagacggcggtaaatttggatgaagtttgcgaagcgtatttggtaacgttatttgaataataatcgtatggtttttattatttgttggggtatttttttggcggtacgttggcgtagggtattgcggcgcgattgcg

SEQ ID NO: 24696 - DNA, 634 bp, Artificial Sequence
  chemically treated genomic DNA (Homo sapiens) CpG-island No: 24696
cgcaatcgcgccgcaataccctacgccaacgtaccgccaaaaaaataccccaacaaataataaaaaccatacgattattattcaaataacgttaccaaatacgcttcgcaaacttcatccaaatttaccgccgtctacataaaaccattaaaacgcgataactaaataccgataatcgaccattataaatcgaaataacgcgaaaacacgctaaactaccaaacaaaaccgaacgcaaaataaaaacaaaacaacgtcgaaccattaccttcacgcaacgacaaaataatttcgaatcccatacgccgaatactatcttcttcaacatcaataatcgttaccaatttaacgacaattaacgcgaccatcacttaccccgacgtcacctaacgaacaacctaccgacttaactacgctaccaatttcattaccaataacgaataaccgccaaacgcgaaaaaatcaacatcgacatcctacacgtcacaccccaacaacgacgaaaataccgcgacgataatcgtttcactacccgctttcgacgcacgccctaacgcttataccttcaattcaaacaacgaaaaaaaaattaaaacccaattaaaccgaaaaaccaaaaaaaaaaaaaaacatt

SEQ ID NO: 24697 - DNA, 514 bp, Artificial Sequence
  chemically treated genomic DNA (Homo sapiens) CpG-island No: 24697
agcgtggcgtattacgttgagttaatcggagaggttgattcgttattattggttcgcgcggtggttgtcggattagcgtaagtagatacgttgcggatgcgttttacggaagataacggcgaagtttggtagtgggtcgatgatgcgttgacgttcgaattgttagaaattatcgatttacgaattaatattgattcgtacggtattgcgtaggtattaatgtaggcggatttgttataagatttgcgcgtcgatagcggtgaattattggttttttattaggtgatataggtggcggataatcggtggttttcgggttcgcggtttttttttttgttgtttaagggtttagttttcggttttttcgtcgattgttaatttttggtttggtttttgggattatttgttgttttaagtttcgcgatttgggaagtattacggggattttgtttttttttcggtagcggaatagaggcggatttgtattatagggggttcgttatcgggatatacg

SEQ ID NO: 24698 - DNA, 514 bp, Artificial Sequence
  chemically treated genomic DNA (Homo sapiens) CpG-island No: 24698
cgtatatcccgataacgaaccccctataatacaaatccgcctctattccgctaccgaaaaaaaaacaaaatccccgtaatacttcccaaatcgcgaaacttaaaacaacaaataatcccaaaaaccaaaccaaaaattaacaatcgacgaaaaaaccgaaaactaaacccttaaacaacaaaaaaaaaaaccgcgaacccgaaaaccaccgattatccgccacctatatcacctaataaaaaaccaataattcaccgctatcgacgcgcaaatcttataacaaatccgcctacattaatacctacgcaataccgtacgaatcaatattaattcgtaaatcgataatttctaacaattcgaacgtcaacgcatcatcgacccactaccaaacttcgccgttatcttccgtaaaacgcatccgcaacgtatctacttacgctaatccgacaaccaccgcgcgaaccaataataacgaatcaacctctccgattaactcaacgtaatacgccacgct

SEQ ID NO: 24699 - DNA, 514 bp, Artificial Sequence
  chemically treated genomic DNA (Homo sapiens) CpG-island No: 24699
cgtatatttcgatagcgggttttttatagtgtaggttcgtttttatttcgttatcgaagaaaagataagattttcgtggtgttttttaaatcgcgaagtttagggtaataggtggttttaagaattaggttaaaaattggtaatcggcggaaaggtcgggaattaaatttttggatagtaaaggggaaaatcgcgaattcgagaattatcggttattcgttatttgtattatttgatgaaagattagtggtttatcgttatcgacgcgtagattttgtggtaaattcgtttgtattaatgtttgcgtagtatcgtgcggattaatgttggttcgtaggtcgataatttttggtagttcgaacgttagcgtattatcgatttattgttagatttcgtcgttatttttcgtaaaacgtattcgtagcgtatttgtttgcgttagttcggtaattatcgcgcgggttagtaatggcgaattaattttttcggttaatttaacgtaatgcgttacgtt

SEQ ID NO: 24700 - DNA, 514 bp, Artificial Sequence
  chemically treated genomic DNA (Homo sapiens) CpG-island No: 24700
aacgtaacgcattacgttaaattaaccgaaaaaattaattcgccattactaacccgcgcgataattaccgaactaacgcaaacaaatacgctacgaatacgttttacgaaaaataacgacgaaatctaacaataaatcgataatacgctaacgttcgaactaccaaaaattatcgacctacgaaccaacattaatccgcacgatactacgcaaacattaatacaaacgaatttaccacaaaatctacgcgtcgataacgataaaccactaatctttcatcaaataatacaaataacgaataaccgataattctcgaattcgcgattttcccctttactatccaaaaatttaattcccgacctttccgccgattaccaatttttaacctaattcttaaaaccacctattaccctaaacttcgcgatttaaaaaacaccacgaaaatcttatcttttcttcgataacgaaataaaaacgaacctacactataaaaaacccgctatcgaaatatacg

SEQ ID NO: 24701 - DNA, 767 bp, Artificial Sequence
  chemically treated genomic DNA (Homo sapiens) CpG-island No: 24701
  unsure (333)
gttagtagataacgttacgagtgattgagttcgggcgcgggtttttcggtagattcgtattgcgcgatagtaagatattattgatttgatttaataatggtacggtattggtaaagttaaattgattaataacgggcgtgtcgttcggtttgttagtttagattttaatgatatagcgagcgttaattttaatcgtttaggcgttacgatagttatagttggtgttcgttttttatgttagtggggcgacgcgcggtaaggtattattcggtaagggttgcgttttattagttataattcggcgaatgatttacgtcgttttcgacgatattnaaggtcgtttaagtagcggatcgttaggttgtaagcgtaatttgtttgttttgtcgtggcgagtaaacgcggtatacgttgtcgttatattttttagttttgtattagcgtcgtcgagaatgagtgaaagattcggcgtagtatcgttgggtaatattacggtaatttaatattgcgttattttgtcgtaaatcgtttcggtttataggtttttagtatttgtatagtaggtaagtttagcgagcgtattagcgtttcgtttatgttgatcgggttatgaaaatcgttattaaagttatttggtcgataattatcggtgcgtcgggggacgttttgtagtagtgattgtcggtggattaagtttttatttagcgttagattataaataaacggtttgagtattgattttgtgcgatcggatcgaattgattata

SEQ ID NO: 24702 - DNA, 767 bp, Artificial Sequence
  chemically treated genomic DNA (Homo sapiens) CpG-island No: 24702
  unsure (435)
tataatcaattcgatccgatcgcacaaaatcaatactcaaaccgtttatttataatctaacgctaaataaaaacttaatccaccgacaatcactactacaaaacgtcccccgacgcaccgataattatcgaccaaataactttaataacgattttcataacccgatcaacataaacgaaacgctaatacgctcgctaaacttacctactatacaaatactaaaaacctataaaccgaaacgatttacgacaaaataacgcaatattaaattaccgtaatattacccaacgatactacgccgaatctttcactcattctcgacgacgctaatacaaaactaaaaaatataacgacaacgtataccgcgtttactcgccacgacaaaacaaacaaattacgcttacaacctaacgatccgctacttaaacgaccttnaatatcgtcgaaaacgacgtaaatcattcgccgaattataactaataaaacgcaacccttaccgaataataccttaccgcgcgtcgccccactaacataaaaaacgaacaccaactataactatcgtaacgcctaaacgattaaaattaacgctcgctatatcattaaaatctaaactaacaaaccgaacgacacgcccgttattaatcaatttaactttaccaataccgtaccattattaaatcaaatcaataatatcttactatcgcgcaatacgaatctaccgaaaaacccgcgcccgaactcaatcactcgtaacgttatctactaac

SEQ ID NO: 24703 - DNA, 767 bp, Artificial Sequence
  chemically treated genomic DNA (Homo sapiens) CpG-island No: 24703
  unsure (435)
tatggttaattcgattcgatcgtataggattagtgtttaaatcgtttgtttatggtttggcgttggatgaaggtttgatttatcggtaattattgttgtaagacgtttttcggcgtatcggtgattatcgattaggtaattttgatagcggtttttatggttcgattagtatgagcgaggcgttggtgcgttcgttgaatttatttgttgtgtaggtgttggaagtttatggatcgaaacggtttgcggtaaagtaacgtaatgttggattgtcgtaatattgtttaacggtgttgcgtcgaattttttatttattttcggcggcgttggtgtaaaattggaagatatggcggtagcgtatatcgcgtttgttcgttacggtaaggtaggtaaattgcgtttatagtttgacgattcgttgtttgaacggttttnaatgtcgtcgggggcggcgtggattattcgtcggattatggttgatgaagcgtaatttttgtcggatagtgttttgtcgcgcgtcgttttattggtatggaaaacgggtattagttatggttatcgtgacgtttgggcgattggggttaacgttcgttatgttattgggatttggattggtagatcggacggtacgttcgttgttggttagtttggttttgttagtgtcgtattattgttgaattaggttaataatattttattgtcgcgtagtgcgaatttgtcggaagattcgcgttcgaatttagttattcgtggcgttatttgttggt

SEQ ID NO: 24704 - DNA, 767 bp, Artificial Sequence
  chemically treated genomic DNA (Homo sapiens) CpG-island No: 24704
  unsure (333)
accaacaaataacgccacgaataactaaattcgaacgcgaatcttccgacaaattcgcactacgcgacaataaaatattattaacctaattcaacaataatacgacactaacaaaaccaaactaaccaacaacgaacgtaccgtccgatctaccaatccaaatcccaataacataacgaacgttaaccccaatcgcccaaacgtcacgataaccataactaatacccgttttccataccaataaaacgacgcgcgacaaaacactatccgacaaaaattacgcttcatcaaccataatccgacgaataatccacgccgcccccgacgacattnaaaaccgttcaaacaacgaatcgtcaaactataaacgcaatttacctaccttaccgtaacgaacaaacgcgatatacgctaccgccatatcttccaattttacaccaacgccgccgaaaataaataaaaaattcgacgcaacaccgttaaacaatattacgacaatccaacattacgttactttaccgcaaaccgtttcgatccataaacttccaacacctacacaacaaataaattcaacgaacgcaccaacgcctcgctcatactaatcgaaccataaaaaccgctatcaaaattacctaatcgataatcaccgatacgccgaaaaacgtcttacaacaataattaccgataaatcaaaccttcatccaacgccaaaccataaacaaacgatttaaacactaatcctatacgatcgaatcgaattaaccata

SEQ ID NO: 24705 - DNA, 528 bp, Artificial Sequence
  chemically treated genomic DNA (Homo sapiens) CpG-island No: 24705
aatattatttagaatggtttgcgttgggcgacggcgatttttagttaatgaggttttcgaaaggtggtgttttcgtaagcgtacgcgcggtcgcggcgggattttcgttgttttttttgtggcggtcgttttggtatttgtttggattgattatttggtagaaagtttcggagcgttgggttagtattattcgtgattgattgagaaggcgcgagaggagtttttttcgttgtatagaggcgtggttgaggttcggcggcgtttagggtatttaggttcggttcggaataaggatattttttttggtttcgtttcgtttatagagttagatggcggcggtcgagttgacggtttcggtttaggtatgtgtcgcgttttttgggtttttttcgttttttttacgttagttttagtattttcgagggcgtttgttcgcggttttgttgtttaggataggatacgggggttcgtcggaggggttttcgtttttaatatttggtgtgttagggaagggagggcgcgattggt

SEQ ID NO: 24706 - DNA, 528 bp, Artificial Sequence
  chemically treated genomic DNA (Homo sapiens) CpG-island No: 24706
accaatcgcgccctcccttccctaacacaccaaatattaaaaacgaaaacccctccgacgaacccccgtatcctatcctaaacaacaaaaccgcgaacaaacgccctcgaaaatactaaaactaacgtaaaaaaaacgaaaaaaacccaaaaaacgcgacacatacctaaaccgaaaccgtcaactcgaccgccgccatctaactctataaacgaaacgaaaccaaaaaaaatatccttattccgaaccgaacctaaataccctaaacgccgccgaacctcaaccacgcctctatacaacgaaaaaaactcctctcgcgccttctcaatcaatcacgaataatactaacccaacgctccgaaactttctaccaaataatcaatccaaacaaataccaaaacgaccgccacaaaaaaaacaacgaaaatcccgccgcgaccgcgcgtacgcttacgaaaacaccacctttcgaaaacctcattaactaaaaatcgccgtcgcccaacgcaaaccattctaaataatatt

SEQ ID NO: 24707 - DNA, 528 bp, Artificial Sequence
  chemically treated genomic DNA (Homo sapiens) CpG-island No: 24707
gttagtcgcgtttttttttttttagtatattaggtgttggaaacgggagttttttcggcgagttttcgtgttttgttttgggtagtagggtcgcgagtaagcgttttcgggggtgttaggattagcgtggggagggcggggaaggtttagaggacgcggtatatatttgggtcggggtcgttagttcggtcgtcgttatttgattttgtgagcggagcggggttagagaggatgtttttatttcgggtcgggtttgggtattttgggcgtcgtcgagttttagttacgtttttgtgtagcggggaagatttttttcgcgtttttttagttagttacggatgatgttgatttagcgtttcggggttttttattaagtaattagtttagataaatgttaaaacgatcgttataaggaggataacggaagtttcgtcgcgatcgcgcgtgcgtttacggaaatattatttttcggaggttttattggttgaaggtcgtcgtcgtttaacgtaggttattttgggtaatgtt

SEQ ID NO: 24708 - DNA, 528 bp, Artificial Sequence
  chemically treated genomic DNA (Homo sapiens) CpG-island No: 24708
aacattacccaaaataacctacgttaaacgacgacgaccttcaaccaataaaacctccgaaaaataatatttccgtaaacgcacgcgcgatcgcgacgaaacttccgttatcctccttataacgatcgttttaacatttatctaaactaattacttaataaaaaaccccgaaacgctaaatcaacatcatccgtaactaactaaaaaaacgcgaaaaaaatcttccccgctacacaaaaacgtaactaaaactcgacgacgcccaaaatacccaaacccgacccgaaataaaaacatcctctctaaccccgctccgctcacaaaatcaaataacgacgaccgaactaacgaccccgacccaaatatataccgcgtcctctaaaccttccccgccctccccacgctaatcctaacacccccgaaaacgcttactcgcgaccctactacccaaaacaaaacacgaaaactcgccgaaaaaactcccgtttccaacacctaatatactaaaaaaaaaaaaacgcgactaac

SEQ ID NO: 24709 - DNA, 958 bp, Artificial Sequence
  chemically treated genomic DNA (Homo sapiens) CpG-island No: 24709
tggtggatgacgaacgttgggcgcgttttaacgagaaatttgagaatatcgagcgtgagcgttagcgtttgaaatcgatttgggtaatttcgtcggcggaagttgtagtcgaagtgaaagttttgtttgatgtttagttcgaagtggtttatttattggcgaagtggaaacgttagattttagggtaatacgattttagcgcgggcgaagggttgtatacgtatatgaaagtttttcgtttcgatgaagatcgttttttttcgttgtattcggtttatgttgattagtgggattgggaacgcgtaatgggcgacggtgagcgttaattttcgattttgaaaagtacggtagaggcgatttgggcgggaattaaagtaatcgaagttgcggttagcgaagagtttggtttggtatcgtttttgtcggattagatttatttcgtatatagttaggagttattgtttcgttattcggattttgatgttaaagggcgtgagcgggcgatagcgaaagattttggcgcggtattttttgtcgggattggcggtaagttgagcgatggttatcgttacgacgtgcgcgtatcggattatgatgattggagtatttcgttagagttgggttatgcgggtttgaacggcgatttttggtgtggaattcggtattggaagatgcgtttgagtttttttttatggggattcgtgtagattcgatacgttgaagtattaattggcgttgatcggtgacgaagatcgtttggagttggagttggtattaggcgttgttgcgcggtgaaatgtcgtagattatcggcggcggtatcggttagtttcgtttgattatttgttgttgtaattgtcgtatatcggttaggtttagtgtggagtatggttagttgttgtcgcgagagcgtttttttttggtgtaataatttaatcgcgtagcgtttagagtaggg

SEQ ID NO: 24710 - DNA, 958 bp, Artificial Sequence
  chemically treated genomic DNA (Homo sapiens) CpG-island No: 24710
ccctactctaaacgctacgcgattaaattattacaccaaaaaaaaacgctctcgcgacaacaactaaccatactccacactaaacctaaccgatatacgacaattacaacaacaaataatcaaacgaaactaaccgataccgccgccgataatctacgacatttcaccgcgcaacaacgcctaataccaactccaactccaaacgatcttcgtcaccgatcaacgccaattaatacttcaacgtatcgaatctacacgaatccccataaaaaaaaactcaaacgcatcttccaataccgaattccacaccaaaaatcgccgttcaaacccgcataacccaactctaacgaaatactccaatcatcataatccgatacgcgcacgtcgtaacgataaccatcgctcaacttaccgccaatcccgacaaaaaataccgcgccaaaatctttcgctatcgcccgctcacgccctttaacatcaaaatccgaataacgaaacaataactcctaactatatacgaaataaatctaatccgacaaaaacgataccaaaccaaactcttcgctaaccgcaacttcgattactttaattcccgcccaaatcgcctctaccgtacttttcaaaatcgaaaattaacgctcaccgtcgcccattacgcgttcccaatcccactaatcaacataaaccgaatacaacgaaaaaaaacgatcttcatcgaaacgaaaaactttcatatacgtatacaacccttcgcccgcgctaaaatcgtattaccctaaaatctaacgtttccacttcgccaataaataaaccacttcgaactaaacatcaaacaaaactttcacttcgactacaacttccgccgacgaaattacccaaatcgatttcaaacgctaacgctcacgctcgatattctcaaatttctcgttaaaacgcgcccaacgttcgtcatccacca

SEQ ID NO: 24711 - DNA, 958 bp, Artificial Sequence
  chemically treated genomic DNA (Homo sapiens) CpG-island No: 24711
ttttgttttaaacgttgcgcgattaaattattatattaggaaaggacgttttcgcgatagtagttggttatattttatattgaatttggtcgatatgcggtagttgtagtagtagatagttaaacgagattggtcgatatcgtcgtcgatggtttgcggtattttatcgcgtagtagcgtttgatgttaattttagttttaggcgattttcgttatcggttagcgttagttgatgttttagcgtgtcggatttatacggatttttatggaggaaagtttaaacgtattttttagtatcgggttttatattagaaatcgtcgtttagattcgtatggtttagttttgacggggtgttttagttattataattcggtgcgcgtacgtcgtggcgatgattatcgtttagtttgtcgttaatttcgataaggaatatcgcgttaagatttttcgttatcgttcgtttacgttttttggtattaagattcggataacgagatagtaatttttggttgtgtacgaagtggatttgattcggtaggaacggtgttaggttaaatttttcgttaatcgtagtttcggttgttttaattttcgtttagatcgtttttatcgtgttttttagagtcgagaattgacgtttatcgtcgtttattacgcgtttttagttttattggttaatatagatcgagtgtaacggagaaagacggtttttatcggggcgaagggtttttatgtgcgtgtatagtttttcgttcgcgttgaagtcgtgttgttttaaggtttgacgtttttatttcgttagtgaatgaattatttcgaattgggtattaggtagagtttttatttcggttgtagttttcgtcgacggggttatttaggtcgattttagacgttgacgtttacgttcgatatttttaagtttttcgttaaagcgcgtttaacgttcgttatttatta

SEQ ID NO: 24712 - DNA, 958 bp, Artificial Sequence
  chemically treated genomic DNA (Homo sapiens) CpG-island No: 24712
taataaataacgaacgttaaacgcgctttaacgaaaaacttaaaaatatcgaacgtaaacgtcaacgtctaaaatcgacctaaataaccccgtcgacgaaaactacaaccgaaataaaaactctacctaatacccaattcgaaataattcattcactaacgaaataaaaacgtcaaaccttaaaacaacacgacttcaacgcgaacgaaaaactatacacgcacataaaaacccttcgccccgataaaaaccgtctttctccgttacactcgatctatattaaccaataaaactaaaaacgcgtaataaacgacgataaacgtcaattctcgactctaaaaaacacgataaaaacgatctaaacgaaaattaaaacaaccgaaactacgattaacgaaaaatttaacctaacaccgttcctaccgaatcaaatccacttcgtacacaaccaaaaattactatctcgttatccgaatcttaataccaaaaaacgtaaacgaacgataacgaaaaatcttaacgcgatattccttatcgaaattaacgacaaactaaacgataatcatcgccacgacgtacgcgcaccgaattataataactaaaacaccccgtcaaaactaaaccatacgaatctaaacgacgatttctaatataaaacccgatactaaaaaatacgtttaaactttcctccataaaaatccgtataaatccgacacgctaaaacatcaactaacgctaaccgataacgaaaatcgcctaaaactaaaattaacatcaaacgctactacgcgataaaataccgcaaaccatcgacgacgatatcgaccaatctcgtttaactatctactactacaactaccgcatatcgaccaaattcaatataaaatataaccaactactatcgcgaaaacgtcctttcctaatataataatttaatcgcgcaacgtttaaaacaaaa

SEQ ID NO: 24713 - DNA, 629 bp, Artificial Sequence
  chemically treated genomic DNA (Homo sapiens) CpG-island No: 24713
acgggtcgtacgagttgtattcggacgtaacgatgatgattagttggtatttgtcggagaattcgttgtagaagagcggttacggttcgttgttgtagacgtatacgggtgaatggtatatggtttattttattagtcgttcgttgcgtttgttcggcgtgtcgttgttggttttcggcggacgcggttattgttcgttggggcgcgagatcggtatcgttcgtattgaatggcgcgacggttggtcgtacgtggaaggcggtaagtacgcgtagttgatcgtgaaaggttcgtaagtagtcgagtagtttgtagtcgtttcgggtaattggcgggacgatttcgacgttagttcgtttgattcggagttgtagattttgcgtatttcgttcgacgatattttcggttcgtttatcgcgcgttcgggttttttacggttttatggtaacgattcgtttaattcgatttttatttaatcgatcgtggcgcgtcgttggtagtatttcgtttttcgggtagaaacgcggatggagttttcgtcggtgtatttttagtagagcgcggggttgatttgttattataatagtaaaaattggagttattgttttgtggattacgaggagggatag

SEQ ID NO: 24714 - DNA, 629 bp, Artificial Sequence
  chemically treated genomic DNA (Homo sapiens) CpG-island No: 24714
ctatccctcctcgtaatccacaaaacaataactccaatttttactattataataacaaatcaaccccgcgctctactaaaaatacaccgacgaaaactccatccgcgtttctacccgaaaaacgaaatactaccaacgacgcgccacgatcgattaaataaaaatcgaattaaacgaatcgttaccataaaaccgtaaaaaacccgaacgcgcgataaacgaaccgaaaatatcgtcgaacgaaatacgcaaaatctacaactccgaatcaaacgaactaacgtcgaaatcgtcccgccaattacccgaaacgactacaaactactcgactacttacgaacctttcacgatcaactacgcgtacttaccgccttccacgtacgaccaaccgtcgcgccattcaatacgaacgataccgatctcgcgccccaacgaacaataaccgcgtccgccgaaaaccaacaacgacacgccgaacaaacgcaacgaacgactaataaaataaaccatataccattcacccgtatacgtctacaacaacgaaccgtaaccgctcttctacaacgaattctccgacaaataccaactaatcatcatcgttacgtccgaatacaactcgtacgacccgt

SEQ ID NO: 24715 - DNA, 629 bp, Artificial Sequence
  chemically treated genomic DNA (Homo sapiens) CpG-island No: 24715
ttgttttttttcgtagtttataaagtagtagttttagtttttgttgttgtagtagtaggttagtttcgcgttttgttggaagtgtatcggcgagaattttattcgcgtttttgttcggaaggcgaagtgttgttagcggcgcgttacggtcgattgggtgaaggtcgaattgagcgagtcgttgttatagagtcgtaagaagttcgggcgcgcggtgagcgagtcgagggtgtcgtcgaacggaatgcgtagggtttgtagtttcgggttaagcgaattggcgtcgaaatcgtttcgttagttgttcggaacggttgtaggttgttcggttatttgcgggttttttacggttagttgcgcgtgtttgtcgttttttacgtacggttagtcgtcgcgttatttaatgcgggcgatgtcggtttcgcgttttagcgggtagtagtcgcgttcgtcggaggttagtagcggtacgtcgggtaggcgtagcgggcggttggtgaggtaggttatgtattatttattcgtatgcgtttgtagtagcgagtcgtggtcgtttttttgtagcgggtttttcggtaggtgttagttggttattatcgttacgttcgggtgtagttcgtacggttcgt

SEQ ID NO: 24716 - DNA, 629 bp, Artificial Sequence
  chemically treated genomic DNA (Homo sapiens) CpG-island No: 24716
acgaaccgtacgaactacacccgaacgtaacgataataaccaactaacacctaccgaaaaacccgctacaaaaaaacgaccacgactcgctactacaaacgcatacgaataaataatacataacctacctcaccaaccgcccgctacgcctacccgacgtaccgctactaacctccgacgaacgcgactactacccgctaaaacgcgaaaccgacatcgcccgcattaaataacgcgacgactaaccgtacgtaaaaaacgacaaacacgcgcaactaaccgtaaaaaacccgcaaataaccgaacaacctacaaccgttccgaacaactaacgaaacgatttcgacgccaattcgcttaacccgaaactacaaaccctacgcattccgttcgacgacaccctcgactcgctcaccgcgcgcccgaacttcttacgactctataacaacgactcgctcaattcgaccttcacccaatcgaccgtaacgcgccgctaacaacacttcgccttccgaacaaaaacgcgaataaaattctcgccgatacacttccaacaaaacgcgaaactaacctactactacaacaacaaaaactaaaactactactttataaactacgaaaaaaaacaa

SEQ ID NO: 24717 - DNA, 500 bp, Artificial Sequence
  chemically treated genomic DNA (Homo sapiens) CpG-island No: 24717
tgattcggagtagttatttacgttttatttttttgttgacgatattgatattacgcggcgtacgttttttcggaggaaattattagcgtattaaacgcggtttgaggattataggtgttattaaatagcgggtattgatgcggtttatatttgttcgttaatattttattataacgcgcgcgcgggttatcgtagatttgttgcggtgtcgggcggaaatgtgtttcggtatcgaatcgttgatattcggcgttaggtgtacgttagaagatttaattacgtttaagtcgcgttattcgttgtcgtcgttgatatagaatatatcggtaatcgtttgttgcgttagtaggttatcggtattcggtattattcgacgatattgattttttattttgttgtgggtcgttttttttgttgtattagtatgattacgttttgtagtagattaaggggttcgaatttagtaattattagcggacgatgaaaatcgttgcgataaa

SEQ ID NO: 24718 - DNA, 500 bp, Artificial Sequence
  chemically treated genomic DNA (Homo sapiens) CpG-island No: 24718
tttatcgcaacgattttcatcgtccgctaataattactaaattcgaaccccttaatctactacaaaacgtaatcatactaatacaacaaaaaaaacgacccacaacaaaataaaaaatcaatatcgtcgaataataccgaataccgataacctactaacgcaacaaacgattaccgatatattctatatcaacgacgacaacgaataacgcgacttaaacgtaattaaatcttctaacgtacacctaacgccgaatatcaacgattcgataccgaaacacatttccgcccgacaccgcaacaaatctacgataacccgcgcgcgcgttataataaaatattaacgaacaaatataaaccgcatcaatacccgctatttaataacacctataatcctcaaaccgcgtttaatacgctaataatttcctccgaaaaaacgtacgccgcgtaatatcaatatcgtcaacaaaaaaataaaacgtaaataactactccgaatca

SEQ ID NO: 24719 - DNA, 500 bp, Artificial Sequence
  chemically treated genomic DNA (Homo sapiens) CpG-island No: 24719
tttatcgtagcgatttttatcgttcgttggtggttgttggattcgaattttttgatttattataaggcgtggttatgttggtgtagtagaaaaagcggtttatagtaaggtagagaattagtatcgtcgagtggtatcggatgtcggtaatttgttggcgtaataggcgattgtcgatgtgttttgtgttaacggcgatagcgaatggcgcggtttaggcgtgattgaattttttggcgtgtatttgacgtcggatattaacgattcgatgtcgaagtatattttcgttcggtatcgtagtaggtttgcgatgattcgcgcgcgcgttgtggtgaggtattaacgggtaaatgtaagtcgtattaatgttcgttgtttggtaatatttgtaatttttaaatcgcgtttggtgcgttgatggtttttttcgaaggagcgtgcgtcgcgtggtattagtatcgttagtaggagagtgaagcgtgaataattatttcgaatta

SEQ ID NO: 24720 - DNA, 500 bp, Artificial Sequence
  chemically treated genomic DNA (Homo sapiens) CpG-island No: 24720
taattcgaaataattattcacgcttcactctcctactaacgatactaataccacgcgacgcacgctccttcgaaaaaaaccatcaacgcaccaaacgcgatttaaaaattacaaatattaccaaacaacgaacattaatacgacttacatttacccgttaatacctcaccacaacgcgcgcgcgaatcatcgcaaacctactacgataccgaacgaaaatatacttcgacatcgaatcgttaatatccgacgtcaaatacacgccaaaaaattcaatcacgcctaaaccgcgccattcgctatcgccgttaacacaaaacacatcgacaatcgcctattacgccaacaaattaccgacatccgataccactcgacgatactaattctctaccttactataaaccgctttttctactacaccaacataaccacgccttataataaatcaaaaaattcgaatccaacaaccaccaacgaacgataaaaatcgctacgataaa

SEQ ID NO: 24721 - DNA, 640 bp, Artificial Sequence
  chemically treated genomic DNA (Homo sapiens) CpG-island No: 24721
gcggtatgggtattatgatttagagttatcgattgaacgaagtcgattttcgtggtgaacgttttgtcgattggttatgcgattttaaaggtaataacgatttgttggtatttagtaaatcggaagtgatcgtcgttatttataacgtttattttgaagcgggcgcggatattatcgaaattaatatttttaattttacgattattgcgatggcggattattagatggaatttttgtcggcggaaattaattttgcggcggcgaaattggcgcgagtttgtgttgacgagtggatcgcgcgtacgttagagaaatcgcgttacgttgtcggtgttttcggttcgattaatcgtacggcgtttattttttcggacgttaacgattcggtatttcgtaatattatttttgacgggttggtggcggtttatcgagagtttattaaagcgttggtggaaggtggcgcggatttgattttgattgaaatcgttttcgatatttttaacgttaaagcggcggtatttgcggtgaaaacggagtttgaagcgttgggcgttgagttgtcgattatgattttcggtattattatcgacgttttcgggcgtacgtttttcgggtagattatcgaagtatttataattta

SEQ ID NO: 24722 - DNA, 640 bp, Artificial Sequence
  chemically treated genomic DNA (Homo sapiens) CpG-island No: 24722
taaattataaatacttcgataatctacccgaaaaacgtacgcccgaaaacgtcgataataataccgaaaatcataatcgacaactcaacgcccaacgcttcaaactccgttttcaccgcaaataccgccgctttaacgttaaaaatatcgaaaacgatttcaatcaaaatcaaatccgcgccaccttccaccaacgctttaataaactctcgataaaccgccaccaacccgtcaaaaataatattacgaaataccgaatcgttaacgtccgaaaaaataaacgccgtacgattaatcgaaccgaaaacaccgacaacgtaacgcgatttctctaacgtacgcgcgatccactcgtcaacacaaactcgcgccaatttcgccgccgcaaaattaatttccgccgacaaaaattccatctaataatccgccatcgcaataatcgtaaaattaaaaatattaatttcgataatatccgcgcccgcttcaaaataaacgttataaataacgacgatcacttccgatttactaaataccaacaaatcgttattacctttaaaatcgcataaccaatcgacaaaacgttcaccacgaaaatcgacttcgttcaatcgataactctaaatcataatacccataccgc

SEQ ID NO: 24723 - DNA, 640 bp, Artificial Sequence
  chemically treated genomic DNA (Homo sapiens) CpG-island No: 24723
tgagttgtaaatgtttcggtggtttgttcggagagcgtgcgttcggaggcgtcggtgatggtgtcggagattataatcggtagtttaacgtttagcgttttaaatttcgtttttatcgtaaatatcgtcgttttggcgttaagggtgtcgaaaacggttttaattaggattagattcgcgttattttttattagcgttttggtggattttcgataagtcgttattagttcgttaaaagtgatattacgaaatgtcggatcgttgacgttcggagaaatagacgtcgtgcggttggtcgggtcgagaatatcggtaacgtagcgcggtttttttggcgtgcgcgcggtttattcgttagtataagttcgcgttagtttcgtcgtcgtaaagttgattttcgtcgatagggattttatttggtaattcgttatcgtaatggtcgtggagttgaaggtgttggtttcgatgatattcgcgttcgttttaaagtaggcgttgtggatagcggcgattattttcggtttattgagtattagtaggtcgttgttgtttttgaggtcgtatggttagtcggtaaagcgtttattacgaaaatcggtttcgtttagtcgataattttggattatggtgtttatatcgt

SEQ ID NO: 24724 - DNA, 640 bp, Artificial Sequence
  chemically treated genomic DNA (Homo sapiens) CpG-island No: 24724
acgatataaacaccataatccaaaattatcgactaaacgaaaccgattttcgtaataaacgctttaccgactaaccatacgacctcaaaaacaacaacgacctactaatactcaataaaccgaaaataatcgccgctatccacaacgcctactttaaaacgaacgcgaatatcatcgaaaccaacaccttcaactccacgaccattacgataacgaattaccaaataaaatccctatcgacgaaaatcaactttacgacgacgaaactaacgcgaacttatactaacgaataaaccgcgcgcacgccaaaaaaaccgcgctacgttaccgatattctcgacccgaccaaccgcacgacgtctatttctccgaacgtcaacgatccgacatttcgtaatatcacttttaacgaactaataacgacttatcgaaaatccaccaaaacgctaataaaaaataacgcgaatctaatcctaattaaaaccgttttcgacacccttaacgccaaaacgacgatatttacgataaaaacgaaatttaaaacgctaaacgttaaactaccgattataatctccgacaccatcaccgacgcctccgaacgcacgctctccgaacaaaccaccgaaacatttacaactca

SEQ ID NO: 24725 - DNA, 533 bp, Artificial Sequence
  chemically treated genomic DNA (Homo sapiens) CpG-island No: 24725
gtcgagcgtgttcgttcggtaatttattataggtgtacgagggtatataatttcgtgtgttcgagtggttttagcggcgtgggttatttttattacgttggataagttttcgtggtttattaaaaggcggagatcgtattcgaggagcggggtaaagagaaaaggaggtgtcggggggtttattgtgggtcgagtttatattttggggtgtatcgggtcgtttttattttttcgtcggggtcgtttttttcggtcggttttcggagtcgtttttaaggcgttgtggaagttttttcggattttgggcggttcgttcggtgggattcggggtttttcgggggtcggtgggtcggggggtcggtaagcggttcgggggggttaagtttttaaggtatcgtttttcgaaatcggtttttttaattaatataagggaggggcgtaggggggtgcgttttataaatatgttttaagattcgggagggcgttttttttaatttttttttcgaatacgaaaggggaatataattttttaa

SEQ ID NO: 24726 - DNA, 533 bp, Artificial Sequence
  chemically treated genomic DNA (Homo sapiens) CpG-island No: 24726
ttaaaaaattatattcccctttcgtattcgaaaaaaaaattaaaaaaaacgccctcccgaatcttaaaacatatttataaaacgcacccccctacgcccctcccttatattaattaaaaaaaccgatttcgaaaaacgataccttaaaaacttaacccccccgaaccgcttaccgaccccccgacccaccgacccccgaaaaaccccgaatcccaccgaacgaaccgcccaaaatccgaaaaaacttccacaacgccttaaaaacgactccgaaaaccgaccgaaaaaaacgaccccgacgaaaaaataaaaacgacccgatacaccccaaaatataaactcgacccacaataaaccccccgacacctccttttctctttaccccgctcctcgaatacgatctccgccttttaataaaccacgaaaacttatccaacgtaataaaaataacccacgccgctaaaaccactcgaacacacgaaattatataccctcgtacacctataataaattaccgaacgaacacgctcgac

SEQ ID NO: 24727 - DNA, 533 bp, Artificial Sequence
  chemically treated genomic DNA (Homo sapiens) CpG-island No: 24727
ttgggaaattgtgtttttttttcgtattcgggggaaaagttaaagaaaacgttttttcgggttttaaaatatgtttgtgagacgtatttttttgcgttttttttttgtgttgattggggaaatcggtttcgggaagcggtattttgggaatttaattttttcgggtcgtttatcggtttttcggtttatcgattttcggaaaatttcggattttatcggacggatcgtttaaagttcggaagagtttttataacgttttggaagcggtttcggaaatcggtcggaaaaaacggtttcggcggaaaaatgggaacggttcggtatattttagaatataaattcggtttataataagtttttcggtatttttttttttttttgtttcgtttttcgggtacggttttcgttttttggtgaattacggaaatttgtttaacgtggtaaaggtggtttacgtcgttggggttattcggatatacggggttgtatattttcgtatatttgtgatagattgtcgggcgaatacgttcgat

SEQ ID NO: 24728 - DNA, 533 bp, Artificial Sequence
  chemically treated genomic DNA (Homo sapiens) CpG-island No: 24728
atcgaacgtattcgcccgacaatctatcacaaatatacgaaaatatacaaccccgtatatccgaataaccccaacgacgtaaaccacctttaccacgttaaacaaatttccgtaattcaccaaaaaacgaaaaccgtacccgaaaaacgaaacaaaaaaaaaaaaaaataccgaaaaacttattataaaccgaatttatattctaaaatataccgaaccgttcccatttttccgccgaaaccgttttttccgaccgatttccgaaaccgcttccaaaacgttataaaaactcttccgaactttaaacgatccgtccgataaaatccgaaattttccgaaaatcgataaaccgaaaaaccgataaacgacccgaaaaaattaaattcccaaaataccgcttcccgaaaccgatttccccaatcaacacaaaaaaaaaacgcaaaaaaatacgtctcacaaacatattttaaaacccgaaaaaacgttttctttaacttttcccccgaatacgaaaaaaaaacacaatttcccaa

SEQ ID NO: 24729 - DNA, 679 bp, Artificial Sequence
  chemically treated genomic DNA (Homo sapiens) CpG-island No: 24729
  unsure (528)
aaggcgttcgcgtcgtattcggtaattaatgtttgatgcgacgttgtcgcgttttattaggtttataattattgtcgatttgtaggtttgataaggtatttgtgtcgtattcggtaattaatgtttgatgcgacgttgtcgcgttttattaggtttataattgttgtcgatttgtaggtcggataaggtatttgtgtcgtattcggtaattaatgtttgatgcgacgttgtcgcgttttattaggtttataattattgtcgatttgtaggtcggataaagtatttgtgtcgtattcggtaattaatgtttgatgcgacgttgtcgcgttttattaggtttataattgttgtcgattcgtaggtcggataaagcgttcgcgtcgtattcggtagtgtttattcgcggcgatttaaaattttttttttataagttcgtacgttttgtagttattcgttatttgttggcgtatcgtgacgttggtaatatattttttagatcgtttgttacggtaacgatttttgtttttntagtagtgttagacgcgtagtgtaatcgttcgtcgtttttagtttgcgtagtttagcggtaggttttagtaacgtttggaacgatttgaagttgttttttttgagaagggttgtgttatgttttttttttagcgtcgagagagattgggtt

SEQ ID NO: 24730 - DNA, 679 bp, Artificial Sequence
  chemically treated genomic DNA (Homo sapiens) CpG-island No: 24730
  unsure (152)
aacccaatctctctcgacgctaaaaaaaaaacataacacaacccttctcaaaaaaaacaacttcaaatcgttccaaacgttactaaaacctaccgctaaactacgcaaactaaaaacgacgaacgattacactacgcgtctaacactactanaaaaacaaaaatcgttaccgtaacaaacgatctaaaaaatatattaccaacgtcacgatacgccaacaaataacgaataactacaaaacgtacgaacttataaaaaaaaaattttaaatcgccgcgaataaacactaccgaatacgacgcgaacgctttatccgacctacgaatcgacaacaattataaacctaataaaacgcgacaacgtcgcatcaaacattaattaccgaatacgacacaaatactttatccgacctacaaatcgacaataattataaacctaataaaacgcgacaacgtcgcatcaaacattaattaccgaatacgacacaaataccttatccgacctacaaatcgacaacaattataaacctaataaaacgcgacaacgtcgcatcaaacattaattaccgaatacgacacaaataccttatcaaacctacaaatcgacaataattataaacctaataaaacgcgacaacgtcgcatcaaacattaattaccgaatacgacgcgaacgcctt

SEQ ID NO: 24731 - DNA, 679 bp, Artificial Sequence
  chemically treated genomic DNA (Homo sapiens) CpG-island No: 24731
  unsure (152)
aatttagtttttttcggcgttgaggagaaaatatggtatagttttttttaggggaagtagttttaggtcgttttaaacgttgttggaatttatcgttaagttgcgtaagttgaaagcggcgggcgattatattgcgcgtttggtattgttgnaagagtagaaatcgttgtcgtggtaggcggtttgggaaatgtattgttaacgttacgatacgttagtaggtagcgaatggttgtagagcgtgcgggtttatgagaaagaaattttgagtcgtcgcgggtaaatattgtcggatgcggcgcgagcgttttattcggtttacgggtcggtaatagttgtaggtttgataagacgcgatagcgtcgtattaggtattgattgtcggatgcggtataagtgttttattcggtttataggtcggtaatagttgtaggtttgataagacgcgatagcgtcgtattaggtattgattgtcggatgcggtataagtgttttattcggtttataggtcggtaatagttgtaggtttgataagacgcgatagcgtcgtattaggtattgattgtcggatgcggtataagtgttttattaggtttataggtcggtaatagttgtaggtttgataagacgcgatagcgtcgtattaggtattgattgtcggatgcggcgcgagcgtttt

SEQ ID NO: 24732 - DNA, 679 bp, Artificial Sequence
  chemically treated genomic DNA (Homo sapiens) CpG-island No: 24732
  unsure (528)
aaaacgctcgcgccgcatccgacaatcaatacctaatacgacgctatcgcgtcttatcaaacctacaactattaccgacctataaacctaataaaacacttataccgcatccgacaatcaatacctaatacgacgctatcgcgtcttatcaaacctacaactattaccgacctataaaccgaataaaacacttataccgcatccgacaatcaatacctaatacgacgctatcgcgtcttatcaaacctacaactattaccgacctataaaccgaataaaacacttataccgcatccgacaatcaatacctaatacgacgctatcgcgtcttatcaaacctacaactattaccgacccgtaaaccgaataaaacgctcgcgccgcatccgacaatatttacccgcgacgactcaaaatttctttctcataaacccgcacgctctacaaccattcgctacctactaacgtatcgtaacgttaacaatacatttcccaaaccgcctaccacgacaacgatttctactcttncaacaataccaaacgcgcaatataatcgcccgccgctttcaacttacgcaacttaacgataaattccaacaacgtttaaaacgacctaaaactacttcccctaaaaaaaactataccatattttctcctcaacgccgaaaaaaactaaatt

SEQ ID NO: 24733 - DNA, 512 bp, Artificial Sequence
  chemically treated genomic DNA (Homo sapiens) CpG-island No: 24733
cgttattatttgcgcggcgattacggtaggtagtaaataatgaggcgttgggagcgaggttgagagacgtacgggttttatttcgggttcgttttttgttaattttagagaggggaaggtttttcgcgtttcgcgtttcgtttttagttttttaggtttcgttattttttcgcgggtttcgtttaggtttggtttttgtttttgcgttgcgtaggaattcggttgataagaattttagggaaagtcgcgatttagatattgagacgttgatgtgggttcgttacgcgtagacgcgtgacgtttttgtttttggtgtatgttgttaatcgtttagcgatttttttaaggttttcgtgcgttttttgtattttgaggacgtggggtttttagtagtattttggatagatttttgtatcgcgtcggggttgggggttttattttttcgattattttttaaaattatcgattaaaggggtaaaggggtttaaaaataattttttgtaaagtaatta

SEQ ID NO: 24734 - DNA, 512 bp, Artificial Sequence
  chemically treated genomic DNA (Homo sapiens) CpG-island No: 24734
taattactttacaaaaaattatttttaaacccctttacccctttaatcgataattttaaaaaataatcgaaaaaataaaacccccaaccccgacgcgatacaaaaatctatccaaaatactactaaaaaccccacgtcctcaaaatacaaaaaacgcacgaaaaccttaaaaaaatcgctaaacgattaacaacatacaccaaaaacaaaaacgtcacgcgtctacgcgtaacgaacccacatcaacgtctcaatatctaaatcgcgactttccctaaaattcttatcaaccgaattcctacgcaacgcaaaaacaaaaaccaaacctaaacgaaacccgcgaaaaaataacgaaacctaaaaaactaaaaacgaaacgcgaaacgcgaaaaaccttcccctctctaaaattaacaaaaaacgaacccgaaataaaacccgtacgtctctcaacctcgctcccaacgcctcattatttactacctaccgtaatcgccgcgcaaataataacg

SEQ ID NO: 24735 - DNA, 512 bp, Artificial Sequence
  chemically treated genomic DNA (Homo sapiens) CpG-island No: 24735
tggttgttttataagaggttgtttttgggtttttttgtttttttaatcggtggttttgggaaataatcggggggataaaatttttaatttcggcgcgatgtagaaatttgtttagggtattattggggattttacgtttttaaggtataagaagcgtacggggattttgggaaggtcgttagacggttaataatatatattaggagtagaaacgttacgcgtttgcgcgtagcggatttatattagcgttttagtgtttgaatcgcggttttttttggggtttttgttagtcgaatttttgcgtagcgtagggatagaagttaggtttgggcgggattcgcggggaggtagcggggtttgaggagttaggggcggggcgcgaagcgcgagagatttttttttttttagaattggtagaaggcgggttcggggtgggattcgtgcgttttttaatttcgtttttagcgttttattgtttgttgtttgtcgtggtcgtcgcgtaggtgatgacg

SEQ ID NO: 24736 - DNA, 512 bp, Artificial Sequence
  chemically treated genomic DNA (Homo sapiens) CpG-island No: 24736
cgtcatcacctacgcgacgaccacgacaaacaacaaacaataaaacgctaaaaacgaaattaaaaaacgcacgaatcccaccccgaacccgccttctaccaattctaaaaaaaaaaaaatctctcgcgcttcgcgccccgcccctaactcctcaaaccccgctacctccccgcgaatcccgcccaaacctaacttctatccctacgctacgcaaaaattcgactaacaaaaaccccaaaaaaaaccgcgattcaaacactaaaacgctaatataaatccgctacgcgcaaacgcgtaacgtttctactcctaatatatattattaaccgtctaacgaccttcccaaaatccccgtacgcttcttataccttaaaaacgtaaaatccccaataataccctaaacaaatttctacatcgcgccgaaattaaaaattttatccccccgattatttcccaaaaccaccgattaaaaaaacaaaaaaacccaaaaacaacctcttataaaacaacca

SEQ ID NO: 24737 - DNA, 1109 bp, Artificial Sequence
  chemically treated genomic DNA (Homo sapiens) CpG-island No: 24737
  unsure (225, 246, 250, 252..)
gtcgattttagggtagggcgcgggtcgtgattgtgtttgggggtttttggatattgtgagggcgttgggttagcgagggggttgtgggcgattcggggggttgcgttggggggtggggggatagggggatgcgtatttatatttttttattgggtcgattgttattatgttgttggatcggtgggttatcgtgcgcggacgtacgtgtaaagcgcggtttaaatnggcgtgggtaaagtatttatnggtntnnaggtttcgtttggattaatcggttagatttgggcggaaaaggggttaacgggggggaagcgacggacgtagtcgaggttgggttgcgcggtattaagggcgttatagtcgcgacggggttggtttgtggcggtagttacgtcggattgtgtttatgcggtttcgtatgggatggtatcggcgggtttagatgtacgacggcgatgggacgggacggtaaagcgcggggggggggaaggggcgggacgtgggtttattggcgggagatttgtagatacgcggcgttgggatagttatcgaattatagttattggtacgtgttcgcggatcggttggtaatcggggttatattgtttagaagattgtcgcggttatttttgatagttggtttgtttggagaatgggaaagtcgggagtgcgcggtgttgtgggcgagtattatcgggcgttggtattggagtgtgaggaatatgcgaatgttgggtaacgggacgtcggggggataaggttttgtttgcgcgggttattttaagtttgtgggtcggttttgatgcgtaggtgttacgatatatgttgcgggtaggggtttgggcgtgtatttttttggagaatggtgaataagggcggagaatggtttgcgaaatgagattgtttgggtaggttaatgaaggacggtcgcgggaggggaggcgtggttgggattacgcgcgaaaatatgtagttgttttattttagggggttattacggtcgcgtgtagggtgaacgggtaggtggttgtagtttttttattggtggtgatttgggaaaagggtgttgatcgtttagtcggcgggtaagatggtaggtggttggggag

SEQ ID NO: 24738 - DNA, 1109 bp, Artificial Sequence
  chemically treated genomic DNA (Homo sapiens) CpG-island No: 24738
  unsure (857..858, 860, 864, 885)
ctccccaaccacctaccatcttacccgccgactaaacgatcaacacccttttcccaaatcaccaccaataaaaaaactacaaccacctacccgttcaccctacacgcgaccgtaataaccccctaaaataaaacaactacatattttcgcgcgtaatcccaaccacgcctcccctcccgcgaccgtccttcattaacctacccaaacaatctcatttcgcaaaccattctccgcccttattcaccattctccaaaaaaatacacgcccaaacccctacccgcaacatatatcgtaacacctacgcatcaaaaccgacccacaaacttaaaataacccgcgcaaacaaaaccttatccccccgacgtcccgttacccaacattcgcatattcctcacactccaataccaacgcccgataatactcgcccacaacaccgcgcactcccgactttcccattctccaaacaaaccaactatcaaaaataaccgcgacaatcttctaaacaatataaccccgattaccaaccgatccgcgaacacgtaccaataactataattcgataactatcccaacgccgcgtatctacaaatctcccgccaataaacccacgtcccgccccttccccccccccgcgctttaccgtcccgtcccatcgccgtcgtacatctaaacccgccgataccatcccatacgaaaccgcataaacacaatccgacgtaactaccgccacaaaccaaccccgtcgcgactataacgcccttaataccgcgcaacccaacctcgactacgtccgtcgcttcccccccgttaaccccttttccgcccaaatctaaccgattaatccaaacgaaacctnnanaccnataaatactttacccacgccnatttaaaccgcgctttacacgtacgtccgcgcacgataacccaccgatccaacaacataataacaatcgacccaataaaaaaatataaatacgcatccccctatccccccaccccccaacgcaaccccccgaatcgcccacaaccccctcgctaacccaacgccctcacaatatccaaaaacccccaaacacaatcacgacccgcgccctaccctaaaatcgac

SEQ ID NO: 24739 - DNA, 1109 bp, Artificial Sequence
  chemically treated genomic DNA (Homo sapiens) CpG-island No: 24739
  unsure (857..858, 860, 864, 885)
ttttttagttatttattattttattcgtcggttaggcgattaatattttttttttaagttattattagtaaaggaattgtaattatttgttcgtttattttatacgcggtcgtaatagttttttaaagtaaggtaattatatgttttcgcgcgtagttttagttacgttttttttttcgcggtcgttttttattagtttatttaagtaattttatttcgtaaattatttttcgtttttatttattattttttaagggggtgtacgtttaagtttttattcgtagtatatatcgtagtatttacgtattaaagtcggtttataaatttgggatggttcgcgtaagtagggttttgttttttcggcgtttcgttgtttaatattcgtatgttttttatattttaatattagcgttcggtaatattcgtttataatatcgcgtattttcggtttttttattttttaggtaggttagttattaaaaataatcgcggtaattttttgggtagtataatttcggttgttaatcggttcgcgggtacgtgttagtaattgtggttcgatgattattttaacgtcgcgtgtttataggtttttcgttaataagtttacgtttcgtttttttttttttttcgcgttttgtcgtttcgttttatcgtcgtcgtgtatttggattcgtcggtattattttatacgaagtcgtataagtatagttcgacgtgattatcgttataggttaatttcgtcgcggttgtaacgtttttaatgtcgcgtagtttaatttcggttacgttcgtcgtttttttttcgttaatttttttttcgtttaggtttaatcgattagtttaggcgagatttnngngttngtgggtattttatttacgttnatttgagtcgcgttttgtacgtacgttcgcgtacggtagtttatcggtttagtaatataatagtagtcggtttaataaaaaaatataagtgcgtatttttttatttttttattttttagcgtagtttttcgggtcgtttataattttttcgttggtttaacgtttttatagtatttaaaaatttttaaatataattacggttcgcgttttattttgaaatcggt

SEQ ID NO: 24740 - DNA, 1109 bp, Artificial Sequence
  chemically treated genomic DNA (Homo sapiens) CpG-island No: 24740
  unsure (225, 246, 250, 252..)
accgatttcaaaataaaacgcgaaccgtaattatatttaaaaatttttaaatactataaaaacgttaaaccaacgaaaaaattataaacgacccgaaaaactacgctaaaaaataaaaaaataaaaaaatacgcacttatatttttttattaaaccgactactattatattactaaaccgataaactaccgtacgcgaacgtacgtacaaaacgcgactcaaatnaacgtaaataaaatacccacnaacncnnaaatctcgcctaaactaatcgattaaacctaaacgaaaaaaaaattaacgaaaaaaaaacgacgaacgtaaccgaaattaaactacgcgacattaaaaacgttacaaccgcgacgaaattaacctataacgataatcacgtcgaactatacttatacgacttcgtataaaataataccgacgaatccaaatacacgacgacgataaaacgaaacgacaaaacgcgaaaaaaaaaaaaaaacgaaacgtaaacttattaacgaaaaacctataaacacgcgacgttaaaataatcatcgaaccacaattactaacacgtacccgcgaaccgattaacaaccgaaattatactacccaaaaaattaccgcgattatttttaataactaacctacctaaaaaataaaaaaaccgaaaatacgcgatattataaacgaatattaccgaacgctaatattaaaatataaaaaacatacgaatattaaacaacgaaacgccgaaaaaacaaaaccctacttacgcgaaccatcccaaatttataaaccgactttaatacgtaaatactacgatatatactacgaataaaaacttaaacgtacacccccttaaaaaataataaataaaaacgaaaaataatttacgaaataaaattacttaaataaactaataaaaaacgaccgcgaaaaaaaaaacgtaactaaaactacgcgcgaaaacatataattaccttactttaaaaaactattacgaccgcgtataaaataaacgaacaaataattacaattcctttactaataataacttaaaaaaaaaatattaatcgcctaaccgacgaataaaataataaataactaaaaaa

SEQ ID NO: 24741 - DNA, 553 bp, Artificial Sequence
  chemically treated genomic DNA (Homo sapiens) CpG-island No: 24741
cgttttttgcgattcgtagttttttaattttaggttttgagtagttaatttcgggcggcgcgtttttttcggcggttggttcgggttagattttttacgttaattatttttgaagaggagtcggttcggttcgcgttgttatggcgatgggttgggcgtttcggcgttttttggagacgttaaggtcggtagggagtcggggaggggcgaatagagtttttttcgtttttttttttcgtttcggagggcgagagaggaaggggtcgttttcgtgtaggttcggcgggtaaggcgtttttagttagagcgagagtaacggaggcgacggttcggtatgacgagttttcgcggggattcggttattttagggtttgggcggttttcgttttgggttttgcggtttacgttttgcgtcggcgttgttatggtaatcgttgcgcgtttgggaagcgcgtttacgtcgattttttagtttcgtttttttggttcggcggggggcgtttagagaggatgttagatttagacggtagggatgggggtagagtcgtttaag

SEQ ID NO: 24742 - DNA, 553 bp, Artificial Sequence
  chemically treated genomic DNA (Homo sapiens) CpG-island No: 24742
cttaaacgactctacccccatccctaccgtctaaatctaacatcctctctaaacgccccccgccgaaccaaaaaaacgaaactaaaaaatcgacgtaaacgcgcttcccaaacgcgcaacgattaccataacaacgccgacgcaaaacgtaaaccgcaaaacccaaaacgaaaaccgcccaaaccctaaaataaccgaatccccgcgaaaactcgtcataccgaaccgtcgcctccgttactctcgctctaactaaaaacgccttacccgccgaacctacacgaaaacgaccccttcctctctcgccctccgaaacgaaaaaaaaaaacgaaaaaaactctattcgcccctccccgactccctaccgaccttaacgtctccaaaaaacgccgaaacgcccaacccatcgccataacaacgcgaaccgaaccgactcctcttcaaaaataattaacgtaaaaaatctaacccgaaccaaccgccgaaaaaaacgcgccgcccgaaattaactactcaaaacctaaaattaaaaaactacgaatcgcaaaaaacg

SEQ ID NO: 24743 - DNA, 553 bp, Artificial Sequence
  chemically treated genomic DNA (Homo sapiens) CpG-island No: 24743
tttgggcgattttgtttttatttttgtcgtttgggtttagtattttttttgggcgtttttcgtcgggttaggagggcggagttggagagtcggcgtgaacgcgttttttaggcgcgtagcggttattatggtagcgtcggcgtagagcgtagatcgtagggtttagggcggaggtcgtttaagttttggggtgatcgaattttcgcggggattcgttatgtcgggtcgtcgttttcgttgttttcgttttaattgggggcgttttgttcgtcgagtttgtacggaggcggtttttttttttttcgtttttcgaggcgggggaggggggcggggggggttttgttcgttttttttcggttttttgtcgattttggcgtttttaggaaacgtcggagcgtttagtttatcgttatggtaacgcgggtcgggtcggtttttttttagggatgattgacgtagggggtttggttcgggttaatcgtcggggagggcgcgtcgttcgggattaattgtttagggtttagagttgggaagttgcgggtcgtagggggcg

SEQ ID NO: 24744 - DNA, 553 bp, Artificial Sequence
  chemically treated genomic DNA (Homo sapiens) CpG-island No: 24744
cgccccctacgacccgcaacttcccaactctaaaccctaaacaattaatcccgaacgacgcgccctccccgacgattaacccgaaccaaaccccctacgtcaatcatccctaaaaaaaaaccgacccgacccgcgttaccataacgataaactaaacgctccgacgtttcctaaaaacgccaaaatcgacaaaaaaccgaaaaaaaacgaacaaaaccccccccgcccccctcccccgcctcgaaaaacgaaaaaaaaaaaaaccgcctccgtacaaactcgacgaacaaaacgcccccaattaaaacgaaaacaacgaaaacgacgacccgacataacgaatccccgcgaaaattcgatcaccccaaaacttaaacgacctccgccctaaaccctacgatctacgctctacgccgacgctaccataataaccgctacgcgcctaaaaaacgcgttcacgccgactctccaactccgccctcctaacccgacgaaaaacgcccaaaaaaaatactaaacccaaacgacaaaaataaaaacaaaatcgcccaaa

SEQ ID NO: 24745 - DNA, 1151 bp, Artificial Sequence
  chemically treated genomic DNA (Homo sapiens) CpG-island No: 24745
gttcgtttcggaaaatttcgttgatttcgatttttatgcgttcgtagtttcgcgtatttacgtttcgaggaggtttcgcgattttcgagattcgttcggggatttcgcgcgtttttttaaatttcgcgttttcgggtttcgcgcgttttcgttaatttcgcgatttttggagtcgtttcggtttcgttcgtttattttcgtttagcgtttttcgggtcgttcgttaatttttaatttcggcgattttttagggtttcgcgcgtttttcgttaatttcgtgtttttcgggggtcgcgcgttttcgttaatttcgcgatttttcgagcgcgtttaggttcgcgtttttcgtcgttcgcgtttacgtgtttcgcgcggtgttcgttcgcgtcggagtttacggaagagcgcggacgtcgagtttcgttttcggtttcgtatttatttttcgcgggtttggttgtcggagggtacggtcgaatttttgttttttttggcgtatatgttgttttacgtcgtcgtcgtcggggtttatatttgttaggcggcgtcgcgggtcgcgtttgtcgtcgttatagttatttcgcgtttcgggttttatcgtttcgagttttaggcgggtacggtaggtatcgttcgcgcgggggagttttagacggtcgcggcggcggcggtagcggcggttttagtttcggtttcggtcgtagggtggtttttttttttttttttttttcgcgcgggttgtttcgggaaacgcgcgttttttttttttcgtcgcgcgcgttttcgttcgttgtttttacgtcgttcgcgggcgtagtttttaaaggggcgatggcgggcgcgcgggtgggtttcgtcgtcggagcgcgtacgcgtagtgttcgtcgcggggggtgggggcgcggttatatattcgcgggttaggatttcggacggttatttagggacgtatagttgatcgcggttgtatacgcgcgcgtgtatatatacgtttatttattttaaatggagtcggttatttatattgttgtatatttagttatatatattcgtagcgatatttaatatagcgttttatatagtaaaagtgtatttcgttgttggaacgattgcggatagttttataaagttttaggtagtgatattgggtg

SEQ ID NO: 24746 - DNA, 1151 bp, Artificial Sequence
  chemically treated genomic DNA (Homo sapiens) CpG-island No: 24746
cacccaatatcactacctaaaactttataaaactatccgcaatcgttccaacaacgaaatacacttttactatataaaacgctatattaaatatcgctacgaatatatataactaaatatacaacaatataaataaccgactccatttaaaataaataaacgtatatatacacgcgcgcgtatacaaccgcgatcaactatacgtccctaaataaccgtccgaaatcctaacccgcgaatatataaccgcgcccccaccccccgcgacgaacactacgcgtacgcgctccgacgacgaaacccacccgcgcgcccgccatcgcccctttaaaaactacgcccgcgaacgacgtaaaaacaacgaacgaaaacgcgcgcgacgaaaaaaaaaaaacgcgcgtttcccgaaacaacccgcgcgaaaaaaaaaaaaaaaaaaaaaccaccctacgaccgaaaccgaaactaaaaccgccgctaccgccgccgccgcgaccgtctaaaactcccccgcgcgaacgatacctaccgtacccgcctaaaactcgaaacgataaaacccgaaacgcgaaataactataacgacgacaaacgcgacccgcgacgccgcctaacaaatataaaccccgacgacgacgacgtaaaacaacatatacgccaaaaaaaacaaaaattcgaccgtaccctccgacaaccaaacccgcgaaaaataaatacgaaaccgaaaacgaaactcgacgtccgcgctcttccgtaaactccgacgcgaacgaacaccgcgcgaaacacgtaaacgcgaacgacgaaaaacgcgaacctaaacgcgctcgaaaaatcgcgaaattaacgaaaacgcgcgacccccgaaaaacacgaaattaacgaaaaacgcgcgaaaccctaaaaaatcgccgaaattaaaaattaacgaacgacccgaaaaacgctaaacgaaaataaacgaacgaaaccgaaacgactccaaaaatcgcgaaattaacgaaaacgcgcgaaacccgaaaacgcgaaatttaaaaaaacgcgcgaaatccccgaacgaatctcgaaaatcgcgaaacctcctcgaaacgtaaatacgcgaaactacgaacgcataaaaatcgaaatcaacgaaattttccgaaacgaac

SEQ ID NO: 24747 - DNA, 1151 bp, Artificial Sequence
  chemically treated genomic DNA (Homo sapiens) CpG-island No: 24747
tatttaatgttattgtttgaggttttatggggttattcgtagtcgttttagtagcggggtatatttttgttgtgtggagcgttatgttgagtgtcgttgcgaatgtgtgtggttgggtgtataataatgtgggtggtcggttttatttgaggtgagtgaacgtgtgtgtgtacgcgcgcgtgtgtagtcgcgattagttgtgcgtttttgggtggtcgttcgggattttgattcgcgagtgtgtagtcgcgtttttatttttcgcggcgggtattgcgcgtgcgcgtttcggcggcgggatttattcgcgcgttcgttatcgtttttttaagagttgcgttcgcgggcggcgtagaggtagcgggcgggggcgcgcgcggcgggaggaggggagcgcgcgtttttcggaatagttcgcgcggaggaaagggaggaaaaaaagttattttgcggtcggggtcggagttggagtcgtcgttgtcgtcgtcgtcgcggtcgtttggagttttttcgcgcggacgatgtttgtcgtgttcgtttggggttcggggcggtgaggttcggggcgcggggtagttatggcgacggtaagcgcggttcgcggcgtcgtttgataggtgtgggtttcggcggcggcggcgtggagtagtatgtacgttaaggggggtaagggttcggtcgtgtttttcgatagttaggttcgcgagaagtgagtgcggggtcgggggcggggttcggcgttcgcgttttttcgtgggtttcggcgcgggcgggtatcgcgcggggtacgtgggcgcgggcggcggggagcgcgagtttgagcgcgttcgaggggtcgcgagattggcgggggcgcgcgattttcgaggggtacgagattggcggggggcgcgcgagattttgaggggtcgtcggagttgagggttggcgggcgattcgaggggcgttagacgggagtggacgggcgagatcggagcggttttaggggtcgcgagattggcgggggcgcgcgaaattcgagggcgcgagatttgagggggcgcgcgagattttcgagcgggtttcgggggtcgcgaggttttttcgagacgtgggtgcgcgaggttgcggacgtatggggatcgaggttagcgaagtttttcgggacgaat

SEQ ID NO: 24748 - DNA, 1151 bp, Artificial Sequence
  chemically treated genomic DNA (Homo sapiens) CpG-island No: 24748
attcgtcccgaaaaacttcgctaacctcgatccccatacgtccgcaacctcgcgcacccacgtctcgaaaaaacctcgcgacccccgaaacccgctcgaaaatctcgcgcgccccctcaaatctcgcgccctcgaatttcgcgcgcccccgccaatctcgcgacccctaaaaccgctccgatctcgcccgtccactcccgtctaacgcccctcgaatcgcccgccaaccctcaactccgacgacccctcaaaatctcgcgcgccccccgccaatctcgtacccctcgaaaatcgcgcgcccccgccaatctcgcgacccctcgaacgcgctcaaactcgcgctccccgccgcccgcgcccacgtaccccgcgcgatacccgcccgcgccgaaacccacgaaaaaacgcgaacgccgaaccccgcccccgaccccgcactcacttctcgcgaacctaactatcgaaaaacacgaccgaacccttaccccccttaacgtacatactactccacgccgccgccgccgaaacccacacctatcaaacgacgccgcgaaccgcgcttaccgtcgccataactaccccgcgccccgaacctcaccgccccgaaccccaaacgaacacgacaaacatcgtccgcgcgaaaaaactccaaacgaccgcgacgacgacgacaacgacgactccaactccgaccccgaccgcaaaataactttttttcctccctttcctccgcgcgaactattccgaaaaacgcgcgctcccctcctcccgccgcgcgcgcccccgcccgctacctctacgccgcccgcgaacgcaactcttaaaaaaacgataacgaacgcgcgaataaatcccgccgccgaaacgcgcacgcgcaatacccgccgcgaaaaataaaaacgcgactacacactcgcgaatcaaaatcccgaacgaccacccaaaaacgcacaactaatcgcgactacacacgcgcgcgtacacacacacgttcactcacctcaaataaaaccgaccacccacattattatacacccaaccacacacattcgcaacgacactcaacataacgctccacacaacaaaaatataccccgctactaaaacgactacgaataaccccataaaacctcaaacaataacattaaata

SEQ ID NO: 24749 - DNA, 761 bp, Artificial Sequence
  chemically treated genomic DNA (Homo sapiens) CpG-island No: 24749
tgcgttgtttgtcggtgtggcggcgattgttggtttggtcggattcggggggcgtggttagtcgcgttttatgaataatgtagcgcgttagcgggcggcggggcggggcgtggtcggcgtggcggcgttggagtcgggaagggggcgcgggggagagatggtcgtaagatggcggcgttgaaggaggataggagttacgggttgtcgtgcgggcgggttagcgacggtagtaaggtgtcggtgttttacgtgaagtttatcgatagtgttttgagggttttcgagagttatcgcgttagataggtgagtggtatggcgttcggcgcgttagtggggaacgttcggacgcgggtcggtttcgcgttttttttattgaggcgttcgggttcggagacgttaggtttgtggtgttgttcgcgggtttttgggtcggcggggcgcggagtgggcgttagttcggtttggagcgttgagaatcgcgtttttttttagtattaggaggtaatataggcgggtggttcggggttgttgaggggtttagattcgcgcgtcgggttcggggggcgtcggtgtcggtatttggcggcgttcggggtttttttggtttgttgggtatttgggtagggtttagtttgcgtatttggcggcggggcgaggaggcggtgggtcgtacggtttcggtatcgtgatagggggaagttgggggtttttttatttggggtcggggtagcgtcgttggtgggggtgattgtgtttgtttt

SEQ ID NO: 24750 - DNA, 761 bp, Artificial Sequence
  chemically treated genomic DNA (Homo sapiens) CpG-island No: 24750
aaaacaaacacaatcacccccaccaacgacgctaccccgaccccaaataaaaaaacccccaacttccccctatcacgataccgaaaccgtacgacccaccgcctcctcgccccgccgccaaatacgcaaactaaaccctacccaaatacccaacaaaccaaaaaaaccccgaacgccgccaaataccgacaccgacgccccccgaacccgacgcgcgaatctaaacccctcaacaaccccgaaccacccgcctatattacctcctaatactaaaaaaaaacgcgattctcaacgctccaaaccgaactaacgcccactccgcgccccgccgacccaaaaacccgcgaacaacaccacaaacctaacgtctccgaacccgaacgcctcaataaaaaaaacgcgaaaccgacccgcgtccgaacgttccccactaacgcgccgaacgccataccactcacctatctaacgcgataactctcgaaaaccctcaaaacactatcgataaacttcacgtaaaacaccgacaccttactaccgtcgctaacccgcccgcacgacaacccgtaactcctatcctccttcaacgccgccatcttacgaccatctctcccccgcgcccccttcccgactccaacgccgccacgccgaccacgccccgccccgccgcccgctaacgcgctacattattcataaaacgcgactaaccacgccccccgaatccgaccaaaccaacaatcgccgccacaccgacaaacaacgca

SEQ ID NO: 24751 - DNA, 761 bp, Artificial Sequence
  chemically treated genomic DNA (Homo sapiens) CpG-island No: 24751
aggatagatatagttatttttattaacggcgttgtttcggttttagatggaaaagtttttagtttttttttattacggtgtcgggatcgtgcggtttatcgttttttcgtttcgtcgttaggtgcgtaaattggattttgtttaggtgtttagtaggttagaaaggtttcggacgtcgttaggtgtcgatatcgacgtttttcgggttcggcgcgcgagtttgggttttttagtagtttcgggttattcgtttgtattgttttttagtgttgagaaggaacgcggtttttagcgttttaggtcggattggcgtttatttcgcgtttcgtcggtttagggattcgcgagtagtattatagatttagcgttttcgagttcggacgttttagtgaggggagcgcgaggtcggttcgcgttcggacgttttttattggcgcgtcgggcgttatgttatttatttgtttggcgcggtagttttcgaaggtttttagggtattgtcggtgagttttacgtggaatatcgatattttgttgtcgtcgttaattcgttcgtacgatagttcgtagtttttatttttttttagcgtcgttattttgcgattatttttttttcgcgtttttttttcggttttagcgtcgttacgtcggttacgtttcgtttcgtcgttcgttgacgcgttgtattatttatgagacgcggttggttacgtttttcgagttcgattaaattaatagtcgtcgttatatcggtaggtagcgta

SEQ ID NO: 24752 - DNA, 761 bp, Artificial Sequence
  chemically treated genomic DNA (Homo sapiens) CpG-island No: 24752
tacgctacctaccgatataacgacgactattaatttaatcgaactcgaaaaacgtaaccaaccgcgtctcataaataatacaacgcgtcaacgaacgacgaaacgaaacgtaaccgacgtaacgacgctaaaaccgaaaaaaaaacgcgaaaaaaaaataatcgcaaaataacgacgctaaaaaaaaataaaaactacgaactatcgtacgaacgaattaacgacgacaacaaaatatcgatattccacgtaaaactcaccgacaataccctaaaaaccttcgaaaactaccgcgccaaacaaataaataacataacgcccgacgcgccaataaaaaacgtccgaacgcgaaccgacctcgcgctcccctcactaaaacgtccgaactcgaaaacgctaaatctataatactactcgcgaatccctaaaccgacgaaacgcgaaataaacgccaatccgacctaaaacgctaaaaaccgcgttccttctcaacactaaaaaacaatacaaacgaataacccgaaactactaaaaaacccaaactcgcgcgccgaacccgaaaaacgtcgatatcgacacctaacgacgtccgaaacctttctaacctactaaacacctaaacaaaatccaatttacgcacctaacgacgaaacgaaaaaacgataaaccgcacgatcccgacaccgtaataaaaaaaaactaaaaacttttccatctaaaaccgaaacaacgccgttaataaaaataactatatctatcct

SEQ ID NO: 24753 - DNA, 610 bp, Artificial Sequence
  chemically treated genomic DNA (Homo sapiens) CpG-island No: 24753
gtatttttcgggtcgtttttttcgaggggtttttcgaggtttttcgtttttatcgggttttgtttcggttgttttcgacggcgttaggtcgtgggacgtgatacgatcgttgcggcgttagtttagttttgtaagattttaggcgttcgcgttgtatttgcgattgtcgtcgtcgtcgtcgtagtcggattaattgttggtagaattttcgttcgtacggttttagttggagttgtatttgcggtcgtaagtcgttagggggcgtcgtagagcgcgtgcgcgtaacggggatttattgtttcgttcgggttcgggcgttgttgtcgtaggtatacggttcgcgcgtcgttggaagatttgggttgggtcgattgggtgttgtcgttacgggaggtgtaagtgattatgtgtatcggcgcgtgttcgagttagtttcgggcggtaaatatgtacgcgtagattaagacgagtttgtatcgtttgaagttcgatacggtgttagcgttttgttgcgtgttcgttagttataattttatggtgtttatttaaaagatcgatatcggggtgtcgttttagatttatgatgatttgttagttaaagattgttatt

SEQ ID NO: 24754 - DNA, 610 bp, Artificial Sequence
  chemically treated genomic DNA (Homo sapiens) CpG-island No: 24754
aataacaatctttaactaacaaatcatcataaatctaaaacgacaccccgatatcgatcttttaaataaacaccataaaattataactaacgaacacgcaacaaaacgctaacaccgtatcgaacttcaaacgatacaaactcgtcttaatctacgcgtacatatttaccgcccgaaactaactcgaacacgcgccgatacacataatcacttacacctcccgtaacgacaacacccaatcgacccaacccaaatcttccaacgacgcgcgaaccgtatacctacgacaacaacgcccgaacccgaacgaaacaataaatccccgttacgcgcacgcgctctacgacgccccctaacgacttacgaccgcaaatacaactccaactaaaaccgtacgaacgaaaattctaccaacaattaatccgactacgacgacgacgacgacaatcgcaaatacaacgcgaacgcctaaaatcttacaaaactaaactaacgccgcaacgatcgtatcacgtcccacgacctaacgccgtcgaaaacaaccgaaacaaaacccgataaaaacgaaaaacctcgaaaaacccctcgaaaaaaacgacccgaaaaatac

SEQ ID NO: 24755 - DNA, 610 bp, Artificial Sequence
  chemically treated genomic DNA (Homo sapiens) CpG-island No: 24755
agtggtagtttttggttaataagttattataggtttggagcgatatttcggtgtcggttttttgaatgagtattatgggattgtagttggcgggtacgtagtagggcgttggtatcgtgtcgggttttaggcggtgtaggttcgttttgatttgcgcgtgtatgtttgtcgttcggaattggttcgggtacgcgtcgatgtatatggttatttgtatttttcgtggcgatagtatttaatcggtttagtttaggttttttagcgacgcgcggatcgtgtgtttacggtaataacgttcgggttcgagcgggatagtgggttttcgttgcgcgtacgcgttttgcggcgttttttggcggtttgcggtcgtaagtgtaattttagttggggtcgtgcggacgaagattttgttagtagttggttcgattgcgacggcggcggcgatagtcgtaggtgtagcgcgggcgtttggggttttgtaaggttgagttgacgtcgtagcggtcgtgttacgttttacgatttgacgtcgtcggggatagtcggaatagagttcggtgaaggcgggaggtttcggggagtttttcgggaagggcggttcgagagatat

SEQ ID NO: 24756 - DNA, 610 bp, Artificial Sequence
  chemically treated genomic DNA (Homo sapiens) CpG-island No: 24756
atatctctcgaaccgcccttcccgaaaaactccccgaaacctcccgccttcaccgaactctattccgactatccccgacgacgtcaaatcgtaaaacgtaacacgaccgctacgacgtcaactcaaccttacaaaaccccaaacgcccgcgctacacctacgactatcgccgccgccgtcgcaatcgaaccaactactaacaaaatcttcgtccgcacgaccccaactaaaattacacttacgaccgcaaaccgccaaaaaacgccgcaaaacgcgtacgcgcaacgaaaacccactatcccgctcgaacccgaacgttattaccgtaaacacacgatccgcgcgtcgctaaaaaacctaaactaaaccgattaaatactatcgccacgaaaaatacaaataaccatatacatcgacgcgtacccgaaccaattccgaacgacaaacatacacgcgcaaatcaaaacgaacctacaccgcctaaaacccgacacgataccaacgccctactacgtacccgccaactacaatcccataatactcattcaaaaaaccgacaccgaaatatcgctccaaacctataataacttattaaccaaaaactaccact

SEQ ID NO: 24757 - DNA, 546 bp, Artificial Sequence
  chemically treated genomic DNA (Homo sapiens) CpG-island No: 24757
gtcgggtcggttttttgagatttcggcgtagtgtcggttagtgggtgttgtcgttgttttttatattaacgcgtagtcgaatttgttcgcgttcgagcgtttttttgtggtcgtgtttaggacgatgcgggtatgttgtgtttgtaggggtcgagtaggatgcgtacgtagttgtattattaatagtattagtattacgagtaggtagagtacgaagtgcgaatatcgtgttgtttgtttcgcgtttagtgttttgcgtttatcggggtgtttcgtcgacggttgtgtagtggtgtttttgtgttgatatgttgtttacgtcgcgtttatggtttatatcgtcgcgttgttttgcggaggagtgggattcgtttttgggcgtcggggatgaggtttgttgttttttttttcgcgtttttttcgtttcgtttttttatagttgcgatagtcgcgatttttttaacgtgtcgataataatttttagatagagtttcggtaacgcggataagtttatattaagtttagttaaatataagtaataataaa

SEQ ID NO: 24758 - DNA, 546 bp, Artificial Sequence
  chemically treated genomic DNA (Homo sapiens) CpG-island No: 24758
tttattattacttatatttaactaaacttaatataaacttatccgcgttaccgaaactctatctaaaaattattatcgacacgttaaaaaaatcgcgactatcgcaactataaaaaaacgaaacgaaaaaaacgcgaaaaaaaaaacaacaaacctcatccccgacgcccaaaaacgaatcccactcctccgcaaaacaacgcgacgatataaaccataaacgcgacgtaaacaacatatcaacacaaaaacaccactacacaaccgtcgacgaaacaccccgataaacgcaaaacactaaacgcgaaacaaacaacacgatattcgcacttcgtactctacctactcgtaatactaatactattaataatacaactacgtacgcatcctactcgacccctacaaacacaacatacccgcatcgtcctaaacacgaccacaaaaaaacgctcgaacgcgaacaaattcgactacgcgttaatataaaaaacaacgacaacacccactaaccgacactacgccgaaatctcaaaaaaccgacccgac

SEQ ID NO: 24759 - DNA, 546 bp, Artificial Sequence
  chemically treated genomic DNA (Homo sapiens) CpG-island No: 24759
tttgttgttgtttgtatttggttgggtttggtatgggtttattcgcgttatcggagttttgtttggggattgttatcggtacgttaagggagtcgcggttgtcgtagttatgagggggcgaagcggaggaggcgcgggagggagggtagtaagttttattttcggcgtttaggggcgggttttattttttcgtagggtagcgcggcgatgtgagttatgagcgcgacgtggatagtatgttagtataggagtattattgtatagtcgtcgacggggtatttcggtgggcgtagggtattggacgcggagtaagtagtacggtgttcgtatttcgtgttttgtttgttcgtggtgttggtgttgttgatggtgtagttgcgtgcgtattttgttcgatttttataagtatagtatgttcgtatcgttttggatacgattataaggaggcgttcgagcgcgggtaagttcgattacgcgttggtgtgaggggtagcggtagtatttattagtcggtattgcgtcggggttttagagggtcggttcggt

SEQ ID NO: 24760 - DNA, 546 bp, Artificial Sequence
  chemically treated genomic DNA (Homo sapiens) CpG-island No: 24760
accgaaccgaccctctaaaaccccgacgcaataccgactaataaatactaccgctacccctcacaccaacgcgtaatcgaacttacccgcgctcgaacgcctccttataatcgtatccaaaacgatacgaacatactatacttataaaaatcgaacaaaatacgcacgcaactacaccatcaacaacaccaacaccacgaacaaacaaaacacgaaatacgaacaccgtactacttactccgcgtccaataccctacgcccaccgaaataccccgtcgacgactatacaataatactcctatactaacatactatccacgtcgcgctcataactcacatcgccgcgctaccctacgaaaaaataaaacccgcccctaaacgccgaaaataaaacttactaccctccctcccgcgcctcctccgcttcgccccctcataactacgacaaccgcgactcccttaacgtaccgataacaatccccaaacaaaactccgataacgcgaataaacccataccaaacccaaccaaatacaaacaacaacaaa

SEQ ID NO: 24761 - DNA, 553 bp, Artificial Sequence
  chemically treated genomic DNA (Homo sapiens) CpG-island No: 24761
  unsure (37, 67, 506, 511, 547)
tagcggattgtcgcgattagtagatagacgatcgtangagatcgttatatacgttatttttttagangacgtgggggtacgcgtttgacgtttttttcggtgggcgtttcggttttggatgcgatgttgtaatcgcgttggtttttttaaagcgggggggggtatatttttataaaacgttaagttttcgttttttagtaagtattttttagtttgcgtacgtaaatagttacgtgttattaagcgagggttttattcgtgtggagtattcgttagtattaacgtttttttttaaaaggatgagagtttttttttgtttttacgacgtggtttttttttttatcgaaaaggtgtcgttcgtatttagcgttggtttatgtgggtttttttttttcggtaggacgatcgattatcgtacgtatcgagggttgagcgattgttttttcgtgtgaagggggtttttatcgatggttgtacgtttcgatatagttggttagttatcgagntgttncgagggaggaaatttaaatttttatgggtagagcgntttata

SEQ ID NO: 24762 - DNA, 553 bp, Artificial Sequence
  chemically treated genomic DNA (Homo sapiens) CpG-island No: 24762
  unsure (7, 43, 48, 487, 517)
tataaancgctctacccataaaaatttaaatttcctccctcgnaacanctcgataactaaccaactatatcgaaacgtacaaccatcgataaaaacccccttcacacgaaaaaacaatcgctcaaccctcgatacgtacgataatcgatcgtcctaccgaaaaaaaaaaacccacataaaccaacgctaaatacgaacgacaccttttcgataaaaaaaaaaaccacgtcgtaaaaacaaaaaaaaactctcatccttttaaaaaaaaacgttaatactaacgaatactccacacgaataaaaccctcgcttaataacacgtaactatttacgtacgcaaactaaaaaatacttactaaaaaacgaaaacttaacgttttataaaaatatacccccccccgctttaaaaaaaccaacgcgattacaacatcgcatccaaaaccgaaacgcccaccgaaaaaaacgtcaaacgcgtacccccacgtcntctaaaaaaataacgtatataacgatctcntacgatcgtctatctactaatcgcgacaatccgcta

SEQ ID NO: 24763 - DNA, 553 bp, Artificial Sequence
  chemically treated genomic DNA (Homo sapiens) CpG-island No: 24763
  unsure (7, 43, 48, 487, 517)
tgtgagncgttttatttatagaaatttagattttttttttcgngatanttcgatagttagttagttatgtcgggacgtatagttatcgatagagattttttttatacggagagatagtcgtttagttttcggtgcgtgcgatagtcggtcgttttatcgaaggagagaggtttatatgggttaacgttaggtgcggacggtattttttcggtggggggagggattacgtcgtgggggtagggagaaatttttatttttttgaggggagacgttggtgttagcggatgttttatacgagtgggattttcgtttggtggtacgtggttgtttgcgtacgtaaattagagagtatttattgggagacgagagtttagcgttttgtgggagtatgttttttttcgttttgagggaattaacgcgattgtaatatcgtatttaagatcgggacgtttatcgaggggggcgttaagcgcgtgtttttacgttntttggaggaatggcgtgtgtaacggttttntacggtcgtttatttattaatcgcgataattcgtta

SEQ ID NO: 24764 - DNA, 553 bp, Artificial Sequence
  chemically treated genomic DNA (Homo sapiens) CpG-island No: 24764
  unsure (37, 67, 506, 511, 547)
taacgaattatcgcgattaataaataaacgaccgtanaaaaccgttacacacgccattcctccaaanaacgtaaaaacacgcgcttaacgcccccctcgataaacgtcccgatcttaaatacgatattacaatcgcgttaattccctcaaaacgaaaaaaaacatactcccacaaaacgctaaactctcgtctcccaataaatactctctaatttacgtacgcaaacaaccacgtaccaccaaacgaaaatcccactcgtataaaacatccgctaacaccaacgtctcccctcaaaaaaataaaaatttctccctacccccacgacgtaatccctccccccaccgaaaaaataccgtccgcacctaacgttaacccatataaacctctctccttcgataaaacgaccgactatcgcacgcaccgaaaactaaacgactatctctccgtataaaaaaaatctctatcgataactatacgtcccgacataactaactaactatcgaantatcncgaaaaaaaaaatctaaatttctataaataaaacgnctcaca

SEQ ID NO: 24765 - DNA, 621 bp, Artificial Sequence
  chemically treated genomic DNA (Homo sapiens) CpG-island No: 24765
tagagttgaagcgagttaagtagacgttggtcggggagagggaggcggtgcgttgttcgttttgtgttttcgtttcggagtttagtaggggcgttcggggcgtggtggttttgggcggaggagcgtattatttggttttcggatggtcgttcggagcgatatcgcgtcgggttcgaggttggaagttaggagtaggagtcggagtaagacgtttcggattaaatttatttcgtagtcggcgtttgtaaagttttattaagtttcgggcgtatacggaaagggcgttttcgggggcgcgtgggggacgcggttttaacggattttcgggtcggggcgaggaggtggggggttgcgagggttgggttcggaaatacgggtagttttaagaggtaggattgtagtcgggaggtcggcgtgcgcgagtgaagtcggttgtaagttgtagggtttttcgcgggggcgggggcgacgaaggaggtcgattgggagggaagggttggtcgcgggagggagggaggttcgatcggttcggggatgaaattataatcgagtggaagtgagagggataggttttgaaatttttatttttcgtttatttcggaagtagatagttcgtttttt

SEQ ID NO: 24766 - DNA, 621 bp, Artificial Sequence
  chemically treated genomic DNA (Homo sapiens) CpG-island No: 24766
aaaaaacgaactatctacttccgaaataaacgaaaaataaaaatttcaaaacctatccctctcacttccactcgattataatttcatccccgaaccgatcgaacctccctccctcccgcgaccaacccttccctcccaatcgacctccttcgtcgcccccgcccccgcgaaaaaccctacaacttacaaccgacttcactcgcgcacgccgacctcccgactacaatcctacctcttaaaactacccgtatttccgaacccaaccctcgcaaccccccacctcctcgccccgacccgaaaatccgttaaaaccgcgtcccccacgcgcccccgaaaacgccctttccgtatacgcccgaaacttaataaaactttacaaacgccgactacgaaataaatttaatccgaaacgtcttactccgactcctactcctaacttccaacctcgaacccgacgcgatatcgctccgaacgaccatccgaaaaccaaataatacgctcctccgcccaaaaccaccacgccccgaacgcccctactaaactccgaaacgaaaacacaaaacgaacaacgcaccgcctccctctccccgaccaacgtctacttaactcgcttcaactcta

SEQ ID NO: 24767 - DNA, 621 bp, Artificial Sequence
  chemically treated genomic DNA (Homo sapiens) CpG-island No: 24767
gaggggcgggttgtttgttttcgaggtgggcgaggagtgaaggttttagggtttgttttttttatttttattcgattgtaattttattttcgggtcggtcgagtttttttttttttcgcggttagttttttttttttagtcggtttttttcgtcgttttcgttttcgcgaaaagttttgtagtttgtagtcggttttattcgcgtacgtcgatttttcggttgtagttttattttttggaattattcgtgttttcgggtttagttttcgtagttttttattttttcgtttcggttcggggattcgttggggtcgcgttttttacgcgttttcggagacgtttttttcgtgtgcgttcgggatttggtgaaattttgtaggcgtcggttgcgaaatggatttaattcgaggcgttttgtttcggtttttgtttttggtttttagtttcggattcggcgcggtgtcgtttcgagcggttattcgaaaattaggtaatgcgttttttcgtttagagttattacgtttcgagcgtttttgttgggtttcggggcgaggatatagagcgggtagcgtatcgttttttttttttcgattaacgtttgtttaattcgttttagttttg

SEQ ID NO: 24768 - DNA, 621 bp, Artificial Sequence
  chemically treated genomic DNA (Homo sapiens) CpG-island No: 24768
caaaactaaaacgaattaaacaaacgttaatcgaaaaaaaaaaaacgatacgctacccgctctatatcctcgccccgaaacccaacaaaaacgctcgaaacgtaataactctaaacgaaaaaacgcattacctaattttcgaataaccgctcgaaacgacaccgcgccgaatccgaaactaaaaaccaaaaacaaaaaccgaaacaaaacgcctcgaattaaatccatttcgcaaccgacgcctacaaaatttcaccaaatcccgaacgcacacgaaaaaaacgtctccgaaaacgcgtaaaaaacgcgaccccaacgaatccccgaaccgaaacgaaaaaataaaaaactacgaaaactaaacccgaaaacacgaataattccaaaaaataaaactacaaccgaaaaatcgacgtacgcgaataaaaccgactacaaactacaaaacttttcgcgaaaacgaaaacgacgaaaaaaaccgactaaaaaaaaaaaactaaccgcgaaaaaaaaaaaaactcgaccgacccgaaaataaaattacaatcgaataaaaataaaaaaaacaaaccctaaaaccttcactcctcgcccacctcgaaaacaaacaacccgcccctc

SEQ ID NO: 24769 - DNA, 821 bp, Artificial Sequence
  chemically treated genomic DNA (Homo sapiens) CpG-island No: 24769
gattacgcgtagatcgagggtatacggtggcgtgcgtgtgtatttattttatgggcgtagattggttacggggattcgtgcgcgcgttgtcggttattcggatttgaaattatgtttcgttatttatattgggtttttacgttattgggtgttgtgaatagcgattcgttagtggttgttatgtattatttcgttacgtatgacgaacggtcgtttatcggcgaggtcgacggggttcgtcggtatttgttacgaggatttgacgtatagtgattggaaggtcgtaaacggtagttattattgttttatcggttatgacgtagacgtcgacgtgatttatcggtatgtaaaattatggaatggttgttaggacgcgttttcgatcgaaaggacgtatttcgtaatcggggcgaagcggtattgcgtgttgtatttttcgcgtaattttgtatttttgtcgtggttattacggttttacggtatttttgtatattgtcggattcgtttgtatattgaaacgttttattgtgtcgtaaggggatgttgtcgataagttagaacgatttcgttgaatttcgttattttttgtttgcgtaaatattttattatttacgatcgtggtcgaatttttttaatcgtttataatttttttcgcgcgtgattatttaatattttgcgtatcgtaatttttaattaacgttttattatcgggacgcgattgcgtgttggttagtattgtataagtatgtacgtttttggtttttggttacggggttgtcgtgaatacgggtgtgaaataaaaataggaaatttttgttaaa

SEQ ID NO: 24770 - DNA, 821 bp, Artificial Sequence
  chemically treated genomic DNA (Homo sapiens) CpG-island No: 24770
tttaacaaaaatttcctatttttatttcacacccgtattcacgacaaccccgtaaccaaaaaccaaaaacgtacatacttatacaatactaaccaacacgcaatcgcgtcccgataataaaacgttaattaaaaattacgatacgcaaaatattaaataatcacgcgcgaaaaaaattataaacgattaaaaaaattcgaccacgatcgtaaataataaaatatttacgcaaacaaaaaataacgaaattcaacgaaatcgttctaacttatcgacaacatccccttacgacacaataaaacgtttcaatatacaaacgaatccgacaatatacaaaaataccgtaaaaccgtaataaccacgacaaaaatacaaaattacgcgaaaaatacaacacgcaataccgcttcgccccgattacgaaatacgtcctttcgatcgaaaacgcgtcctaacaaccattccataattttacataccgataaatcacgtcgacgtctacgtcataaccgataaaacaataataactaccgtttacgaccttccaatcactatacgtcaaatcctcgtaacaaataccgacgaaccccgtcgacctcgccgataaacgaccgttcgtcatacgtaacgaaataatacataacaaccactaacgaatcgctattcacaacacccaataacgtaaaaacccaatataaataacgaaacataatttcaaatccgaataaccgacaacgcgcgcacgaatccccgtaaccaatctacgcccataaaataaatacacacgcacgccaccgtataccctcgatctacgcgtaatc

SEQ ID NO: 24771 - DNA, 821 bp, Artificial Sequence
  chemically treated genomic DNA (Homo sapiens) CpG-island No: 24771
tttagtaaaagttttttgtttttattttatattcgtatttacggtaatttcgtagttaagggttaggggcgtgtatatttatgtagtattggttagtacgtagtcgcgtttcggtaataaagcgttaattaggggttacggtacgtagggtattggatagttacgcgcgggggaggttatgagcggttggaggagttcggttacggtcgtaagtggtaaggtatttgcgtaagtagggggtggcggggtttaacggggtcgttttaatttgtcggtagtatttttttgcggtatagtagggcgttttagtgtgtaggcgggttcggtagtgtataggggtatcgtaaggtcgtggtggttacggtaaaggtgtagggttacgcgggggatgtagtacgtaatgtcgtttcgtttcggttgcggggtgcgttttttcggtcgggggcgcgttttagtaattattttataattttgtatatcggtaggttacgtcggcgtttgcgttatggtcggtaaggtagtaatggttatcgtttgcggttttttagttattgtacgttaggttttcgtggtaggtgtcggcgggtttcgtcggtttcgtcggtgggcggtcgttcgttatgcgtagcggggtagtgtatggtaattattagcgggtcgttgtttatagtatttagtggcgtaaaggtttagtgtaagtaacggggtataattttaggttcgggtggtcggtaacgcgcgtacgggttttcgtagttagtttgcgtttataaagtaaatgtatacgtacgttatcgtgtattttcggtttacgcgtaatt

SEQ ID NO: 24772 - DNA, 821 bp, Artificial Sequence
  chemically treated genomic DNA (Homo sapiens) CpG-island No: 24772
aattacgcgtaaaccgaaaatacacgataacgtacgtatacatttactttataaacgcaaactaactacgaaaacccgtacgcgcgttaccgaccacccgaacctaaaattataccccgttacttacactaaacctttacgccactaaatactataaacaacgacccgctaataattaccatacactaccccgctacgcataacgaacgaccgcccaccgacgaaaccgacgaaacccgccgacacctaccacgaaaacctaacgtacaataactaaaaaaccgcaaacgataaccattactaccttaccgaccataacgcaaacgccgacgtaacctaccgatatacaaaattataaaataattactaaaacgcgcccccgaccgaaaaaacgcaccccgcaaccgaaacgaaacgacattacgtactacatcccccgcgtaaccctacacctttaccgtaaccaccacgaccttacgatacccctatacactaccgaacccgcctacacactaaaacgccctactataccgcaaaaaaatactaccgacaaattaaaacgaccccgttaaaccccgccaccccctacttacgcaaataccttaccacttacgaccgtaaccgaactcctccaaccgctcataacctcccccgcgcgtaactatccaataccctacgtaccgtaacccctaattaacgctttattaccgaaacgcgactacgtactaaccaatactacataaatatacacgcccctaacccttaactacgaaattaccgtaaatacgaatataaaataaaaacaaaaaacttttactaaa

SEQ ID NO: 24773 - DNA, 959 bp, Artificial Sequence
  chemically treated genomic DNA (Homo sapiens) CpG-island No: 24773
  unsure (695)
tattggtattaggtgcgttagttcgcgattttatgttcgtttgtatcgtcgatgcggattttgttgtcgtttgtttgtttttggttaagttaatcgttgtttcgcgtttttcgttttgtatcgttcgtggagaataaacgttttttgtttatggcgaatgacgcgattatttgtaaattgcgaaacgttcgattatggtcgagcgtatagatggttttagtacgttggttttgttattgtcgttggtatttattagaaagttaaagcgggagataaggcgagattcgcggttttaatgttgcggaaatcgcggattataagcgggtgagggatattatagttttattggtatgataatataagttcgttttggttggtcgtatttttaatttgtacgttggaaatcgaatcggtagtattatgcggacgttttcgttattttagcgcgtttagaatatttagttataattgacgttgaagtcgatttttattttcgtatcgttataggtaattcgaggatttttttcgtttttttttgtttcgggttgttggcggtgattttagttggttttcgttgatataaagacgtacgtcgcggaatttttcgttaagagaatcgtcgcgcgagtaaacgtttgtttgagtagatcgtagttagttttagatgtttgttcgggtttttcggtagtaacgtnggcgataattcggaagcgattatttattagtttggaggtgaagataaagtcgttaacgtggggcgaatgttgttgttgttaatttgtacgcgtagcggattgtcgtcgtcgcgagtatacgtattagtttaattacgtttttacgcggtacgattatcgatggtttggtaaagattgattaattggtattgaatagatcgttagacggtgtcgtcggttgttacgtgcgtagttttttattttcgttttaaatagtatttatat

SEQ ID NO: 24774 - DNA, 959 bp, Artificial Sequence
  chemically treated genomic DNA (Homo sapiens) CpG-island No: 24774
  unsure (265)
atataaatactatttaaaacgaaaataaaaaactacgcacgtaacaaccgacgacaccgtctaacgatctattcaataccaattaatcaatctttaccaaaccatcgataatcgtaccgcgtaaaaacgtaattaaactaatacgtatactcgcgacgacgacaatccgctacgcgtacaaattaacaacaacaacattcgccccacgttaacgactttatcttcacctccaaactaataaataatcgcttccgaattatcgccnacgttactaccgaaaaacccgaacaaacatctaaaactaactacgatctactcaaacaaacgtttactcgcgcgacgattctcttaacgaaaaattccgcgacgtacgtctttatatcaacgaaaaccaactaaaatcaccgccaacaacccgaaacaaaaaaaaacgaaaaaaatcctcgaattacctataacgatacgaaaataaaaatcgacttcaacgtcaattataactaaatattctaaacgcgctaaaataacgaaaacgtccgcataatactaccgattcgatttccaacgtacaaattaaaaatacgaccaaccaaaacgaacttatattatcataccaataaaactataatatccctcacccgcttataatccgcgatttccgcaacattaaaaccgcgaatctcgccttatctcccgctttaactttctaataaataccaacgacaataacaaaaccaacgtactaaaaccatctatacgctcgaccataatcgaacgtttcgcaatttacaaataatcgcgtcattcgccataaacaaaaaacgtttattctccacgaacgatacaaaacgaaaaacgcgaaacaacgattaacttaaccaaaaacaaacaaacgacaacaaaatccgcatcgacgatacaaacgaacataaaatcgcgaactaacgcacctaataccaata

SEQ ID NO: 24775 - DNA, 959 bp, Artificial Sequence
  chemically treated genomic DNA (Homo sapiens) CpG-island No: 24775
  unsure (265)
atatggatgttgtttgaaacgaaggtgaagaattgcgtacgtggtaatcgacggtatcgtttggcggtttgtttaatgttaattggttaatttttgttaagttatcggtgatcgtatcgcgtaaaggcgtgattgaattgatgcgtatgttcgcggcggcgataattcgttgcgcgtatagattggtagtaataatattcgttttacgttggcgattttatttttatttttaaattggtggatggtcgttttcggattatcgttngcgttattgtcgaagaattcggataaatatttggagttggttgcgatttgtttaagtaggcgtttgttcgcgcggcgatttttttaacgagaaatttcgcggcgtacgtttttatgttagcgaaaattagttgaaattatcgttaataattcggaataggaagaagcggaagagattttcgagttatttatagcggtgcggagatggaaatcggttttaacgttagttatggttggatgttttgaacgcgttgaaatggcgaaaacgttcgtatgatgttatcgattcggtttttagcgtgtagattgaagatgcggttagttagagcgggtttatgttgttatgttaatgagattgtaatgttttttattcgtttgtgattcgcgattttcgtaatattgaaatcgcggatttcgttttatttttcgttttaattttttggtaggtgttaacggtagtggtaaaattagcgtgttgaagttatttatacgttcggttatggtcgggcgtttcgtagtttgtagatggtcgcgttattcgttatgagtaggaggcgtttgttttttacgggcgatatagggcgaagagcgcgagatagcgattggtttaattaaagataaataggcgatagtaaagttcgtatcgacggtatagacgggtataaggtcgcggattggcgtatttgatgttaatg

SEQ ID NO: 24776 - DNA, 959 bp, Artificial Sequence
  chemically treated genomic DNA (Homo sapiens) CpG-island No: 24776
  unsure (695)
cattaacatcaaatacgccaatccgcgaccttatacccgtctataccgtcgatacgaactttactatcgcctatttatctttaattaaaccaatcgctatctcgcgctcttcgccctatatcgcccgtaaaaaacaaacgcctcctactcataacgaataacgcgaccatctacaaactacgaaacgcccgaccataaccgaacgtataaataacttcaacacgctaattttaccactaccgttaacacctaccaaaaaattaaaacgaaaaataaaacgaaatccgcgatttcaatattacgaaaatcgcgaatcacaaacgaataaaaaacattacaatctcattaacataacaacataaacccgctctaactaaccgcatcttcaatctacacgctaaaaaccgaatcgataacatcatacgaacgttttcgccatttcaacgcgttcaaaacatccaaccataactaacgttaaaaccgatttccatctccgcaccgctataaataactcgaaaatctcttccgcttcttcctattccgaattattaacgataatttcaactaattttcgctaacataaaaacgtacgccgcgaaatttctcgttaaaaaaatcgccgcgcgaacaaacgcctacttaaacaaatcgcaaccaactccaaatatttatccgaattcttcgacaataacgcnaacgataatccgaaaacgaccatccaccaatttaaaaataaaaataaaatcgccaacgtaaaacgaatattattactaccaatctatacgcgcaacgaattatcgccgccgcgaacatacgcatcaattcaatcacgcctttacgcgatacgatcaccgataacttaacaaaaattaaccaattaacattaaacaaaccgccaaacgataccgtcgattaccacgtacgcaattcttcaccttcgtttcaaacaacatccatat

SEQ ID NO: 24777 - DNA, 899 bp, Artificial Sequence
  chemically treated genomic DNA (Homo sapiens) CpG-island No: 24777
tataattagtagttatatttgtatttatcgcgattacgaaggtattagaagttgcgatttcggttcgggatgcggcggttttaaaagaagcggtaaaattattagaaacgaacgtattattaagcgttagtagtgtagttttttcggtaacggcggtaggaaatttcgcgaaggcggtaaaaacgttcgagacgaacgttaggttttttgaaacggtagcgggatagagcgtttcggttgcggtaggtttaaaaatagcggttgcgtcgtttgttagtgtagcgttaataagtgtcgggtaggttttagttagtgttatcgtcgtcggaaaatcggtagaaagcgtcgtatcgtttgttttaatagttataacgaaggttggcgaagttattgaataggttagcgtagtagcgaggtttgttttcgtagcgaagatattcgaaacgaacgcgaaagcgtcggaaataagcgtagaatttttaaaaacggttgtcgtatcgttagttagttcggcggcgttatcggtattatcggcgtttgttttaaaagatgaggcgattagataagcgttagtagcgaagagtagcgttacgacggtatttacgaaggcgatagaggttgttggtagtgcgacggcggtagtttagagtaaaagtacggcggaattcgcggtaacgcgcgtcgagatagtagttaaacgggtagaggatattgtattcgtcgtggcgtttgaggatgtaagtacgacgaaaaaggggatagtatagtttagtagtgcgattaatagtacgtttgaaacgttggcggtaacgttaaaggtagtaaaattagtttatgataatgtagagaaacgtttgtagaaagattagaacggcgttgatatattcgataagggatgt

SEQ ID NO: 24778 - DNA, 899 bp, Artificial Sequence
  chemically treated genomic DNA (Homo sapiens) CpG-island No: 24778
acatcccttatcgaatatatcaacgccgttctaatctttctacaaacgtttctctacattatcataaactaattttactacctttaacgttaccgccaacgtttcaaacgtactattaatcgcactactaaactatactatcccctttttcgtcgtacttacatcctcaaacgccacgacgaatacaatatcctctacccgtttaactactatctcgacgcgcgttaccgcgaattccgccgtacttttactctaaactaccgccgtcgcactaccaacaacctctatcgccttcgtaaataccgtcgtaacgctactcttcgctactaacgcttatctaatcgcctcatcttttaaaacaaacgccgataataccgataacgccgccgaactaactaacgatacgacaaccgtttttaaaaattctacgcttatttccgacgctttcgcgttcgtttcgaatatcttcgctacgaaaacaaacctcgctactacgctaacctattcaataacttcgccaaccttcgttataactattaaaacaaacgatacgacgctttctaccgattttccgacgacgataacactaactaaaacctacccgacacttattaacgctacactaacaaacgacgcaaccgctatttttaaacctaccgcaaccgaaacgctctatcccgctaccgtttcaaaaaacctaacgttcgtctcgaacgtttttaccgccttcgcgaaatttcctaccgccgttaccgaaaaaactacactactaacgcttaataatacgttcgtttctaataattttaccgcttcttttaaaaccgccgcatcccgaaccgaaatcgcaacttctaataccttcgtaatcgcgataaatacaaatataactactaattata

SEQ ID NO: 24779 - DNA, 899 bp, Artificial Sequence
  chemically treated genomic DNA (Homo sapiens) CpG-island No: 24779
gtattttttatcgggtatattagcgtcgttttggtttttttgtagacgtttttttgtattgttataggttgattttattgtttttggcgttgtcgttagcgttttagacgtattgttggtcgtattgttgagttgtattattttttttttcgtcgtatttgtatttttaagcgttacggcggatgtaatattttttgttcgtttagttgttgtttcggcgcgcgttgtcgcggatttcgtcgtatttttgttttgagttgtcgtcgtcgtattgttagtagtttttgtcgttttcgtggatgtcgtcgtggcgttgtttttcgttgttgacgtttgtttggtcgttttattttttgaagtagacgtcgatgatgtcgatgacgtcgtcgaattggttgacgatgcggtagtcgtttttgaggattttgcgtttgttttcgacgttttcgcgttcgtttcggatgttttcgttgcggaagtagatttcgttgttgcgttggtttgtttagtggtttcgttagttttcgttgtggttgttgaagtagacgatgcggcgttttttgtcgatttttcggcggcggtggtattggttgaggtttgttcggtatttgttgacgttgtattggtagacgacgtagtcgttgtttttgagtttgtcgtagtcgaggcgttttgtttcgttgtcgttttagaagatttggcgttcgtttcggacgtttttgtcgttttcgcggaattttttgtcgtcgttgtcgaggaagttgtattattggcgtttgatgatgcgttcgtttttgatgattttgtcgttttttttgaggtcgtcgtatttcgggtcgaggtcgtagtttttgatgttttcgtggtcgcggtggatgtagatgtggttgttgattgta

SEQ ID NO: 24780 - DNA, 899 bp, Artificial Sequence
  chemically treated genomic DNA (Homo sapiens) CpG-island No: 24780
tacaatcaacaaccacatctacatccaccgcgaccacgaaaacatcaaaaactacgacctcgacccgaaatacgacgacctcaaaaaaaacgacaaaatcatcaaaaacgaacgcatcatcaaacgccaataatacaacttcctcgacaacgacgacaaaaaattccgcgaaaacgacaaaaacgtccgaaacgaacgccaaatcttctaaaacgacaacgaaacaaaacgcctcgactacgacaaactcaaaaacaacgactacgtcgtctaccaatacaacgtcaacaaataccgaacaaacctcaaccaataccaccgccgccgaaaaatcgacaaaaaacgccgcatcgtctacttcaacaaccacaacgaaaactaacgaaaccactaaacaaaccaacgcaacaacgaaatctacttccgcaacgaaaacatccgaaacgaacgcgaaaacgtcgaaaacaaacgcaaaatcctcaaaaacgactaccgcatcgtcaaccaattcgacgacgtcatcgacatcatcgacgtctacttcaaaaaataaaacgaccaaacaaacgtcaacaacgaaaaacaacgccacgacgacatccacgaaaacgacaaaaactactaacaatacgacgacgacaactcaaaacaaaaatacgacgaaatccgcgacaacgcgcgccgaaacaacaactaaacgaacaaaaaatattacatccgccgtaacgcttaaaaatacaaatacgacgaaaaaaaaaataatacaactcaacaatacgaccaacaatacgtctaaaacgctaacgacaacgccaaaaacaataaaatcaacctataacaatacaaaaaaacgtctacaaaaaaaccaaaacgacgctaatatacccgataaaaaatac

SEQ ID NO: 24781 - DNA, 566 bp, Artificial Sequence
  chemically treated genomic DNA (Homo sapiens) CpG-island No: 24781
cgggacgttttattacgtatattttacgattatattagtatttcgattagcgattcgatgtcgtattaggttcgtcgtgcgtagcgtgtttattacgtattaattatataacggtcgtgtaaattatcggtttatattattatgatatatagcggcgtatatagcgatagtgtattatatatatagtcgaggttaaatagagtttagatataaaagggattagcgatatcgttaattataggttcgtcgttagttcggacgtataaaattaattagggttatcgaatattattggatagagttattaatataataattcgaacgatttaacgattaagaaggttggtcgaaaaatatcgaatacggtataatttatagtatattatagtcgtaaatatattggaagagtaatttatagtgacgatttttatagttatcggaattatgttcgtataatcggtatatttagttcggtaagaaaatatatagaggaaatcgtggcggtagttgttgttgtatgtcgattttagaggattttataatatatttttgtagtatcggtataa

SEQ ID NO: 24782 - DNA, 566 bp, Artificial Sequence
  chemically treated genomic DNA (Homo sapiens) CpG-island No: 24782
ttataccgatactacaaaaatatattataaaatcctctaaaatcgacatacaacaacaactaccgccacgatttcctctatatattttcttaccgaactaaatataccgattatacgaacataattccgataactataaaaatcgtcactataaattactcttccaatatatttacgactataatatactataaattataccgtattcgatatttttcgaccaaccttcttaatcgttaaatcgttcgaattattatattaataactctatccaataatattcgataaccctaattaattttatacgtccgaactaacgacgaacctataattaacgatatcgctaatcccttttatatctaaactctatttaacctcgactatatatataatacactatcgctatatacgccgctatatatcataataatataaaccgataatttacacgaccgttatataattaatacgtaataaacacgctacgcacgacgaacctaatacgacatcgaatcgctaatcgaaatactaatataatcgtaaaatatacgtaataaaacgtcccg

SEQ ID NO: 24783 - DNA, 566 bp, Artificial Sequence
  chemically treated genomic DNA (Homo sapiens) CpG-island No: 24783
ttatatcgatattgtaagaatgtgttgtgggattttttagagtcgatatatagtagtagttgtcgttacggttttttttgtgtgtttttttgtcggattgggtatgtcggttgtgcgggtatggtttcggtagttgtgagagtcgttattgtgggttgtttttttagtgtgtttacggttgtggtatgttgtgagttgtgtcgtgttcggtgtttttcggttagtttttttgatcgttgagtcgttcgagttgttgtgttgatggttttgtttagtggtgttcggtagttttgattggttttgtacgttcgagttagcggcgggtttgtggttgacggtgtcgttggttttttttgtgtttgggttttgtttggtttcgattatgtgtgtggtgtattgtcgttgtatgcgtcgttgtatgttatggtggtatagatcggtgatttatacggtcgttgtgtagttgatgcgtgatgagtacgttgcgtacggcgagtttggtacgatatcgagtcgttagtcgaggtgttagtgtagtcgtaggatatgcgtgatagagcgtttcg

SEQ ID NO: 24784 - DNA, 566 bp, Artificial Sequence
  chemically treated genomic DNA (Homo sapiens) CpG-island No: 24784
cgaaacgctctatcacgcatatcctacgactacactaacacctcgactaacgactcgatatcgtaccaaactcgccgtacgcaacgtactcatcacgcatcaactacacaacgaccgtataaatcaccgatctataccaccataacatacaacgacgcatacaacgacaatacaccacacacataatcgaaaccaaacaaaacccaaacacaaaaaaaaccaacgacaccgtcaaccacaaacccgccgctaactcgaacgtacaaaaccaatcaaaactaccgaacaccactaaacaaaaccatcaacacaacaactcgaacgactcaacgatcaaaaaaactaaccgaaaaacaccgaacacgacacaactcacaacataccacaaccgtaaacacactaaaaaaacaacccacaataacgactctcacaactaccgaaaccatacccgcacaaccgacatacccaatccgacaaaaaaacacacaaaaaaaaccgtaacgacaactactactatatatcgactctaaaaaatcccacaacacattcttacaatatcgatataa

SEQ ID NO: 24785 - DNA, 681 bp, Artificial Sequence
  chemically treated genomic DNA (Homo sapiens) CpG-island No: 24785
attcgtagcgcgtgagtgtaattggagattttggatttaagatgtttttatgaggaacgattttagttcgcggtaatttcggttagtttgtagcgtggacgataaaataggtattacgtggtttcggcgtcggggcggggttagagacgtcggaagtgatcgcgcggtgcgtcggttcgcgaggaaacgcgtttttagattatggcgatttaggcgaagcgtttacgggtgagtggcgggcgcggggtttagttttttttttcgcgttttatttttttttcgttcgtagaatcgttcgtttgcgtttttttcgttttttttcgcgggtttcgcgttttttttcgttcgtttttttttttatttaaagttcgttttgcgttcgcgtcgaggtttttgtagtttttagcgatttttttgggggtcggatttggttattgcggtatttatttaggtggcggggttcgtggacggcggcgatttggattttgtggtttgttttttgagttgggtcggcgggtggggttggagttgagttttaaggtgagcgagcgacggcgggcggaggattcgcggcggggcgcggggttattagttcgtaggcgttacgagtacggcgtacggtgtgatataggtgagaaggttaggggttttgttatggttatagaggtataagtgtttaat

SEQ ID NO: 24786 - DNA, 681 bp, Artificial Sequence
  chemically treated genomic DNA (Homo sapiens) CpG-island No: 24786
attaaacacttatacctctataaccataacaaaacccctaaccttctcacctatatcacaccgtacgccgtactcgtaacgcctacgaactaataaccccgcgccccgccgcgaatcctccgcccgccgtcgctcgctcaccttaaaactcaactccaaccccacccgccgacccaactcaaaaaacaaaccacaaaatccaaatcgccgccgtccacgaaccccgccacctaaataaataccgcaataaccaaatccgacccccaaaaaaatcgctaaaaactacaaaaacctcgacgcgaacgcaaaacgaactttaaataaaaaaaaaaacgaacgaaaaaaaacgcgaaacccgcgaaaaaaaacgaaaaaaacgcaaacgaacgattctacgaacgaaaaaaaaataaaacgcgaaaaaaaaaactaaaccccgcgcccgccactcacccgtaaacgcttcgcctaaatcgccataatctaaaaacgcgtttcctcgcgaaccgacgcaccgcgcgatcacttccgacgtctctaaccccgccccgacgccgaaaccacgtaatacctattttatcgtccacgctacaaactaaccgaaattaccgcgaactaaaatcgttcctcataaaaacatcttaaatccaaaatctccaattacactcacgcgctacgaat

SEQ ID NO: 24787 - DNA, 681 bp, Artificial Sequence
  chemically treated genomic DNA (Homo sapiens) CpG-island No: 24787
gttaaatatttatatttttgtagttataataaaatttttagtttttttatttatattatatcgtacgtcgtgttcgtgacgtttacgagttggtggtttcgcgtttcgtcgcgggtttttcgttcgtcgtcgttcgtttattttgggatttagttttagttttattcgtcggtttagtttaggaagtaggttataggatttaggtcgtcgtcgtttacgggtttcgttatttagataagtgtcgtagtgattaggttcgatttttaagagagtcgttgggaattgtagagatttcggcgcgagcgtagaacgggttttgggtggaggaggggacgagcggagaggggcgcgggattcgcgggagggagcggagggggcgtaggcggacggttttgcgaacggagaaggggtgaggcgcggaggaaaaggttggatttcgcgttcgttatttattcgtggacgtttcgtttgggtcgttatggtttaagagcgcgttttttcgcgggtcggcgtatcgcgcggttattttcggcgtttttggtttcgtttcggcgtcggaattacgtggtgtttgttttgtcgtttacgttgtagattggtcggagttatcgcgggttggaatcgttttttatgaaaatattttgagtttaggatttttaattgtatttacgcgttgcgagt

SEQ ID NO: 24788 - DNA, 681 bp, Artificial Sequence
  chemically treated genomic DNA (Homo sapiens) CpG-island No: 24788
actcgcaacgcgtaaatacaattaaaaatcctaaactcaaaatattttcataaaaaacgattccaacccgcgataactccgaccaatctacaacgtaaacgacaaaacaaacaccacgtaattccgacgccgaaacgaaaccaaaaacgccgaaaataaccgcgcgatacgccgacccgcgaaaaaacgcgctcttaaaccataacgacccaaacgaaacgtccacgaataaataacgaacgcgaaatccaaccttttcctccgcgcctcaccccttctccgttcgcaaaaccgtccgcctacgccccctccgctccctcccgcgaatcccgcgcccctctccgctcgtcccctcctccacccaaaacccgttctacgctcgcgccgaaatctctacaattcccaacgactctcttaaaaatcgaacctaatcactacgacacttatctaaataacgaaacccgtaaacgacgacgacctaaatcctataacctacttcctaaactaaaccgacgaataaaactaaaactaaatcccaaaataaacgaacgacgacgaacgaaaaacccgcgacgaaacgcgaaaccaccaactcgtaaacgtcacgaacacgacgtacgatataatataaataaaaaaactaaaaattttattataactacaaaaatataaatatttaac

SEQ ID NO: 24789 - DNA, 505 bp, Artificial Sequence
  chemically treated genomic DNA (Homo sapiens) CpG-island No: 24789
tcgtagagagtagagtttttatggtgtcgcgtttttattttcgcgttattattagcgaggtgagaatcgcgtcgatgatcgttatgataatggttatcgtatcggggataatgaagtgttggttaatcgtcgtcgggttaaattagtagcgggtttgtatattaataagcggtttaaaagtttgttcgttgtttttcgttcgttgtatttgttagatttgttagattttttcgatatatttttgtataaagttagcggtattcggtttattgtcgtcggtgattatttgaatcggtgcggtggcgttggcgcgttttatttgtttcgtaaaatttatcggaataattattagatcgcgaatttttttcgtttgtattttggcgattagtttttgacggttatcgttgatggtggcgtcgatgtagggcgaatcggttatggtgtgggtgaaatttagcgtcgtttcgttacgttgttttagttaaatttcgaatcgtaggttgtt

SEQ ID NO: 24790 - DNA, 505 bp, Artificial Sequence
  chemically treated genomic DNA (Homo sapiens) CpG-island No: 24790
aacaacctacgattcgaaatttaactaaaacaacgtaacgaaacgacgctaaatttcacccacaccataaccgattcgccctacatcgacgccaccatcaacgataaccgtcaaaaactaatcgccaaaatacaaacgaaaaaaattcgcgatctaataattattccgataaattttacgaaacaaataaaacgcgccaacgccaccgcaccgattcaaataatcaccgacgacaataaaccgaataccgctaactttatacaaaaatatatcgaaaaaatctaacaaatctaacaaatacaacgaacgaaaaacaacgaacaaacttttaaaccgcttattaatatacaaacccgctactaatttaacccgacgacgattaaccaacacttcattatccccgatacgataaccattatcataacgatcatcgacgcgattctcacctcgctaataataacgcgaaaataaaaacgcgacaccataaaaactctactctctacga

SEQ ID NO: 24791 - DNA, 505 bp, Artificial Sequence
  chemically treated genomic DNA (Homo sapiens) CpG-island No: 24791
agtaatttgcggttcgggatttgattggaatagcgtagcgaagcggcgttggattttatttatattatgatcggttcgttttatatcgacgttattattagcgataatcgttaggaattgatcgttaaaatgtaggcggggaaaattcgcggtttggtggttatttcggtggattttgcggaatagatggagcgcgttaacgttatcgtatcgatttaggtgattatcgacggtagtgagtcgaatatcgttaattttgtataggggtatgtcgaagggatttggtagatttggtaaatgtagcgagcggaggataacgggtagatttttgaatcgtttattgatgtataaattcgttattggtttaattcggcggcgattagttagtattttattattttcggtgcggtgattattattatgacggttatcggcgcgatttttatttcgttggtggtggcgcgagaatgggaacgcggtattatggaggttttgttttttacgg

SEQ ID NO: 24792 - DNA, 505 bp, Artificial Sequence
  chemically treated genomic DNA (Homo sapiens) CpG-island No: 24792
ccgtaaaaaacaaaacctccataataccgcgttcccattctcgcgccaccaccaacgaaataaaaatcgcgccgataaccgtcataataataatcaccgcaccgaaaataataaaatactaactaatcgccgccgaattaaaccaataacgaatttatacatcaataaacgattcaaaaatctacccgttatcctccgctcgctacatttaccaaatctaccaaatcccttcgacatacccctatacaaaattaacgatattcgactcactaccgtcgataatcacctaaatcgatacgataacgttaacgcgctccatctattccgcaaaatccaccgaaataaccaccaaaccgcgaattttccccgcctacattttaacgatcaattcctaacgattatcgctaataataacgtcgatataaaacgaaccgatcataatataaataaaatccaacgccgcttcgctacgctattccaatcaaatcccgaaccgcaaattact

SEQ ID NO: 24793 - DNA, 705 bp, Artificial Sequence
  chemically treated genomic DNA (Homo sapiens) CpG-island No: 24793
  unsure (162, 198, 210, 316, 362, 455, 523, 529, 541, 545, 606)
tttattagttcgtatagggttcgtaatcgattttaagattcgttttttaataaagtttcgataagtgtgggtttggtttcgttagatttgtaagttcgacgtttgatatttttataagttttaggtgagatatttttgttgtcgtcgatttaggtttcggtnattttaattagatattgcgggatatatatttggcgntcggagcgtagntagtggcgagtttatagtcgataatttgggcgttagattgtttttcgtcgcgtatgtattgcgcgttattacgtcggaatatttggcgttgtcggtttttttgtgntttagattgtcgtagttcgtggttgtagtagtacggtagtggttantcgatcgtatttagcgtttagatatgcgcggcgttatattgatcgagttttagttattattaagtataatatatgcggaggagtgaagcggtnacgtgatagaggtatattatcgatcgaggatatataacgcggcgtatgtaatagataagggtataagngaatanttttgttagaangatngcggttaggtcgtttggtttcgagtcggttttttttgtatatttagcgttatattaggcgnattttcgtgtagcgtaggtagtttattataatatatacggattgtttgtaatcgttaatgagcgttgggtagtaaatatatagattagggtacgttatt

SEQ ID NO: 24794 - DNA, 705 bp, Artificial Sequence
  chemically treated genomic DNA (Homo sapiens) CpG-island No: 24794
  unsure (100, 161, 165, 177, 183, 251, 344, 390, 496, 508, 544)
aataacgtaccctaatctatatatttactacccaacgctcattaacgattacaaacaatccgtatatattataataaactacctacgctacacgaaaatncgcctaatataacgctaaatatacaaaaaaaaccgactcgaaaccaaacgacctaaccgcnatcnttctaacaaaantattcncttatacccttatctattacatacgccgcgttatatatcctcgatcgataatatacctctatcacgtnaccgcttcactcctccgcatatattatacttaataataactaaaactcgatcaatataacgccgcgcatatctaaacgctaaatacgatcgantaaccactaccgtactactacaaccacgaactacgacaatctaaancacaaaaaaaccgacaacgccaaatattccgacgtaataacgcgcaatacatacgcgacgaaaaacaatctaacgcccaaattatcgactataaactcgccactanctacgctccgancgccaaatatatatcccgcaatatctaattaaaatnaccgaaacctaaatcgacgacaacaaaaatatctcacctaaaacttataaaaatatcaaacgtcgaacttacaaatctaacgaaaccaaacccacacttatcgaaactttattaaaaaacgaatcttaaaatcgattacgaaccctatacgaactaataaa

SEQ ID NO: 24795 - DNA, 705 bp, Artificial Sequence
  chemically treated genomic DNA (Homo sapiens) CpG-island No: 24795
  unsure (100, 161, 165, 177, 183, 251, 344, 390, 496, 508, 544)
aatgacgtattttagtttgtgtgtttattgtttaacgtttattgacggttgtaggtagttcgtatgtgttatagtagattgtttacgttatacgggggtncgtttggtatgacgttgagtgtgtaagaggaatcggttcgaggttagacggtttggtcgtngttnttttaatagggntgtttntttgtgtttttgtttgttgtatgcgtcgcgttgtatgttttcgatcgatagtatatttttgttacgtngtcgttttattttttcgtatgtattatgtttggtagtgattagagttcggttagtgtaacgtcgcgtatatttgaacgttggatgcggtcgantgattattgtcgtattgttatagttacggattgcgataatttgagntatagagaggtcgataacgttagatgtttcgacgtagtagcgcgtagtgtatacgcggcggaaggtagtttggcgtttaaattatcgattataaattcgttattgnttgcgtttcggncgttaggtgtgtgtttcgtagtatttagttaaaatngtcgaggtttgggtcgacggtagtaggagtgttttatttgagatttgtgaagatgttaggcgtcgagtttgtaagtttgacgagattaggtttatatttatcgagattttgttgggaagcgaattttagggtcgattgcggattttgtgcgaattggtgag

SEQ ID NO: 24796 - DNA, 705 bp, Artificial Sequence
  chemically treated genomic DNA (Homo sapiens) CpG-island No: 24796
  unsure (162, 198, 210, 316, 362, 455, 523, 529, 541, 545, 606)
ctcaccaattcgcacaaaatccgcaatcgaccctaaaattcgcttcccaacaaaatctcgataaatataaacctaatctcgtcaaacttacaaactcgacgcctaacatcttcacaaatctcaaataaaacactcctactaccgtcgacccaaacctcgacnattttaactaaatactacgaaacacacacctaacgnccgaaacgcaancaataacgaatttataatcgataatttaaacgccaaactaccttccgccgcgtatacactacgcgctactacgtcgaaacatctaacgttatcgacctctctatanctcaaattatcgcaatccgtaactataacaatacgacaataatcantcgaccgcatccaacgttcaaatatacgcgacgttacactaaccgaactctaatcactaccaaacataatacatacgaaaaaataaaacgacnacgtaacaaaaatatactatcgatcgaaaacatacaacgcgacgcatacaacaaacaaaaacacaaanaaacanccctattaaaanaacnacgaccaaaccgtctaacctcgaaccgattcctcttacacactcaacgtcataccaaacgnacccccgtataacgtaaacaatctactataacacatacgaactacctacaaccgtcaataaacgttaaacaataaacacacaaactaaaatacgtcatt

SEQ ID NO: 24797 - DNA, 527 bp, Artificial Sequence
  chemically treated genomic DNA (Homo sapiens) CpG-island No: 24797
attttggtcgtagcgcgcgggcgatgtacgttagtttatttacgtttttacggtagatttagcgtttggaagaagatttcggttagtcgttgtttgtgcgcgataatcgtacggtgacgttgattgaagcgggcgaagagttgcgcgttttcgtttagtaaacgttgttgtagtattagtagttgcgttatattatcgattagtaagggtcgtcgttttttggcgaattatatattttttgttcggtgatcgttgtttatagttatttgtcgtcgattttggatcgttttcgcgcggaatattcgtcggtggagattaaatttattattggtgatgcggtagatgcgatggaaaaggtggttattggtgaagcggatttggcgattgcgggtaaatcggaaattttgttcggcgtagtggcgttttcgatgttggagaatttggtagtagtgttgattgttttcgcgttgttttgttcggtgcgtaattatttttatagtatatagtatattcgcgatattgtattt

SEQ ID NO: 24798 - DNA, 527 bp, Artificial Sequence
  chemically treated genomic DNA (Homo sapiens) CpG-island No: 24798
aaatacaatatcgcgaatatactatatactataaaaataattacgcaccgaacaaaacaacgcgaaaacaatcaacactactaccaaattctccaacatcgaaaacgccactacgccgaacaaaatttccgatttacccgcaatcgccaaatccgcttcaccaataaccaccttttccatcgcatctaccgcatcaccaataataaatttaatctccaccgacgaatattccgcgcgaaaacgatccaaaatcgacgacaaataactataaacaacgatcaccgaacaaaaaatatataattcgccaaaaaacgacgacccttactaatcgataatataacgcaactactaatactacaacaacgtttactaaacgaaaacgcgcaactcttcgcccgcttcaatcaacgtcaccgtacgattatcgcgcacaaacaacgactaaccgaaatcttcttccaaacgctaaatctaccgtaaaaacgtaaataaactaacgtacatcgcccgcgcgctacgaccaaaat

SEQ ID NO: 24799 - DNA, 527 bp, Artificial Sequence
  chemically treated genomic DNA (Homo sapiens) CpG-island No: 24799
aggtatagtatcgcgggtatattgtatgttgtagaagtgattacgtatcgggtagggtagcgcgggggtaattagtattattgttagattttttagtatcgaaaacgttattgcgtcgggtaaggttttcggtttattcgtaatcgttagattcgttttattagtgattattttttttatcgtatttgtcgtattattagtagtaagtttaatttttatcgacgggtgtttcgcgcggaagcgatttagaatcggcggtagatggttgtaggtagcggttatcgagtagaagatatgtaattcgttagagagcgacggtttttgttgatcgatggtgtggcgtaattgttgatattgtaatagcgtttgttgggcgaaaacgcgtagtttttcgttcgttttagttagcgttatcgtgcggttatcgcgtataaatagcggttgatcgagatttttttttaggcgttgaatttgtcgtgagagcgtggatgggttaacgtgtatcgttcgcgcgttgcggttaaaat

SEQ ID NO: 24800 - DNA, 527 bp, Artificial Sequence
  chemically treated genomic DNA (Homo sapiens) CpG-island No: 24800
attttaaccgcaacgcgcgaacgatacacgttaacccatccacgctctcacgacaaattcaacgcctaaaaaaaaatctcgatcaaccgctatttatacgcgataaccgcacgataacgctaactaaaacgaacgaaaaactacgcgttttcgcccaacaaacgctattacaatatcaacaattacgccacaccatcgatcaacaaaaaccgtcgctctctaacgaattacatatcttctactcgataaccgctacctacaaccatctaccgccgattctaaatcgcttccgcgcgaaacacccgtcgataaaaattaaacttactactaataatacgacaaatacgataaaaaaaataatcactaataaaacgaatctaacgattacgaataaaccgaaaaccttacccgacgcaataacgttttcgatactaaaaaatctaacaataatactaattacccccgcgctaccctacccgatacgtaatcacttctacaacatacaatatacccgcgatactatacct

SEQ ID NO: 24801 - DNA, 680 bp, Artificial Sequence
  chemically treated genomic DNA (Homo sapiens) CpG-island No: 24801
  unsure (60, 63..64, 84, 107, 119, 224, 267, 488..489, 530, 572, 601)
  unsure (611, 636)
tgttagttataaaggacgtgttatggtgtcggtcgcggtgtcggtggttttaagaaaganttnnacgatgtagtggttgcggtnttaacgttatatagtgggggtantttttacggcgntgttgtaagggagggataggtgtcgcgttagtacgagtatttagtttttttaacgttgtcgtggagtgttttatcgttattaggtaggggtattgtgtatcgagnacgttgtgtaaggttttacgttgggttttaggtaagagaaggngtggtacgtggtatgtttcgtggtgtggtgtagagtatgtggaagaataagggcgtcgcgttagagaggacgcgatggagcgaatgtagggcgcgatgtgcgatacggtgtggtgggggtcggtgtaaaagcgtgtaggtgaggtgtggtgtgtggtagaagaggtaagatgttttacgtgatgtgcgttataaggggtgtcgcgagagagggtttatcgnnacggtgggagtatcgtggggggggatagaaggtaaggtaancggtgggtttcgtcgcgttatagataaggggtaatagagggnaaacgtggggtgtagtagcgagagatttngtgtagggtntgttcgttaaggtcgggtgtcgtanagttcggtgggtgtaatttagtattaagttagaagggtagaagt

SEQ ID NO: 24802 - DNA, 680 bp, Artificial Sequence
  chemically treated genomic DNA (Homo sapiens) CpG-island No: 24802
  unsure (45, 70, 80, 109, 151, 192..193, 414, 457, 562, 574, 597, 617..618)
  unsure (621)
acttctacccttctaacttaatactaaattacacccaccgaactntacgacacccgaccttaacgaacanaccctacacnaaatctctcgctactacaccccacgtttnccctctattaccccttatctataacgcgacgaaacccaccgnttaccttaccttctatccccccccacgatactcccaccgtnncgataaaccctctctcgcgacaccccttataacgcacatcacgtaaaacatcttacctcttctaccacacaccacacctcacctacacgcttttacaccgacccccaccacaccgtatcgcacatcgcgccctacattcgctccatcgcgtcctctctaacgcgacgcccttattcttccacatactctacaccacaccacgaaacataccacgtaccacnccttctcttacctaaaacccaacgtaaaaccttacacaacgtnctcgatacacaatacccctacctaataacgataaaacactccacgacaacgttaaaaaaactaaatactcgtactaacgcgacacctatccctcccttacaacancgccgtaaaaantacccccactatataacgttaanaccgcaaccactacatcgtnnaantctttcttaaaaccaccgacaccgcgaccgacaccataacacgtcctttataactaaca

SEQ ID NO: 24803 - DNA, 680 bp, Artificial Sequence
  chemically treated genomic DNA (Homo sapiens) CpG-island No: 24803
  unsure (45, 70, 80, 109, 151, 192..193, 414, 457, 562, 574, 597, 617..618)
  unsure (621)
atttttatttttttaatttggtattaggttatatttatcgaattntgcgatattcgattttaacgggtanattttatatngaatttttcgttgttatattttacgtttnttttttgttattttttatttgtaacgcgacggaatttatcgnttattttattttttgtttttttttacgatgtttttatcgtnncggtgggttttttttcgcggtattttttgtaacgtatattacgtaggatattttattttttttattatatattatattttatttatacgtttttatatcggtttttattatatcgtgtcgtatatcgcgttttatattcgttttatcgcgttttttttaacgcggcgtttttatttttttatatattttatattatattacggaatatattacgtgttatntttttttttatttggagtttaacgtgagattttatatagcgtnttcggtgtatagtgtttttatttagtgacggtggggtattttacgataacgttgagggagttgggtgttcgtattggcgcgatatttgttttttttttataatancgtcgtggaggntgtttttattatgtggcgttggnatcgtaattattatatcgtnnggnttttttttgggattatcggtatcgcgatcggtattataatacgttttttgtaattagta

SEQ ID NO: 24804 - DNA, 680 bp, Artificial Sequence
  chemically treated genomic DNA (Homo sapiens) CpG-island No: 24804
  unsure (60, 63..64, 84, 107, 119, 224, 267, 488..489, 530, 572, 601)
  unsure (611, 636)
tactaattacaaaaaacgtattataataccgatcgcgataccgataatcccaaaaaaaanccnnacgatataataattacgatnccaacgccacataataaaaacancctccacgacgntattataaaaaaaaaacaaatatcgcgccaatacgaacacccaactccctcaacgttatcgtaaaataccccaccgtcactaaataaaaacactatacaccgaanacgctatataaaatctcacgttaaactccaaataaaaaaaaanataacacgtaatatattccgtaatataatataaaatatataaaaaaataaaaacgccgcgttaaaaaaaacgcgataaaacgaatataaaacgcgatatacgacacgatataataaaaaccgatataaaaacgtataaataaaatataatatataataaaaaaaataaaatatcctacgtaatatacgttacaaaaaataccgcgaaaaaaaacccaccgnnacgataaaaacatcgtaaaaaaaaacaaaaaataaaataancgataaattccgtcgcgttacaaataaaaaataacaaaaaanaaacgtaaaatataacaacgaaaaattcnatataaaatntacccgttaaaatcgaatatcgcanaattcgataaatataacctaataccaaattaaaaaaataaaaat

SEQ ID NO: 24805 - DNA, 715 bp, Artificial Sequence
  chemically treated genomic DNA (Homo sapiens) CpG-island No: 24805
tcggtttcggtttagttcgttcggttttcggggtaagagttttcgtttacgttattttcgtcgtcgttttttcggttttttagcgaaagagataaagagtcggcgttttaattcgcgaagtcgcggttgtcgggagcggtagatcgggggattttgttttaaaacgaggggcgggcgtagggagggcgaggtggtggtattcgggttaagttgtcgcgcgttcggttgcgcgggtagcgggatacgcggatgtggggcgggtagtttcggcgtatggaagtagtggttttaggcgagagtttgcgggtttcgacggacggacgggcgggtattagcgcgcggtggtcggagttcggtagtttcgcggcgggtcggtcgagcgtttggggtagcgtcgttgggcgggtcggtcgtagttgtatttatcggatcggaagaaggtcgcgatgtcggttaggtttttggtcgttttttttgttttttcgtcggtatcgttttcgtagttcgagttagcgcgttggttagtacgcggcgagggtcggagagacgtaggtagggggtaggtaggtattcgtatagattgtatgtcgtattaatggatatgcgggcggatagtacgcgacgaggtacggtgatatcgatattagaggattttagaagattatatataagatagatttagggagaatgaacgaagaattaggaagtttagata

SEQ ID NO: 24806 - DNA, 715 bp, Artificial Sequence
  chemically treated genomic DNA (Homo sapiens) CpG-island No: 24806
tatctaaacttcctaattcttcgttcattctccctaaatctatcttatatataatcttctaaaatcctctaatatcgatatcaccgtacctcgtcgcgtactatccgcccgcatatccattaatacgacatacaatctatacgaatacctacctaccccctacctacgtctctccgaccctcgccgcgtactaaccaacgcgctaactcgaactacgaaaacgataccgacgaaaaaacaaaaaaaacgaccaaaaacctaaccgacatcgcgaccttcttccgatccgataaatacaactacgaccgacccgcccaacgacgctaccccaaacgctcgaccgacccgccgcgaaactaccgaactccgaccaccgcgcgctaatacccgcccgtccgtccgtcgaaacccgcaaactctcgcctaaaaccactacttccatacgccgaaactacccgccccacatccgcgtatcccgctacccgcgcaaccgaacgcgcgacaacttaacccgaataccaccacctcgccctccctacgcccgcccctcgttttaaaacaaaatcccccgatctaccgctcccgacaaccgcgacttcgcgaattaaaacgccgactctttatctctttcgctaaaaaaccgaaaaaacgacgacgaaaataacgtaaacgaaaactcttaccccgaaaaccgaacgaactaaaccgaaaccga

SEQ ID NO: 24807 - DNA, 715 bp, Artificial Sequence
  chemically treated genomic DNA (Homo sapiens) CpG-island No: 24807
tgtttggattttttggtttttcgtttattttttttgggtttgttttatgtgtggttttttggggttttttgatgtcggtgttatcgtgtttcgtcgcgtgttgttcgttcgtatgtttattgatgcggtatgtagtttgtgcggatgtttgtttgttttttgtttgcgttttttcggttttcgtcgcgtgttggttagcgcgttggttcgggttgcgggggcggtgtcggcgagggggtagaggaggcggttaaggatttggtcgatatcgcggttttttttcgattcggtgagtgtaattgcggtcggttcgtttagcggcgttgttttaagcgttcggtcgattcgtcgcggagttgtcgagtttcggttatcgcgcgttggtgttcgttcgttcgttcgtcggggttcgtaggttttcgtttgggattattgtttttatgcgtcggggttgttcgttttatattcgcgtgtttcgttgttcgcgtagtcgggcgcgcggtagtttggttcgaatgttattatttcgttttttttgcgttcgtttttcgttttagggtagaatttttcggtttgtcgttttcggtagtcgcggtttcgcgggttggggcgtcggttttttgtttttttcgttggaggatcgaggaggcggcggcggagatggcgtgggcggaggtttttatttcggaggtcgagcggattgagtcggggtcgg

SEQ ID NO: 24808 - DNA, 715 bp, Artificial Sequence
  chemically treated genomic DNA (Homo sapiens) CpG-island No: 24808
ccgaccccgactcaatccgctcgacctccgaaataaaaacctccgcccacgccatctccgccgccgcctcctcgatcctccaacgaaaaaaacaaaaaaccgacgccccaacccgcgaaaccgcgactaccgaaaacgacaaaccgaaaaattctaccctaaaacgaaaaacgaacgcaaaaaaaacgaaataataacattcgaaccaaactaccgcgcgcccgactacgcgaacaacgaaacacgcgaatataaaacgaacaaccccgacgcataaaaacaataatcccaaacgaaaacctacgaaccccgacgaacgaacgaacgaacaccaacgcgcgataaccgaaactcgacaactccgcgacgaatcgaccgaacgcttaaaacaacgccgctaaacgaaccgaccgcaattacactcaccgaatcgaaaaaaaaccgcgatatcgaccaaatccttaaccgcctcctctaccccctcgccgacaccgcccccgcaacccgaaccaacgcgctaaccaacacgcgacgaaaaccgaaaaaacgcaaacaaaaaacaaacaaacatccgcacaaactacataccgcatcaataaacatacgaacgaacaacacgcgacgaaacacgataacaccgacatcaaaaaaccccaaaaaaccacacataaaacaaacccaaaaaaaataaacgaaaaaccaaaaaatccaaaca

SEQ ID NO: 24809 - DNA, 845 bp, Artificial Sequence
  chemically treated genomic DNA (Homo sapiens) CpG-island No: 24809
gaattgggcgcggtcggggttcgtttcgtattgttttcgaggtttcgtcgttaatttattttattttaggaggtcgcggtcgcgtttatttatttttcgtcgtatcgttaacgcgcgttttgcggggcgtagagatcggggttcggtcgttttcggggggttttagagataggtgaggggtttcgttgttattgtttagcggtttttacggttcgtaggttcgtcgcgttttgcgttgagcggatatttggcggtcggcggagttttagcggagtcggttttgtaaggttgaggttttagtgcgttcgcgtatgtttcgggtttggtggggcggcgggggcggggttgttaatgaatacgaggggcgggcgcgggacgttggggcggggttgggggcggggcggggcggtagggggagcgttgcgttgagtatttggtcgcgcgcggtcgggtcgcgggggagttttcgttgtagttgttgcgtttttaaggtaagcgggcgcggggttcggttttgcgggcgcggcgcggggggtattcgggggcggagattgggttcgttagttttagtagttatttgcgtcgtagtttttgtttttcgcgttttttcgagttatattttcgggtcgttttgcgcgtttttgagttttcggattgggatgttcggagttcggcgttgcgggttcggtgcgaggacgcgacggggaggttttgtaaaggtcgcgagcgggggttattcgtcggtcgcgtttaggataggtttgttatttttttcgggttttgtgtttggcgttttggttttttttcgcggttacggacgtttttgtagtttttttttttagatt

SEQ ID NO: 24810 - DNA, 845 bp, Artificial Sequence
  chemically treated genomic DNA (Homo sapiens) CpG-island No: 24810
aatctaaaaaaaaaaactacaaaaacgtccgtaaccgcgaaaaaaaaccaaaacgccaaacacaaaacccgaaaaaaataacaaacctatcctaaacgcgaccgacgaataacccccgctcgcgacctttacaaaacctccccgtcgcgtcctcgcaccgaacccgcaacgccgaactccgaacatcccaatccgaaaactcaaaaacgcgcaaaacgacccgaaaatataactcgaaaaaacgcgaaaaacaaaaactacgacgcaaataactactaaaactaacgaacccaatctccgcccccgaataccccccgcgccgcgcccgcaaaaccgaaccccgcgcccgcttaccttaaaaacgcaacaactacaacgaaaactcccccgcgacccgaccgcgcgcgaccaaatactcaacgcaacgctccccctaccgccccgccccgcccccaaccccgccccaacgtcccgcgcccgcccctcgtattcattaacaaccccgcccccgccgccccaccaaacccgaaacatacgcgaacgcactaaaacctcaaccttacaaaaccgactccgctaaaactccgccgaccgccaaatatccgctcaacgcaaaacgcgacgaacctacgaaccgtaaaaaccgctaaacaataacaacgaaacccctcacctatctctaaaaccccccgaaaacgaccgaaccccgatctctacgccccgcaaaacgcgcgttaacgatacgacgaaaaataaataaacgcgaccgcgacctcctaaaataaaataaattaacgacgaaacctcgaaaacaatacgaaacgaaccccgaccgcgcccaattc

SEQ ID NO: 24811 - DNA, 845 bp, Artificial Sequence
  chemically treated genomic DNA (Homo sapiens) CpG-island No: 24811
ggtttggagggaagggttgtaggggcgttcgtggtcgcgaagaaaggttaaagcgttaggtatagggttcggagaaagtgatagatttgttttgggcgcggtcgacgggtgattttcgttcgcggtttttgtaaagttttttcgtcgcgttttcgtatcgagttcgtagcgtcgaatttcgggtattttaattcgggggtttagggacgcgtagggcggttcgggaatgtggttcgggggagcgcggggggtaggggttgcggcgtaggtggttgttggggttgacgggtttagttttcgttttcgggtgtttttcgcgtcgcgttcgtaggatcgagtttcgcgttcgtttattttggagacgtagtaattgtagcggaggttttttcgcgattcggtcgcgcgcgattaagtgtttagcgtagcgttttttttgtcgtttcgtttcgtttttagtttcgttttagcgtttcgcgttcgtttttcgtgtttattggtagtttcgttttcgtcgttttattaggttcggagtatgcgcgggcgtattgagattttagttttataagatcggtttcgttgaggtttcgtcggtcgttaggtattcgtttagcgtagggcgcggcggatttgcgggtcgtgggaatcgttgggtagtggtagcgaggttttttatttgtttttggggtttttcggggacgatcggatttcgatttttgcgtttcgtaggacgcgcgttgacggtgcggcgggggatggatgagcgcggtcgcggttttttggggtggggtgggttggcggcggggtttcgaggatagtgcggggcgagtttcgatcgcgtttagttt

SEQ ID NO: 24812 - DNA, 845 bp, Artificial Sequence
  chemically treated genomic DNA (Homo sapiens) CpG-island No: 24812
aaactaaacgcgatcgaaactcgccccgcactatcctcgaaaccccgccgccaacccaccccaccccaaaaaaccgcgaccgcgctcatccatcccccgccgcaccgtcaacgcgcgtcctacgaaacgcaaaaatcgaaatccgatcgtccccgaaaaaccccaaaaacaaataaaaaacctcgctaccactacccaacgattcccacgacccgcaaatccgccgcgccctacgctaaacgaatacctaacgaccgacgaaacctcaacgaaaccgatcttataaaactaaaatctcaatacgcccgcgcatactccgaacctaataaaacgacgaaaacgaaactaccaataaacacgaaaaacgaacgcgaaacgctaaaacgaaactaaaaacgaaacgaaacgacaaaaaaaacgctacgctaaacacttaatcgcgcgcgaccgaatcgcgaaaaaacctccgctacaattactacgtctccaaaataaacgaacgcgaaactcgatcctacgaacgcgacgcgaaaaacacccgaaaacgaaaactaaacccgtcaaccccaacaaccacctacgccgcaacccctaccccccgcgctcccccgaaccacattcccgaaccgccctacgcgtccctaaacccccgaattaaaatacccgaaattcgacgctacgaactcgatacgaaaacgcgacgaaaaaactttacaaaaaccgcgaacgaaaatcacccgtcgaccgcgcccaaaacaaatctatcactttctccgaaccctatacctaacgctttaacctttcttcgcgaccacgaacgcccctacaacccttccctccaaacc

SEQ ID NO: 24813 - DNA, 505 bp, Artificial Sequence
  chemically treated genomic DNA (Homo sapiens) CpG-island No: 24813
cgagggatatggttcggtcgattacgtacgggggatatggataaggggtaattgagaagagacgaatttaaagggagttgaataacgggaggtggcgaagagcgcgatcgcggagagaagtatgaaattgttttaatttcgatcgtcgcgatagatattaagaagggttttggattttcgcgataaatattacgtggggtataatacgtgttttattacggagattggggtagtgtgacgggaggggaatatagcggtagggagagtgtgtgtgtgtatcgtagtgataggggtattcgggatagggaggtgatgtagcgacgaggtggatatggaattattatgacgagtatagtagaggaatataggcgataagtagtatcgcggggtacggagggtcgagtgttcggatatatatataagatataaggggatgtgttacggataggggggatatggggagggggttatagaagggttgggggcgaaacggagtggatatgag

SEQ ID NO: 24814 - DNA, 505 bp, Artificial Sequence
  chemically treated genomic DNA (Homo sapiens) CpG-island No: 24814
ctcatatccactccgtttcgcccccaacccttctataaccccctccccatatcccccctatccgtaacacatccccttatatcttatatatatatccgaacactcgaccctccgtaccccgcgatactacttatcgcctatattcctctactatactcgtcataataattccatatccacctcgtcgctacatcacctccctatcccgaatacccctatcactacgatacacacacacactctccctaccgctatattcccctcccgtcacactaccccaatctccgtaataaaacacgtattataccccacgtaatatttatcgcgaaaatccaaaacccttcttaatatctatcgcgacgatcgaaattaaaacaatttcatacttctctccgcgatcgcgctcttcgccacctcccgttattcaactccctttaaattcgtctcttctcaattaccccttatccatatcccccgtacgtaatcgaccgaaccatatccctcg

SEQ ID NO: 24815 - DNA, 505 bp, Artificial Sequence
  chemically treated genomic DNA (Homo sapiens) CpG-island No: 24815
tttatatttatttcgtttcgtttttagtttttttgtggttttttttttatattttttttattcgtgatatatttttttatgttttgtgtatatattcggatattcggtttttcgtatttcgcggtattatttgtcgtttgtatttttttattgtattcgttatggtaattttatgtttatttcgtcgttgtattatttttttatttcgggtatttttgttattgcgatatatatatatattttttttatcgttatgtttttttttcgttatattattttagttttcgtggtggggtacgtattgtattttacgtggtgtttatcgcgggagtttagggttttttttggtgtttgtcgcggcggtcggggttggggtaattttatattttttttcgcggtcgcgtttttcgttatttttcgttatttagttttttttgaattcgtttttttttagttgttttttatttatgtttttcgtgcgtagtcggtcgggttatatttttcg

SEQ ID NO: 24816 - DNA, 505 bp, Artificial Sequence
  chemically treated genomic DNA (Homo sapiens) CpG-island No: 24816
cgaaaaatataacccgaccgactacgcacgaaaaacataaataaaaaacaactaaaaaaaaacgaattcaaaaaaaactaaataacgaaaaataacgaaaaacgcgaccgcgaaaaaaaatataaaattaccccaaccccgaccgccgcgacaaacaccaaaaaaaaccctaaactcccgcgataaacaccacgtaaaatacaatacgtaccccaccacgaaaactaaaataatataacgaaaaaaaaacataacgataaaaaaaatatatatatatatcgcaataacaaaaatacccgaaataaaaaaataatacaacgacgaaataaacataaaattaccataacgaatacaataaaaaaatacaaacgacaaataataccgcgaaatacgaaaaaccgaatatccgaatatatacacaaaacataaaaaaatatatcacgaataaaaaaaatataaaaaaaaaaccacaaaaaaactaaaaacgaaacgaaataaatataaa

SEQ ID NO: 24817 - DNA, 864 bp, Artificial Sequence
  chemically treated genomic DNA (Homo sapiens) CpG-island No: 24817
gaataagggcggggcggaaaatggtttgcggaaatgagattgtttgggtaggttaatgaggtacggtcgcgggaggggattaaagtgtgtggttgggattacgcgcgaaaatatgttgtagttttattttaggggcgttattacggtcggttgtagggtgatcgggtcggtggttttagttgttttttattggggatgatttggggatagcgcgttgatcgcgtagtcggcgggtatttacggtaggtcgttggggaggttgttaggtgatgaggacgtgtcgatgggaatgtgtgagttggagaaggtaaagggatagggatcgtagggattattggaaggggcgtgtgcgtatttgggaatcgagggcgtatggcgtttgatgtatattatagaatgtcgggtttgatatgtgattgcgcgtgtgtgagtttattggtaggggtcgatcgtcggcgatagttggttgggatcggggttggggtgttttgttttaattggattagtatatacgacgggcgcgtaaagggttggtgggcgattgtgcgcgttggcggatttgtagtgaggattattgttttatggaatgttggcggcgtttaggtagatttagggagagagattgtttggagtgtcgttgtttgcgaatgagggttggtattatgtatcgtagtgggcgcgtaagcgtatttgagtgacggagtattcgcgtaaggtgtttgtttttgtaaagcgttttgcggttgttgtcgggttaatgacgagttttcgggaaggattgttaattttggtatcgtatgagggggtatgtcggtaatgttttgatgggggggggtaatatatcgtgtgtttaatgaattttta

SEQ ID NO: 24818 - DNA, 864 bp, Artificial Sequence
  chemically treated genomic DNA (Homo sapiens) CpG-island No: 24818
taaaaattcattaaacacacgatatattacccccccccatcaaaacattaccgacataccccctcatacgataccaaaattaacaatccttcccgaaaactcgtcattaacccgacaacaaccgcaaaacgctttacaaaaacaaacaccttacgcgaatactccgtcactcaaatacgcttacgcgcccactacgatacataataccaaccctcattcgcaaacaacgacactccaaacaatctctctccctaaatctacctaaacgccgccaacattccataaaacaataatcctcactacaaatccgccaacgcgcacaatcgcccaccaaccctttacgcgcccgtcgtatatactaatccaattaaaacaaaacaccccaaccccgatcccaaccaactatcgccgacgatcgacccctaccaataaactcacacacgcgcaatcacatatcaaacccgacattctataatatacatcaaacgccatacgccctcgattcccaaatacgcacacgccccttccaataatccctacgatccctatccctttaccttctccaactcacacattcccatcgacacgtcctcatcacctaacaacctccccaacgacctaccgtaaatacccgccgactacgcgatcaacgcgctatccccaaatcatccccaataaaaaacaactaaaaccaccgacccgatcaccctacaaccgaccgtaataacgcccctaaaataaaactacaacatattttcgcgcgtaatcccaaccacacactttaatcccctcccgcgaccgtacctcattaacctacccaaacaatctcatttccgcaaaccattttccgccccgcccttattc

SEQ ID NO: 24819 - DNA, 864 bp, Artificial Sequence
  chemically treated genomic DNA (Homo sapiens) CpG-island No: 24819
taagagtttattaaatatacggtatgttatttttttttattaaagtattgtcggtatatttttttatgcggtgttaaggttggtaatttttttcgaaaattcgttattagttcgatagtaatcgtagaacgttttatagggataaatattttacgcgggtatttcgttatttaaatacgtttacgcgtttattacggtgtataatgttagtttttattcgtaaatagcggtattttaaatagtttttttttttagatttatttgagcgtcgttaatattttatagggtaatggtttttattataagttcgttaacgcgtataatcgtttattaattttttacgcgttcgtcgtatatgttaatttagttggggtaggatattttaatttcggttttagttaattatcgtcggcggtcggtttttattaataggtttatatacgcgtagttatatattaaattcggtattttgtagtgtgtattaaacgttatgcgttttcggtttttaggtacgtatacgttttttttaatagtttttacggtttttgtttttttattttttttagtttatatatttttatcggtacgtttttattatttagtaatttttttagcgatttatcgtgagtattcgtcggttacgcgattaacgcgttgtttttaagttatttttagtgagaagtaattggaattatcggttcggttattttatagtcggtcgtaatagcgtttttaaagtaaggttataatatgttttcgcgcgtagttttagttatatattttaattttttttcgcggtcgtgttttattagtttatttaagtaattttattttcgtaaattatttttcgtttcgtttttattt

SEQ ID NO: 24820 - DNA, 864 bp, Artificial Sequence
  chemically treated genomic DNA (Homo sapiens) CpG-island No: 24820
aaataaaaacgaaacgaaaaataatttacgaaaataaaattacttaaataaactaataaaacacgaccgcgaaaaaaaattaaaatatataactaaaactacgcgcgaaaacatattataaccttactttaaaaacgctattacgaccgactataaaataaccgaaccgataattccaattacttctcactaaaaataacttaaaaacaacgcgttaatcgcgtaaccgacgaatactcacgataaatcgctaaaaaaattactaaataataaaaacgtaccgataaaaatatataaactaaaaaaaataaaaaaacaaaaaccgtaaaaactattaaaaaaaacgtatacgtacctaaaaaccgaaaacgcataacgtttaatacacactacaaaataccgaatttaatatataactacgcgtatataaacctattaataaaaaccgaccgccgacgataattaactaaaaccgaaattaaaatatcctaccccaactaaattaacatatacgacgaacgcgtaaaaaattaataaacgattatacgcgttaacgaacttataataaaaaccattaccctataaaatattaacgacgctcaaataaatctaaaaaaaaaaactatttaaaataccgctatttacgaataaaaactaacattatacaccgtaataaacgcgtaaacgtatttaaataacgaaatacccgcgtaaaatatttatccctataaaacgttctacgattactatcgaactaataacgaattttcgaaaaaaattaccaaccttaacaccgcataaaaaaatataccgacaatactttaataaaaaaaaataacataccgtatatttaataaactctta

SEQ ID NO: 24821 - DNA, 2343 bp, Artificial Sequence
  chemically treated genomic DNA (Homo sapiens) CpG-island No: 24821
atgtttggttttatgttgttagagtagtgttttcgtttgcgggtgatgtatcgtttgacgtttatcggttagtcggttttttttattatatttgtaatgtaattcggttattcggtgtttttcgttgatatgttgatgtttgttagttagttacgttcgttatattgttatcgttttgcggttttattttttacggtgcggtgcgtgatacggtttgtttcgttatagtgttagaggatgattagatttttatttttattttgtgtgagtttttcggttaggttataatgataacgttgcgttcgttcgttaaagtcggttttttgtattagtcggtttagcgtatcgtaattgaagacgttgtggttgtcgttttcgttggttaggttgatgatacgttcggtagtatcgtattttatattgcgcgttagttcgttttgcgtggtgttgatcgtttttttttacgtatcgtattgtgtttcgtttcggttgtcgttcggggtgataacggtagttaggtcgtttgcggcgttgtatttatatcgcgttttacggttttgtgcgttttttatcgaggttaatcggttacggttgttatagcggcggtaaaggttgatgtttttttcgcggtggatcgtcgttatttggtcgaagcggtcgtatttataacgggtttggtagttcgagtagtcggtgaacgttagtaattgttcgtagcggttttaggttatttgtcgggtgttgttcgtcgtattcgttgtcgtcgtcggtaatttattgtgcgcgttatcgtagcggtagcgtattgttttttcgttgcgcgatgttttcgatattagtttgttcggtttattatattttcggcggttttttagttcgttcggggatattatcgtcgttagttggttttcgtcgttatagtaaaatttcgtttttcgttcgttcggtgtggtgatgttcgtgatatcgtcggatattatatttagatcgtattttgtttttcgtttcgtcgcgttcgtttgcgtcgtgagtttttttgtcgcgttaaattgattttgcgtgacgttgtcgttcgcgtgttttttttttattattcgttttagttcgtttttattttgcgtgtgtaggattttacggcggtttaggttgtcggtgatggtgatgcggttttttttatattgatacgtgtaatttaagtttgtcgggtttagttgttttgttattcgttcgtcgttgtcgtaacggtaatagattttcggtcggttcgtgtgacggtgcgttattattcggtttcggtatttattatcgtaagtaaagttgcgtatttgtgtattgttgcggttatatatcgtcgttagttcgtcgcggggcgtttagttatagcgtattagcggcgcggtaggtaaatttttcgggtatttcgggtcgtgcgttagttatacggtagatagacggatgtcgttgtttcggttatattcggtgtaattcggtagggtattaggaaaagcggacggtttcgtttcgtcggaaatggtttgttgtcgggttttttttgttcgttgcgtttgcgtggttagtattagtcggaagtgacgttaggtattattcgttacgtcggtgatttcgtcgttgaatttatcggcggtttcgcggtggaacgtttgtgtgcgttcgaagcggtttattagttcggttagtattcggtacggcggtagcggcgtaggtagtattttattcgttttcggtattcgtttatattaatcgagtagttattacggtttttgcggattgtttgtcgttagataacgatgcggatttaagcggagttttttcggtagcgtttgttagagtgcggttagtcggtgatttttatttagtttcgttacgtcgtcgcgtattagttatagtgattcgttgcggttgtaatcgtttttatcgggaaataggtgtttaaaatataggtttttgtcgtcgttattattgagtattagtgtgttatcgcgtagttgtaagcggatattcgtaggtattttttagtcggggtcgaggttttttatcggcgcgggcgtttttgttcggtaattgttgtaggtgcgggagaggatgaacggtagcgggtcgggtagggcgatgtcggttttatcgggaaggatttttgtatcgagtaggggattgatcggatggtcggacgttatttcgtcggggtatatcgaataggttacgtcggtgggggtattaatacgtatttcggttgaattttgaataatgttatcgttatattgcgttatgttattttgacgcgtcgtcggtttttcgtttatcgtaaaatttttttttattatt

SEQ ID NO: 24822 - DNA, 2343 bp, Artificial Sequence
  chemically treated genomic DNA (Homo sapiens) CpG-island No: 24822
aataataaaaaaaaattttacgataaacgaaaaaccgacgacgcgtcaaaataacataacgcaatataacgataacattattcaaaattcaaccgaaatacgtattaatacccccaccgacgtaacctattcgatataccccgacgaaataacgtccgaccatccgatcaatcccctactcgatacaaaaatccttcccgataaaaccgacatcgccctacccgacccgctaccgttcatcctctcccgcacctacaacaattaccgaacaaaaacgcccgcgccgataaaaaacctcgaccccgactaaaaaatacctacgaatatccgcttacaactacgcgataacacactaatactcaataataacgacgacaaaaacctatattttaaacacctatttcccgataaaaacgattacaaccgcaacgaatcactataactaatacgcgacgacgtaacgaaactaaataaaaatcaccgactaaccgcactctaacaaacgctaccgaaaaaactccgcttaaatccgcatcgttatctaacgacaaacaatccgcaaaaaccgtaataactactcgattaatataaacgaataccgaaaacgaataaaatactacctacgccgctaccgccgtaccgaatactaaccgaactaataaaccgcttcgaacgcacacaaacgttccaccgcgaaaccgccgataaattcaacgacgaaatcaccgacgtaacgaataatacctaacgtcacttccgactaatactaaccacgcaaacgcaacgaacaaaaaaaacccgacaacaaaccatttccgacgaaacgaaaccgtccgcttttcctaataccctaccgaattacaccgaatataaccgaaacaacgacatccgtctatctaccgtataactaacgcacgacccgaaatacccgaaaaatttacctaccgcgccgctaatacgctataactaaacgccccgcgacgaactaacgacgatatataaccgcaacaatacacaaatacgcaactttacttacgataataaataccgaaaccgaataataacgcaccgtcacacgaaccgaccgaaaatctattaccgttacgacaacgacgaacgaataacaaaacaactaaacccgacaaacttaaattacacgtatcaatataaaaaaaaccgcatcaccatcaccgacaacctaaaccgccgtaaaatcctacacacgcaaaataaaaacgaactaaaacgaataataaaaaaaaaacacgcgaacgacaacgtcacgcaaaatcaatttaacgcgacaaaaaaactcacgacgcaaacgaacgcgacgaaacgaaaaacaaaatacgatctaaatataatatccgacgatatcacgaacatcaccacaccgaacgaacgaaaaacgaaattttactataacgacgaaaaccaactaacgacgataatatccccgaacgaactaaaaaaccgccgaaaatataataaaccgaacaaactaatatcgaaaacatcgcgcaacgaaaaaacaatacgctaccgctacgataacgcgcacaataaattaccgacgacgacaacgaatacgacgaacaacacccgacaaataacctaaaaccgctacgaacaattactaacgttcaccgactactcgaactaccaaacccgttataaatacgaccgcttcgaccaaataacgacgatccaccgcgaaaaaaacatcaacctttaccgccgctataacaaccgtaaccgattaacctcgataaaaaacgcacaaaaccgtaaaacgcgatataaatacaacgccgcaaacgacctaactaccgttatcaccccgaacgacaaccgaaacgaaacacaatacgatacgtaaaaaaaaacgatcaacaccacgcaaaacgaactaacgcgcaatataaaatacgatactaccgaacgtatcatcaacctaaccaacgaaaacgacaaccacaacgtcttcaattacgatacgctaaaccgactaatacaaaaaaccgactttaacgaacgaacgcaacgttatcattataacctaaccgaaaaactcacacaaaataaaaataaaaatctaatcatcctctaacactataacgaaacaaaccgtatcacgcaccgcaccgtaaaaaataaaaccgcaaaacgataacaatataacgaacgtaactaactaacaaacatcaacatatcaacgaaaaacaccgaataaccgaattacattacaaatataataaaaaaaaccgactaaccgataaacgtcaaacgatacatcacccgcaaacgaaaacactactctaacaacataaaaccaaacat

SEQ ID NO: 24823 - DNA, 2343 bp, Artificial Sequence
  chemically treated genomic DNA (Homo sapiens) CpG-island No: 24823
aataatagaaaaggattttacgatgagcggaaaatcggcggcgcgttagggtgatatgacgtagtatggcggtagtattgtttagggtttagtcggggtacgtattggtgtttttatcggcgtggtttgttcggtgtgtttcggcggagtgacgttcggttattcggttaattttttgttcggtgtaaaggtttttttcggtgaaatcgatatcgttttgttcggttcgttgtcgtttattttttttcgtatttatagtagttatcggataaaaacgttcgcgtcggtggggagtttcggtttcggttggaaaatgtttgcggatattcgtttatagttgcgcgataatatattgatatttagtgataacggcggtagaagtttgtattttgagtatttgtttttcggtgaggacggttatagtcgtagcgagttattgtggttggtgcgcggcggcgtggcgaaattggatgaaggttatcggttggtcgtattttggtaggcgttgtcggaagaatttcgtttaagttcgtatcgttatttggcgataaatagttcgtaggggtcgtggtggttgttcggttggtgtgagcgggtgtcggaagcggatgaggtgttgtttgcgtcgttgtcgtcgtatcgggtattgatcgggttggtggatcgtttcgggcgtatatagacgttttatcgcgaagtcgtcggtgaatttagcggcgaaattatcggcgtgacggatggtgtttggcgttattttcggttggtattgattacgtaggcgtagcgggtagaagaagttcggtagtaggttattttcggcgggacggaatcgttcgttttttttgatattttgtcgggttatatcgaatatggtcgggataacggtattcgtttgtttgtcgtgtggttgacgtacgattcggaatattcggagaatttatttgtcgcgtcgttggtgcgttatggttggacgtttcgcggcgaattggcggcggtgtatgatcgtagtaatatataggtgcgtagttttatttacgatgataaatatcggggtcggatggtggcgtatcgttatacgggtcgatcggaaatttgttatcgttacgatagcgacgggcgggtgatagaatagttaaattcggtaggtttaagttatacgtattagtatgagaaggatcgtattattattatcgatagtttgaatcgtcgtgaagttttgtatacgtagggtgaaggcgggttgaagcgggtggtgaaaaaggaatacgcggacggtagcgttacgtagagttagtttgacgcggtaggaaggtttacggcgtagacggacgcggcgggacggaggatagagtacggtttgaatgtggtgttcggcgatattacggatattattatatcggacgggcgggagacgaaattttattataacgacgggaattagttgacggcggtggtgttttcggacgggttggagagtcgtcgggaatatgatgaatcgggtaggttggtatcggagatatcgcgtagcggggagatagtacgttatcgttacgatgacgcgtatagtgagttatcggcgacgataacggatgcgacgggtagtattcggtagatgatttggagtcgttacgggtagttgttggcgtttatcgattgttcgggttattagattcgttatgaatacgatcgtttcggttagatgacggcggtttatcgcgaggaaggtattagtttttatcgtcgttatgataatcgtggtcggttaatttcggtgaaagacgtatagggtcgtgaaacgcggtatgaatataacgtcgtaggcgatttgattgtcgttattatttcggacggtaatcggagcgagatatagtacgatgcgtggggaaaggcggttagtattacgtagggcgggttgacgcgtagtatggagtacgatgttgtcggacgtgttattagtttgattaacgagaacggtagttatagcgtttttagttacgatgcgttggatcggttggtataggaaatcggttttgacgggcggacgtaacgttattattatgatttgatcggaaaatttatatagagtgaggatgagggtttggttattttttggtattatgacgaagtagatcgtattacgtatcgtatcgtgaagggtgaaatcgtagagcggtggtagtatgacgaacgtggttggttgatagatattagtatattagcgaagggtatcgggtggtcgggttgtattataggtatgatgagaaaggtcggttgatcggtgagcgttagacggtgtattattcgtagacggaagtattgttttggtagtatgagattagatat

SEQ ID NO: 24824 - DNA, 2343 bp, Artificial Sequence
  chemically treated genomic DNA (Homo sapiens) CpG-island No: 24824
atatctaatctcatactaccaaaacaatacttccgtctacgaataatacaccgtctaacgctcaccgatcaaccgacctttctcatcatacctataatacaacccgaccacccgatacccttcgctaatatactaatatctatcaaccaaccacgttcgtcatactaccaccgctctacgatttcacccttcacgatacgatacgtaatacgatctacttcgtcataataccaaaaaataaccaaaccctcatcctcactctatataaattttccgatcaaatcataataataacgttacgtccgcccgtcaaaaccgatttcctataccaaccgatccaacgcatcgtaactaaaaacgctataactaccgttctcgttaatcaaactaataacacgtccgacaacatcgtactccatactacgcgtcaacccgccctacgtaatactaaccgcctttccccacgcatcgtactatatctcgctccgattaccgtccgaaataataacgacaatcaaatcgcctacgacgttatattcataccgcgtttcacgaccctatacgtctttcaccgaaattaaccgaccacgattatcataacgacgataaaaactaataccttcctcgcgataaaccgccgtcatctaaccgaaacgatcgtattcataacgaatctaataacccgaacaatcgataaacgccaacaactacccgtaacgactccaaatcatctaccgaatactacccgtcgcatccgttatcgtcgccgataactcactatacgcgtcatcgtaacgataacgtactatctccccgctacgcgatatctccgataccaacctacccgattcatcatattcccgacgactctccaacccgtccgaaaacaccaccgccgtcaactaattcccgtcgttataataaaatttcgtctcccgcccgtccgatataataatatccgtaatatcgccgaacaccacattcaaaccgtactctatcctccgtcccgccgcgtccgtctacgccgtaaaccttcctaccgcgtcaaactaactctacgtaacgctaccgtccgcgtattcctttttcaccacccgcttcaacccgccttcaccctacgtatacaaaacttcacgacgattcaaactatcgataataataatacgatccttctcatactaatacgtataacttaaacctaccgaatttaactattctatcacccgcccgtcgctatcgtaacgataacaaatttccgatcgacccgtataacgatacgccaccatccgaccccgatatttatcatcgtaaataaaactacgcacctatatattactacgatcatacaccgccgccaattcgccgcgaaacgtccaaccataacgcaccaacgacgcgacaaataaattctccgaatattccgaatcgtacgtcaaccacacgacaaacaaacgaataccgttatcccgaccatattcgatataacccgacaaaatatcaaaaaaaacgaacgattccgtcccgccgaaaataacctactaccgaacttcttctacccgctacgcctacgtaatcaataccaaccgaaaataacgccaaacaccatccgtcacgccgataatttcgccgctaaattcaccgacgacttcgcgataaaacgtctatatacgcccgaaacgatccaccaacccgatcaatacccgatacgacgacaacgacgcaaacaacacctcatccgcttccgacacccgctcacaccaaccgaacaaccaccacgacccctacgaactatttatcgccaaataacgatacgaacttaaacgaaattcttccgacaacgcctaccaaaatacgaccaaccgataaccttcatccaatttcgccacgccgccgcgcaccaaccacaataactcgctacgactataaccgtcctcaccgaaaaacaaatactcaaaatacaaacttctaccgccgttatcactaaatatcaatatattatcgcgcaactataaacgaatatccgcaaacattttccaaccgaaaccgaaactccccaccgacgcgaacgtttttatccgataactactataaatacgaaaaaaaataaacgacaacgaaccgaacaaaacgatatcgatttcaccgaaaaaaacctttacaccgaacaaaaaattaaccgaataaccgaacgtcactccgccgaaacacaccgaacaaaccacgccgataaaaacaccaatacgtaccccgactaaaccctaaacaatactaccgccatactacgtcatatcaccctaacgcgccgccgattttccgctcatcgtaaaatccttttctattatt

SEQ ID NO: 24825 - DNA, 961 bp, Artificial Sequence
  chemically treated genomic DNA (Homo sapiens) CpG-island No: 24825
  unsure (110)
tgaataacgcgttaagcgcgatgagttcggtgagtaaagcggtgtagtaaatcgtaggtcggataagacgtttcggcgtcgtattcgataatgtgtaggcgttgaatgtncggatgcggtgtaagtattttattcggtttatagatcggagttaaatatgtaaattattattatcgttttatttaagcgtagttggttttcgtttttgagttgggtcgttgtattcgtcgtgttggtcgtttcgtggtagggcgcggaaatggtttcgtttacgttgattaaagacggcggtaatatggcgacgttcgtcgtcgattttttttcgttcgattttagttagtggtaggattattttatcgaaatggtcgttacgttgtaaatcgtcgtttggggtatcgcgttggcggtggttttttttattttttttggtttgatgagcgtcgaaaatttggtgtcgtggtgggttattagttcgttcgtcgtttgatggacgtttgtcgcgttattaacgaaatggttttcgttatgttgttcgtggtcgtcgtcggtttcggttcgttcgttggcgtgttggcgtgttggcgttgtttatttatattatcggcgtgttttttaagttgtttttcgaagcggtggaagcgattgagttcggttcggtggaaggtattcgcgttatcggtgttaataagttcgaagagattttttacggcgtgttgttataggtgatgttattgttgattttttattttttttatcgtttcgaatttaacgttcgttcggcgatcgtcgtcggtatggtcggcgtaggcgggatcggcgttattttgtgggaagcgattcgcggtttttagttttaataaagttgcgttttgatggtgtttattatcgttacggttagtttgttggatttttttttttaacggttgcgtaagtattttatttgataagcgaggttttgata

SEQ ID NO: 24826 - DNA, 961 bp, Artificial Sequence
  chemically treated genomic DNA (Homo sapiens) CpG-island No: 24826
  unsure (852)
tatcaaaacctcgcttatcaaataaaatacttacgcaaccgttaaaaaaaaaaatccaacaaactaaccgtaacgataataaacaccatcaaaacgcaactttattaaaactaaaaaccgcgaatcgcttcccacaaaataacgccgatcccgcctacgccgaccataccgacgacgatcgccgaacgaacgttaaattcgaaacgataaaaaaaataaaaaatcaacaataacatcacctataacaacacgccgtaaaaaatctcttcgaacttattaacaccgataacgcgaataccttccaccgaaccgaactcaatcgcttccaccgcttcgaaaaacaacttaaaaaacacgccgataatataaataaacaacgccaacacgccaacacgccaacgaacgaaccgaaaccgacgacgaccacgaacaacataacgaaaaccatttcgttaataacgcgacaaacgtccatcaaacgacgaacgaactaataacccaccacgacaccaaattttcgacgctcatcaaaccaaaaaaaataaaaaaaaccaccgccaacgcgataccccaaacgacgatttacaacgtaacgaccatttcgataaaataatcctaccactaactaaaatcgaacgaaaaaaaatcgacgacgaacgtcgccatattaccgccgtctttaatcaacgtaaacgaaaccatttccgcgccctaccacgaaacgaccaacacgacgaatacaacgacccaactcaaaaacgaaaaccaactacgcttaaataaaacgataataataatttacatatttaactccgatctataaaccgaataaaatacttacaccgcatccgnacattcaacgcctacacattatcgaatacgacgccgaaacgtcttatccgacctacgatttactacaccgctttactcaccgaactcatcgcgcttaacgcgttattca

SEQ ID NO: 24827 - DNA, 961 bp, Artificial Sequence
  chemically treated genomic DNA (Homo sapiens) CpG-island No: 24827
  unsure (852)
tattaaggtttcgtttattagataaagtgtttacgtaatcgttgagagaggaaatttagtaggttgatcgtgacgatgataagtattattagggcgtagttttgttggaattggaaatcgcgaatcgttttttatagggtgacgtcgatttcgtttgcgtcgattatgtcgacgacggtcgtcgagcggacgttggattcgaagcgatagagggagtaggagattagtagtggtattatttgtggtagtacgtcgtagaggattttttcgagtttgttggtatcggtggcgcgaatgttttttatcgggtcgggtttaatcgtttttatcgtttcggaaagtagtttggagagtacgtcggtggtgtggataaatagcgttagtacgttagtacgttagcgaacgggtcgaggtcgacggcgattacgaatagtatggcgaagattatttcgttaatggcgcggtaggcgtttattaggcggcgaacgggttggtaatttattacggtattaggttttcggcgtttattaggttaaaggggatggagagaattatcgttagcgcggtgttttagacggcgatttgtagcgtgacggttatttcggtgaggtaattttgttattggttgaaatcgggcgggaagaagtcggcggcgaacgtcgttatgttgtcgtcgtttttgattagcgtaagcggggttattttcgcgttttgttacgagacgattaatacggcgagtataacggtttagtttagaagcgagaattagttgcgtttgggtggggcgatggtgatggtttgtatgtttggtttcggtttgtaggtcggataaggtgtttgtatcgtattcgngtatttaacgtttgtatattgtcggatgcgacgtcggggcgttttattcgatttacgatttattgtatcgttttatttatcgaatttatcgcgtttagcgcgttgttta

SEQ ID NO: 24828 - DNA, 961 bp, Artificial Sequence
  chemically treated genomic DNA (Homo sapiens) CpG-island No: 24828
  unsure (110)
taaacaacgcgctaaacgcgataaattcgataaataaaacgatacaataaatcgtaaatcgaataaaacgccccgacgtcgcatccgacaatatacaaacgttaaatacncgaatacgatacaaacaccttatccgacctacaaaccgaaaccaaacatacaaaccatcaccatcgccccacccaaacgcaactaattctcgcttctaaactaaaccgttatactcgccgtattaatcgtctcgtaacaaaacgcgaaaataaccccgcttacgctaatcaaaaacgacgacaacataacgacgttcgccgccgacttcttcccgcccgatttcaaccaataacaaaattacctcaccgaaataaccgtcacgctacaaatcgccgtctaaaacaccgcgctaacgataattctctccatcccctttaacctaataaacgccgaaaacctaataccgtaataaattaccaacccgttcgccgcctaataaacgcctaccgcgccattaacgaaataatcttcgccatactattcgtaatcgccgtcgacctcgacccgttcgctaacgtactaacgtactaacgctatttatccacaccaccgacgtactctccaaactactttccgaaacgataaaaacgattaaacccgacccgataaaaaacattcgcgccaccgataccaacaaactcgaaaaaatcctctacgacgtactaccacaaataataccactactaatctcctactccctctatcgcttcgaatccaacgtccgctcgacgaccgtcgtcgacataatcgacgcaaacgaaatcgacgtcaccctataaaaaacgattcgcgatttccaattccaacaaaactacgccctaataatacttatcatcgtcacgatcaacctactaaatttcctctctcaacgattacgtaaacactttatctaataaacgaaaccttaata

SEQ ID NO: 24829 - DNA, 680 bp, Artificial Sequence
  chemically treated genomic DNA (Homo sapiens) CpG-island No: 24829
ttttattttaattttttttttagaggggcgaggggatcgatcgcgtttaatgttgcgatcggtttgttttattttttgcgtaataattttaacgtattcgttgttattagtatcgtcgttttcgtatttgttagtattgttagttataattcggttatttttaatagcgtggtgacgaggaagattttttttagttttagcgtaatagtgatgttttggcggatattggcgtgagtggcgcgtgttagtttaattatttgtattaggtcgcgtaggtggttatgggttaatgttgcgtcggcggtttttagcgttacgtttgtgtcgttatttattgtaatttcgatggcggtagtttttatcgttggcgcgtcgttaatatcgttatcgattatcgttagcggcgtatgttgatttagttcggttatcgttttgattttatttttcggtaataggttcgttttaaattttagttttagtttttcggtaattgtcgtcgttgcgcgtggattatcgtcggtgaggattatttttttgacgtttagcgcgtttagtttattgatggtagttgtagtatcggcgcgtagggtattttgtaacgtaatgatattaagtacgttatcgttacgtattattagtattatcgtttgttcggcgttttttagttcgttaattaaagt

SEQ ID NO: 24830 - DNA, 680 bp, Artificial Sequence
  chemically treated genomic DNA (Homo sapiens) CpG-island No: 24830
actttaattaacgaactaaaaaacgccgaacaaacgataatactaataatacgtaacgataacgtacttaatatcattacgttacaaaataccctacgcgccgatactacaactaccatcaataaactaaacgcgctaaacgtcaaaaaaataatcctcaccgacgataatccacgcgcaacgacgacaattaccgaaaaactaaaactaaaatttaaaacgaacctattaccgaaaaataaaatcaaaacgataaccgaactaaatcaacatacgccgctaacgataatcgataacgatattaacgacgcgccaacgataaaaactaccgccatcgaaattacaataaataacgacacaaacgtaacgctaaaaaccgccgacgcaacattaacccataaccacctacgcgacctaatacaaataattaaactaacacgcgccactcacgccaatatccgccaaaacatcactattacgctaaaactaaaaaaaatcttcctcgtcaccacgctattaaaaataaccgaattataactaacaatactaacaaatacgaaaacgacgatactaataacaacgaatacgttaaaattattacgcaaaaaataaaacaaaccgatcgcaacattaaacgcgatcgatcccctcgcccctctaaaaaaaaaattaaaataaaa

SEQ ID NO: 24831 - DNA, 680 bp, Artificial Sequence
  chemically treated genomic DNA (Homo sapiens) CpG-island No: 24831
gttttaattaacgaattggaaagcgtcgggtaaacggtagtgttggtagtacgtaacgatgacgtgtttggtgttattgcgttataggatattttgcgcgtcgatgttgtaattgttattagtgaattgaacgcgttgggcgttaaaggggtgatttttatcggcgataatttacgcgtagcggcggtaattgtcggggagttggggttggagtttaaagcgggtttgttgtcggaagataaagttaaagcggtgatcgagttgaattaatatgcgtcgttggcgatggtcggtgacggtattaacgacgcgttagcgatgaaagttgtcgttatcgggattgtaatgggtagcggtatagacgtggcgttggaaatcgtcgacgtagtattaatttataattatttgcgcggtttggtgtaaatgattgaattggtacgcgttatttacgttaatattcgttagaatattattattgcgttggggttgaaagggatttttttcgttattacgttgttagggatgatcgggttgtggttggtagtgttggtagatacgggggcgacggtgttggtgatagcgaatgcgttaagattgttgcgtaggagataaggtaaatcgatcgtaatattgagcgcgatcggttttttcgtttttttggggagagggttagggtgagg

SEQ ID NO: 24832 - DNA, 680 bp, Artificial Sequence
  chemically treated genomic DNA (Homo sapiens) CpG-island No: 24832
cctcaccctaaccctctccccaaaaaaacgaaaaaaccgatcgcgctcaatattacgatcgatttaccttatctcctacgcaacaatcttaacgcattcgctatcaccaacaccgtcgcccccgtatctaccaacactaccaaccacaacccgatcatccctaacaacgtaataacgaaaaaaatccctttcaaccccaacgcaataataatattctaacgaatattaacgtaaataacgcgtaccaattcaatcatttacaccaaaccgcgcaaataattataaattaatactacgtcgacgatttccaacgccacgtctataccgctacccattacaatcccgataacgacaactttcatcgctaacgcgtcgttaataccgtcaccgaccatcgccaacgacgcatattaattcaactcgatcaccgctttaactttatcttccgacaacaaacccgctttaaactccaaccccaactccccgacaattaccgccgctacgcgtaaattatcgccgataaaaatcacccctttaacgcccaacgcgttcaattcactaataacaattacaacatcgacgcgcaaaatatcctataacgcaataacaccaaacacgtcatcgttacgtactaccaacactaccgtttacccgacgctttccaattcgttaattaaaac

SEQ ID NO: 24833 - DNA, 554 bp, Artificial Sequence
  chemically treated genomic DNA (Homo sapiens) CpG-island No: 24833
cgtcggggttcggtaaacgattatcgttcggttatattttcgatgcgtgaattatagtaacgcgtttttacggttagcgttacgtcgttttattaataatttttgttaggttttttttagttattttcggatagtgttcgagggttaatgcgttgacgttgtcgtttaggttatgtttgcgtattttattagtaaaggtgattatcgtatcgttttcgttacgtttcgttagttacgggtattttttttttacgttgaacggttgcggattaataataattttggtttttgttattttaattttcggttatcggcgggaagaaagttatttcgtcgtcgttagttagcggatggttaaaatttattagcgtttggttgacggtagttagtaatttgttattttttagcgttagcgtttagcgatcgttttgcgtagttatgtgttggcgtaacgttttaatagttgggaaattcgtagttatttcggttgtatttgtttttattaattcgcgtatttgggcgaaaaaaagaattttaattattcgtttttattt

SEQ ID NO: 24834 - DNA, 554 bp, Artificial Sequence
  chemically treated genomic DNA (Homo sapiens) CpG-island No: 24834
aaataaaaacgaataattaaaattctttttttcgcccaaatacgcgaattaataaaaacaaatacaaccgaaataactacgaatttcccaactattaaaacgttacgccaacacataactacgcaaaacgatcgctaaacgctaacgctaaaaaataacaaattactaactaccgtcaaccaaacgctaataaattttaaccatccgctaactaacgacgacgaaataactttcttcccgccgataaccgaaaattaaaataacaaaaaccaaaattattattaatccgcaaccgttcaacgtaaaaaaaaaatacccgtaactaacgaaacgtaacgaaaacgatacgataatcacctttactaataaaatacgcaaacataacctaaacgacaacgtcaacgcattaaccctcgaacactatccgaaaataactaaaaaaaacctaacaaaaattattaataaaacgacgtaacgctaaccgtaaaaacgcgttactataattcacgcatcgaaaatataaccgaacgataatcgtttaccgaaccccgacg

SEQ ID NO: 24835 - DNA, 554 bp, Artificial Sequence
  chemically treated genomic DNA (Homo sapiens) CpG-island No: 24835
aggtggaagcggatgattaaagttttttttttcgtttaggtgcgcgagttggtgggaatagatgtaatcgaagtggttgcggattttttaattgttgaagcgttacgttagtatatggttgcgtagagcgatcgttgggcgttggcgttggaagatggtaaattattggttgtcgttaattagacgttggtgagttttgattattcgttgattgacggcgacgaagtagtttttttttcgtcggtaatcggaggttaagatggtagaaattaaaattgttgttggttcgtagtcgtttagcgtaggagaagagtattcgtggttggcggagcgtgacgaagacggtgcggtagttatttttattggtaaggtgcgtaaatataatttgggcgatagcgttaacgtattaattttcgaatattattcggggatgattgaaaaaggtttggtagaaattgttgatgaagcggcgtaacgttggtcgtgggggcgcgttattgtgatttacgtatcgggaatatggtcgggcgataatcgtttgtcgggtttcggcg

SEQ ID NO: 24836 - DNA, 554 bp, Artificial Sequence
  chemically treated genomic DNA (Homo sapiens) CpG-island No: 24836
cgccgaaacccgacaaacgattatcgcccgaccatattcccgatacgtaaatcacaataacgcgcccccacgaccaacgttacgccgcttcatcaacaatttctaccaaacctttttcaatcatccccgaataatattcgaaaattaatacgttaacgctatcgcccaaattatatttacgcaccttaccaataaaaataactaccgcaccgtcttcgtcacgctccgccaaccacgaatactcttctcctacgctaaacgactacgaaccaacaacaattttaatttctaccatcttaacctccgattaccgacgaaaaaaaaactacttcgtcgccgtcaatcaacgaataatcaaaactcaccaacgtctaattaacgacaaccaataatttaccatcttccaacgccaacgcccaacgatcgctctacgcaaccatatactaacgtaacgcttcaacaattaaaaaatccgcaaccacttcgattacatctattcccaccaactcgcgcacctaaacgaaaaaaaaaactttaatcatccgcttccacct

SEQ ID NO: 24837 - DNA, 609 bp, Artificial Sequence
  chemically treated genomic DNA (Homo sapiens) CpG-island No: 24837
cgttttgtatatgttataaatggttagcgtcgttacggaggtcgcggttaatgtttttatttcgatatcggttttttcggttaggcggtataaggtttttatacgtattcgattgtgtttcggttcggtttgtaaattgattttaattttgttgagtattagcggatgatagagcgggattagattttaggtgcgttttgtcgtttgaatatcggtaatacgcgtagtggtaaatacgtcgtttttgtggtggcgattattaataattatcgttagcgtttcgttgcgtatggtgataaaggttttcgttcgcgttttacgtacggttttcgttttggcggagatattattatgtgcgtttcgttagcggcgtcgatatgggttagttgcgatatatttatttttttaaatgtggatgcgaatattatcggacgcgtatcgggtattagttgcgggcgatgattttttatgcgtacgtcgtttggttaatcgttgggtaattacgttgtggtagtcgtatcgtatatgattgaatttattttaagaatacggaatatatatttttcggtaaaggatagcggagtatatcgggttcgatattgatatata

SEQ ID NO: 24838 - DNA, 609 bp, Artificial Sequence
  chemically treated genomic DNA (Homo sapiens) CpG-island No: 24838
tatatatcaatatcgaacccgatatactccgctatcctttaccgaaaaatatatattccgtattcttaaaataaattcaatcatatacgatacgactaccacaacgtaattacccaacgattaaccaaacgacgtacgcataaaaaatcatcgcccgcaactaatacccgatacgcgtccgataatattcgcatccacatttaaaaaaataaatatatcgcaactaacccatatcgacgccgctaacgaaacgcacataataatatctccgccaaaacgaaaaccgtacgtaaaacgcgaacgaaaacctttatcaccatacgcaacgaaacgctaacgataattattaataatcgccaccacaaaaacgacgtatttaccactacgcgtattaccgatattcaaacgacaaaacgcacctaaaatctaatcccgctctatcatccgctaatactcaacaaaattaaaatcaatttacaaaccgaaccgaaacacaatcgaatacgtataaaaaccttataccgcctaaccgaaaaaaccgatatcgaaataaaaacattaaccgcgacctccgtaacgacgctaaccatttataacatatacaaaacg

SEQ ID NO: 24839 - DNA, 609 bp, Artificial Sequence
  chemically treated genomic DNA (Homo sapiens) CpG-island No: 24839
tgtgtgttaatatcgggttcggtgtgtttcgttattttttgtcgaagagtgtgtatttcgtgtttttagagtgaatttaattatgtgcggtacggttgttataacgtgattgtttagcggttgattaagcggcgtacgtatggaaaattatcgttcgtagttgatgttcggtacgcgttcggtgatgttcgtatttatatttgaagaaataagtatgtcgtaattgatttatatcgacgtcgttggcgaagcgtatatggtgatgttttcgttaaagcggaaatcgtgcgtgaagcgcgggcggaagtttttgttattatgcgtagcgagacgttggcgatgattattgatggtcgttattataaaggcgacgtatttgttattgcgcgtattgtcggtatttaggcggtaaaacgtatttgggatttgatttcgttttgttattcgttgatgtttagtaaagttgaagttaatttataggtcgagtcggagtataatcgggtgcgtatagaaattttatgtcgtttgatcgggaaaatcggtgtcgaaatggaagtattaatcgcggttttcgtggcggcgttgattatttatgatatgtgtaaagcg

SEQ ID NO: 24840 - DNA, 609 bp, Artificial Sequence
  chemically treated genomic DNA (Homo sapiens) CpG-island No: 24840
cgctttacacatatcataaataatcaacgccgccacgaaaaccgcgattaatacttccatttcgacaccgattttcccgatcaaacgacataaaatttctatacgcacccgattatactccgactcgacctataaattaacttcaactttactaaacatcaacgaataacaaaacgaaatcaaatcccaaatacgttttaccgcctaaataccgacaatacgcgcaataacaaatacgtcgcctttataataacgaccatcaataatcatcgccaacgtctcgctacgcataataacaaaaacttccgcccgcgcttcacgcacgatttccgctttaacgaaaacatcaccatatacgcttcgccaacgacgtcgatataaatcaattacgacatacttatttcttcaaatataaatacgaacatcaccgaacgcgtaccgaacatcaactacgaacgataattttccatacgtacgccgcttaatcaaccgctaaacaatcacgttataacaaccgtaccgcacataattaaattcactctaaaaacacgaaatacacactcttcgacaaaaaataacgaaacacaccgaacccgatattaacacaca

SEQ ID NO: 24841 - DNA, 507 bp, Artificial Sequence
  chemically treated genomic DNA (Homo sapiens) CpG-island No: 24841
tgaattaatttattgtcggagtttgtttggtcgcgattggcggtttttggtattattttatcgttggttttgtgatgttcggcgtcgtttggatgttgtggcgtagtaaacgcgtcgcgttttggttatacgtagttttgttgttcggtattatgatttggggcgtttgggaagttggtttcgatttttgggcgttgatttcgcgtagcgatattttggtttttttcggtatttggttgattttgtcgtttgtttggcgtcgtttggttatttttgttagcggcgtagttgtcgtattggtggtcgtattgttgattagcggtggtattttgatttgggtcggatttaacgattcgtaggagattaacggtattttaagcgtcgatgttatatttgttgaagttatttttttcgtagtcgattaggattggtttgtttatggtcgtaattaggaaggttaacgtttttcgtcgttgaaataaattaacgtcgataacgtttataatt

SEQ ID NO: 24842 - DNA, 507 bp, Artificial Sequence
  chemically treated genomic DNA (Homo sapiens) CpG-island No: 24842
aattataaacgttatcgacgttaatttatttcaacgacgaaaaacgttaaccttcctaattacgaccataaacaaaccaatcctaatcgactacgaaaaaaataacttcaacaaatataacatcgacgcttaaaataccgttaatctcctacgaatcgttaaatccgacccaaatcaaaataccaccgctaatcaacaatacgaccaccaatacgacaactacgccgctaacaaaaataaccaaacgacgccaaacaaacgacaaaatcaaccaaataccgaaaaaaaccaaaatatcgctacgcgaaatcaacgcccaaaaatcgaaaccaacttcccaaacgccccaaatcataataccgaacaacaaaactacgtataaccaaaacgcgacgcgtttactacgccacaacatccaaacgacgccgaacatcacaaaaccaacgataaaataataccaaaaaccgccaatcgcgaccaaacaaactccgacaataaattaattca

SEQ ID NO: 24843 - DNA, 507 bp, Artificial Sequence
  chemically treated genomic DNA (Homo sapiens) CpG-island No: 24843
gattatggacgttatcggcgttaatttgttttagcggcgaaaagcgttgatttttttgattacgattataggtaggttagttttgatcggttacgggggagatagttttagtaggtgtggtatcggcgtttaaggtgtcgttgattttttgcggatcgttaaattcggtttaggttaggatattatcgttaattagtagtgcgattattagtgcggtaattgcgtcgttggtaggaatgattaggcgacgttagataaacggtaggattagttagatgtcgaagaagattagaatgtcgttgcgcggagttagcgtttagaagtcgaaattaattttttagacgttttaaattatggtgtcgagtagtagggttgcgtatagttaaagcgcggcgcgtttattgcgttatagtatttaggcgacgtcgagtattataaggttagcgatagggtagtattaggagtcgttaatcgcgattaggtaggtttcggtaatgagttgattta

SEQ ID NO: 24844 - DNA, 507 bp, Artificial Sequence
  chemically treated genomic DNA (Homo sapiens) CpG-island No: 24844
taaatcaactcattaccgaaacctacctaatcgcgattaacgactcctaatactaccctatcgctaaccttataatactcgacgtcgcctaaatactataacgcaataaacgcgccgcgctttaactatacgcaaccctactactcgacaccataatttaaaacgtctaaaaaattaatttcgacttctaaacgctaactccgcgcaacgacattctaatcttcttcgacatctaactaatcctaccgtttatctaacgtcgcctaatcattcctaccaacgacgcaattaccgcactaataatcgcactactaattaacgataatatcctaacctaaaccgaatttaacgatccgcaaaaaatcaacgacaccttaaacgccgataccacacctactaaaactatctcccccgtaaccgatcaaaactaacctacctataatcgtaatcaaaaaaatcaacgcttttcgccgctaaaacaaattaacgccgataacgtccataatc

SEQ ID NO: 24845 - DNA, 515 bp, Artificial Sequence
  chemically treated genomic DNA (Homo sapiens) CpG-island No: 24845
gcgtcgttacgcgtatcgttaggtagacgtttataggttttatgtgttttttgtatttgtttttagtttagttttacgtttagatcgggcgtattaggaacggtaattttttcgtttttaatttttagcggatttcgggttaggcgataatcgtttttttgttaaatttagtgggtatcgatagcggtaggattattcggtgtcgtcgcgtttatatgggtaaatatcgttagagagatatcgaaatggttattagaatggtagatttaggttagttttaagtcgtcgtatagttgcgtatacggattgtatcggaagcgttaaagtgcggtcggtagtggatatttatcgttgattttacgtatgatattttcgtcgttgtggtatttgtagtttatagatagcggtgcggtgaatcggtatattagttcgatagcgtttgttattgttcgttggtaatttcgttgtttaaggttagatatcggatggtttttacgtatataggttttaattta

SEQ ID NO: 24846 - DNA, 515 bp, Artificial Sequence
  chemically treated genomic DNA (Homo sapiens) CpG-island No: 24846
taaattaaaacctatatacgtaaaaaccatccgatatctaaccttaaacaacgaaattaccaacgaacaataacaaacgctatcgaactaatataccgattcaccgcaccgctatctataaactacaaataccacaacgacgaaaatatcatacgtaaaatcaacgataaatatccactaccgaccgcactttaacgcttccgatacaatccgtatacgcaactatacgacgacttaaaactaacctaaatctaccattctaataaccatttcgatatctctctaacgatatttacccatataaacgcgacgacaccgaataatcctaccgctatcgatacccactaaatttaacaaaaaaacgattatcgcctaacccgaaatccgctaaaaattaaaaacgaaaaaattaccgttcctaatacgcccgatctaaacgtaaaactaaactaaaaacaaatacaaaaaacacataaaacctataaacgtctacctaacgatacgcgtaacgacgc

SEQ ID NO: 24847 - DNA, 515 bp, Artificial Sequence
  chemically treated genomic DNA (Homo sapiens) CpG-island No: 24847
tgggttggaatttgtgtacgtgaggattattcggtgtttaattttaagtagcggagttattagcgagtagtggtagacgttgtcggattagtatgtcgatttatcgtatcgttgtttgtggattatagatgttatagcggcggaaatgttatacgtgaggttagcggtagatatttattgtcgatcgtattttgacgttttcggtgtagttcgtgtgcgtagttgtgcgacgatttggggttgatttgggtttgttattttgataattatttcgatatttttttggcgatgtttatttatgtgggcgcggcggtatcgggtaattttatcgttatcgatatttattggatttggtaggagggcgattgtcgtttgattcgaaattcgttggagattaaaaacggaaaaattgtcgtttttgatgcgttcggtttgggcgtggaattggattgggaataggtataaaaggtatatgaggtttataaacgtttgtttggcggtgcgcgtaacgacgt

SEQ ID NO: 24848 - DNA, 515 bp, Artificial Sequence
  chemically treated genomic DNA (Homo sapiens) CpG-island No: 24848
acgtcgttacgcgcaccgccaaacaaacgtttataaacctcatataccttttatacctattcccaatccaattccacgcccaaaccgaacgcatcaaaaacgacaatttttccgtttttaatctccaacgaatttcgaatcaaacgacaatcgccctcctaccaaatccaataaatatcgataacgataaaattacccgataccgccgcgcccacataaataaacatcgccaaaaaaatatcgaaataattatcaaaataacaaacccaaatcaaccccaaatcgtcgcacaactacgcacacgaactacaccgaaaacgtcaaaatacgatcgacaataaatatctaccgctaacctcacgtataacatttccgccgctataacatctataatccacaaacaacgatacgataaatcgacatactaatccgacaacgtctaccactactcgctaataactccgctacttaaaattaaacaccgaataatcctcacgtacacaaattccaaccca

SEQ ID NO: 24849 - DNA, 529 bp, Artificial Sequence
  chemically treated genomic DNA (Homo sapiens) CpG-island No: 24849
cgatttgtacgcggtagatggcgatgagtataaatttttttgcgttgcgaaaggcggcggttttgttaataaaacgtatttttattaggaaattaaagttttgttgattttcggtaaattgaaaaattttttcgtcgagaaaatgcgtattttcggtattgtagtttgttcgtcgtattatatcgcgtttgtgattggcggtacgtttgcggaaattaatttgaaaatcgttaagttagtaagcgtttattattacgatgaattgtcgacggaagggaacgaatatggttaggcgtttcgcgatgtttagttggaataggaattgttggaagaggtttagaaattcggttttggcgcgtagtttggcggtaaatatttcgcgtacgatattcgcgtgattcgtttgttacgttacggcgtattttgttcggtcggtatgggcgttttttgttttgttgatcgtaatattaaagcgaagattaatcgttaggggatttggatcgaaaaattggaatataatttaggttag

SEQ ID NO: 24850 - DNA, 529 bp, Artificial Sequence
  chemically treated genomic DNA (Homo sapiens) CpG-island No: 24850
ctaacctaaattatattccaatttttcgatccaaatcccctaacgattaatcttcgctttaatattacgatcaacaaaacaaaaaacgcccataccgaccgaacaaaatacgccgtaacgtaacaaacgaatcacgcgaatatcgtacgcgaaatatttaccgccaaactacgcgccaaaaccgaatttctaaacctcttccaacaattcctattccaactaaacatcgcgaaacgcctaaccatattcgttcccttccgtcgacaattcatcgtaataataaacgcttactaacttaacgattttcaaattaatttccgcaaacgtaccgccaatcacaaacgcgatataatacgacgaacaaactacaataccgaaaatacgcattttctcgacgaaaaaatttttcaatttaccgaaaatcaacaaaactttaatttcctaataaaaatacgttttattaacaaaaccgccgcctttcgcaacgcaaaaaaatttatactcatcgccatctaccgcgtacaaatcg

SEQ ID NO: 24851 - DNA, 529 bp, Artificial Sequence
  chemically treated genomic DNA (Homo sapiens) CpG-island No: 24851
ttggtttggattatgttttagtttttcgatttagattttttgacggttgattttcgttttgatattacggttagtagagtaggagacgtttatatcgatcgggtaggatgcgtcgtgacgtggtaggcgaattacgcgaatgtcgtgcgcgaagtatttatcgttaaattgcgcgttaagatcgagtttttgggttttttttagtagtttttgttttagttggatatcgcggaacgtttgattatgttcgttttttttcgtcggtagtttatcgtaatagtgagcgtttgttaatttgacggtttttaggttggttttcgtagacgtatcgttaattataaacgcgatatggtacggcgggtaggttgtagtatcgagggtacgtattttttcgacgaggaagttttttagtttgtcgggagttagtagggttttggttttttggtagagatacgttttgttggtagagtcgtcgtttttcgtaacgtaaaggaatttgtatttatcgttatttatcgcgtataggtcg

SEQ ID NO: 24852 - DNA, 529 bp, Artificial Sequence
  chemically treated genomic DNA (Homo sapiens) CpG-island No: 24852
cgacctatacgcgataaataacgataaatacaaattcctttacgttacgaaaaacgacgactctaccaacaaaacgtatctctaccaaaaaaccaaaaccctactaactcccgacaaactaaaaaacttcctcgtcgaaaaaatacgtaccctcgatactacaacctacccgccgtaccatatcgcgtttataattaacgatacgtctacgaaaaccaacctaaaaaccgtcaaattaacaaacgctcactattacgataaactaccgacgaaaaaaaacgaacataatcaaacgttccgcgatatccaactaaaacaaaaactactaaaaaaaacccaaaaactcgatcttaacgcgcaatttaacgataaatacttcgcgcacgacattcgcgtaattcgcctaccacgtcacgacgcatcctacccgatcgatataaacgtctcctactctactaaccgtaatatcaaaacgaaaatcaaccgtcaaaaaatctaaatcgaaaaactaaaacataatccaaaccaa

SEQ ID NO: 24853 - DNA, 644 bp, Artificial Sequence
  chemically treated genomic DNA (Homo sapiens) CpG-island No: 24853
ggggggggtcgggagtggcgggtgtgtggcgggtggtgtaggggggtgagtggggaggtgtggggtgggtgagggataggtaggggtgggggcggggggggtggtggggggagtgggcgatggggagggggggggagatggatgattgggagttcgggtgtcgtggagaggtgtagtgagcgatgggaaggcgagtacggtaattcgtagcgggcgagcgggatgggtcggttagttaggcgtcggagcggtatagtgttagatgagataggcgtagtagaggtgcgggtagcgagcgatggaggtgttggtaggcgaggtgcgcggtgaggtggtgggatggggcggtgtaatgaggttgggtgcgagtgtatggttgtaaggtatttggagcgcgttttcgggtagaggtagtgttttaggcgtttgttagttgtgttttttagcggcggcgattatttcgtcgggcgtttttgtcggagtcgtaggattattatttcgttcgttatttcgttttcgtcgtttagttcggtaatgtttcggcgtattttcgggttaatttggattttcgtaatatcgcgtagataaacgggtacgttatttttattggtttttaaaacgatgtgattaaagtcgtcgagcgt

SEQ ID NO: 24854 - DNA, 644 bp, Artificial Sequence
  chemically treated genomic DNA (Homo sapiens) CpG-island No: 24854
acgctcgacgactttaatcacatcgttttaaaaaccaataaaaataacgtacccgtttatctacgcgatattacgaaaatccaaattaacccgaaaatacgccgaaacattaccgaactaaacgacgaaaacgaaataacgaacgaaataataatcctacgactccgacaaaaacgcccgacgaaataatcgccgccgctaaaaaacacaactaacaaacgcctaaaacactacctctacccgaaaacgcgctccaaataccttacaaccatacactcgcacccaacctcattacaccgccccatcccaccacctcaccgcgcacctcgcctaccaacacctccatcgctcgctacccgcacctctactacgcctatctcatctaacactataccgctccgacgcctaactaaccgacccatcccgctcgcccgctacgaattaccgtactcgccttcccatcgctcactacacctctccacgacacccgaactcccaatcatccatctccccccccctccccatcgcccactccccccaccaccccccccgcccccacccctacctatccctcacccaccccacacctccccactcacccccctacaccacccgccacacacccgccactcccgacccccccc

SEQ ID NO: 24855 - DNA, 644 bp, Artificial Sequence
  chemically treated genomic DNA (Homo sapiens) CpG-island No: 24855
acgttcgacgattttaattatatcgttttaaaagttagtgaaaatggcgtgttcgtttatttgcgcgatgttgcgaaggtttagattggttcggagatgcgtcggggtattgtcgaattaaacggcgaaggcgaagtggcgggcggggtggtgattttgcgatttcggtaaaaacgttcgacgaagtgatcgtcgtcgttgaaggatataattggtaaacgtttgaaatattatttttgttcggaagcgcgttttagatattttataattatatattcgtatttagttttattgtatcgttttattttattattttatcgcgtatttcgtttgttaatatttttatcgttcgttgttcgtatttttgttgcgtttgttttatttggtattgtgtcgtttcggcgtttggttggtcgatttatttcgttcgttcgttgcgggttgtcgtattcgtttttttatcgtttattgtatttttttacggtattcgaatttttaattatttatttttttttttttttttatcgtttattttttttattatttttttcgtttttatttttatttattttttatttattttatatttttttatttatttttttgtattattcgttatatattcgttattttcgatttttttt

SEQ ID NO: 24856 - DNA, 644 bp, Artificial Sequence
  chemically treated genomic DNA (Homo sapiens) CpG-island No: 24856
aaaaaaaatcgaaaataacgaatatataacgaataatacaaaaaaataaataaaaaaatataaaataaataaaaaataaataaaaataaaaacgaaaaaaataataaaaaaaataaacgataaaaaaaaaaaaaaaaataaataattaaaaattcgaataccgtaaaaaaatacaataaacgataaaaaaacgaatacgacaacccgcaacgaacgaacgaaataaatcgaccaaccaaacgccgaaacgacacaataccaaataaaacaaacgcaacaaaaatacgaacaacgaacgataaaaatattaacaaacgaaatacgcgataaaataataaaataaaacgatacaataaaactaaatacgaatatataattataaaatatctaaaacgcgcttccgaacaaaaataatatttcaaacgtttaccaattatatccttcaacgacgacgatcacttcgtcgaacgtttttaccgaaatcgcaaaatcaccaccccgcccgccacttcgccttcgccgtttaattcgacaataccccgacgcatctccgaaccaatctaaaccttcgcaacatcgcgcaaataaacgaacacgccattttcactaacttttaaaacgatataattaaaatcgtcgaacgt

SEQ ID NO: 24857 - DNA, 581 bp, Artificial Sequence
  chemically treated genomic DNA (Homo sapiens) CpG-island No: 24857
atttgcgtcgtagtatgcgcgataagattcgcgagttgtaaaagtagtttgatattatttcgttgtacgttatttacgattagagcgaagtttttgcggtttttgatattggtgttggtgatcgtaataaggggtatatatttatgttagatcggtttatcgtaggatttttatcgttagttcgtttttcgttttatggcgagttttatgggcgatgttaatttgttttcggtaatttttagcgacggatacgttgatatttacggttattatttgtcgcgttcgttgtattttggtatatagggtgaagggatggtcggtgtgcgttcggaagcgattacgtttagcgatcgcggcgaagagagttagcgttgcgtgattcgttatgtcgtttatatggggtcgtagtatgaagtgacggtggaatggtacgggtaggagatattattgtaggttaacgttacgcgtttgtaatcggacgtcggcgagtagtattattttgaaatttattcgtacggtatgtttgttttggcggatgcggtataacgttttgtggttttgtaggtcggataaggcgtttg

SEQ ID NO: 24858 - DNA, 581 bp, Artificial Sequence
  chemically treated genomic DNA (Homo sapiens) CpG-island No: 24858
caaacgccttatccgacctacaaaaccacaaaacgttataccgcatccgccaaaacaaacataccgtacgaataaatttcaaaataatactactcgccgacgtccgattacaaacgcgtaacgttaacctacaataatatctcctacccgtaccattccaccgtcacttcatactacgaccccatataaacgacataacgaatcacgcaacgctaactctcttcgccgcgatcgctaaacgtaatcgcttccgaacgcacaccgaccatcccttcaccctatataccaaaatacaacgaacgcgacaaataataaccgtaaatatcaacgtatccgtcgctaaaaattaccgaaaacaaattaacatcgcccataaaactcgccataaaacgaaaaacgaactaacgataaaaatcctacgataaaccgatctaacataaatatataccccttattacgatcaccaacaccaatatcaaaaaccgcaaaaacttcgctctaatcgtaaataacgtacaacgaaataatatcaaactacttttacaactcgcgaatcttatcgcgcatactacgacgcaaat

SEQ ID NO: 24859 - DNA, 581 bp, Artificial Sequence
  chemically treated genomic DNA (Homo sapiens) CpG-island No: 24859
taagcgttttattcggtttataaaattataaaacgttatgtcgtattcgttagaataaatatgtcgtacggatggattttaagataatattgttcgtcgacgttcggttgtagacgcgtagcgttgatttgtaataatattttttgttcgtgttattttatcgttattttatattgcggttttatataggcgatatggcggattacgtagcgttggtttttttcgtcgcgatcgttgagcgtgatcgttttcgggcgtatatcgattatttttttattttgtgtattaaagtgtagcgggcgcggtagatgatagtcgtagatattaacgtattcgtcgttgaaggttgtcgggaataggttggtatcgtttataaagttcgttataaagcgggaggcgggttggcggtaaagattttgcggtgagtcgatttggtatgagtgtgtattttttgttgcgattattagtattagtattagaaatcgtaaaggtttcgttttgatcgtgggtgacgtatagcgaggtgatattaaattgtttttgtaattcgcggattttgtcgcgtatgttgcgacgtaggt

SEQ ID NO: 24860 - DNA, 581 bp, Artificial Sequence
  chemically treated genomic DNA (Homo sapiens) CpG-island No: 24860
acctacgtcgcaacatacgcgacaaaatccgcgaattacaaaaacaatttaatatcacctcgctatacgtcacccacgatcaaaacgaaacctttacgatttctaatactaatactaataatcgcaacaaaaaatacacactcataccaaatcgactcaccgcaaaatctttaccgccaacccgcctcccgctttataacgaactttataaacgataccaacctattcccgacaaccttcaacgacgaatacgttaatatctacgactatcatctaccgcgcccgctacactttaatacacaaaataaaaaaataatcgatatacgcccgaaaacgatcacgctcaacgatcgcgacgaaaaaaaccaacgctacgtaatccgccatatcgcctatataaaaccgcaatataaaataacgataaaataacacgaacaaaaaatattattacaaatcaacgctacgcgtctacaaccgaacgtcgacgaacaatattatcttaaaatccatccgtacgacatatttattctaacgaatacgacataacgttttataattttataaaccgaataaaacgctta

SEQ ID NO: 24861 - DNA, 849 bp, Artificial Sequence
  chemically treated genomic DNA (Homo sapiens) CpG-island No: 24861
agtgggtggtatatgcgttgcgggtatagggtgtgaatatcgttttcggttattcgggtggcgtaattatgtcggtttacgatgtattgtatgacggcggcgtggagtatttgttatgtcgatatgagtagggtgcggtaatggcggttatcggttatgttcgtgttatcggtaaaattggcgtatgtatcgttacgtttggttcgggcgtaattaatttgataatcgggtttgcggacgtattgttagattttatttttgttgttgttattatcggttaagtgttcgtatcgtttatcggtattgacgtattttaggaagtggatgttttgggattgtcgttagtttgtattaagtatagttttttggtgtagtcgttggaagagttgtcgcgtattatggttgaagtattcgacgttgtttgtttaggtcgttttggttcggttttggtcgatattttaaaagatatttagttagttagcggtgatttggaatcgtggtttattatcgttgaaaacgaagtgatttttttatatgtcgaagttgagtaagcgcgttagatgttggtaaaagcgtaaaaatcgatgttgtacgttggcggtggcgtgggtatggcgtaggtagtttcggttttgcgtgaatttttcgttggtataaaaatgtttgttatttgtacgttgaaagggtttggcgtagtagaagtagatttttcgtattatttgggtatgttgggaattttcggtattaagcgggaaatttcgcgggttcggagtttttatcgtgattttcgtgggtttcgttttaaaatcgttaacggaaatgaaaattttttgtttagataagttttta

SEQ ID NO: 24862 - DNA, 849 bp, Artificial Sequence
  chemically treated genomic DNA (Homo sapiens) CpG-island No: 24862
taaaaacttatctaaacaaaaaattttcatttccgttaacgattttaaaacgaaacccacgaaaatcacgataaaaactccgaacccgcgaaatttcccgcttaataccgaaaattcccaacatacccaaataatacgaaaaatctacttctactacgccaaaccctttcaacgtacaaataacaaacatttttataccaacgaaaaattcacgcaaaaccgaaactacctacgccatacccacgccaccgccaacgtacaacatcgatttttacgcttttaccaacatctaacgcgcttactcaacttcgacatataaaaaaatcacttcgttttcaacgataataaaccacgattccaaatcaccgctaactaactaaatatcttttaaaatatcgaccaaaaccgaaccaaaacgacctaaacaaacaacgtcgaatacttcaaccataatacgcgacaactcttccaacgactacaccaaaaaactatacttaatacaaactaacgacaatcccaaaacatccacttcctaaaatacgtcaataccgataaacgatacgaacacttaaccgataataacaacaacaaaaataaaatctaacaatacgtccgcaaacccgattatcaaattaattacgcccgaaccaaacgtaacgatacatacgccaattttaccgataacacgaacataaccgataaccgccattaccgcaccctactcatatcgacataacaaatactccacgccgccgtcatacaatacatcgtaaaccgacataattacgccacccgaataaccgaaaacgatattcacaccctatacccgcaacgcatataccacccact

SEQ ID NO: 24863 - DNA, 849 bp, Artificial Sequence
  chemically treated genomic DNA (Homo sapiens) CpG-island No: 24863
tgaaaatttgtttgggtaaaaggtttttattttcgttagcggttttaaaacggggtttacgggaattacggtgaaaatttcgggttcgcgaagtttttcgtttggtgtcgggaatttttagtatgtttagatagtacggaaaatttgtttttattgcgttaagtttttttagcgtataggtggtaggtatttttgtgttagcgagaaatttacgtaaagtcggaattgtttgcgttatatttacgttatcgttaacgtatagtatcggtttttgcgtttttgttagtatttggcgcgtttgtttaatttcggtatgtgggaaagttatttcgtttttaacggtggtgaattacggttttaggttatcgttggttaattggatattttttgggatatcgattagaatcggattaggacgatttgagtaggtaacgtcgaatgttttagttatgatgcgcggtaatttttttagcgattgtattagaaagttgtgtttggtataggttaacgataattttaggatatttattttttgaaatgcgttagtgtcgataaacggtgcggatatttgatcggtgatggtaataatagggatggaatttaatagtgcgttcgtaagttcggttattaggttggttgcgttcggattagacgtggcgatatatacgttagttttgtcggtagtacgagtataatcgatagtcgttattgtcgtattttgtttatgtcggtatagtaagtgttttacgtcgtcgttatataatgtatcgtaaatcggtataattgcgttattcggataatcgaaaacggtgtttatattttgtgttcgtaacgtatgtattatttatt

SEQ ID NO: 24864 - DNA, 849 bp, Artificial Sequence
  chemically treated genomic DNA (Homo sapiens) CpG-island No: 24864
aataaataatacatacgttacgaacacaaaatataaacaccgttttcgattatccgaataacgcaattataccgatttacgatacattatataacgacgacgtaaaacacttactataccgacataaacaaaatacgacaataacgactatcgattatactcgtactaccgacaaaactaacgtatatatcgccacgtctaatccgaacgcaaccaacctaataaccgaacttacgaacgcactattaaattccatccctattattaccatcaccgatcaaatatccgcaccgtttatcgacactaacgcatttcaaaaaataaatatcctaaaattatcgttaacctataccaaacacaactttctaatacaatcgctaaaaaaattaccgcgcatcataactaaaacattcgacgttacctactcaaatcgtcctaatccgattctaatcgatatcccaaaaaatatccaattaaccaacgataacctaaaaccgtaattcaccaccgttaaaaacgaaataactttcccacataccgaaattaaacaaacgcgccaaatactaacaaaaacgcaaaaaccgatactatacgttaacgataacgtaaatataacgcaaacaattccgactttacgtaaatttctcgctaacacaaaaatacctaccacctatacgctaaaaaaacttaacgcaataaaaacaaattttccgtactatctaaacatactaaaaattcccgacaccaaacgaaaaacttcgcgaacccgaaattttcaccgtaattcccgtaaaccccgttttaaaaccgctaacgaaaataaaaaccttttacccaaacaaattttca

SEQ ID NO: 24865 - DNA, 657 bp, Artificial Sequence
  chemically treated genomic DNA (Homo sapiens) CpG-island No: 24865
cgtgggtatagaaagtttattcgggtttaagaatgatatagttgtttaagtgtttcgatatcgttcggttgatttttattacgttttagcgtacgtagaatttttacgttttacggtagatcgtcgcggtacggcgtatattagtcgtaggatttacgggcgaaaaatttttttaggttacgtattagcgatattatgttgattttatggttaatcgttatcgttagcgtcgtatttagacggttgttcgttttatcgatattttcgaattttatcggtagattaaggtgcgtttcggttaggaagttagttttcgcgtcgtttggttgttaggttttaaattttagattattacgtatattatcggcgtaattttcgaggatttcgcgtgcggtggtgtcgaacggtagtttttatagtttcggattttttattcgatcggagaagtttattagtttggtgttagtatttttatttttcgagatgttttgatattattttacgtcgttagcgaggatcgtcggaacgttatatagggtttcgacgttgttgatataggtcggtttattttatgcgtcggagttgtcgggaagggtggtttcgagcgtgggttagtacgacgttttttttaggggagttgattaacgttgttttttt

SEQ ID NO: 24866 - DNA, 657 bp, Artificial Sequence
  chemically treated genomic DNA (Homo sapiens) CpG-island No: 24866
aaaaaaacaacgttaatcaactcccctaaaaaaaacgtcgtactaacccacgctcgaaaccacccttcccgacaactccgacgcataaaataaaccgacctatatcaacaacgtcgaaaccctatataacgttccgacgatcctcgctaacgacgtaaaataatatcaaaacatctcgaaaaataaaaatactaacaccaaactaataaacttctccgatcgaataaaaaatccgaaactataaaaactaccgttcgacaccaccgcacgcgaaatcctcgaaaattacgccgataatatacgtaataatctaaaatttaaaacctaacaaccaaacgacgcgaaaactaacttcctaaccgaaacgcaccttaatctaccgataaaattcgaaaatatcgataaaacgaacaaccgtctaaatacgacgctaacgataacgattaaccataaaatcaacataatatcgctaatacgtaacctaaaaaaatttttcgcccgtaaatcctacgactaatatacgccgtaccgcgacgatctaccgtaaaacgtaaaaattctacgtacgctaaaacgtaataaaaatcaaccgaacgatatcgaaacacttaaacaactatatcattcttaaacccgaataaactttctatacccacg

SEQ ID NO: 24867 - DNA, 657 bp, Artificial Sequence
  chemically treated genomic DNA (Homo sapiens) CpG-island No: 24867
gaagaaatagcgttaattaatttttttgggaaggacgtcgtgttaatttacgttcgaagttatttttttcggtaatttcggcgtatggggtaaatcgatttgtgttaataacgtcgaaattttgtgtaacgtttcggcgattttcgttaacggcgtggagtggtattagaatatttcgaaaagtaaagatgttggtattaagttgatgggttttttcggtcgggtgaaaaattcgggattgtgggaattgtcgttcggtattatcgtacgcgagattttcgaagattacgtcggtggtatgcgtgatggtttgaaatttaaagtttggtagttaggcggcgcggggattgattttttgatcgaagcgtattttgatttgtcgatggaattcgaaagtatcggtaaagcgggtagtcgtttgggtacggcgttggcgatggcggttgattatgagattaatatggtgtcgttggtgcgtaatttggaagagtttttcgttcgtgagttttgcggttggtgtacgtcgtgtcgcgacggtttgtcgtggagcgtgaaaattttgcgtgcgttggagcgtggtgaaggttagtcgggcgatatcgaaatatttgagtaattgtgttatttttaggttcgggtaaattttttgtgtttacg

SEQ ID NO: 24868 - DNA, 657 bp, Artificial Sequence
  chemically treated genomic DNA (Homo sapiens) CpG-island No: 24868
cgtaaacacaaaaaatttacccgaacctaaaaataacacaattactcaaatatttcgatatcgcccgactaaccttcaccacgctccaacgcacgcaaaattttcacgctccacgacaaaccgtcgcgacacgacgtacaccaaccgcaaaactcacgaacgaaaaactcttccaaattacgcaccaacgacaccatattaatctcataatcaaccgccatcgccaacgccgtacccaaacgactacccgctttaccgatactttcgaattccatcgacaaatcaaaatacgcttcgatcaaaaaatcaatccccgcgccgcctaactaccaaactttaaatttcaaaccatcacgcataccaccgacgtaatcttcgaaaatctcgcgtacgataataccgaacgacaattcccacaatcccgaatttttcacccgaccgaaaaaacccatcaacttaataccaacatctttacttttcgaaatattctaataccactccacgccgttaacgaaaatcgccgaaacgttacacaaaatttcgacgttattaacacaaatcgatttaccccatacgccgaaattaccgaaaaaaataacttcgaacgtaaattaacacgacgtccttcccaaaaaaattaattaacgctatttcttc

SEQ ID NO: 24869 - DNA, 812 bp, Artificial Sequence
  chemically treated genomic DNA (Homo sapiens) CpG-island No: 24869
gcgggttagagtagtttatcgtcgcgtttttgtttttaaaaatttgtatttatgggtacgttttttttagttttgcggtttgtttttgttaggtttttgacgattttcgttaatgttgtaacgttgagttttggtagcgttttattgtgattcggtgaaaagtagattattcggttggtgtcgcgcgcgttttggtaacgtattagcggatcgtgattttttggcgtatttggcgtgttagatattaaagtcgtaaagttattagtgaaaacgtaagtttcggtgtaatcggggtttttatcgtttgttattcgtatattatttgcgtagaggaagtaatttggatcgtgcgtaggtaatatttgtgtggttggcgttttttgcgttttttgttaggggcgtttagcgcggtgcggtgaaattagaatttattgttcggtgagcgggtagtagcggcgatgtggatgattaacgggatttaattgcgttatggtcgttttttaatcgggatatttttgtggatggcgtgattgttagtgttaagtgttttgcgttattatatcgagatgtgcgacgtacgcgttaggttaggtgtaatcggcggattagtttgcgtttcgttcgttagtcgtaagggtttttatacgaagcggcgtttacggaagttaatcggttgttcgaggttcggcgaagggcgtaattaattcgaaagtaggtttacgtacgtttaggggttaagtgtcgtcgtttgttttagatcgtacgcgagagtgagacgtatatcgggcgggagaacgcggtcggatattggt

SEQ ID NO: 24870 - DNA, 812 bp, Artificial Sequence
  chemically treated genomic DNA (Homo sapiens) CpG-island No: 24870
accaatatccgaccgcgttctcccgcccgatatacgtctcactctcgcgtacgatctaaaacaaacgacgacacttaacccctaaacgtacgtaaacctactttcgaattaattacgcccttcgccgaacctcgaacaaccgattaacttccgtaaacgccgcttcgtataaaaacccttacgactaacgaacgaaacgcaaactaatccgccgattacacctaacctaacgcgtacgtcgcacatctcgatataataacgcaaaacacttaacactaacaatcacgccatccacaaaaatatcccgattaaaaaacgaccataacgcaattaaatcccgttaatcatccacatcgccgctactacccgctcaccgaacaataaattctaatttcaccgcaccgcgctaaacgcccctaacaaaaaacgcaaaaaacgccaaccacacaaatattacctacgcacgatccaaattacttcctctacgcaaataatatacgaataacaaacgataaaaaccccgattacaccgaaacttacgttttcactaataactttacgactttaatatctaacacgccaaatacgccaaaaaatcacgatccgctaatacgttaccaaaacgcgcgcgacaccaaccgaataatctacttttcaccgaatcacaataaaacgctaccaaaactcaacgttacaacattaacgaaaatcgtcaaaaacctaacaaaaacaaaccgcaaaactaaaaaaaacgtacccataaatacaaatttttaaaaacaaaaacgcgacgataaactactctaacccgc

SEQ ID NO: 24871 - DNA, 812 bp, Artificial Sequence
  chemically treated genomic DNA (Homo sapiens) CpG-island No: 24871
gttagtgttcggtcgcgttttttcgttcgatgtgcgttttattttcgcgtgcgatttgggataggcggcggtatttgatttttgggcgtgcgtgggtttgttttcgagttggttacgtttttcgtcgggtttcgggtaatcggttgattttcgtgggcgtcgtttcgtgtgggggtttttgcggttagcgggcggagcgtaggttagttcgtcggttgtatttgatttggcgcgtacgtcgtatatttcgatgtggtggcgtagaatatttggtattggtagttacgttatttatagggatatttcgattaagggacgattatgacgtaattaagtttcgttgattatttatatcgtcgttattattcgtttatcgggtaatggattttggttttatcgtatcgcgttaagcgtttttggtagggggcgtaggaaacgttagttatataggtgttatttgcgtacgatttagattgttttttttgcgtaggtaatgtgcgggtgataggcgatgagaatttcgattatatcgggatttacgtttttattaatgattttgcggttttgatgtttgatacgttagatgcgttagaaagttacgattcgttgatgcgttgttagagcgcgcgcggtattagtcgggtgatttgttttttatcggattatagtaaaacgttgttagagtttagcgttgtagtattgacggaaatcgttaaaagtttggtaggagtaaatcgtagaattggggaaaacgtatttatgggtgtaggtttttgaaaataaaggcgcggcgatgggttgttttaattcgt

SEQ ID NO: 24872 - DNA, 812 bp, Artificial Sequence
  chemically treated genomic DNA (Homo sapiens) CpG-island No: 24872
acgaattaaaacaacccatcgccgcgcctttattttcaaaaacctacacccataaatacgttttccccaattctacgatttactcctaccaaacttttaacgatttccgtcaatactacaacgctaaactctaacaacgttttactataatccgataaaaaacaaatcacccgactaataccgcgcgcgctctaacaacgcatcaacgaatcgtaactttctaacgcatctaacgtatcaaacatcaaaaccgcaaaatcattaataaaaacgtaaatcccgatataatcgaaattctcatcgcctatcacccgcacattacctacgcaaaaaaaacaatctaaatcgtacgcaaataacacctatataactaacgtttcctacgccccctaccaaaaacgcttaacgcgatacgataaaaccaaaatccattacccgataaacgaataataacgacgatataaataatcaacgaaacttaattacgtcataatcgtcccttaatcgaaatatccctataaataacgtaactaccaataccaaatattctacgccaccacatcgaaatatacgacgtacgcgccaaatcaaatacaaccgacgaactaacctacgctccgcccgctaaccgcaaaaacccccacacgaaacgacgcccacgaaaatcaaccgattacccgaaacccgacgaaaaacgtaaccaactcgaaaacaaacccacgcacgcccaaaaatcaaataccgccgcctatcccaaatcgcacgcgaaaataaaacgcacatcgaacgaaaaaacgcgaccgaacactaac

SEQ ID NO: 24873 - DNA, 1230 bp, Artificial Sequence
  chemically treated genomic DNA (Homo sapiens) CpG-island No: 24873
  unsure (1002)
tggtcgaaatttgttcgatcggcgtattatcgataaaacgtatttcgagcgttataatcgtaaatgggatatgtagttagcgtcgagtatttgttagtaatgttttatcggttgtaatattagtttcggatgaacgttacggcgaattgcgatcgtatcgaaaatcgttataacggtacggtaaattattattttttttgcgatcgtggtcgtttcggttacggttacgttaatttgaaggatcgttcgcgttagttagtatagcgtcgtggcgatgattttattatttttaacgtcgaataggtaatgtagggcgcggtagatattttgcgttagtcgaagaaagtgatcggtattggttttttcgcgtgttagcgtggaaagtaattttgcgttgcgtgaattggtgggcgaagaaaatttttatatcggtatcgtttacggtgagtaggaacgtttgtaattggcgttgaaagtgttgcgtgaaggcggtatttatatttcggttttgcgcgaaatcgaattttacgatgcggtattggtgttgggcgaagacgttatttagatcggcgcgcgcgtcgcgttggtagtgcgttaggttgtgaaaggtaaagcgcgcgaaatggcggtagtatagaaagtggttgattggtagattgcggtaatttttaatatcggttaacgtgcgaagtattcgttgtttgttattaacgttgatgatattcgtttggatgatatcgcggcgtggatttatcgcgtatcggttgaagattaggcgcgtttaggttttgttatcgtttatgcgttggataattttgtattagcggttgacggtatcgaatttgagttgtaaagtaaaatcgacgttatcgtgtaggtattggtaggtgcgaagaaatcgttgattattttcgggacgaacgtcggtagtttagaggtgatttaggcggcggttaacgtcgcgaaagttttgaaaggtcgcggcgttgacgtcggtattanttatgattgttcgtttcgttaatagtatggggttgggtattatgggtggcggttcgtttgaagaagcgttaatcgaattggaaatcggacgcgtcgacgcggtggtggtgttggaaaacgatttgtatcgttacgtttttgttattcgcgtgaatgttgcgttggttaaagtatcgttggtgatggtggttgattattaacgtatagcgattatggaaaacgtttatt

SEQ ID NO: 24874 - DNA, 1230 bp, Artificial Sequence
  chemically treated genomic DNA (Homo sapiens) CpG-island No: 24874
  unsure (229)
aataaacgttttccataatcgctatacgttaataatcaaccaccatcaccaacgatactttaaccaacgcaacattcacgcgaataacaaaaacgtaacgatacaaatcgttttccaacaccaccaccgcgtcgacgcgtccgatttccaattcgattaacgcttcttcaaacgaaccgccacccataatacccaaccccatactattaacgaaacgaacaatcataantaataccgacgtcaacgccgcgacctttcaaaactttcgcgacgttaaccgccgcctaaatcacctctaaactaccgacgttcgtcccgaaaataatcaacgatttcttcgcacctaccaatacctacacgataacgtcgattttactttacaactcaaattcgataccgtcaaccgctaatacaaaattatccaacgcataaacgataacaaaacctaaacgcgcctaatcttcaaccgatacgcgataaatccacgccgcgatatcatccaaacgaatatcatcaacgttaataacaaacaacgaatacttcgcacgttaaccgatattaaaaattaccgcaatctaccaatcaaccactttctatactaccgccatttcgcgcgctttacctttcacaacctaacgcactaccaacgcgacgcgcgcgccgatctaaataacgtcttcgcccaacaccaataccgcatcgtaaaattcgatttcgcgcaaaaccgaaatataaataccgccttcacgcaacactttcaacgccaattacaaacgttcctactcaccgtaaacgataccgatataaaaattttcttcgcccaccaattcacgcaacgcaaaattactttccacgctaacacgcgaaaaaaccaataccgatcactttcttcgactaacgcaaaatatctaccgcgccctacattacctattcgacgttaaaaataataaaatcatcgccacgacgctatactaactaacgcgaacgatccttcaaattaacgtaaccgtaaccgaaacgaccacgatcgcaaaaaaaataataatttaccgtaccgttataacgattttcgatacgatcgcaattcgccgtaacgttcatccgaaactaatattacaaccgataaaacattactaacaaatactcgacgctaactacatatcccatttacgattataacgctcgaaatacgttttatcgataatacgccgatcgaacaaatttcgacca

SEQ ID NO: 24875 - DNA, 1230 bp, Artificial Sequence
  chemically treated genomic DNA (Homo sapiens) CpG-island No: 24875
  unsure (229)
gatgggcgttttttataatcgttgtgcgttgatgattaattattattattagcggtgttttagttagcgtagtatttacgcggatagtagaagcgtgacgatgtagatcgttttttaatattattatcgcgtcggcgcgttcggtttttagttcggttaacgtttttttaagcgaatcgttatttataatgtttagttttatgttgttgacggaacgggtaattatggntgatatcgacgttagcgtcgcgattttttagggttttcgcgacgttagtcgtcgtttgaattatttttaagttatcggcgttcgtttcggagataattaacggttttttcgtatttgttagtgtttgtacgatgacgtcgattttgttttgtagtttaggttcgatatcgttaatcgttggtgtagagttatttagcgtatgggcgatggtaaaatttaaacgcgtttgatttttaatcggtgcgcggtaagtttacgtcgcgatattatttagacgggtgttattaacgttggtaataaatagcggatgtttcgtacgttgatcgatgttgaggattgtcgtaatttgttagttagttattttttgtgttgtcgttatttcgcgcgttttattttttatagtttgacgtattgttagcgcgacgcgcgcgtcggtttgggtaacgttttcgtttagtattagtatcgtatcgtaagattcgatttcgcgtagagtcggagtataaatgtcgtttttacgtagtatttttagcgttagttgtagacgtttttgtttatcgtgagcgatatcggtgtagaagtttttttcgtttattagtttacgtagcgtaaagttgttttttacgttggtacgcgggagaattaatatcgattatttttttcgattgacgtagaatatttgtcgcgttttgtattgtttgttcggcgttgagggtaatgaaattatcgttacgacgttgtattggttgacgcggacgattttttaggttgacgtaatcgtaatcgaaacgattacggtcgtagaggaagtagtggtttatcgtatcgttgtaacggttttcgatacgatcgtagttcgtcgtaacgtttattcggggttgatgttatagtcgatggaatattgttggtagatgttcggcgttaattgtatattttatttacggttgtaacgttcggagtgcgttttgtcggtaatacgtcggtcgggtaaatttcgatta

SEQ ID NO: 24876 - DNA, 1230 bp, Artificial Sequence
  chemically treated genomic DNA (Homo sapiens) CpG-island No: 24876
  unsure (1002)
taatcgaaatttacccgaccgacgtattaccgacaaaacgcactccgaacgttacaaccgtaaataaaatatacaattaacgccgaacatctaccaacaatattccatcgactataacatcaaccccgaataaacgttacgacgaactacgatcgtatcgaaaaccgttacaacgatacgataaaccactacttcctctacgaccgtaatcgtttcgattacgattacgtcaacctaaaaaatcgtccgcgtcaaccaatacaacgtcgtaacgataatttcattaccctcaacgccgaacaaacaatacaaaacgcgacaaatattctacgtcaatcgaaaaaaataatcgatattaattctcccgcgtaccaacgtaaaaaacaactttacgctacgtaaactaataaacgaaaaaaacttctacaccgatatcgctcacgataaacaaaaacgtctacaactaacgctaaaaatactacgtaaaaacgacatttatactccgactctacgcgaaatcgaatcttacgatacgatactaatactaaacgaaaacgttacccaaaccgacgcgcgcgtcgcgctaacaatacgtcaaactataaaaaataaaacgcgcgaaataacgacaacacaaaaaataactaactaacaaattacgacaatcctcaacatcgatcaacgtacgaaacatccgctatttattaccaacgttaataacacccgtctaaataatatcgcgacgtaaacttaccgcgcaccgattaaaaatcaaacgcgtttaaattttaccatcgcccatacgctaaataactctacaccaacgattaacgatatcgaacctaaactacaaaacaaaatcgacgtcatcgtacaaacactaacaaatacgaaaaaaccgttaattatctccgaaacgaacgccgataacttaaaaataattcaaacgacgactaacgtcgcgaaaaccctaaaaaatcgcgacgctaacgtcgatatcanccataattacccgttccgtcaacaacataaaactaaacattataaataacgattcgcttaaaaaaacgttaaccgaactaaaaaccgaacgcgccgacgcgataataatattaaaaaacgatctacatcgtcacgcttctactatccgcgtaaatactacgctaactaaaacaccgctaataataataattaatcatcaacgcacaacgattataaaaaacgcccatc

SEQ ID NO: 24877 - DNA, 568 bp, Artificial Sequence
  chemically treated genomic DNA (Homo sapiens) CpG-island No: 24877
tacgtcggagatggcgcgtacgataataaacgggacgttgaaattgtggtagatatgggcgattgtcgtcgtttttatttttatagtaatggtttgtgggaagttgtggcggattttcgttagattaatagaatcgttgatgaaagcgtcgtcgttaataattaggttacgtatagcgttaagatttagttcggtaatgtaggttttagcggtagcgattagtttatcgttagttttaaagtttgtcggatagtttggtaattgatcgtatttataattaaatgtcgtgatattcgcgtcgtgataacgtgtttcgttcgagataacgatatcgtttatttttaacgttggtgttaggttatcggtagaatcggtgttaataattatatttggtttgtagtgttttaatagtaaagtgggatttagcgtcgtagcgattttagcgatgttcgattttagaagcgtaaattcggttttatttaggtgggcgggatagattcgtaacggtcgagatgatagttcgacggtttcgatttggtacgtaataggtaattttttttttatggtt

SEQ ID NO: 24878 - DNA, 568 bp, Artificial Sequence
  chemically treated genomic DNA (Homo sapiens) CpG-island No: 24878
aaccataaaaaaaaaattacctattacgtaccaaatcgaaaccgtcgaactatcatctcgaccgttacgaatctatcccgcccacctaaataaaaccgaatttacgcttctaaaatcgaacatcgctaaaatcgctacgacgctaaatcccactttactattaaaacactacaaaccaaatataattattaacaccgattctaccgataacctaacaccaacgttaaaaataaacgatatcgttatctcgaacgaaacacgttatcacgacgcgaatatcacgacatttaattataaatacgatcaattaccaaactatccgacaaactttaaaactaacgataaactaatcgctaccgctaaaacctacattaccgaactaaatcttaacgctatacgtaacctaattattaacgacgacgctttcatcaacgattctattaatctaacgaaaatccgccacaacttcccacaaaccattactataaaaataaaaacgacgacaatcgcccatatctaccacaatttcaacgtcccgtttattatcgtacgcgccatctccgacgta

SEQ ID NO: 24879 - DNA, 568 bp, Artificial Sequence
  chemically treated genomic DNA (Homo sapiens) CpG-island No: 24879
ggttatggaagagaagttatttgttgcgtgttaaatcggaatcgtcgaattattatttcggtcgttgcgaatttatttcgtttatttgaatggaatcgagtttgcgtttttgaaatcgggtatcgttaaagtcgttgcggcgttgggttttattttgttgttggaatattgtaagttagatgtgattattaatatcggttttgtcggtggtttggtattaacgttgaaagtgggcgatatcgttgtttcggacgaagtacgttattacgacgcggatgttacggtatttggttatgaatacggttagttattaggttgttcggtaggttttaaagttgacgataaattgatcgttgtcgttgaggtttgtattgtcgaattgaattttaacgttgtacgtggtttgattgttagcggcgacgtttttattaacggttttgttggtttggcgaaaattcgttataattttttataggttattgttgtagagatggaagcgacggtaatcgtttatgtttgttataattttaacgtttcgtttgttgtcgtacgcgttattttcgacgtg

SEQ ID NO: 24880 - DNA, 568 bp, Artificial Sequence
  chemically treated genomic DNA (Homo sapiens) CpG-island No: 24880
cacgtcgaaaataacgcgtacgacaacaaacgaaacgttaaaattataacaaacataaacgattaccgtcgcttccatctctacaacaataacctataaaaaattataacgaattttcgccaaaccaacaaaaccgttaataaaaacgtcgccgctaacaatcaaaccacgtacaacgttaaaattcaattcgacaatacaaacctcaacgacaacgatcaatttatcgtcaactttaaaacctaccgaacaacctaataactaaccgtattcataaccaaataccgtaacatccgcgtcgtaataacgtacttcgtccgaaacaacgatatcgcccactttcaacgttaataccaaaccaccgacaaaaccgatattaataatcacatctaacttacaatattccaacaacaaaataaaacccaacgccgcaacgactttaacgatacccgatttcaaaaacgcaaactcgattccattcaaataaacgaaataaattcgcaacgaccgaaataataattcgacgattccgatttaacacgcaacaaataacttctcttccataacc

SEQ ID NO: 24881 - DNA, 765 bp, Artificial Sequence
  chemically treated genomic DNA (Homo sapiens) CpG-island No: 24881
gagttgcgttatttatatcgattttcgagatcgatttcgtttcgaacgggtcgattttatcgtcgttcggtattagtatagcgcggaaattacgcggaatgttattaattttcggtgcgtcgtaattgcgtaaattacgcgttaacgggtgattttcggcgttataaatgattttttcgtttatattgtggtcgatagtacgtagggtggtatcgtagatttgttttaacgttaattttggattgatcggtgtatcgtagtttagtaaggcgtagaatttatttaggcggattttattcgtacgcgtgttgacggtaattttagcgaagtttgcgttatacgggaaggcgaaattaggcgtgatataattgttagtttttattagtgaattaaagtcggtgtcggtttcgtttttatgggtaatattttcgaaattaatttcgttttttttgtcgcgtacgacgttcggcgttgttagttgaatatttgttattggtttatttaatatttgcgcgtcgtggaatagaattttttttcgtagatttttcgttgttaaacgcgtcgcgttattcgagaagtaagtatcggacgaggtatatgcgtttttattaaataacgtatgatcggtattatcggagataatatgtacgttttgcggtgggtagtgtagtatttttgttgttagtttcgttattatagtatttagattagtattaatattcgtatcgttagaatgaacgataaaggtgtcgttcgattttagtt

SEQ ID NO: 24882 - DNA, 765 bp, Artificial Sequence
  chemically treated genomic DNA (Homo sapiens) CpG-island No: 24882
aactaaaatcgaacgacacctttatcgttcattctaacgatacgaatattaatactaatctaaatactataataacgaaactaacaacaaaaatactacactacccaccgcaaaacgtacatattatctccgataataccgatcatacgttatttaataaaaacgcatatacctcgtccgatacttacttctcgaataacgcgacgcgtttaacaacgaaaaatctacgaaaaaaaattctattccacgacgcgcaaatattaaataaaccaataacaaatattcaactaacaacgccgaacgtcgtacgcgacaaaaaaaacgaaattaatttcgaaaatattacccataaaaacgaaaccgacaccgactttaattcactaataaaaactaacaattatatcacgcctaatttcgccttcccgtataacgcaaacttcgctaaaattaccgtcaacacgcgtacgaataaaatccgcctaaataaattctacgccttactaaactacgatacaccgatcaatccaaaattaacgttaaaacaaatctacgataccaccctacgtactatcgaccacaatataaacgaaaaaatcatttataacgccgaaaatcacccgttaacgcgtaatttacgcaattacgacgcaccgaaaattaataacattccgcgtaatttccgcgctatactaataccgaacgacgataaaatcgacccgttcgaaacgaaatcgatctcgaaaatcgatataaataacgcaactc

SEQ ID NO: 24883 - DNA, 765 bp, Artificial Sequence
  chemically treated genomic DNA (Homo sapiens) CpG-island No: 24883
aattggaatcggacggtatttttatcgtttattttggcggtgcggatattggtattggtttggatattgtagtgacgaaattggtagtagaagtgttgtattgtttatcgtaggacgtgtatgttattttcggtgatatcgattatgcgttgtttgataaaggcgtatatgtttcgttcggtatttgtttttcgggtaacgcggcgcgtttggtagcggaaaatttacgggagaaaattttgttttacggcgcgtaaatgttgggtgagttagtggtagatgtttaattggtaacgtcgggcgtcgtgcgcggtaagaaaggcgaagttagtttcggggatattgtttataaaggcgaaatcggtatcggttttggtttattggtgggaattggtagttatattacgtttgatttcgttttttcgtatggcgtaaatttcgttgaagttgtcgttaatacgcgtacgggtgaaattcgtttggataaattttacgttttgttggattgcggtatatcggttaatttagagttagcgttgggataaatttacggtgttattttgcgtgttatcggttatagtatgagcgaagagattatttatgacgtcgaaggttattcgttaacgcgtgatttacgtagttacggcgtatcgaaaattggtgatatttcgcgtgattttcgcgttgtgttggtgtcgagcgacgataaagtcggttcgttcggggcgaaatcgatttcggaaatcggtgtaaatggcgtagttt

SEQ ID NO: 24884 - DNA, 765 bp, Artificial Sequence
  chemically treated genomic DNA (Homo sapiens) CpG-island No: 24884
aaactacgccatttacaccgatttccgaaatcgatttcgccccgaacgaaccgactttatcgtcgctcgacaccaacacaacgcgaaaatcacgcgaaatatcaccaattttcgatacgccgtaactacgtaaatcacgcgttaacgaataaccttcgacgtcataaataatctcttcgctcatactataaccgataacacgcaaaataacaccgtaaatttatcccaacgctaactctaaattaaccgatataccgcaatccaacaaaacgtaaaatttatccaaacgaatttcacccgtacgcgtattaacgacaacttcaacgaaatttacgccatacgaaaaaacgaaatcaaacgtaatataactaccaattcccaccaataaaccaaaaccgataccgatttcgcctttataaacaatatccccgaaactaacttcgcctttcttaccgcgcacgacgcccgacgttaccaattaaacatctaccactaactcacccaacatttacgcgccgtaaaacaaaattttctcccgtaaattttccgctaccaaacgcgccgcgttacccgaaaaacaaataccgaacgaaacatatacgcctttatcaaacaacgcataatcgatatcaccgaaaataacatacacgtcctacgataaacaatacaacacttctactaccaatttcgtcactacaatatccaaaccaataccaatatccgcaccgccaaaataaacgataaaaataccgtccgattccaatt

SEQ ID NO: 24885 - DNA, 537 bp, Artificial Sequence
  chemically treated genomic DNA (Homo sapiens) CpG-island No: 24885
gtacggaaatatatatcgtataggtagtagtacggttcgttattgtatgcgcgtagcgtaggtaattattagcgtagttgtcggtaagtatttatcggtatagattcgatgtatcgtatcgttatgtagagtaaaattttcgttttatcggggtgaagttggagtttttaatttatcggttggatgtcgattgaggttggagttttcgtcgttaaagtttttaaggttgtaagattcggataggttcgtattttatcggggaatcggacgttttgaattaaggattttaggttgaatattttttgttttattgtcgtatagggtatcgcgcgtataacggacgtaggatttaatcgtagtagttagttaacggtaagtacgttatacggttaaatgttatttagatattcgtttcgtcgcgtttcgatattttttagcggaaaatttacgaacgttatgttgtttataggtattatattacgaggtaggaaatagtttataaaaagttacgaaaggttatcgtttttcgcgggttat

SEQ ID NO: 24886 - DNA, 537 bp, Artificial Sequence
  chemically treated genomic DNA (Homo sapiens) CpG-island No: 24886
ataacccgcgaaaaacgataacctttcgtaactttttataaactatttcctacctcgtaatataatacctataaacaacataacgttcgtaaattttccgctaaaaaatatcgaaacgcgacgaaacgaatatctaaataacatttaaccgtataacgtacttaccgttaactaactactacgattaaatcctacgtccgttatacgcgcgataccctatacgacaataaaacaaaaaatattcaacctaaaatccttaattcaaaacgtccgattccccgataaaatacgaacctatccgaatcttacaaccttaaaaactttaacgacgaaaactccaacctcaatcgacatccaaccgataaattaaaaactccaacttcaccccgataaaacgaaaattttactctacataacgatacgatacatcgaatctataccgataaatacttaccgacaactacgctaataattacctacgctacgcgcatacaataacgaaccgtactactacctatacgatatatatttccgtac

SEQ ID NO: 24887 - DNA, 537 bp, Artificial Sequence
  chemically treated genomic DNA (Homo sapiens) CpG-island No: 24887
gtgattcgcgagaaacgatggtttttcgtgattttttgtgagttgttttttgtttcgtagtgtggtgtttgtaggtagtatggcgttcgtgggtttttcgttggggagtgtcggggcgcggcggggcgggtatttaggtggtatttggtcgtatggcgtgtttgtcgttggttgattgttgcggttgggttttgcgttcgttgtgcgcgcggtgttttgtgcgatagtgaggtaaggagtgtttagtttgaggtttttgatttaggacgttcggtttttcggtgaggtgcggatttattcggattttatagttttgggggttttgacggcgggagttttagttttagtcgatatttagtcggtggattagggattttagttttatttcggtgggacggaggttttattttgtatgacgatgcgatgtatcgggtttgtgtcggtgagtgtttgtcggtagttgcgttggtgattgtttgcgttgcgcgtatgtaatggcggatcgtgttgttgtttatgcggtatgtgttttcgtgt

SEQ ID NO: 24888 - DNA, 537 bp, Artificial Sequence
  chemically treated genomic DNA (Homo sapiens) CpG-island No: 24888
acacgaaaacacataccgcataaacaacaacacgatccgccattacatacgcgcaacgcaaacaatcaccaacgcaactaccgacaaacactcaccgacacaaacccgatacatcgcatcgtcatacaaaataaaacctccgtcccaccgaaataaaactaaaatccctaatccaccgactaaatatcgactaaaactaaaactcccgccgtcaaaacccccaaaactataaaatccgaataaatccgcacctcaccgaaaaaccgaacgtcctaaatcaaaaacctcaaactaaacactccttacctcactatcgcacaaaacaccgcgcgcacaacgaacgcaaaacccaaccgcaacaatcaaccaacgacaaacacgccatacgaccaaataccacctaaatacccgccccgccgcgccccgacactccccaacgaaaaacccacgaacgccatactacctacaaacaccacactacgaaacaaaaaacaactcacaaaaaatcacgaaaaaccatcgtttctcgcgaatcac

SEQ ID NO: 24889 - DNA, 642 bp, Artificial Sequence
  chemically treated genomic DNA (Homo sapiens) CpG-island No: 24889
gtagtagacgacgttcgcggtttttaacgaatagtagcgcgcggttagtacgattcgtacgatcggtacgatcgatacggtgaacgtaagatttagaatttatcgggatatcgtagttaattattaggttgatacgtttaacgtttaggttacgggttgtaacgtcggtcgtaattaggatgtttagacgattattttttaggcgttttagtgtttgtttacgtagcgtttggatttatgttatcgtttagcgcggcgttgttgtagtttgttacgtttaagagttttagttatttttagagtcgcgtttttggtacgaacgaagataagtcgtcgtattaaaatttttcgcgttttaggaaacgtattagtgtttcgtgttcgcgtatattttagatagtttagtagttttggttgatgttcggacgggtagttacgttggattgaatgcgtattttttgcggtttttttataaagcggcgggtaatgcgacgaatcgttttcggtatggttgtagagaatagagcggtttgatgatttttcgggatttgcgttataatggttttaacgttttcgatgaagtttatgcgtagtatgtcgttagttttatttttagtaagttatgattcggtttagttttag

SEQ ID NO: 24890 - DNA, 642 bp, Artificial Sequence
  chemically treated genomic DNA (Homo sapiens) CpG-island No: 24890
ctaaaactaaaccgaatcataacttactaaaaataaaactaacgacatactacgcataaacttcatcgaaaacgttaaaaccattataacgcaaatcccgaaaaatcatcaaaccgctctattctctacaaccataccgaaaacgattcgtcgcattacccgccgctttataaaaaaaccgcaaaaaatacgcattcaatccaacgtaactacccgtccgaacatcaaccaaaactactaaactatctaaaatatacgcgaacacgaaacactaatacgtttcctaaaacgcgaaaaattttaatacgacgacttatcttcgttcgtaccaaaaacgcgactctaaaaataactaaaactcttaaacgtaacaaactacaacaacgccgcgctaaacgataacataaatccaaacgctacgtaaacaaacactaaaacgcctaaaaaataatcgtctaaacatcctaattacgaccgacgttacaacccgtaacctaaacgttaaacgtatcaacctaataattaactacgatatcccgataaattctaaatcttacgttcaccgtatcgatcgtaccgatcgtacgaatcgtactaaccgcgcgctactattcgttaaaaaccgcgaacgtcgtctactac

SEQ ID NO: 24891 - DNA, 642 bp, Artificial Sequence
  chemically treated genomic DNA (Homo sapiens) CpG-island No: 24891
ttaaaattgagtcgagttatggtttattgagaatgaagttgacgatatgttgcgtatgggttttatcgaagacgttgaaattattatggcgtagatttcggaaggttattagatcgttttgttttttgtaattatgtcggaagcgattcgtcgtattattcgtcgttttatgaaagagtcgtaggaagtgcgtatttagtttagcgtgattattcgttcggatattagttagagttattggattgtttggggtatgcgcgaatacgaagtattggtacgttttttggaacgcggaagattttgatgcggcgatttattttcgttcgtattaaaaacgcgattttggaagtggttgaagtttttgagcgtaataggttataatagcgtcgcgttgaacggtgatatgaatttaggcgttgcgtgaatagatattggaacgtttgaaagatggtcgtttggatattttgattgcgatcgacgttgtagttcgtggtttggacgttgagcgtattagtttggtagttaattacgatatttcgatggattttgagttttacgtttatcgtatcggtcgtatcggtcgtgcgggtcgtgttggtcgcgcgttgttgttcgttgagaatcgcgagcgtcgtttgttgt

SEQ ID NO: 24892 - DNA, 642 bp, Artificial Sequence
  chemically treated genomic DNA (Homo sapiens) CpG-island No: 24892
acaacaaacgacgctcgcgattctcaacgaacaacaacgcgcgaccaacacgacccgcacgaccgatacgaccgatacgataaacgtaaaactcaaaatccatcgaaatatcgtaattaactaccaaactaatacgctcaacgtccaaaccacgaactacaacgtcgatcgcaatcaaaatatccaaacgaccatctttcaaacgttccaatatctattcacgcaacgcctaaattcatatcaccgttcaacgcgacgctattataacctattacgctcaaaaacttcaaccacttccaaaatcgcgtttttaatacgaacgaaaataaatcgccgcatcaaaatcttccgcgttccaaaaaacgtaccaatacttcgtattcgcgcataccccaaacaatccaataactctaactaatatccgaacgaataatcacgctaaactaaatacgcacttcctacgactctttcataaaacgacgaataatacgacgaatcgcttccgacataattacaaaaaacaaaacgatctaataaccttccgaaatctacgccataataatttcaacgtcttcgataaaacccatacgcaacatatcgtcaacttcattctcaataaaccataactcgactcaattttaa

SEQ ID NO: 24893 - DNA, 527 bp, Artificial Sequence
  chemically treated genomic DNA (Homo sapiens) CpG-island No: 24893
tttatcgagaaataacgcggcgaaaattattatttagaacggtatggtatagtttaggatcgttatttttttcgtattttcgttgattaacgtttattgcgttagattaattatttcgtaggtttgtaatagggtaatggttaaggtgtatttaaacggtgtcgggcgtatttcgcgattacgtaatataaggacgatgaataatacgagagcgtcgaatatgtagcgtacggcggtaaagtcgaaggtatcgatgtaattggtgatttgttttttgataatttagttataattttatattacgtgtgatttaaatacgttatgattgttagtgcgttgttttttttgcggtcgattgagaatttcggttatttcgtcgttattaattcgttatatcgttttttacgttatatttcgttaagggttttatacgttaaggtagtatttttatatgttcgaattaataattcggtttacggaattttttacgacgttttttatatttttattttttttttattatattt

SEQ ID NO: 24894 - DNA, 527 bp, Artificial Sequence
  chemically treated genomic DNA (Homo sapiens) CpG-island No: 24894
aaatataataaaaaaaaaataaaaatataaaaaacgtcgtaaaaaattccgtaaaccgaattattaattcgaacatataaaaatactaccttaacgtataaaacccttaacgaaatataacgtaaaaaacgatataacgaattaataacgacgaaataaccgaaattctcaatcgaccgcaaaaaaaacaacgcactaacaatcataacgtatttaaatcacacgtaatataaaattataactaaattatcaaaaaacaaatcaccaattacatcgataccttcgactttaccgccgtacgctacatattcgacgctctcgtattattcatcgtccttatattacgtaatcgcgaaatacgcccgacaccgtttaaatacaccttaaccattaccctattacaaacctacgaaataattaatctaacgcaataaacgttaatcaacgaaaatacgaaaaaaataacgatcctaaactataccataccgttctaaataataattttcgccgcgttatttctcgataaa

SEQ ID NO: 24895 - DNA, 527 bp, Artificial Sequence
  chemically treated genomic DNA (Homo sapiens) CpG-island No: 24895
gggtgtggtggggggggggtgggggtgtgggggacgtcgtgggggatttcgtgggtcgagttgttaattcgggtatgtaaggatattgttttggcgtgtaggatttttggcggggtgtggcgtggggaacggtgtggcgggttagtggcggcggagtaatcgggatttttagtcggtcgtagagagagtaacgtattggtaattatggcgtgtttgggttatacgtgatgtggagttatagttggattgttaggaagtaagttattagttatatcggtgttttcgattttatcgtcgtacgttgtatgttcggcgttttcgtgttatttatcgtttttgtattacgtggtcgcggaatgcgttcgatatcgtttaaatatattttagttattgttttgttataaatttgcgggatggttggtttggcgtagtgggcgttggttagcggaggtgcggggaaggtggcgattttgagttatattatgtcgttttgggtggtgattttcgtcgcgttgtttttcggtgaa

SEQ ID NO: 24896 - DNA, 527 bp, Artificial Sequence
  chemically treated genomic DNA (Homo sapiens) CpG-island No: 24896
ttcaccgaaaaacaacgcgacgaaaatcaccacccaaaacgacataatataactcaaaatcgccaccttccccgcacctccgctaaccaacgcccactacgccaaaccaaccatcccgcaaatttataacaaaacaataactaaaatatatttaaacgatatcgaacgcattccgcgaccacgtaatacaaaaacgataaataacacgaaaacgccgaacatacaacgtacgacgataaaatcgaaaacaccgatataactaataacttacttcctaacaatccaactataactccacatcacgtataacccaaacacgccataattaccaatacgttactctctctacgaccgactaaaaatcccgattactccgccgccactaacccgccacaccgttccccacgccacaccccgccaaaaatcctacacgccaaaacaatatccttacatacccgaattaacaactcgacccacgaaatcccccacgacgtcccccacacccccaccccccccccaccacaccc

SEQ ID NO: 24897 - DNA, 556 bp, Artificial Sequence
  chemically treated genomic DNA (Homo sapiens) CpG-island No: 24897
attatcgggttagtgtcgaagtcgaagttttttgcgtcgagaatcgtcgttttgatgatatcgatattcgtttttaggtcgttatcgatttgtaaacggattttgtgacgtaagtcgttagtaattagcgtttgttgggttttaataagttttagtttttacggatagtttgcgtattttatcgatgaaagcggatttgcgtcggtgtcgtcgttatagtttgcgatggtgattaagttcgtataagtttttgttacgttagtcgcgatggtgtttattttcggttcggaaattagttttacggagattatcgttttcgggttaatttgtttgaggtcgaaaatgagttgcgttaagttttcgatagagtagatatcgtggtgcggcggcggggagattagcgttatttcgggtatcgaatagcgtagtttggcgattaaggcgtgattttattattcggtaattgagcgttttcgtttggtttcgcgttttgggcgaattttatttgaatgacgtttcggttgatagataagtcggattaattttaagcgaacgg

SEQ ID NO: 24898 - DNA, 556 bp, Artificial Sequence
  chemically treated genomic DNA (Homo sapiens) CpG-island No: 24898
ccgttcgcttaaaattaatccgacttatctatcaaccgaaacgtcattcaaataaaattcgcccaaaacgcgaaaccaaacgaaaacgctcaattaccgaataataaaatcacgccttaatcgccaaactacgctattcgatacccgaaataacgctaatctccccgccgccgcaccacgatatctactctatcgaaaacttaacgcaactcattttcgacctcaaacaaattaacccgaaaacgataatctccgtaaaactaatttccgaaccgaaaataaacaccatcgcgactaacgtaacaaaaacttatacgaacttaatcaccatcgcaaactataacgacgacaccgacgcaaatccgctttcatcgataaaatacgcaaactatccgtaaaaactaaaacttattaaaacccaacaaacgctaattactaacgacttacgtcacaaaatccgtttacaaatcgataacgacctaaaaacgaatatcgatatcatcaaaacgacgattctcgacgcaaaaaacttcgacttcgacactaacccgataat

SEQ ID NO: 24899 - DNA, 556 bp, Artificial Sequence
  chemically treated genomic DNA (Homo sapiens) CpG-island No: 24899
tcgttcgtttggggttaattcggtttatttgttaatcggaacgttatttagataaaattcgtttagggcgcgaagttaggcgaaggcgtttagttgtcgggtgataaagttacgttttaatcgttaaattgcgttattcggtgttcggagtgacgttgattttttcgtcgtcgtattacgatatttattttatcgaggatttagcgtagtttattttcgattttaagtaggttaattcgaaagcgatgattttcgtgaagttggttttcgaatcgggagtaggtattatcgcgattggcgtggtaaaagtttatgcggatttgattattatcgtaggttatgacggcggtatcggcgtaagttcgtttttatcggtgaaatacgtaggttgttcgtgggagttggggtttgttgaaatttagtaggcgttggttgttaacggtttgcgttataagattcgtttgtaggtcgatggcggtttgaaaacgggtgtcgatattattaaggcggcgattttcggcgtagaaagtttcggtttcggtattggttcgatggt

SEQ ID NO: 24900 - DNA, 556 bp, Artificial Sequence
  chemically treated genomic DNA (Homo sapiens) CpG-island No: 24900
accatcgaaccaataccgaaaccgaaactttctacgccgaaaatcgccgccttaataatatcgacacccgttttcaaaccgccatcgacctacaaacgaatcttataacgcaaaccgttaacaaccaacgcctactaaatttcaacaaaccccaactcccacgaacaacctacgtatttcaccgataaaaacgaacttacgccgataccgccgtcataacctacgataataatcaaatccgcataaacttttaccacgccaatcgcgataatacctactcccgattcgaaaaccaacttcacgaaaatcatcgctttcgaattaacctacttaaaatcgaaaataaactacgctaaatcctcgataaaataaatatcgtaatacgacgacgaaaaaatcaacgtcactccgaacaccgaataacgcaatttaacgattaaaacgtaactttatcacccgacaactaaacgccttcgcctaacttcgcgccctaaacgaattttatctaaataacgttccgattaacaaataaaccgaattaaccccaaacgaacga

SEQ ID NO: 24901 - DNA, 532 bp, Artificial Sequence
  chemically treated genomic DNA (Homo sapiens) CpG-island No: 24901
  unsure (273..274, 292, 298)
ttggtttgtgtattacgatcgcgatgataaatggtttgtcgtacgttaatacgatgttagtcgcgggcgtcgtttagcgtttagttatcgaatagttttatttgaattttattttcgtagcgttgtgttattgcgtggtttttttttatcgtcgcgagcggcgcggcgtagatgatggttatttagttagcgtttgcgttaaacgtttgttgcgcgagcgttttattaggcgtcggcgattttttatgtgtagtagacgatgattttatgtgnnggttatcgagttcgtaantttcgntagattagtgtcgtagatgtcggaggggcgtattatattcgtcggtaattcgtattattatggtgcgtttgtatatatttaatgtcggagagtagtcgtgaatgacgttatttttcgttcgtaggcgaaaattcgtaaggcgttgacgtcgttattagaaattcgtaatttgattaaattttacgatggttaatatgcggtggatgatgttagtttgattatttataaaggtga

SEQ ID NO: 24902 - DNA, 532 bp, Artificial Sequence
  chemically treated genomic DNA (Homo sapiens) CpG-island No: 24902
  unsure (235, 241, 259..)
tcacctttataaataatcaaactaacatcatccaccgcatattaaccatcgtaaaatttaatcaaattacgaatttctaataacgacgtcaacgccttacgaattttcgcctacgaacgaaaaataacgtcattcacgactactctccgacattaaatatatacaaacgcaccataataatacgaattaccgacgaatataatacgcccctccgacatctacgacactaatctancgaaanttacgaactcgataaccnncacataaaatcatcgtctactacacataaaaaatcgccgacgcctaataaaacgctcgcgcaacaaacgtttaacgcaaacgctaactaaataaccatcatctacgccgcgccgctcgcgacgataaaaaaaaaccacgcaataacacaacgctacgaaaataaaattcaaataaaactattcgataactaaacgctaaacgacgcccgcgactaacatcgtattaacgtacgacaaaccatttatcatcgcgatcgtaatacacaaaccaa

SEQ ID NO: 24903 - DNA, 532 bp, Artificial Sequence
  chemically treated genomic DNA (Homo sapiens) CpG-island No: 24903
  unsure (235, 241, 259..)
ttatttttgtagatggttaggttgatattatttatcgtatgttgattatcgtaggatttggttaggttgcggatttttaatagcggcgttagcgttttacgggttttcgtttgcgggcgagggatagcgttatttacggttgtttttcggtattgaatgtgtgtaagcgtattataatggtgcgaattgtcggcgggtgtggtgcgttttttcggtatttacgatattgatttancggaanttacgagttcggtgattnntatataaagttatcgtttgttgtatatggaaggtcgtcgacgtttggtgaaacgttcgcgtaataggcgtttggcgtaggcgttaattggatgattattatttgcgtcgcgtcgttcgcgacggtagaaaaaggttacgtaatggtataacgttgcgggggtgaaatttagatagagttgttcggtaattggacgttggacgacgttcgcgattggtatcgtattggcgtgcggtaggttatttattatcgcggtcgtgatgtataggttag

SEQ ID NO: 24904 - DNA, 532 bp, Artificial Sequence
  chemically treated genomic DNA (Homo sapiens) CpG-island No: 24904
  unsure (273..274, 292, 298)
ctaacctatacatcacgaccgcgataataaataacctaccgcacgccaatacgataccaatcgcgaacgtcgtccaacgtccaattaccgaacaactctatctaaatttcacccccgcaacgttataccattacgtaacctttttctaccgtcgcgaacgacgcgacgcaaataataatcatccaattaacgcctacgccaaacgcctattacgcgaacgtttcaccaaacgtcgacgaccttccatatacaacaaacgataactttatatannaatcaccgaactcgtaanttccgntaaatcaatatcgtaaataccgaaaaaacgcaccacacccgccgacaattcgcaccattataatacgcttacacacattcaataccgaaaaacaaccgtaaataacgctatccctcgcccgcaaacgaaaacccgtaaaacgctaacgccgctattaaaaatccgcaacctaaccaaatcctacgataatcaacatacgataaataatatcaacctaaccatctacaaaaataa

SEQ ID NO: 24905 - DNA, 716 bp, Artificial Sequence
  chemically treated genomic DNA (Homo sapiens) CpG-island No: 24905
  unsure (139)
ggcggtttcggttacgttagcggttatagcgtggtgtattaggtattggaagaagagttggtcgagtggtttggttattcgcgggtattgttgtttatttttggtttcgtcgttattaggtagttattgtcgcgatgantgcgaaagaggatcgtattgttgtcgatcggtttagttatgttttattgttggaagttgttagtttaagttcgtcgtagtttcgtcgttttgtttataacgatttatttatttggcgcgattgtttgtttttttttttcggggtagtaaatggtggtgatagaaggcgtgtttagtatggacggcgatagtgcgttattggcggaaatttagtaggtaacgtaatagtataatggttggttgatggtcgatgatgtttacggtacgggcgttatcggggagtaggggcgcggtagttgttggttgtaaaaggtaaaattagaattgttggtagtgatttttggtaaaggatttggcgttagcggggtagcggtgttttgttttagtacggtggcggattatttgttgtaattcgttcgttattttatttatagtattagtatgtcgttcgtttaggcgtaggtattacgtgcgtcgttgcggttattcgtagtgatgagggtgatgtacggcgcgaaaaattggcggtatttattacgcgttttcgtgttcggagtattaggattttgtcgtttacg

SEQ ID NO: 24906 - DNA, 716 bp, Artificial Sequence
  chemically treated genomic DNA (Homo sapiens) CpG-island No: 24906
  unsure (578)
cgtaaacgacaaaatcctaatactccgaacacgaaaacgcgtaataaataccgccaatttttcgcgccgtacatcaccctcatcactacgaataaccgcaacgacgcacgtaatacctacgcctaaacgaacgacatactaatactataaataaaataacgaacgaattacaacaaataatccgccaccgtactaaaacaaaacaccgctaccccgctaacgccaaatcctttaccaaaaatcactaccaacaattctaattttaccttttacaaccaacaactaccgcgcccctactccccgataacgcccgtaccgtaaacatcatcgaccatcaaccaaccattatactattacgttacctactaaatttccgccaataacgcactatcgccgtccatactaaacacgccttctatcaccaccatttactaccccgaaaaaaaaaaacaaacaatcgcgccaaataaataaatcgttataaacaaaacgacgaaactacgacgaacttaaactaacaacttccaacaataaaacataactaaaccgatcgacaacaatacgatcctctttcgcantcatcgcgacaataactacctaataacgacgaaaccaaaaataaacaacaatacccgcgaataaccaaaccactcgaccaactcttcttccaatacctaatacaccacgctataaccgctaacgtaaccgaaaccgcc

SEQ ID NO: 24907 - DNA, 716 bp, Artificial Sequence
  chemically treated genomic DNA (Homo sapiens) CpG-island No: 24907
  unsure (578)
cgtaaacggtaaaattttgatatttcgggtacgaaaacgcgtaatgagtgtcgttagtttttcgcgtcgtgtattatttttattattgcgaatgatcgtagcgacgtacgtaatgtttgcgtttgagcgggcggtatattggtgttgtagataaggtggcgggcgaattgtagtagataattcgttatcgtattggagtaaagtatcgttgtttcgttgacgttaaattttttgttaaaagttattattagtaattttggttttattttttgtagttagtagttgtcgcgtttttgtttttcgataacgttcgtgtcgtgggtattatcgattattaattagttattgtgttgttgcgttatttgttggattttcgttagtggcgtattatcgtcgtttatgttgaatacgttttttgttattattatttgttgtttcggaagggggaagtaagtaatcgcgttaaatgagtgaatcgttatgagtaaaacggcgaagttgcgacgggtttaaattggtagtttttagtaatgaggtatggttaagtcggtcggtagtaatacggttttttttcgtanttatcgcggtaataattgtttgatagcggcgaaattagagataaatagtagtgttcgcgaatagttaagttattcggttagttttttttttagtgtttgatgtattacgttataatcgttgacgtgatcggagtcgtt

SEQ ID NO: 24908 - DNA, 716 bp, Artificial Sequence
  chemically treated genomic DNA (Homo sapiens) CpG-island No: 24908
  unsure (139)
aacgactccgatcacgtcaacgattataacgtaatacatcaaacactaaaaaaaaaactaaccgaataacttaactattcgcgaacactactatttatctctaatttcgccgctatcaaacaattattaccgcgataantacgaaaaaaaaccgtattactaccgaccgacttaaccatacctcattactaaaaactaccaatttaaacccgtcgcaacttcgccgttttactcataacgattcactcatttaacgcgattacttacttcccccttccgaaacaacaaataataataacaaaaaacgtattcaacataaacgacgataatacgccactaacgaaaatccaacaaataacgcaacaacacaataactaattaataatcgataatacccacgacacgaacgttatcgaaaaacaaaaacgcgacaactactaactacaaaaaataaaaccaaaattactaataataacttttaacaaaaaatttaacgtcaacgaaacaacgatactttactccaatacgataacgaattatctactacaattcgcccgccaccttatctacaacaccaatataccgcccgctcaaacgcaaacattacgtacgtcgctacgatcattcgcaataataaaaataatacacgacgcgaaaaactaacgacactcattacgcgttttcgtacccgaaatatcaaaattttaccgtttacg

SEQ ID NO: 24909 - DNA, 993 bp, Artificial Sequence
  chemically treated genomic DNA (Homo sapiens) CpG-island No: 24909
ggaaacggcgttcggtttaggtcgtttgcgggcgttgggtttgtagtcgttgtaggtcgggttttgagttttggcgttcgggaggtttttgagtcggttttcgagttagttttcgggcgcggggttcggttgggggggttcggaattttgggttggttttacgtaaattcgtttggggcgagtttcggtttttcggtagcggtgggaaagggcgcgagcggttagttatggcgcgcggatttttttcgtcggcggcgttatagcggcgtttttttttgttttagcgcgtgcggcggtgcgtggtacgagggcggtagcgacgttagttttagtagcgcggggcggcggcgcgcgcgaggtcgttggaacgagcgtcggttgtgtacgcggcgcgtcgtcgtcgaacgcgcgtgcgtattcggtagttttcggcgtttcggtttcgttttcggcgtaggtttcgttttcggttcgttttcgggcggttttgcgggcgtaggcgcggtattttcggagttttgcgtaggcgttggcgtgggcgaggcggggttcggggttcgcggtcgttgtagtcgcgcggggatttggggtttttttgggatagcggcggcggcggtgggcggatcgtggcgcggggacgagcggtcggttagcggcgtgtcggagtcggtgttatttgcgggagaggaaggcgtgagcggcgcgcggagttcgggcgttggggcgggaggggttttttcgggggttttagttgttttcgagttcggcggttttcgttttttttttcgcggcgtattttaggttcggcgttcgttggggtttttttttaggattcgggttcgcggggtagaggcggaagtagtaatagcgaagttttagttcggtttcgttacgttttttcgtcgggggtttcgggatagcggttttttcggcgtaggaaggtttcgttttaggttttgtagcgcgggaggttaaggtttttaaggggatttg

SEQ ID NO: 24910 - DNA, 993 bp, Artificial Sequence
  chemically treated genomic DNA (Homo sapiens) CpG-island No: 24910
caaatccccttaaaaaccttaacctcccgcgctacaaaacctaaaacgaaaccttcctacgccgaaaaaaccgctatcccgaaacccccgacgaaaaaacgtaacgaaaccgaactaaaacttcgctattactacttccgcctctaccccgcgaacccgaatcctaaaaaaaaaccccaacgaacgccgaacctaaaatacgccgcgaaaaaaaaaacgaaaaccgccgaactcgaaaacaactaaaacccccgaaaaaacccctcccgccccaacgcccgaactccgcgcgccgctcacgccttcctctcccgcaaataacaccgactccgacacgccgctaaccgaccgctcgtccccgcgccacgatccgcccaccgccgccgccgctatcccaaaaaaaccccaaatccccgcgcgactacaacgaccgcgaaccccgaaccccgcctcgcccacgccaacgcctacgcaaaactccgaaaataccgcgcctacgcccgcaaaaccgcccgaaaacgaaccgaaaacgaaacctacgccgaaaacgaaaccgaaacgccgaaaactaccgaatacgcacgcgcgttcgacgacgacgcgccgcgtacacaaccgacgctcgttccaacgacctcgcgcgcgccgccgccccgcgctactaaaactaacgtcgctaccgccctcgtaccacgcaccgccgcacgcgctaaaacaaaaaaaaacgccgctataacgccgccgacgaaaaaaatccgcgcgccataactaaccgctcgcgccctttcccaccgctaccgaaaaaccgaaactcgccccaaacgaatttacgtaaaaccaacccaaaattccgaacccccccaaccgaaccccgcgcccgaaaactaactcgaaaaccgactcaaaaacctcccgaacgccaaaactcaaaacccgacctacaacgactacaaacccaacgcccgcaaacgacctaaaccgaacgccgtttcc

SEQ ID NO: 24911 - DNA, 993 bp, Artificial Sequence
  chemically treated genomic DNA (Homo sapiens) CpG-island No: 24911
taggtttttttggggattttgatttttcgcgttgtagggtttggggcgggatttttttgcgtcgaggaggtcgttgtttcgggattttcggcggggggacgtggcggggtcgggttggggtttcgttgttgttgttttcgtttttgtttcgcgaattcgggttttgggaggaggttttagcggacgtcgagtttggggtgcgtcgcgggaggggaggcgagagtcgtcgggttcggggatagttgaggttttcggggaggtttttttcgttttagcgttcgggtttcgcgcgtcgtttacgtttttttttttcgtaggtgatatcggtttcgatacgtcgttaatcggtcgttcgttttcgcgttacggttcgtttatcgtcgtcgtcgttgttttagagaaattttagattttcgcgcggttatagcgatcgcgagtttcgagtttcgtttcgtttacgttagcgtttgcgtagaatttcgagagtgtcgcgtttgcgttcgtagagtcgttcgagggcgagtcgggggcggggtttgcgtcgggggcggggtcggagcgtcgagggttgtcgagtgcgtacgcgcgttcggcggcggcgcgtcgcgtgtatagtcggcgttcgttttagcggtttcgcgcgcgtcgtcgtttcgcgttgttgaagttggcgtcgttgtcgttttcgtgttacgtatcgtcgtacgcgttggagtaggaggagacgtcgttgtgacgtcgtcggcgggaagggttcgcgcgttatggttggtcgttcgcgtttttttttatcgttgtcgggaaatcgaggttcgttttaaacggatttgcgtgaaattagtttaaggtttcgggtttttttaatcgagtttcgcgttcggggattgattcggggatcgatttagggatttttcgagcgttaggatttagggttcgatttgtagcggttgtaggtttagcgttcgtaagcggtttgggtcgagcgtcgttttt

SEQ ID NO: 24912 - DNA, 993 bp, Artificial Sequence
  chemically treated genomic DNA (Homo sapiens) CpG-island No: 24912
aaaaacgacgctcgacccaaaccgcttacgaacgctaaacctacaaccgctacaaatcgaaccctaaatcctaacgctcgaaaaatccctaaatcgatccccgaatcaatccccgaacgcgaaactcgattaaaaaaacccgaaaccttaaactaatttcacgcaaatccgtttaaaacgaacctcgatttcccgacaacgataaaaaaaaacgcgaacgaccaaccataacgcgcgaacccttcccgccgacgacgtcacaacgacgtctcctcctactccaacgcgtacgacgatacgtaacacgaaaacgacaacgacgccaacttcaacaacgcgaaacgacgacgcgcgcgaaaccgctaaaacgaacgccgactatacacgcgacgcgccgccgccgaacgcgcgtacgcactcgacaaccctcgacgctccgaccccgcccccgacgcaaaccccgcccccgactcgccctcgaacgactctacgaacgcaaacgcgacactctcgaaattctacgcaaacgctaacgtaaacgaaacgaaactcgaaactcgcgatcgctataaccgcgcgaaaatctaaaatttctctaaaacaacgacgacgacgataaacgaaccgtaacgcgaaaacgaacgaccgattaacgacgtatcgaaaccgatatcacctacgaaaaaaaaaaacgtaaacgacgcgcgaaacccgaacgctaaaacgaaaaaaacctccccgaaaacctcaactatccccgaacccgacgactctcgcctcccctcccgcgacgcaccccaaactcgacgtccgctaaaacctcctcccaaaacccgaattcgcgaaacaaaaacgaaaacaacaacaacgaaaccccaacccgaccccgccacgtccccccgccgaaaatcccgaaacaacgacctcctcgacgcaaaaaaatcccgccccaaaccctacaacgcgaaaaatcaaaatccccaaaaaaaccta

SEQ ID NO: 24913 - DNA, 950 bp, Artificial Sequence
  chemically treated genomic DNA (Homo sapiens) CpG-island No: 24913
gcgagcgcgcgaggcggagatttggagggagaggagttgcggagaggggttaggcggggagggagagagagaattaggtttcggtttagggaggagagagatagcgcgcgcgaggcggagatttggaggagaggagttgcggagaggggttaggcggggagagagagagagcgagttaggtttaggtttagggaggagagagatagcgcgcgcgaggcggagatttggagggagaggagttgcggagaggggttaggcggggagggagagagagaattaggtttaggtttagggaggagagagatagcgcgcgcgaggcggagatttggaggagaggagttgcggagaggggttaggcggggagagagagagagcgagttaggtttaggtttagggaggagagagatagcgcgcgcgaggcggagatttggagggagaggagttgcggagaggggttaggcggggagggagagagttaggtttaggtttagggaggagagagatagcgcgcgcgaggcggagatttggagggagaggagttgcggagaggggttaggcggggagagagagagcgagttaggtttaggtttagggaggagagagatagcgcgcgcgaggcggagatttggagggagaggagttgcggagaggggttaggcggggagggagagagatagcgcgcgcgaggcggagatttggagggagaggagttgcggagaggggttaggcggcgggaggttcgggagcgttatatgtgtgtggattcggggagggcggcggggggtcgtttttcggggtcgtttgtttgtaggaaggagtttacggatttgttgttgaggcggaagggtattaggcggtagaaggtgtcgggagagtagggaatttgcgtgcgggttttttgcgaggggattatcgttttttcgggagatagttagggcggtagtttggtt

SEQ ID NO: 24914 - DNA, 950 bp, Artificial Sequence
  chemically treated genomic DNA (Homo sapiens) CpG-island No: 24914
aaccaaactaccgccctaactatctcccgaaaaaacgataatcccctcgcaaaaaacccgcacgcaaattccctactctcccgacaccttctaccgcctaatacccttccgcctcaacaacaaatccgtaaactccttcctacaaacaaacgaccccgaaaaacgaccccccgccgccctccccgaatccacacacatataacgctcccgaacctcccgccgcctaacccctctccgcaactcctctccctccaaatctccgcctcgcgcgcgctatctctctccctccccgcctaacccctctccgcaactcctctccctccaaatctccgcctcgcgcgcgctatctctctcctccctaaacctaaacctaactcgctctctctctccccgcctaacccctctccgcaactcctctccctccaaatctccgcctcgcgcgcgctatctctctcctccctaaacctaaacctaactctctccctccccgcctaacccctctccgcaactcctctccctccaaatctccgcctcgcgcgcgctatctctctcctccctaaacctaaacctaactcgctctctctctctccccgcctaacccctctccgcaactcctctcctccaaatctccgcctcgcgcgcgctatctctctcctccctaaacctaaacctaattctctctctccctccccgcctaacccctctccgcaactcctctccctccaaatctccgcctcgcgcgcgctatctctctcctccctaaacctaaacctaactcgctctctctctctccccgcctaacccctctccgcaactcctctcctccaaatctccgcctcgcgcgcgctatctctctcctccctaaaccgaaacctaattctctctctccctccccgcctaacccctctccgcaactcctctccctccaaatctccgcctcgcgcgctcgc

SEQ ID NO: 24915 - DNA, 950 bp, Artificial Sequence
  chemically treated genomic DNA (Homo sapiens) CpG-island No: 24915
ggttaggttgtcgttttggttgtttttcggggagacggtggttttttcgtagagggttcgtacgtagattttttattttttcggtattttttgtcgtttgatgttttttcgttttagtagtaagttcgtggatttttttttgtaggtagacggtttcgaggagcggtttttcgtcgtttttttcgagtttatatatatgtaacgttttcgggtttttcgtcgtttaattttttttcgtagtttttttttttttaggttttcgtttcgcgcgcgttgttttttttttttttcgtttaattttttttcgtagtttttttttttttaggttttcgtttcgcgcgcgttgttttttttttttttggatttgaatttggttcgtttttttttttttcgtttaattttttttcgtagtttttttttttttaggttttcgtttcgcgcgcgttgttttttttttttttggatttgaatttggtttttttttttttcgtttaattttttttcgtagtttttttttttttaggttttcgtttcgcgcgcgttgttttttttttttttggatttgaatttggttcgtttttttttttttttcgtttaattttttttcgtagttttttttttttaggttttcgtttcgcgcgcgttgttttttttttttttggatttgaatttggtttttttttttttttttcgtttaattttttttcgtagtttttttttttttaggttttcgtttcgcgcgcgttgttttttttttttttggatttgaatttggttcgtttttttttttttttcgtttaattttttttcgtagttttttttttttaggttttcgtttcgcgcgcgttgttttttttttttttggatcggaatttggtttttttttttttttttcgtttaattttttttcgtagtttttttttttttaggttttcgtttcgcgcgttcgt

SEQ ID NO: 24916 - DNA, 950 bp, Artificial Sequence
  chemically treated genomic DNA (Homo sapiens) CpG-island No: 24916
acgaacgcgcgaaacgaaaacctaaaaaaaaaaaaactacgaaaaaaaattaaacgaaaaaaaaaaaaaaaaaccaaattccgatccaaaaaaaaaaaaaacaacgcgcgcgaaacgaaaacctaaaaaaaaaaaactacgaaaaaaaattaaacgaaaaaaaaaaaaaaacgaaccaaattcaaatccaaaaaaaaaaaaaacaacgcgcgcgaaacgaaaacctaaaaaaaaaaaaactacgaaaaaaaattaaacgaaaaaaaaaaaaaaaaaccaaattcaaatccaaaaaaaaaaaaaacaacgcgcgcgaaacgaaaacctaaaaaaaaaaaactacgaaaaaaaattaaacgaaaaaaaaaaaaaaacgaaccaaattcaaatccaaaaaaaaaaaaaacaacgcgcgcgaaacgaaaacctaaaaaaaaaaaaactacgaaaaaaaattaaacgaaaaaaaaaaaaaccaaattcaaatccaaaaaaaaaaaaaacaacgcgcgcgaaacgaaaacctaaaaaaaaaaaaactacgaaaaaaaattaaacgaaaaaaaaaaaaacgaaccaaattcaaatccaaaaaaaaaaaaaacaacgcgcgcgaaacgaaaacctaaaaaaaaaaaaactacgaaaaaaaattaaacgaaaaaaaaaaaaaacaacgcgcgcgaaacgaaaacctaaaaaaaaaaaaactacgaaaaaaaattaaacgacgaaaaacccgaaaacgttacatatatataaactcgaaaaaaacgacgaaaaaccgctcctcgaaaccgtctacctacaaaaaaaaatccacgaacttactactaaaacgaaaaaacatcaaacgacaaaaaataccgaaaaaataaaaaatctacgtacgaaccctctacgaaaaaaccaccgtctccccgaaaaacaaccaaaacgacaacctaacc

SEQ ID NO: 24917 - DNA, 542 bp, Artificial Sequence
  chemically treated genomic DNA (Homo sapiens) CpG-island No: 24917
  unsure (245, 409)
gggcgtttttcgtcgaggttcgcgggttggggtagcgcgggtgggggtatacgtttgggttattcgtatatagatcgattatttaggcggtcggtgtagttaagttttattgtaggggtcgttttcgtagcggagtcgatttcgttttattcgtaatgcgtttcgcggattcggtagtttcggtttttttttcgagaagcgcgtaggtgcggcggtaggggcgcgtttttttcggtatcgcgatnagttattatcgcgggcgttcgtttattttttttttatttttttcgtagtcgtcggcgtcgttacgcgatggggttagttaggtttcgcgtgcgagtagcgttttcgttttcgttcgttcgggtagggcgttaggagttttaggagcgcggggagcgttaggatngtcgtggtttggggaatggggttcggggttcgcgcgggcgtttcgggtgtatacggggcgggcggattcggttacggtttttttaggttttttcgtttttttgagtttgggggttttatttgaggttcgtttt

SEQ ID NO: 24918 - DNA, 542 bp, Artificial Sequence
  chemically treated genomic DNA (Homo sapiens) CpG-island No: 24918
  unsure (134, 298)
aaaacgaacctcaaataaaacccccaaactcaaaaaaacgaaaaaacctaaaaaaaccgtaaccgaatccgcccgccccgtatacacccgaaacgcccgcgcgaaccccgaaccccattccccaaaccacgacnatcctaacgctccccgcgctcctaaaactcctaacgccctacccgaacgaacgaaaacgaaaacgctactcgcacgcgaaacctaactaaccccatcgcgtaacgacgccgacgactacgaaaaaaataaaaaaaaaataaacgaacgcccgcgataataactnatcgcgataccgaaaaaaacgcgcccctaccgccgcacctacgcgcttctcgaaaaaaaaaccgaaactaccgaatccgcgaaacgcattacgaataaaacgaaatcgactccgctacgaaaacgacccctacaataaaacttaactacaccgaccgcctaaataatcgatctatatacgaataacccaaacgtatacccccacccgcgctaccccaacccgcgaacctcgacgaaaaacgccc

SEQ ID NO: 24919 - DNA, 542 bp, Artificial Sequence
  chemically treated genomic DNA (Homo sapiens) CpG-island No: 24919
  unsure (134, 298)
ggggcggattttaggtgggatttttaggtttaggagggcggggggatttggggaggtcgtggtcgggttcgttcgtttcgtgtgtattcggagcgttcgcgcggatttcgagttttattttttaggttacggtngttttggcgtttttcgcgtttttggggtttttggcgttttgttcgggcgggcgggggcgggagcgttgttcgtacgcgaggtttggttggttttatcgcgtgacggcgtcggcggttgcgggggaagtaggggggaagtgggcgggcgttcgcggtggtggttnatcgcgatgtcgggaggggcgcgtttttgtcgtcgtatttacgcgtttttcggggaaaaggtcggggttgtcgggttcgcggggcgtattgcgggtgggacggggtcggtttcgttgcgggagcgatttttgtaatggggtttggttgtatcggtcgtttgggtggtcggtttgtgtgcgggtgatttaggcgtgtgtttttattcgcgttgttttagttcgcggatttcggcggggagcgttt

SEQ ID NO: 24920 - DNA, 542 bp, Artificial Sequence
  chemically treated genomic DNA (Homo sapiens) CpG-island No: 24920
  unsure (245, 409)
aaacgctccccgccgaaatccgcgaactaaaacaacgcgaataaaaacacacgcctaaatcacccgcacacaaaccgaccacccaaacgaccgatacaaccaaaccccattacaaaaatcgctcccgcaacgaaaccgaccccgtcccacccgcaatacgccccgcgaacccgacaaccccgaccttttccccgaaaaacgcgtaaatacgacgacaaaaacgcgcccctcccgacatcgcgatnaaccaccaccgcgaacgcccgcccacttcccccctacttcccccgcaaccgccgacgccgtcacgcgataaaaccaaccaaacctcgcgtacgaacaacgctcccgcccccgcccgcccgaacaaaacgccaaaaaccccaaaaacgcgaaaaacgccaaaacnaccgtaacctaaaaaataaaactcgaaatccgcgcgaacgctccgaatacacacgaaacgaacgaacccgaccacgacctccccaaatccccccgccctcctaaacctaaaaatcccacctaaaatccgcccc

SEQ ID NO: 24921 - DNA, 612 bp, Artificial Sequence
  chemically treated genomic DNA (Homo sapiens) CpG-island No: 24921
gcgattgaggaagagcgttcgggagtggaggtttttagttacggagtttattcgggtagttagcgattggggaagagcgttcgcgagtggaggtttttagatacggagtttattcgggtagttagcgattggggaagagcgttcgggagtggaggtttttagttacggagtttattcgggtagttagcgattgaggaagagcgttcgcgagtggaggtttttagttacggagtttattcgggtagttagcgattgaggaagagcgttcgggagtggaggtcgttagttacggagtttattcgggtagttagcgattgaggaagagcgttcgtaagtggaggtttttagttacggagtttattcgggtagttagcgattgaggaagagcgttcgcgagtggaggtttttagttacggagtttattcgggtagttagcgattgaggaagagcgttcgcgagtggaggtttttagttacggagtttattcgggtagttagcgattggggaagagcgttcgggagtggaggtttttagttacggagtttattcgggtagttagcgattggggaagagcgttcgggagtggaggtttttagttacggagtttattcg

SEQ ID NO: 24922 - DNA, 612 bp, Artificial Sequence
  chemically treated genomic DNA (Homo sapiens) CpG-island No: 24922
cgaataaactccgtaactaaaaacctccactcccgaacgctcttccccaatcgctaactacccgaataaactccgtaactaaaaacctccactcccgaacgctcttccccaatcgctaactacccgaataaactccgtaactaaaaacctccactcgcgaacgctcttcctcaatcgctaactacccgaataaactccgtaactaaaaacctccactcgcgaacgctcttcctcaatcgctaactacccgaataaactccgtaactaaaaacctccacttacgaacgctcttcctcaatcgctaactacccgaataaactccgtaactaacgacctccactcccgaacgctcttcctcaatcgctaactacccgaataaactccgtaactaaaaacctccactcgcgaacgctcttcctcaatcgctaactacccgaataaactccgtaactaaaaacctccactcccgaacgctcttccccaatcgctaactacccgaataaactccgtatctaaaaacctccactcgcgaacgctcttccccaatcgctaactacccgaataaactccgtaactaaaaacctccactcccgaacgctcttcctcaatcgc

SEQ ID NO: 24923 - DNA, 612 bp, Artificial Sequence
  chemically treated genomic DNA (Homo sapiens) CpG-island No: 24923
cgggtggatttcgtgattgagggtttttattttcgggcgtttttttttagtcgttgattgttcgggtggatttcgtgattgagggtttttattttcgggcgtttttttttagtcgttgattgttcgggtggatttcgtgattgagggtttttattcgcgggcgtttttttttagtcgttgattgttcgggtggatttcgtgattgagggtttttattcgcgggcgtttttttttagtcgttgattgttcgggtggatttcgtgattgagggtttttatttgcgggcgtttttttttagtcgttgattgttcgggtggatttcgtgattgacggtttttattttcgggcgtttttttttagtcgttgattgttcgggtggatttcgtgattgagggtttttattcgcgggcgtttttttttagtcgttgattgttcgggtggatttcgtgattgagggtttttattttcgggcgtttttttttagtcgttgattgttcgggtggatttcgtgtttgagggtttttattcgcgggcgtttttttttagtcgttgattgttcgggtggatttcgtgattgagggtttttattttcgggcgtttttttttagtcgt

SEQ ID NO: 24924 - DNA, 612 bp, Artificial Sequence
  chemically treated genomic DNA (Homo sapiens) CpG-island No: 24924
acgactaaaaaaaaacgcccgaaaataaaaaccctcaatcacgaaatccacccgaacaatcaacgactaaaaaaaaacgcccgcgaataaaaaccctcaaacacgaaatccacccgaacaatcaacgactaaaaaaaaacgcccgaaaataaaaaccctcaatcacgaaatccacccgaacaatcaacgactaaaaaaaaacgcccgcgaataaaaaccctcaatcacgaaatccacccgaacaatcaacgactaaaaaaaaacgcccgaaaataaaaaccgtcaatcacgaaatccacccgaacaatcaacgactaaaaaaaaacgcccgcaaataaaaaccctcaatcacgaaatccacccgaacaatcaacgactaaaaaaaaacgcccgcgaataaaaaccctcaatcacgaaatccacccgaacaatcaacgactaaaaaaaaacgcccgcgaataaaaaccctcaatcacgaaatccacccgaacaatcaacgactaaaaaaaaacgcccgaaaataaaaaccctcaatcacgaaatccacccgaacaatcaacgactaaaaaaaaacgcccgaaaataaaaaccctcaatcacgaaatccacccg

SEQ ID NO: 24925 - DNA, 677 bp, Artificial Sequence
  chemically treated genomic DNA (Homo sapiens) CpG-island No: 24925
gttagcgattggggaagagcgttcgcgagtggaggtttttagttacggagtttattcgggtagttagcgattgaggaagagcgttcgcgagtggaggtcgttagttacggagtttattcgggtagttagcgattgaggaagagcgttcgcgagtggaggtttttagttacggagtttattcgggtagttagcgattgaggaagagcgttcgcgagtggaggtttttagttacggagtttattcgggtagttagcgattgaggaagagcgttcgggagtggaggtttttagttacggagtttattcgggtagttagcgattgaggaagagcgttcgggagtggaggtttttagttacggagtttattcgggtagttagcgattgaggaagagcgttcgggagtggaggtttttagttacggagtttattcgggtagttagcgattgaggaagagcgttcgcgagtggaggtttttagttacggagtttattcgggtagttagcgattgaggaagagcgttcgcgagtggaggtttttagttacggagtttattcgggtagttagcgattgaggaagagcgttcgcgagtggaggtcgttagttacggagtttatttaggtttggtatgtggttgtgtttatttttatgcgtagggtcggagtgttgacggggtataga

SEQ ID NO: 24926 - DNA, 677 bp, Artificial Sequence
  chemically treated genomic DNA (Homo sapiens) CpG-island No: 24926
tctataccccgtcaacactccgaccctacgcataaaaataaacacaaccacataccaaacctaaataaactccgtaactaacgacctccactcgcgaacgctcttcctcaatcgctaactacccgaataaactccgtaactaaaaacctccactcgcgaacgctcttcctcaatcgctaactacccgaataaactccgtaactaaaaacctccactcgcgaacgctcttcctcaatcgctaactacccgaataaactccgtaactaaaaacctccactcccgaacgctcttcctcaatcgctaactacccgaataaactccgtaactaaaaacctccactcccgaacgctcttcctcaatcgctaactacccgaataaactccgtaactaaaaacctccactcccgaacgctcttcctcaatcgctaactacccgaataaactccgtaactaaaaacctccactcgcgaacgctcttcctcaatcgctaactacccgaataaactccgtaactaaaaacctccactcgcgaacgctcttcctcaatcgctaactacccgaataaactccgtaactaacgacctccactcgcgaacgctcttcctcaatcgctaactacccgaataaactccgtaactaaaaacctccactcgcgaacgctcttccccaatcgctaac

SEQ ID NO: 24927 - DNA, 677 bp, Artificial Sequence
  chemically treated genomic DNA (Homo sapiens) CpG-island No: 24927
tttgtgtttcgttagtatttcggttttacgtatagaggtggatatagttatatgttaggtttgggtggatttcgtgattgacggtttttattcgcgggcgtttttttttagtcgttgattgttcgggtggatttcgtgattgagggtttttattcgcgggcgtttttttttagtcgttgattgttcgggtggatttcgtgattgagggtttttattcgcgggcgtttttttttagtcgttgattgttcgggtggatttcgtgattgagggtttttattttcgggcgtttttttttagtcgttgattgttcgggtggatttcgtgattgagggtttttattttcgggcgtttttttttagtcgttgattgttcgggtggatttcgtgattgagggtttttattttcgggcgtttttttttagtcgttgattgttcgggtggatttcgtgattgagggtttttattcgcgggcgtttttttttagtcgttgattgttcgggtggatttcgtgattgagggtttttattcgcgggcgtttttttttagtcgttgattgttcgggtggatttcgtgattgacggtttttattcgcgggcgtttttttttagtcgttgattgttcgggtggatttcgtgattgagggtttttattcgcgggcgtttttttttagtcgttgat

SEQ ID NO: 24928 - DNA, 677 bp, Artificial Sequence
  chemically treated genomic DNA (Homo sapiens) CpG-island No: 24928
atcaacgactaaaaaaaaacgcccgcgaataaaaaccctcaatcacgaaatccacccgaacaatcaacgactaaaaaaaaacgcccgcgaataaaaaccgtcaatcacgaaatccacccgaacaatcaacgactaaaaaaaaacgcccgcgaataaaaaccctcaatcacgaaatccacccgaacaatcaacgactaaaaaaaaacgcccgcgaataaaaaccctcaatcacgaaatccacccgaacaatcaacgactaaaaaaaaacgcccgaaaataaaaaccctcaatcacgaaatccacccgaacaatcaacgactaaaaaaaaacgcccgaaaataaaaaccctcaatcacgaaatccacccgaacaatcaacgactaaaaaaaaacgcccgaaaataaaaaccctcaatcacgaaatccacccgaacaatcaacgactaaaaaaaaacgcccgcgaataaaaaccctcaatcacgaaatccacccgaacaatcaacgactaaaaaaaaacgcccgcgaataaaaaccctcaatcacgaaatccacccgaacaatcaacgactaaaaaaaaacgcccgcgaataaaaaccgtcaatcacgaaatccacccaaacctaacatataactatatccacctctatacgtaaaaccgaaatactaacgaaacacaaa

SEQ ID NO: 24929 - DNA, 633 bp, Artificial Sequence
  chemically treated genomic DNA (Homo sapiens) CpG-island No: 24929
agtggagcgtggggagggtcggcgatggcgcggggagtggagcgtggggagggtcggcgatggcgcggggagtggagcgtggggagggtcggcgatggcgcggggagtggagcgtggggagggtcggcgatggcgcggggagtggagcgtggggagggtcggcgatggcgcggggagtggagcgtggggagggtcggcgatggcgcggggagtggagcgtggggagggtcggcgatggcgcggggagtggagcgtggggagggtcggcgatggcgcggggagtggagcgtggggagggtcggcgatggcgcggggagtggagcgtggggagggtcggcgatggcgcggggagtggagcgtggggagggtcggcgatggcgcggggagtggagcgtggggagggtcggcgatggcgcggggagtggagcgtggggagggtcggcgatggcgcggggagtggagcgtggggagggtcggcgatggcgcggggagtggagcgtggggagggtcggcgatggcgcggggagtggagcgtggggagggtcggcgatggcgcggggagtattgtgagtttttagggtatagagttgcgttgttgtttttaaagataaagttggtttttgtgtttttgtg

SEQ ID NO: 24930 - DNA, 633 bp, Artificial Sequence
  chemically treated genomic DNA (Homo sapiens) CpG-island No: 24930
cacaaaaacacaaaaaccaactttatctttaaaaacaacaacgcaactctataccctaaaaactcacaatactccccgcgccatcgccgaccctccccacgctccactccccgcgccatcgccgaccctccccacgctccactccccgcgccatcgccgaccctccccacgctccactccccgcgccatcgccgaccctccccacgctccactccccgcgccatcgccgaccctccccacgctccactccccgcgccatcgccgaccctccccacgctccactccccgcgccatcgccgaccctccccacgctccactccccgcgccatcgccgaccctccccacgctccactccccgcgccatcgccgaccctccccacgctccactccccgcgccatcgccgaccctccccacgctccactccccgcgccatcgccgaccctccccacgctccactccccgcgccatcgccgaccctccccacgctccactccccgcgccatcgccgaccctccccacgctccactccccgcgccatcgccgaccctccccacgctccactccccgcgccatcgccgaccctccccacgctccactccccgcgccatcgccgaccctccccacgctccact

SEQ ID NO: 24931 - DNA, 633 bp, Artificial Sequence
  chemically treated genomic DNA (Homo sapiens) CpG-island No: 24931
tatagggatatagggattagttttgtttttaaaaataataacgtaattttgtgttttggggatttatagtgtttttcgcgttatcgtcgattttttttacgttttatttttcgcgttatcgtcgattttttttacgttttatttttcgcgttatcgtcgattttttttacgttttatttttcgcgttatcgtcgattttttttacgttttatttttcgcgttatcgtcgattttttttacgttttatttttcgcgttatcgtcgattttttttacgttttatttttcgcgttatcgtcgattttttttacgttttatttttcgcgttatcgtcgattttttttacgttttatttttcgcgttatcgtcgattttttttacgttttatttttcgcgttatcgtcgattttttttacgttttatttttcgcgttatcgtcgattttttttacgttttatttttcgcgttatcgtcgattttttttacgttttatttttcgcgttatcgtcgattttttttacgttttatttttcgcgttatcgtcgattttttttacgttttatttttcgcgttatcgtcgattttttttacgttttatttttcgcgttatcgtcgattttttttacgttttatt

SEQ ID NO: 24932 - DNA, 633 bp, Artificial Sequence
  chemically treated genomic DNA (Homo sapiens) CpG-island No: 24932
aataaaacgtaaaaaaaatcgacgataacgcgaaaaataaaacgtaaaaaaaatcgacgataacgcgaaaaataaaacgtaaaaaaaatcgacgataacgcgaaaaataaaacgtaaaaaaaatcgacgataacgcgaaaaataaaacgtaaaaaaaatcgacgataacgcgaaaaataaaacgtaaaaaaaatcgacgataacgcgaaaaataaaacgtaaaaaaaatcgacgataacgcgaaaaataaaacgtaaaaaaaatcgacgataacgcgaaaaataaaacgtaaaaaaaatcgacgataacgcgaaaaataaaacgtaaaaaaaatcgacgataacgcgaaaaataaaacgtaaaaaaaatcgacgataacgcgaaaaataaaacgtaaaaaaaatcgacgataacgcgaaaaataaaacgtaaaaaaaatcgacgataacgcgaaaaataaaacgtaaaaaaaatcgacgataacgcgaaaaataaaacgtaaaaaaaatcgacgataacgcgaaaaataaaacgtaaaaaaaatcgacgataacgcgaaaaacactataaatccccaaaacacaaaattacgttattatttttaaaaacaaaactaatccctatatccctata

SEQ ID NO: 24933 - DNA, 880 bp, Artificial Sequence
  chemically treated genomic DNA (Homo sapiens) CpG-island No: 24933
ggacgtcgcgtttgtatttgttatatttgtatttatttcgttttgcgttcgtgtatattttggttttgtttcgttttgcgtttgtttcgttttgtattcgtgtgttcgtgtacgttttggttttgttttattttgcgtttttttcgttttgcgttcgtgtacgttttggttttgtttcgttttgcgtttttttcgttttgcgttcgtgtacgttttggttttgtttcgttttgcgtttttttcgttttgcgttcgtgtacgttttggttttgtttcgttttgcgtttttatcgttttgcgttcgtgtacgttttggttttgtttcgttttgcgtttttttcgttttgcgttcgtgtacgttttggttttgtttcgttttgcgtttttttcgttttgcgttcgtgtacgttttggttttgtttcgttttgcgtttgtttcgttttgtattcgtgtgttcgtgtacgttttggttttgttttattttgcgtttttttcgttttgcgttcgtgtacgttttggttttgtttcgttttgcgtttttttcgttttgcgttcgtgtacgttttggttttgtttcgttttgcgtttgtttcgttttgtattcgtgtgttcgtgtacgttttggttttgttttattttgcgtttttttcgttttgcgttcgtgtacgttttggttttgttttattttgcgtttttttcgttttgtgttcgtgtacgttttggttttgtttcgttttgcgtttttttcgttttgttttcgtgtacgttttggttttgtttcgttttgcgtttttttcgttttgtttttatgtacgttttggttttgttttattttgcgtttttttcgttttgtttttatgtacgttttggttttgtttt

SEQ ID NO: 24934 - DNA, 880 bp, Artificial Sequence
  chemically treated genomic DNA (Homo sapiens) CpG-island No: 24934
aaaacaaaaccaaaacgtacataaaaacaaaacgaaaaaaacgcaaaataaaacaaaaccaaaacgtacataaaaacaaaacgaaaaaaacgcaaaacgaaacaaaaccaaaacgtacacgaaaacaaaacgaaaaaaacgcaaaacgaaacaaaaccaaaacgtacacgaacacaaaacgaaaaaaacgcaaaataaaacaaaaccaaaacgtacacgaacgcaaaacgaaaaaaacgcaaaataaaacaaaaccaaaacgtacacgaacacacgaatacaaaacgaaacaaacgcaaaacgaaacaaaaccaaaacgtacacgaacgcaaaacgaaaaaaacgcaaaacgaaacaaaaccaaaacgtacacgaacgcaaaacgaaaaaaacgcaaaataaaacaaaaccaaaacgtacacgaacacacgaatacaaaacgaaacaaacgcaaaacgaaacaaaaccaaaacgtacacgaacgcaaaacgaaaaaaacgcaaaacgaaacaaaaccaaaacgtacacgaacgcaaaacgaaaaaaacgcaaaacgaaacaaaaccaaaacgtacacgaacgcaaaacgataaaaacgcaaaacgaaacaaaaccaaaacgtacacgaacgcaaaacgaaaaaaacgcaaaacgaaacaaaaccaaaacgtacacgaacgcaaaacgaaaaaaacgcaaaacgaaacaaaaccaaaacgtacacgaacgcaaaacgaaaaaaacgcaaaataaaacaaaaccaaaacgtacacgaacacacgaatacaaaacgaaacaaacgcaaaacgaaacaaaaccaaaatatacacgaacgcaaaacgaaataaatacaaatataacaaatacaaacgcgacgtcc

SEQ ID NO: 24935 - DNA, 880 bp, Artificial Sequence
  chemically treated genomic DNA (Homo sapiens) CpG-island No: 24935
gaggtagggttagagcgtgtatgggggtagggcgaggagggcgtagggtgaggtagggttagagcgtgtatgggggtagggcgaggagggcgtagggcgaggtagggttagagcgtgtacgggggtagggcgaggagggcgtagggcgaggtagggttagagcgtgtacggatatagggcgaggagggcgtagggtgaggtagggttagagcgtgtacgggcgtagggcgaggagggcgtagggtgaggtagggttagagcgtgtacgaatatacgggtgtagggcgaggtaggcgtagggcgaggtagggttagagcgtgtacggacgtagggcgaggagggcgtagggcgaggtagggttagagcgtgtacgggcgtagggcgaggagggcgtagggtgaggtagggttagagcgtgtacgaatatacgggtgtagggcgaggtaggcgtagggcgaggtagggttagagcgtgtacggacgtagggcgaggagggcgtagggcgaggtagggttagagcgtgtacgggcgtagggcgaggagggcgtagggcgaggtagggttagagcgtgtacgggcgtagggcgatgagggcgtagggcgaggtagggttagagcgtgtacgggcgtagggcgaggagggcgtagggcgaggtagggttagagcgtgtacgggcgtagggcgaggagggcgtagggcgaggtagggttagagcgtgtacgggcgtagggcgaggagggcgtagggtgaggtagggttagagcgtgtacgaatatacgggtgtagggcgaggtaggcgtagggcgaggtagggttagagtgtgtacgggcgtagggcgaggtgggtgtagatgtggtaggtgtagacgcggcgttt

SEQ ID NO: 24936 - DNA, 880 bp, Artificial Sequence
  chemically treated genomic DNA (Homo sapiens) CpG-island No: 24936
aaacgccgcgtctacacctaccacatctacacccacctcgccctacgcccgtacacactctaaccctacctcgccctacgcctacctcgccctacacccgtatattcgtacacgctctaaccctacctcaccctacgccctcctcgccctacgcccgtacacgctctaaccctacctcgccctacgccctcctcgccctacgcccgtacacgctctaaccctacctcgccctacgccctcctcgccctacgcccgtacacgctctaaccctacctcgccctacgccctcatcgccctacgcccgtacacgctctaaccctacctcgccctacgccctcctcgccctacgcccgtacacgctctaaccctacctcgccctacgccctcctcgccctacgtccgtacacgctctaaccctacctcgccctacgcctacctcgccctacacccgtatattcgtacacgctctaaccctacctcaccctacgccctcctcgccctacgcccgtacacgctctaaccctacctcgccctacgccctcctcgccctacgtccgtacacgctctaaccctacctcgccctacgcctacctcgccctacacccgtatattcgtacacgctctaaccctacctcaccctacgccctcctcgccctacgcccgtacacgctctaaccctacctcaccctacgccctcctcgccctatatccgtacacgctctaaccctacctcgccctacgccctcctcgccctacccccgtacacgctctaaccctacctcgccctacgccctcctcgccctacccccatacacgctctaaccctacctcaccctacgccctcctcgccctacccccatacacgctctaaccctacctc

SEQ ID NO: 24937 - DNA, 1954 bp, Artificial Sequence
  chemically treated genomic DNA (Homo sapiens) CpG-island No: 24937
  unsure (465, 639, 718, 754)
agaagaggtcggattattatatttataataaacgggggcgcgaaggaagtagcgcgacgatgaggtaagcgaaataagtagggcggtatatcgattatacgtagatgatgaagataagatcggtcggtcgttagtagtttaattagattaattgtacgatcgagtttacgacgtaggatcgttgatagagtagttagtagacggcgtatacgacgagtatagggatcgatgtatagagcgtcgagtaagaggtagagtagagagttagacgtgtacggtatatatcgaagcgaggtgagacgtacggatttacgagacgagtaagtaatagacgaacggtacgcgtaggcgtacgaagagacgaattaagagcgggtcgtacggtagattaggatagttgatattgtattatacgagtaggcgtgtgtagtatataggtttacgcgcggatgttgtgttaggttngcgcgtttataggagtaacgtaagcgttgtatatagcgttaggtacggtacgtttgcgtaggatatgcgtattacgtagatagagtacgcgacgtgtagtttacgagttgattatatttcgacgtcgtttttgttcgtaattaggatagcgtatacgtttataaattagttcgnatttacgttagtacgtcggtatcgtgtcgatggtgtcgttgcggtgtcgtggttgttatacgtttcgcgcgttttgttncgttgtcgtgcgtttatcgtttttcggttcgagtgnttaagtcgtcgagtcggaggtcgaggtggttacgttcgcgcgatagattcgacgaagtcgttagttacgatgttcgttagagttggttttacgtttacgttgtgttcggtcgtttttacgttttgttgtgtttgtgtatcgcgcgtgcgtttttgtttatttttcgttgtcggtgcgttacggttgagtcgtcgtatgcgcgttcgtgttcgttgatatttgtatgttgcggttttgttagcgcgcgtcgtgcgtttacgttcgtttttgattagtgtcgcggttcgttgtttcgttgcgtacgttttttcgttatttgttatcgcggcgcgtgtcgcgtatttatcgtagcgttgttagtgtggtcggtttttgtttttatgttggtgttcggttcggttttatcgttttagcgttcgttttgtttttttttcgcgtttttagattttgtaagcgtatttcgtattacgtcggtcgtgcgtttttttttgtttttatgtgttcgtagtatatatttttttcgttatagtcggcgcgtgcgttcgtttatttagcgtttcgatcggtttagtttatcgtgtgtttagtatcgttattcgtttgttgtcgtcgtattacggtagtttttcgtgtgacgtgcgttttagtcgatatttcgttttacgttttgcgtttttcggtttttttttttagcgtttcgcgatacgcggttgttcgtttgttgttcgttttatcgtttgtcgttttatttacgcgacgtcgttgtttcgattcgtcgcgttttcgttttatttttatttttcgttttttttttcgtttagtgttagtatcgtgtttacggtttttttcgcgcgtcgttcgttatttacgtcgtttcgttgtttgtgcgttttttcgttggtcgcgcgttttttcgtgttcgcgtcgtcgtttttagttttgatttacgtacgcgttcgttgcgcgttattcgttttttattcgcgttcggtggtgcgcgcgttagtggtcgtagtgcgttttagtttcgtcgttcgtttttttggttttgttgtacgacgtattagcgacgtttcgttgttttatgtttatatttttgcgtattattatgcgtaatattatattatttattttttatcgtttattatagtattcgttagtattatatagttgtaatacgtttgcgtatattgttgattt

SEQ ID NO: 24938 - DNA, 1954 bp, Artificial Sequence
  chemically treated genomic DNA (Homo sapiens) CpG-island No: 24938
  unsure (1201, 1237, 1316, 1490)
aaatcaacaatatacgcaaacgtattacaactatataatactaacgaatactataataaacgataaaaaataaataatataatattacgcataataatacgcaaaaatataaacataaaacaacgaaacgtcgctaatacgtcgtacaacaaaaccaaaaaaacgaacgacgaaactaaaacgcactacgaccactaacgcgcgcaccaccgaacgcgaataaaaaacgaataacgcgcaacgaacgcgtacgtaaatcaaaactaaaaacgacgacgcgaacacgaaaaaacgcgcgaccaacgaaaaaacgcacaaacaacgaaacgacgtaaataacgaacgacgcgcgaaaaaaaccgtaaacacgatactaacactaaacgaaaaaaaaaacgaaaaataaaaataaaacgaaaacgcgacgaatcgaaacaacgacgtcgcgtaaataaaacgacaaacgataaaacgaacaacaaacgaacaaccgcgtatcgcgaaacgctaaaaaaaaaaaccgaaaaacgcaaaacgtaaaacgaaatatcgactaaaacgcacgtcacacgaaaaactaccgtaatacgacgacaacaaacgaataacgatactaaacacacgataaactaaaccgatcgaaacgctaaataaacgaacgcacgcgccgactataacgaaaaaaatatatactacgaacacataaaaacaaaaaaaaacgcacgaccgacgtaatacgaaatacgcttacaaaatctaaaaacgcgaaaaaaaaacaaaacgaacgctaaaacgataaaaccgaaccgaacaccaacataaaaacaaaaaccgaccacactaacaacgctacgataaatacgcgacacgcgccgcgataacaaataacgaaaaaacgtacgcaacgaaacaacgaaccgcgacactaatcaaaaacgaacgtaaacgcacgacgcgcgctaacaaaaccgcaacatacaaatatcaacgaacacgaacgcgcatacgacgactcaaccgtaacgcaccgacaacgaaaaataaacaaaaacgcacgcgcgatacacaaacacaacaaaacgtaaaaacgaccgaacacaacgtaaacgtaaaaccaactctaacgaacatcgtaactaacgacttcgtcgaatctatcgcgcgaacgtaaccacctcgacctccgactcgacgacttaancactcgaaccgaaaaacgataaacgcacgacaacgnaacaaaacgcgcgaaacgtataacaaccacgacaccgcaacgacaccatcgacacgataccgacgtactaacgtaaatncgaactaatttataaacgtatacgctatcctaattacgaacaaaaacgacgtcgaaatataatcaactcgtaaactacacgtcgcgtactctatctacgtaatacgcatatcctacgcaaacgtaccgtacctaacgctatatacaacgcttacgttactcctataaacgcgcnaacctaacacaacatccgcgcgtaaacctatatactacacacgcctactcgtataatacaatatcaactatcctaatctaccgtacgacccgctcttaattcgtctcttcgtacgcctacgcgtaccgttcgtctattacttactcgtctcgtaaatccgtacgtctcacctcgcttcgatatataccgtacacgtctaactctctactctacctcttactcgacgctctatacatcgatccctatactcgtcgtatacgccgtctactaactactctatcaacgatcctacgtcgtaaactcgatcgtacaattaatctaattaaactactaacgaccgaccgatcttatcttcatcatctacgtataatcgatataccgccctacttatttcgcttacctcatcgtcgcgctacttccttcgcgcccccgtttattataaatataataatccgacctcttct

SEQ ID NO: 24939 - DNA, 1954 bp, Artificial Sequence
  chemically treated genomic DNA (Homo sapiens) CpG-island No: 24939
  unsure (1201, 1237, 1316, 1490)
gaattaataatgtgcgtaggcgtgttgtagttgtgtggtattggcgagtgttatagtggacgataggaagtgagtggtatgatgttgcgtatagtggtgcgtaggaatgtgagtatgagatagcgagacgtcgttgatgcgtcgtgtagtagagttaggagagcgggcggcgggattgggacgtattgcggttattgacgcgcgtattatcgagcgcgagtgagggacgagtagcgcgtagcgagcgcgtgcgtggattagggttgagagcggcgacgcgagtacgaggaggcgcgcggttagcggaggagcgtataggtagcgaagcggcgtgagtagcgagcggcgcgcggaggagatcgtaagtacggtgttggtattggacgggaggaggaacgagaggtaggagtggaacgagaacgcgacgagtcgaggtagcgacgtcgcgtgggtggggcggtaggcgatagagcgggtagtagacgaatagtcgcgtgtcgcgaggcgttagagagagagatcgagaggcgtagagcgtagagcgaggtgtcgattgaggcgtacgttatacgagaggttgtcgtagtacgacggtagtagacggatggcggtgttaggtatacggtagattaggtcggtcggagcgttgagtggacgagcgtacgcgtcgattgtgacggggagggtgtgtgttgcgagtatatgagagtagaggagggcgtacgatcgacgtagtgcggagtacgtttgtagggtttagagacgcgaagggagggtagaacggacgttggagcggtaggatcggatcggatattagtatggagataggagtcgattatattgataacgttgcggtgagtgcgcggtacgcgtcgcggtggtaggtggcgaggagacgtgcgtagcggagtagcgagtcgcggtattggttagggacgggcgtgaacgtacggcgcgcgttggtagggtcgtagtatgtaggtgttagcggatacgagcgcgtatgcggcgatttagtcgtgacgtatcggtagcggggagtagataggggcgtacgcgcgatgtataggtatagtaggacgtagggacgatcgagtatagcgtggacgtgaggttagttttgacgagtatcgtgattgacgatttcgtcgagtttgtcgcgcgagcgtggttatttcgattttcgattcgacgatttgantattcgagtcgagggacgatggacgtacgatagcgnagtaagacgcgcgaggcgtgtgatagttacggtatcgtagcgatattatcggtacggtatcgacgtattggcgtgagtncgagttggtttgtgagcgtgtgcgttgttttgattacggatagagacggcgtcgggatgtggttagttcgtggattgtacgtcgcgtgttttgtttgcgtggtgcgtatgttttgcgtagacgtatcgtgtttgacgttgtgtgtagcgtttacgttgtttttgtaggcgcgtnagtttaatatagtattcgcgcgtgagtttgtgtattgtatacgtttattcgtgtagtgtagtgttagttgttttagtttatcgtgcgattcgtttttagttcgttttttcgtgcgtttacgcgtatcgttcgtttgttgtttattcgtttcgtgggttcgtgcgttttatttcgtttcggtgtgtgtcgtgtacgtttggttttttattttattttttgttcggcgttttgtatatcgatttttgtgttcgtcgtatgcgtcgtttgttggttgttttgttagcgattttgcgtcgtgaattcgatcgtatagttagtttgattgagttattgacggtcggtcgattttatttttattatttgcgtgtggtcgatgtgtcgttttatttgtttcgtttgttttatcgtcgcgttgtttttttcgcgttttcgtttattataaatatagtgattcggtttttttt

SEQ ID NO: 24940 - DNA, 1954 bp, Artificial Sequence
  chemically treated genomic DNA (Homo sapiens) CpG-island No: 24940
  unsure (465, 639, 718, 754)
aaaaaaaaccgaatcactatatttataataaacgaaaacgcgaaaaaaacaacgcgacgataaaacaaacgaaacaaataaaacgacacatcgaccacacgcaaataataaaaataaaatcgaccgaccgtcaataactcaatcaaactaactatacgatcgaattcacgacgcaaaatcgctaacaaaacaaccaacaaacgacgcatacgacgaacacaaaaatcgatatacaaaacgccgaacaaaaaataaaataaaaaaccaaacgtacacgacacacaccgaaacgaaataaaacgcacgaacccacgaaacgaataaacaacaaacgaacgatacgcgtaaacgcacgaaaaaacgaactaaaaacgaatcgcacgataaactaaaacaactaacactacactacacgaataaacgtatacaatacacaaactcacgcgcgaatactatattaaactnacgcgcctacaaaaacaacgtaaacgctacacacaacgtcaaacacgatacgtctacgcaaaacatacgcaccacgcaaacaaaacacgcgacgtacaatccacgaactaaccacatcccgacgccgtctctatccgtaatcaaaacaacgcacacgctcacaaaccaactcgnactcacgccaatacgtcgataccgtaccgataatatcgctacgataccgtaactatcacacgcctcgcgcgtcttactncgctatcgtacgtccatcgtccctcgactcgaatantcaaatcgtcgaatcgaaaatcgaaataaccacgctcgcgcgacaaactcgacgaaatcgtcaatcacgatactcgtcaaaactaacctcacgtccacgctatactcgatcgtccctacgtcctactatacctatacatcgcgcgtacgcccctatctactccccgctaccgatacgtcacgactaaatcgccgcatacgcgctcgtatccgctaacacctacatactacgaccctaccaacgcgcgccgtacgttcacgcccgtccctaaccaataccgcgactcgctactccgctacgcacgtctcctcgccacctaccaccgcgacgcgtaccgcgcactcaccgcaacgttatcaatataatcgactcctatctccatactaatatccgatccgatcctaccgctccaacgtccgttctaccctcccttcgcgtctctaaaccctacaaacgtactccgcactacgtcgatcgtacgccctcctctactctcatatactcgcaacacacaccctccccgtcacaatcgacgcgtacgctcgtccactcaacgctccgaccgacctaatctaccgtatacctaacaccgccatccgtctactaccgtcgtactacgacaacctctcgtataacgtacgcctcaatcgacacctcgctctacgctctacgcctctcgatctctctctctaacgcctcgcgacacgcgactattcgtctactacccgctctatcgcctaccgccccacccacgcgacgtcgctacctcgactcgtcgcgttctcgttccactcctacctctcgttcctcctcccgtccaataccaacaccgtacttacgatctcctccgcgcgccgctcgctactcacgccgcttcgctacctatacgctcctccgctaaccgcgcgcctcctcgtactcgcgtcgccgctctcaaccctaatccacgcacgcgctcgctacgcgctactcgtccctcactcgcgctcgataatacgcgcgtcaataaccgcaatacgtcccaatcccgccgcccgctctcctaactctactacacgacgcatcaacgacgtctcgctatctcatactcacattcctacgcaccactatacgcaacatcataccactcacttcctatcgtccactataacactcgccaataccacacaactacaacacgcctacgcacattattaattc

SEQ ID NO: 24941 - DNA, 731 bp, Artificial Sequence
  chemically treated genomic DNA (Homo sapiens) CpG-island No: 24941
  unsure (317, 324, 583)
ttggtatacgattagagagacggagagacgagtagagatttttataggagatacgacgcgagacgtatgtaaggacggagcggagatataaagcgtaagagatagtacgaagataatataaagacgtacgatagaagtcgtaatatatattagagtagagtacgtagtacgtgtaataacggatttaatcgagcggattatacggataatagacgtatatatatacgtaggtagagtatagaagagtaatatatagtgaggatacggagataggattagtatagtaatgtaggaggatatacggacgagagtttatncgacgangcgatacgcgagagatttacgtaagatagcgatttagacgtaaagatcgaggagtagataggaagagcgaacgaacgtaatagtaagtaagatatagagaattgatcggagaaatatcggaacgaacgaagcgaagtatgataagcgagtagtagaagacgaggagatagtatacgacgaggcgaatgagtagtagtttatatagaattcgaaagagagataacgaatattagatagagagatgcgagtagattagagngtacgagagatacgaggaaggatagatacgaaagagagtagagagtatacgcgtagtagcgacgaatcgtttagcggcgtaagttgagtagcgattatagaggataggatagaagagagtagacgatagacgtcgcgagcgcgtaagt

SEQ ID NO: 24942 - DNA, 731 bp, Artificial Sequence
  chemically treated genomic DNA (Homo sapiens) CpG-island No: 24942
  unsure (149, 408, 415)
acttacgcgctcgcgacgtctatcgtctactctcttctatcctatcctctataatcgctactcaacttacgccgctaaacgattcgtcgctactacgcgtatactctctactctctttcgtatctatccttcctcgtatctctcgtacnctctaatctactcgcatctctctatctaatattcgttatctctctttcgaattctatataaactactactcattcgcctcgtcgtatactatctcctcgtcttctactactcgcttatcatacttcgcttcgttcgttccgatatttctccgatcaattctctatatcttacttactattacgttcgttcgctcttcctatctactcctcgatctttacgtctaaatcgctatcttacgtaaatctctcgcgtatcgcntcgtcgnataaactctcgtccgtatatcctcctacattactatactaatcctatctccgtatcctcactatatattactcttctatactctacctacgtatatatatacgtctattatccgtataatccgctcgattaaatccgttattacacgtactacgtactctactctaatatatattacgacttctatcgtacgtctttatattatcttcgtactatctcttacgctttatatctccgctccgtccttacatacgtctcgcgtcgtatctcctataaaaatctctactcgtctctccgtctctctaatcgtataccaa

SEQ ID NO: 24943 - DNA, 731 bp, Artificial Sequence
  chemically treated genomic DNA (Homo sapiens) CpG-island No: 24943
  unsure (149, 408, 415)
gtttgcgcgttcgcggcgtttgtcgtttgtttttttttgttttgttttttatgatcgttgtttagtttgcgtcgttgagcggttcgtcgttgttacgcgtgtgttttttgttttttttcgtgtttgttttttttcgtgtttttcgtgtnttttggtttgttcgtatttttttgtttagtgttcgttgtttttttttcgagttttgtgtgagttgttgtttattcgtttcgtcgtgtgttgttttttcgttttttgttgttcgtttgttatgtttcgtttcgttcgtttcgatgttttttcgattagttttttgtgttttgtttattgttgcgttcgttcgttttttttgtttatttttcggtttttgcgtttgggtcgttgttttgcgtaggtttttcgcgtgtcgtntcgtcgngtggattttcgttcgtgtgtttttttgtattgttgtgttggttttattttcgtgtttttattgtgtgttgtttttttgtgttttatttacgtatgtgtatgcgtttgttgttcgtatagttcgttcggttgagttcgttgttgtacgtgttgcgtgttttattttgatgtgtgttgcggtttttgtcgtgcgtttttgtgttgttttcgtgttgttttttgcgttttgtgttttcgtttcgtttttgtatgcgtttcgcgtcgtgttttttgtaagagtttttgttcgttttttcgtttttttggtcgtgtgttag

SEQ ID NO: 24944 - DNA, 731 bp, Artificial Sequence
  chemically treated genomic DNA (Homo sapiens) CpG-island No: 24944
  unsure (317, 324, 583)
ctaacacacgaccaaaaaaacgaaaaaacgaacaaaaactcttacaaaaaacacgacgcgaaacgcatacaaaaacgaaacgaaaacacaaaacgcaaaaaacaacacgaaaacaacacaaaaacgcacgacaaaaaccgcaacacacatcaaaataaaacacgcaacacgtacaacaacgaactcaaccgaacgaactatacgaacaacaaacgcatacacatacgtaaataaaacacaaaaaaacaacacacaataaaaacacgaaaataaaaccaacacaacaatacaaaaaaacacacgaacgaaaatccacncgacganacgacacgcgaaaaacctacgcaaaacaacgacccaaacgcaaaaaccgaaaaataaacaaaaaaaacgaacgaacgcaacaataaacaaaacacaaaaaactaatcgaaaaaacatcgaaacgaacgaaacgaaacataacaaacgaacaacaaaaaacgaaaaaacaacacacgacgaaacgaataaacaacaactcacacaaaactcgaaaaaaaaacaacgaacactaaacaaaaaaatacgaacaaaccaaaanacacgaaaaacacgaaaaaaaacaaacacgaaaaaaaacaaaaaacacacgcgtaacaacgacgaaccgctcaacgacgcaaactaaacaacgatcataaaaaacaaaacaaaaaaaaacaaacgacaaacgccgcgaacgcgcaaac

SEQ ID NO: 24945 - DNA, 689 bp, Artificial Sequence
  chemically treated genomic DNA (Homo sapiens) CpG-island No: 24945
acgatagttagtatcgtttggtgttttatacgcggatatagtatggcgagttattggtcgagagtcgttatttttacgattcgttgggacggcgaatggtaaaacgggtttggcggcgggagcgtgatttgacggggtggatgtcgttgtcgcgtaaatcggaggtgacgtggtatggttgggacggagataggttgacgacggtgtagattgatattatacgtatttagacggtatacgagtcgggaagttttacgtcgtttattcgggtcgagatagagaacggcgagcgggaaaaagcgtagcggcgtagtttggtagagacgttttagtaggaagggagtgagaacggttacggcgtggtgttttcggttgaattggtgcggttgttggataggttggaggaagaaattcgggtagatcgcgtgagtagtgaaagtcgggcgtggtttgcgtagtgcgggttgacggtggagtaattggttagataggtggagtcggaatatatatcggcgcgaaaagtttatttttattattgcgattatcggggtttgtcgttggcgtttattagcgaagacggtaatacggcgtggcgcggggagtatgatgaatggggtaattagtttaatgaggagaattcgtattagttgtattagtcgtatcgtttgataaggtagtagtatgatgag

SEQ ID NO: 24946 - DNA, 689 bp, Artificial Sequence
  chemically treated genomic DNA (Homo sapiens) CpG-island No: 24946
ctcatcatactactaccttatcaaacgatacgactaatacaactaatacgaattctcctcattaaactaattaccccattcatcatactccccgcgccacgccgtattaccgtcttcgctaataaacgccaacgacaaaccccgataatcgcaataataaaaataaacttttcgcgccgatatatattccgactccacctatctaaccaattactccaccgtcaacccgcactacgcaaaccacgcccgactttcactactcacgcgatctacccgaatttcttcctccaacctatccaacaaccgcaccaattcaaccgaaaacaccacgccgtaaccgttctcactcccttcctactaaaacgtctctaccaaactacgccgctacgctttttcccgctcgccgttctctatctcgacccgaataaacgacgtaaaacttcccgactcgtataccgtctaaatacgtataatatcaatctacaccgtcgtcaacctatctccgtcccaaccataccacgtcacctccgatttacgcgacaacgacatccaccccgtcaaatcacgctcccgccgccaaacccgttttaccattcgccgtcccaacgaatcgtaaaaataacgactctcgaccaataactcgccatactatatccgcgtataaaacaccaaacgatactaactatcgt

SEQ ID NO: 24947 - DNA, 689 bp, Artificial Sequence
  chemically treated genomic DNA (Homo sapiens) CpG-island No: 24947
tttattatgttgttgttttgttagacggtacggttggtgtagttgatgcgggttttttttattaagttggttgttttatttattatatttttcgcgttacgtcgtattgtcgttttcgttgatgagcgttagcggtaggtttcggtggtcgtagtggtaaaaatgaatttttcgcgtcggtgtgtatttcggttttatttgtttggttagttgttttatcgttagttcgtattgcgtaagttacgttcggtttttattgtttacgcggtttgttcggatttttttttttagtttgtttagtagtcgtattagtttagtcgggaatattacgtcgtggtcgtttttattttttttttgttggagcgtttttgttaggttgcgtcgttgcgttttttttcgttcgtcgttttttgtttcgattcggatgagcggcgtgaagtttttcggttcgtatatcgtttggatacgtgtggtgttagtttgtatcgtcgttagtttgttttcgttttagttatattacgttattttcggtttacgcgatagcgatatttatttcgttaggttacgttttcgtcgttagattcgttttgttattcgtcgttttagcgggtcgtagaggtagcggttttcgattagtggttcgttatgttgtattcgcgtgtagaatattaggcggtgttggttgtcgt

SEQ ID NO: 24948 - DNA, 689 bp, Artificial Sequence
  chemically treated genomic DNA (Homo sapiens) CpG-island No: 24948
acgacaaccaacaccgcctaatattctacacgcgaatacaacataacgaaccactaatcgaaaaccgctacctctacgacccgctaaaacgacgaataacaaaacgaatctaacgacgaaaacgtaacctaacgaaataaatatcgctatcgcgtaaaccgaaaataacgtaatataactaaaacgaaaacaaactaacgacgatacaaactaacaccacacgtatccaaacgatatacgaaccgaaaaacttcacgccgctcatccgaatcgaaacaaaaaacgacgaacgaaaaaaaacgcaacgacgcaacctaacaaaaacgctccaacaaaaaaaaaataaaaacgaccacgacgtaatattcccgactaaactaatacgactactaaacaaactaaaaaaaaaaatccgaacaaaccgcgtaaacaataaaaaccgaacgtaacttacgcaatacgaactaacgataaaacaactaaccaaacaaataaaaccgaaatacacaccgacgcgaaaaattcatttttaccactacgaccaccgaaacctaccgctaacgctcatcaacgaaaacgacaatacgacgtaacgcgaaaaatataataaataaaacaaccaacttaataaaaaaaacccgcatcaactacaccaaccgtaccgtctaacaaaacaacaacataataaa

SEQ ID NO: 24949 - DNA, 545 bp, Artificial Sequence
  chemically treated genomic DNA (Homo sapiens) CpG-island No: 24949
ttagcgtttttttttttattagtcgcgttatttattagtcgtcgtaatacgttcgttagtcgcgtttcgttgttcggttagtaaattttttattcgttcgtttggttttttacggtaaattttaatattttcgtttgtaatattgttcgcgtcgttttcgtatttattgcggtttatttaggtcggtaatataattacgtttggcgtattttatatatatcgtggtacgtcgtcgtttttttttcgttacgagtgtgcgtttaaattatcgtttttgtagacgttgtacgttttttttattgtatttgtgtttataattagtatatatacgtaggcggtgtttcgttattatattttttttcgcgttcgtatttattgtttttattattgtacgtattgtatttaattcgcgtttaatatttaatcggtttatggtcgggttttggcggttgtatagttgttaatatgtcgtagtttatttttttagcggtaattggtacgtttattttgcggttgtatgtatatggataatatatatttaacgt

SEQ ID NO: 24950 - DNA, 545 bp, Artificial Sequence
  chemically treated genomic DNA (Homo sapiens) CpG-island No: 24950
acgttaaatatatattatccatatacatacaaccgcaaaataaacgtaccaattaccgctaaaaaaataaactacgacatattaacaactatacaaccgccaaaacccgaccataaaccgattaaatattaaacgcgaattaaatacaatacgtacaataataaaaacaataaatacgaacgcgaaaaaaaatataataacgaaacaccgcctacgtatatatactaattataaacacaaatacaataaaaaaaacgtacaacgtctacaaaaacgataatttaaacgcacactcgtaacgaaaaaaaaacgacgacgtaccacgatatatataaaatacgccaaacgtaattatattaccgacctaaataaaccgcaataaatacgaaaacgacgcgaacaatattacaaacgaaaatattaaaatttaccgtaaaaaaccaaacgaacgaataaaaaatttactaaccgaacaacgaaacgcgactaacgaacgtattacgacgactaataaataacgcgactaataaaaaaaaaaacgctaa

SEQ ID NO: 24951 - DNA, 545 bp, Artificial Sequence
  chemically treated genomic DNA (Homo sapiens) CpG-island No: 24951
gcgttgaatgtatattatttatatatatgtaatcgtagagtgggcgtattagttgtcgttggggagatgggttacggtatgttggtaattatgtaatcgttagggttcgattatgagtcggttagatattgggcgcgagttgaatatagtgcgtgtagtggtgggagtagtgaatgcgggcgcgggaagggatgtggtgacggggtatcgtttgcgtatgtgtgttggttgtgggtataggtgtagtggggaaggcgtgtagcgtttgtaggagcggtggtttgggcgtatattcgtggcggggaaaaaacggcggcgtattacggtgtgtgtggagtgcgttaggcgtggttgtgttgtcggtttgggtgggtcgtaatgggtgcggaaacggcgcgggtagtgttgtaggcgaaagtgttggagtttgtcgtggggagttagacgggcgagtggggagtttgttggtcgggtagcggagcgcggttggcgggcgtgttgcggcggttggtgggtggcgcgattggtgaaggggaaggcgttgg

SEQ ID NO: 24952 - DNA, 545 bp, Artificial Sequence
  chemically treated genomic DNA (Homo sapiens) CpG-island No: 24952
ccaacgccttccccttcaccaatcgcgccacccaccaaccgccgcaacacgcccgccaaccgcgctccgctacccgaccaacaaactccccactcgcccgtctaactccccacgacaaactccaacactttcgcctacaacactacccgcgccgtttccgcacccattacgacccacccaaaccgacaacacaaccacgcctaacgcactccacacacaccgtaatacgccgccgttttttccccgccacgaatatacgcccaaaccaccgctcctacaaacgctacacgccttccccactacacctatacccacaaccaacacacatacgcaaacgataccccgtcaccacatcccttcccgcgcccgcattcactactcccaccactacacgcactatattcaactcgcgcccaatatctaaccgactcataatcgaaccctaacgattacataattaccaacataccgtaacccatctccccaacgacaactaatacgcccactctacgattacatatatataaataatatacattcaacgc

SEQ ID NO: 24953 - DNA, 601 bp, Artificial Sequence
  chemically treated genomic DNA (Homo sapiens) CpG-island No: 24953
tgttggcggaagtgggtttggtgggtaaagcgtcgggtcgttataatttgtattttggcggtaatcgtattgggatacgtattttacggatgtataaagaaaatattatcgagtcggaaattttggcgtcgtttgatgaattgatagggcgttgggcgaaagagcgcgaagcgggtgaaggtttcggcgattttacggtgcgtgcgggtattattcgttcggtgttcgattcggcgcgtgatttgtgggattaattattagttcggttttgtaggtttgataagaacgcgtgagcgtcgtattaggtaaggtaaatagtgaggaatttatgtttaaattcgatttaaacgttttgaacgaattgtcgaaggtagatcgtattttggcgttggcggaaattaacgtcgaattggaaaaattggacgttgaaggtcgcgtagtttgggcgttggataatttgttcggtgaatatgtatttttttttagttttggtatttaggcggcggtgagtttgtatttggtgaattaaattcgttcggatatttcggtgatttttatcgatacgggttatttgttttcggaaatttaacgttttattgat

SEQ ID NO: 24954 - DNA, 601 bp, Artificial Sequence
  chemically treated genomic DNA (Homo sapiens) CpG-island No: 24954
atcaataaaacgttaaatttccgaaaacaaataacccgtatcgataaaaatcaccgaaatatccgaacgaatttaattcaccaaatacaaactcaccgccgcctaaataccaaaactaaaaaaaaatacatattcaccgaacaaattatccaacgcccaaactacgcgaccttcaacgtccaatttttccaattcgacgttaatttccgccaacgccaaaatacgatctaccttcgacaattcgttcaaaacgtttaaatcgaatttaaacataaattcctcactatttaccttacctaatacgacgctcacgcgttcttatcaaacctacaaaaccgaactaataattaatcccacaaatcacgcgccgaatcgaacaccgaacgaataatacccgcacgcaccgtaaaatcgccgaaaccttcacccgcttcgcgctctttcgcccaacgccctatcaattcatcaaacgacgccaaaatttccgactcgataatattttctttatacatccgtaaaatacgtatcccaatacgattaccgccaaaatacaaattataacgacccgacgctttacccaccaaacccacttccgccaaca

SEQ ID NO: 24955 - DNA, 601 bp, Artificial Sequence
  chemically treated genomic DNA (Homo sapiens) CpG-island No: 24955
gttaataaagcgttaggttttcgggaataagtaattcgtatcggtgaggattatcggaatattcgggcgaatttgatttattagatgtaggtttatcgtcgtttgaatgttaaagttggaagaaagtatatatttatcgggtagattatttagcgtttaggttacgcggtttttagcgtttagtttttttagttcggcgttagttttcgttagcgttagaatgcgatttattttcggtagttcgtttagggcgtttagatcgagtttggatatagattttttattgtttgttttgtttgatgcgacgtttacgcgtttttattaggtttataagatcgggttgatggttaattttataaattacgcgtcggatcgagtatcgggcgaatgatgttcgtacgtatcgtaaagtcgtcgaagtttttattcgtttcgcgttttttcgtttagcgttttattagtttattaagcgacgttaggattttcggttcggtgatgttttttttatatattcgtgggatacgtgttttaatgcggttgtcgttaagatgtaggttgtagcgattcggcgttttatttattaggtttattttcgttagta

SEQ ID NO: 24956 - DNA, 601 bp, Artificial Sequence
  chemically treated genomic DNA (Homo sapiens) CpG-island No: 24956
tactaacgaaaataaacctaataaataaaacgccgaatcgctacaacctacatcttaacgacaaccgcattaaaacacgtatcccacgaatatataaaaaaaacatcaccgaaccgaaaatcctaacgtcgcttaataaactaataaaacgctaaacgaaaaaacgcgaaacgaataaaaacttcgacgactttacgatacgtacgaacatcattcgcccgatactcgatccgacgcgtaatttataaaattaaccatcaacccgatcttataaacctaataaaaacgcgtaaacgtcgcatcaaacaaaacaaacaataaaaaatctatatccaaactcgatctaaacgccctaaacgaactaccgaaaataaatcgcattctaacgctaacgaaaactaacgccgaactaaaaaaactaaacgctaaaaaccgcgtaacctaaacgctaaataatctacccgataaatatatactttcttccaactttaacattcaaacgacgataaacctacatctaataaatcaaattcgcccgaatattccgataatcctcaccgatacgaattacttattcccgaaaacctaacgctttattaac

SEQ ID NO: 24957 - DNA, 639 bp, Artificial Sequence
  chemically treated genomic DNA (Homo sapiens) CpG-island No: 24957
ggcggcggcggcggtaaaacgttaagatttaggtttcggcgaagcggttacgtttgcgggaaagtaaaatagttgagtaatttaaaaaatgaggaaatttcgggtgttttgcggggaaggacggagggttttgagaaatagggaggttgcggcggaaagaggggcggtgtcgtcggagagtagggtcgacgatggaaagcgagtagcggcgggagcggaaagcgaggatatggacgtgggcggggaagaagatttagaggtttttgggggtcggcgaaattgagaaaattcgacgggggcgaaagggggtcgggtagcgcggtatttgtagagatcgtttaggacgttgtcgggaatttttattcgtttggtttttatgatgaggatttattagtaggaatagtgtatttcggtttcgcgcggatcggggattgacggtacggtattagagatttcggttcgtcggagagttggtagatcgagggagtcgcgggtagagacgattttaacggagacgagaaggggaaggggcgggattcgtttattttcgtttcgtttttttagttttggattttaagattgggttaaggttcggggcggagttttcggagttacgtttttgttcgtttgaaaggttta

SEQ ID NO: 24958 - DNA, 639 bp, Artificial Sequence
  chemically treated genomic DNA (Homo sapiens) CpG-island No: 24958
taaacctttcaaacgaacaaaaacgtaactccgaaaactccgccccgaaccttaacccaatcttaaaatccaaaactaaaaaaacgaaacgaaaataaacgaatcccgccccttccccttctcgtctccgttaaaatcgtctctacccgcgactccctcgatctaccaactctccgacgaaccgaaatctctaataccgtaccgtcaatccccgatccgcgcgaaaccgaaatacactattcctactaataaatcctcatcataaaaaccaaacgaataaaaattcccgacaacgtcctaaacgatctctacaaataccgcgctacccgaccccctttcgcccccgtcgaattttctcaatttcgccgacccccaaaaacctctaaatcttcttccccgcccacgtccatatcctcgctttccgctcccgccgctactcgctttccatcgtcgaccctactctccgacgacaccgcccctctttccgccgcaacctccctatttctcaaaaccctccgtccttccccgcaaaacacccgaaatttcctcattttttaaattactcaactattttactttcccgcaaacgtaaccgcttcgccgaaacctaaatcttaacgttttaccgccgccgccgcc

SEQ ID NO: 24959 - DNA, 639 bp, Artificial Sequence
  chemically treated genomic DNA (Homo sapiens) CpG-island No: 24959
tgggttttttaagcgagtaggggcgtgatttcgggggtttcgtttcgagttttggtttagttttggggtttaaggttgagggagcgggacggaagtgagcgggtttcgttttttttttttttcgttttcgttggagtcgtttttgttcgcggttttttcggtttgttagtttttcggcgagtcggagtttttagtgtcgtatcgttagttttcggttcgcgcggagtcgggatgtattgtttttgttggtgggtttttattatggagattaaacgggtggagattttcggtagcgttttggacgatttttgtaggtatcgcgttattcgattttttttcgttttcgtcgggtttttttagtttcgtcgatttttagaggtttttgggttttttttttcgtttacgtttatgttttcgtttttcgttttcgtcgttgttcgttttttatcgtcgattttgtttttcgacgatatcgttttttttttcgtcgtagtttttttgttttttaaggtttttcgttttttttcgtagaatattcggaatttttttattttttaagttatttaattattttgttttttcgtaggcgtagtcgtttcgtcggagtttgggttttagcgttttgtcgtcgtcgtcgtt

SEQ ID NO: 24960 - DNA, 639 bp, Artificial Sequence
  chemically treated genomic DNA (Homo sapiens) CpG-island No: 24960
aacgacgacgacgacaaaacgctaaaacccaaactccgacgaaacgactacgcctacgaaaaaacaaaataattaaataacttaaaaaataaaaaaattccgaatattctacgaaaaaaaacgaaaaaccttaaaaaacaaaaaaactacgacgaaaaaaaaaacgatatcgtcgaaaaacaaaatcgacgataaaaaacgaacaacgacgaaaacgaaaaacgaaaacataaacgtaaacgaaaaaaaaaacccaaaaacctctaaaaatcgacgaaactaaaaaaacccgacgaaaacgaaaaaaaatcgaataacgcgatacctacaaaaatcgtccaaaacgctaccgaaaatctccacccgtttaatctccataataaaaacccaccaacaaaaacaatacatcccgactccgcgcgaaccgaaaactaacgatacgacactaaaaactccgactcgccgaaaaactaacaaaccgaaaaaaccgcgaacaaaaacgactccaacgaaaacgaaaaaaaaaaaaaacgaaacccgctcacttccgtcccgctccctcaaccttaaaccccaaaactaaaccaaaactcgaaacgaaacccccgaaatcacgcccctactcgcttaaaaaaccca

SEQ ID NO: 24961 - DNA, 580 bp, Artificial Sequence
  chemically treated genomic DNA (Homo sapiens) CpG-island No: 24961
ttcgtggttttattagcggcggcgattttcggttatttattaagagcgatgaagtttttgtttacgtcggttttggtttcgagtttggttagaaggttagttatgtagtttttttcgtgtaggaatcggtcgaattttttttttatggtcgtagatatggcggggatcgtttcgtcgttcggggttgtttttagtgtcggatagattggagcggcgattgcggcggagtagcggtaggcggggatcgcggcgcgtttacgcgttttttattcgttttcgttcgtttcgttcggtcgtcgcgcgttttttttcggtcgtcgcgcgttttttttttttcgtttagcgttagggggatagcgttatattttggcgggggcgggtttgtaatttcgcggacgttgcgaggtggtttgtttgttgatagttttaatttattgcggggtaaaaaggatgtggcgtgggggcgtgtattttgtgtttttcgtgggttttttttttaaatcggattattgtaaaaagtaggtagaaaggaggtaggcgtttttgttgttttcgtttgtaatttattgcgatgagtttg

SEQ ID NO: 24962 - DNA, 580 bp, Artificial Sequence
  chemically treated genomic DNA (Homo sapiens) CpG-island No: 24962
caaactcatcgcaataaattacaaacgaaaacaacaaaaacgcctacctcctttctacctactttttacaataatccgatttaaaaaaaaaacccacgaaaaacacaaaatacacgcccccacgccacatcctttttaccccgcaataaattaaaactatcaacaaacaaaccacctcgcaacgtccgcgaaattacaaacccgcccccgccaaaatataacgctatccccctaacgctaaacgaaaaaaaaaaaacgcgcgacgaccgaaaaaaaacgcgcgacgaccgaacgaaacgaacgaaaacgaataaaaaacgcgtaaacgcgccgcgatccccgcctaccgctactccgccgcaatcgccgctccaatctatccgacactaaaaacaaccccgaacgacgaaacgatccccgccatatctacgaccataaaaaaaaaattcgaccgattcctacacgaaaaaaactacataactaaccttctaaccaaactcgaaaccaaaaccgacgtaaacaaaaacttcatcgctcttaataaataaccgaaaatcgccgccgctaataaaaccacgaa

SEQ ID NO: 24963 - DNA, 580 bp, Artificial Sequence
  chemically treated genomic DNA (Homo sapiens) CpG-island No: 24963
taaatttatcgtagtgaattgtaggcgggagtaataaggacgtttgttttttttttgtttgttttttgtaatagttcgatttgagaaggggatttacgagagatataaaatgtacgtttttacgttatattttttttatttcgtaatgggttaagattgttaataggtaggttatttcgtagcgttcgcggagttgtaggttcgttttcgttagggtgtggcgttgtttttttggcgttgggcgggggaggaggggcgcgcggcggtcgaggaggggcgcgcggcggtcgggcggggcgagcggaggcgagtggaggacgcgtagacgcgtcgcggttttcgtttgtcgttgtttcgtcgtagtcgtcgttttagtttattcggtattaggaatagtttcgagcggcgagacggttttcgttatgtttgcggttatgagggagaggttcgatcggtttttgtacgagaagaattgtatgattgattttttggttaagttcgaggttaaaatcggcgtgaataggagttttatcgtttttggtgggtggtcgggggtcgtcgtcgttggtagggttacggg

SEQ ID NO: 24964 - DNA, 580 bp, Artificial Sequence
  chemically treated genomic DNA (Homo sapiens) CpG-island No: 24964
cccgtaaccctaccaacgacgacgacccccgaccacccaccaaaaacgataaaactcctattcacgccgattttaacctcgaacttaaccaaaaaatcaatcatacaattcttctcgtacaaaaaccgatcgaacctctccctcataaccgcaaacataacgaaaaccgtctcgccgctcgaaactattcctaataccgaataaactaaaacgacgactacgacgaaacaacgacaaacgaaaaccgcgacgcgtctacgcgtcctccactcgcctccgctcgccccgcccgaccgccgcgcgcccctcctcgaccgccgcgcgcccctcctcccccgcccaacgccaaaaaaacaacgccacaccctaacgaaaacgaacctacaactccgcgaacgctacgaaataacctacctattaacaatcttaacccattacgaaataaaaaaaatataacgtaaaaacgtacattttatatctctcgtaaatccccttctcaaatcgaactattacaaaaaacaaacaaaaaaaaaacaaacgtccttattactcccgcctacaattcactacgataaattta

SEQ ID NO: 24965 - DNA, 567 bp, Artificial Sequence
  chemically treated genomic DNA (Homo sapiens) CpG-island No: 24965
gtttttgtcgttggcgttgaagtataatttagcggagaattggcggtttgcgtcggatcgtgcggtttcggtaatttgtatttaattaacggtttgttcgattgttatcgtaattacgtttcggtattggcgattgtcgtttatattttttttagcgaaattggtagcggttatttttaggaaatttatttataagagttatttcgcgaatgtagttattattgcgagttggtttttagttcggagtagattttataagtattggcgattgttatgcgtaaagcggtgtttaatcgtggcgtttcggttgtcgtgttattaggcgacgtggcgttaaaatttgcgttagaaggggtaattatgtattggtattatgcgttataattagtcgtgacgtcggaagaagaagagttacgtaaattggcgtaattgttgcgttattttagtaatatcgttttgatgtgtggtagcggttgcgcgggggcgtataaagagttagttgagtttgtcgggaaaattaaagcgtttattgtttatgttttgcgcggtaaagaatatgtcgaatat

SEQ ID NO: 24966 - DNA, 567 bp, Artificial Sequence
  chemically treated genomic DNA (Homo sapiens) CpG-island No: 24966
atattcgacatattctttaccgcgcaaaacataaacaataaacgctttaattttcccgacaaactcaactaactctttatacgcccccgcgcaaccgctaccacacatcaaaacgatattactaaaataacgcaacaattacgccaatttacgtaactcttcttcttccgacgtcacgactaattataacgcataataccaatacataattaccccttctaacgcaaattttaacgccacgtcgcctaataacacgacaaccgaaacgccacgattaaacaccgctttacgcataacaatcgccaatacttataaaatctactccgaactaaaaaccaactcgcaataataactacattcgcgaaataactcttataaataaatttcctaaaaataaccgctaccaatttcgctaaaaaaaatataaacgacaatcgccaataccgaaacgtaattacgataacaatcgaacaaaccgttaattaaatacaaattaccgaaaccgcacgatccgacgcaaaccgccaattctccgctaaattatacttcaacgccaacgacaaaaac

SEQ ID NO: 24967 - DNA, 567 bp, Artificial Sequence
  chemically treated genomic DNA (Homo sapiens) CpG-island No: 24967
gtattcgatatgttttttatcgcgtagggtatgaataataggcgttttaattttttcggtaaatttaattaattttttatgcgttttcgcgtagtcgttgttatatattagggcgatattgttggaataacgtagtagttgcgttagtttgcgtaattttttttttttcggcgttacgattggttgtggcgtatgatattagtgtatggttgttttttttggcgtaggttttaacgttacgtcgtttggtaatacgataatcgaaacgttacggttaagtatcgttttgcgtatggtaatcgttagtatttgtgggatttgtttcgggttggaaattagttcgtaatagtgattatattcgcggaatagtttttgtgggtgggttttttggaaatagtcgttgttaatttcgttggagggaatatgagcggtaatcgttagtatcggaacgtgattgcggtggtaatcgaataggtcgttgattaagtgtaggttgtcggggtcgtacgattcggcgtagatcgttagtttttcgttaagttgtgttttagcgttagcggtaaaggt

SEQ ID NO: 24968 - DNA, 567 bp, Artificial Sequence
  chemically treated genomic DNA (Homo sapiens) CpG-island No: 24968
acctttaccgctaacgctaaaacacaacttaacgaaaaactaacgatctacgccgaatcgtacgaccccgacaacctacacttaatcaacgacctattcgattaccaccgcaatcacgttccgatactaacgattaccgctcatattccctccaacgaaattaacaacgactatttccaaaaaacccacccacaaaaactattccgcgaatataatcactattacgaactaatttccaacccgaaacaaatcccacaaatactaacgattaccatacgcaaaacgatacttaaccgtaacgtttcgattatcgtattaccaaacgacgtaacgttaaaacctacgccaaaaaaaacaaccatacactaatatcatacgccacaaccaatcgtaacgccgaaaaaaaaaaaattacgcaaactaacgcaactactacgttattccaacaatatcgccctaatatataacaacgactacgcgaaaacgcataaaaaattaattaaatttaccgaaaaaattaaaacgcctattattcataccctacgcgataaaaaacatatcgaatac

SEQ ID NO: 24969 - DNA, 512 bp, Artificial Sequence
  chemically treated genomic DNA (Homo sapiens) CpG-island No: 24969
ggtgcgaattgtatcgttaaattgttttttaacgttgcgtattgatttgtaggtcgatattttgcgtatcgagtggggcgatgcgtattattatatttttagatttaagggtgtttgtaacggcgggttggtttatttttattttttatttgttttttatgcgggggttttttgacgagttgtcgcgttttggcgggagtgtttaagtaggttttgtaaataatgtagcgtgattgtagggattagcggcgcgatagtcgtgagatcgtttttcgttagtagttgacgtattcgggaagcggatatcggtattttttggtaacgtagtcgtttaattttaattagttcgatgggcggtgcggagatagtcggcgtttttagttagtagcgtatattttggttgtattgggcggtaacgcgataaaagggtttagtatcgataaagcggtgagttatatttagcgcgggagcgaggtattgacggaaaatttttagattaatttcggtgtaat

SEQ ID NO: 24970 - DNA, 512 bp, Artificial Sequence
  chemically treated genomic DNA (Homo sapiens) CpG-island No: 24970
attacaccgaaattaatctaaaaattttccgtcaatacctcgctcccgcgctaaatataactcaccgctttatcgatactaaacccttttatcgcgttaccgcccaatacaaccaaaatatacgctactaactaaaaacgccgactatctccgcaccgcccatcgaactaattaaaattaaacgactacgttaccaaaaaataccgatatccgcttcccgaatacgtcaactactaacgaaaaacgatctcacgactatcgcgccgctaatccctacaatcacgctacattatttacaaaacctacttaaacactcccgccaaaacgcgacaactcgtcaaaaaacccccgcataaaaaacaaataaaaaataaaaataaaccaacccgccgttacaaacacccttaaatctaaaaatataataatacgcatcgccccactcgatacgcaaaatatcgacctacaaatcaatacgcaacgttaaaaaacaatttaacgatacaattcgcacc

SEQ ID NO: 24971 - DNA, 512 bp, Artificial Sequence
  chemically treated genomic DNA (Homo sapiens) CpG-island No: 24971
gttatatcgaaattgatttgaagatttttcgttagtatttcgttttcgcgttgggtgtaatttatcgttttgtcggtattgaatttttttgtcgcgttatcgtttagtataattaggatatgcgttattggttggaaacgtcgattattttcgtatcgtttatcgaattggttgaaattgagcggttgcgttattaggagatgtcgatattcgtttttcgggtacgttaattgttggcgaaaaacgattttacggttatcgcgtcgttggtttttgtagttacgttgtattatttgtagaatttgtttgagtattttcgttaggacgcggtagttcgttaaaagattttcgtatgagaaataggtgaaaaatgaaaataaattagttcgtcgttgtaggtatttttgagtttggggatgtgatgatacgtatcgttttattcgatacgtaggatatcgatttgtaaattaatacgtagcgttgagaaatagtttggcgatgtaattcgtatt

SEQ ID NO: 24972 - DNA, 512 bp, Artificial Sequence
  chemically treated genomic DNA (Homo sapiens) CpG-island No: 24972
aatacgaattacatcgccaaactatttctcaacgctacgtattaatttacaaatcgatatcctacgtatcgaataaaacgatacgtatcatcacatccccaaactcaaaaatacctacaacgacgaactaatttattttcatttttcacctatttctcatacgaaaatcttttaacgaactaccgcgtcctaacgaaaatactcaaacaaattctacaaataatacaacgtaactacaaaaaccaacgacgcgataaccgtaaaatcgtttttcgccaacaattaacgtacccgaaaaacgaatatcgacatctcctaataacgcaaccgctcaatttcaaccaattcgataaacgatacgaaaataatcgacgtttccaaccaataacgcatatcctaattatactaaacgataacgcgacaaaaaaattcaataccgacaaaacgataaattacacccaacgcgaaaacgaaatactaacgaaaaatcttcaaatcaatttcgatataac

SEQ ID NO: 24973 - DNA, 751 bp, Artificial Sequence
  chemically treated genomic DNA (Homo sapiens) CpG-island No: 24973
gcgagtttcggttttagtcggttcgtattggtttgcgttaggtttagttcgtagggttcgtttatagtcggtggttcgcgtcgtcgttcggtgttcgcgggtttggtgttggcgggggcgcggggttcggcgcggtcgtttcggttttatttagcggttcgcgtcggggagagggagcgtatttattttagacgcgtttcgggagtcgttggaagagttcgggaaaggaggcggagtcgcgcgaatgaatggagtcggcggttgttcgttggcgattttcggtcggttttaggtcgtatagttcgcggttgttagggcgagtgcggttgtttttcgttcgtttcggacgttcggtttttcgtcgcgggtcggtcgcggtttatcgtgtttttcgacgacgtgacgtattagcgtcgtagcgtttttagttttcgttttcgtttcgcgttcgcgtttatcgcgaattttttcgttcgttagcgcggagcggttttttttcggagtttgggacgtcgttttgtttttttttagtttcggtttttaggcgtcggttcggtaggtgcgggtttggttagttcgggggcgttacgcggttttcgtttcgttattcgcgtttttttttttcgtttcggtcgtcgttattcggtagcgcgacgtttagtttagggtaatggtttggtattaaagagtgattttggtttagatataaaaatagatgcggttaagtcgcgggggttgtaacgttgatttt

SEQ ID NO: 24974 - DNA, 751 bp, Artificial Sequence
  chemically treated genomic DNA (Homo sapiens) CpG-island No: 24974
aaaatcaacgttacaacccccgcgacttaaccgcatctatttttatatctaaaccaaaatcactctttaataccaaaccattaccctaaactaaacgtcgcgctaccgaataacgacgaccgaaacgaaaaaaaaaaacgcgaataacgaaacgaaaaccgcgtaacgcccccgaactaaccaaacccgcacctaccgaaccgacgcctaaaaaccgaaactaaaaaaaaacaaaacgacgtcccaaactccgaaaaaaaaccgctccgcgctaacgaacgaaaaaattcgcgataaacgcgaacgcgaaacgaaaacgaaaactaaaaacgctacgacgctaatacgtcacgtcgtcgaaaaacacgataaaccgcgaccgacccgcgacgaaaaaccgaacgtccgaaacgaacgaaaaacaaccgcactcgccctaacaaccgcgaactatacgacctaaaaccgaccgaaaatcgccaacgaacaaccgccgactccattcattcgcgcgactccgcctcctttcccgaactcttccaacgactcccgaaacgcgtctaaaataaatacgctccctctccccgacgcgaaccgctaaataaaaccgaaacgaccgcgccgaaccccgcgcccccgccaacaccaaacccgcgaacaccgaacgacgacgcgaaccaccgactataaacgaaccctacgaactaaacctaacgcaaaccaatacgaaccgactaaaaccgaaactcgc

SEQ ID NO: 24975 - DNA, 751 bp, Artificial Sequence
  chemically treated genomic DNA (Homo sapiens) CpG-island No: 24975
aaaattagcgttgtagttttcgcggtttaatcgtatttatttttatatttaagttaaggttattttttaatattaggttattgttttgagttgggcgtcgcgttgtcgggtgacggcggtcggggcggagagagggggcgcgggtggcgaggcgggggtcgcgtgacgttttcgggttggttaagttcgtatttgtcgggtcggcgtttgaaagtcggggttggagggaggtagggcggcgttttaggtttcgaggaggggtcgtttcgcgttggcgggcggggggattcgcggtgggcgcgggcgcggagcggaagcgaaggttggaggcgttgcggcgttagtgcgttacgtcgtcggagggtacggtgggtcgcggtcgattcgcgacgaggagtcgggcgttcggggcgagcgggaggtagtcgtattcgttttggtagtcgcgagttgtgcggtttgggatcggtcggaggtcgttagcgagtagtcgtcggttttatttattcgcgcggtttcgttttttttttcgggtttttttagcggttttcggggcgcgtttgaggtgagtgcgtttttttttttcggcgcggatcgttgggtgaggtcgagacggtcgcgtcgggtttcgcgttttcgttagtattagattcgcggatatcgagcggcgacgcgggttatcggttgtgggcggattttgcgggttgggtttggcgtagattagtgcgggtcgattggaatcggggttcgt

SEQ ID NO: 24976 - DNA, 751 bp, Artificial Sequence
  chemically treated genomic DNA (Homo sapiens) CpG-island No: 24976
acgaaccccgattccaatcgacccgcactaatctacgccaaacccaacccgcaaaatccgcccacaaccgataacccgcgtcgccgctcgatatccgcgaatctaatactaacgaaaacgcgaaacccgacgcgaccgtctcgacctcacccaacgatccgcgccgaaaaaaaaaaacgcactcacctcaaacgcgccccgaaaaccgctaaaaaaacccgaaaaaaaaaacgaaaccgcgcgaataaataaaaccgacgactactcgctaacgacctccgaccgatcccaaaccgcacaactcgcgactaccaaaacgaatacgactacctcccgctcgccccgaacgcccgactcctcgtcgcgaatcgaccgcgacccaccgtaccctccgacgacgtaacgcactaacgccgcaacgcctccaaccttcgcttccgctccgcgcccgcgcccaccgcgaatccccccgcccgccaacgcgaaacgacccctcctcgaaacctaaaacgccgccctacctccctccaaccccgactttcaaacgccgacccgacaaatacgaacttaaccaacccgaaaacgtcacgcgacccccgcctcgccacccgcgccccctctctccgccccgaccgccgtcacccgacaacgcgacgcccaactcaaaacaataacctaatattaaaaaataaccttaacttaaatataaaaataaatacgattaaaccgcgaaaactacaacgctaatttt

SEQ ID NO: 24977 - DNA, 592 bp, Artificial Sequence
  chemically treated genomic DNA (Homo sapiens) CpG-island No: 24977
tcgagggtcggggtacgttttatttgtcgtaggtttaagaggtcggcgggatcgtcgggcgaaagttcgggattttcggcggagtttcgggttggtcgcggagtcgggcgaggcgcgagtttcggatacggtttaggggtaggcgaggaagacggcgtaggcggtagcgagtagtagtagtagtagtagtttcgcgattagggtttaaggtagtacgcggtaggcgcgagcgcggggcgcgggaggttacggggtttcggggtttagtgaagcgttagaggcgtattttatgtacgagagattgcgggaagatatagcgcgtcgttttttatagttgtttggttataaaaggaggttacgttttttcgttcgcggttacgttttttcgttcgcggttacgtttttttttagtttagagttttttttttcgttttcgtgattttgcggaattttttttattcggattttttttcgtttttcgttttttttttcgttttcggttttttaagttcggttttaggtttttttttttttgttgtttttttatcgttttggttttttttttttgtcgttttttttcggtatttttgtg

SEQ ID NO: 24978 - DNA, 592 bp, Artificial Sequence
  chemically treated genomic DNA (Homo sapiens) CpG-island No: 24978
cacaaaaataccgaaaaaaaacgacaaaaaaaaaaaaccaaaacgataaaaaaacaacaaaaaaaaaaaaacctaaaaccgaacttaaaaaaccgaaaacgaaaaaaaaaacgaaaaacgaaaaaaaatccgaataaaaaaaattccgcaaaatcacgaaaacgaaaaaaaaaactctaaactaaaaaaaaacgtaaccgcgaacgaaaaaacgtaaccgcgaacgaaaaaacgtaacctccttttataaccaaacaactataaaaaacgacgcgctatatcttcccgcaatctctcgtacataaaatacgcctctaacgcttcactaaaccccgaaaccccgtaacctcccgcgccccgcgctcgcgcctaccgcgtactaccttaaaccctaatcgcgaaactactactactactactactcgctaccgcctacgccgtcttcctcgcctacccctaaaccgtatccgaaactcgcgcctcgcccgactccgcgaccaacccgaaactccgccgaaaatcccgaactttcgcccgacgatcccgccgacctcttaaacctacgacaaataaaacgtaccccgaccctcga

SEQ ID NO: 24979 - DNA, 592 bp, Artificial Sequence
  chemically treated genomic DNA (Homo sapiens) CpG-island No: 24979
tatagagatatcgggaaagagcggtagagagggagaattagggcgatggagagatagtagggagaaaggaatttggagtcgagtttggaaggtcggaaacggaaaggagagcgaaaagcggagagagattcgagtggagaaaatttcgtagagttacggggacgaggggaaaggttttgggttgggaaggggcgtggtcgcgggcggaggggcgtggtcgcgggcggaggggcgtggtttttttttgtagttaagtagttataaaaagcggcgcgttgtgttttttcgtagtttttcgtatatggaatacgtttttgacgttttattggatttcgaagtttcgtggtttttcgcgtttcgcgttcgcgtttgtcgcgtattgttttgggttttggtcgcggggttgttgttgttgttgttgttcgttgtcgtttgcgtcgtttttttcgtttgtttttgggtcgtgttcggggttcgcgtttcgttcggtttcgcggttagttcgagatttcgtcgagggtttcgagttttcgttcgacgatttcgtcggttttttggatttgcggtaggtgagacgtgtttcgattttcgg

SEQ ID NO: 24980 - DNA, 592 bp, Artificial Sequence
  chemically treated genomic DNA (Homo sapiens) CpG-island No: 24980
ccgaaaatcgaaacacgtctcacctaccgcaaatccaaaaaaccgacgaaatcgtcgaacgaaaactcgaaaccctcgacgaaatctcgaactaaccgcgaaaccgaacgaaacgcgaaccccgaacacgacccaaaaacaaacgaaaaaaacgacgcaaacgacaacgaacaacaacaacaacaacaaccccgcgaccaaaacccaaaacaatacgcgacaaacgcgaacgcgaaacgcgaaaaaccacgaaacttcgaaatccaataaaacgtcaaaaacgtattccatatacgaaaaactacgaaaaaacacaacgcgccgctttttataactacttaactacaaaaaaaaaccacgcccctccgcccgcgaccacgcccctccgcccgcgaccacgccccttcccaacccaaaacctttcccctcgtccccgtaactctacgaaattttctccactcgaatctctctccgcttttcgctctcctttccgtttccgaccttccaaactcgactccaaattcctttctccctactatctctccatcgccctaattctccctctctaccgctctttcccgatatctctata

SEQ ID NO: 24981 - DNA, 573 bp, Artificial Sequence
  chemically treated genomic DNA (Homo sapiens) CpG-island No: 24981
ggatgatagcggaatggggtttcggtagattgataggattagtcgtggaaggggcgggtttattttttttttgaattcgcgagttaaagttacgttggtgttggtgattatttaggttgagcgttgggtatttttagtttcgggcgattttttggcgttatttttaggttgagagttatgattaggcgagtttcggtcgtgggatcgaagattttttatttttagtattttaattttttcgattttgttttcgttgtgtttcgttgggatattcgttttcggggtttttcgcggtttaggagtcgtatttgtcgggtggagacgcggggttggtttggggtgcgggagtaggaggttttcggtttaatcgtttttaatttatttttgttttcgacgttttgttttcgcgtttaatgttttgttcgatttagtttcggttttttatttttttttttcgcgtttttacgtttttttttttttcggttttgtcgtgaatgtttttaagttttagagtatcggaatttttcgcgcgttttggtttttgggttttagtttcgtgtagttttggattgg

SEQ ID NO: 24982 - DNA, 573 bp, Artificial Sequence
  chemically treated genomic DNA (Homo sapiens) CpG-island No: 24982
ccaatccaaaactacacgaaactaaaacccaaaaaccaaaacgcgcgaaaaattccgatactctaaaacttaaaaacattcacgacaaaaccgaaaaaaaaaaaaacgtaaaaacgcgaaaaaaaaaaataaaaaaccgaaactaaatcgaacaaaacattaaacgcgaaaacaaaacgtcgaaaacaaaaataaattaaaaacgattaaaccgaaaacctcctactcccgcaccccaaaccaaccccgcgtctccacccgacaaatacgactcctaaaccgcgaaaaaccccgaaaacgaatatcccaacgaaacacaacgaaaacaaaatcgaaaaaattaaaatactaaaaataaaaaatcttcgatcccacgaccgaaactcgcctaatcataactctcaacctaaaaataacgccaaaaaatcgcccgaaactaaaaatacccaacgctcaacctaaataatcaccaacaccaacgtaactttaactcgcgaattcaaaaaaaaaataaacccgccccttccacgactaatcctatcaatctaccgaaaccccattccgctatcatcc

SEQ ID NO: 24983 - DNA, 573 bp, Artificial Sequence
  chemically treated genomic DNA (Homo sapiens) CpG-island No: 24983
ttagtttaggattgtacggagttggggtttaggagttaaggcgcgcggggagtttcggtgttttaggatttgggagtatttacggtagaatcggggaaggaaagagcgtggagacgcgggaaggggagatgggaggtcggaattggatcgggtagggtattaagcgcgggaatagaacgtcggaagtaggaatgggttggaggcggttggatcgaagattttttattttcgtattttagattagtttcgcgtttttattcggtaggtgcggtttttggatcgcggaagatttcggaggcggatattttaacgaggtatagcgagggtagggtcggggaggttagagtgttgagggtgggaggttttcggttttacggtcgaagttcgtttagttatggtttttagtttggaagtaacgttaagaaatcgttcgagattgggaatgtttagcgtttagtttggatgattattagtattaacgtggttttggttcgcgggtttaagagaaagatgggttcgttttttttacgattgattttgttagtttatcgaagttttatttcgttgttattt

SEQ ID NO: 24984 - DNA, 573 bp, Artificial Sequence
  chemically treated genomic DNA (Homo sapiens) CpG-island No: 24984
aaataacaacgaaataaaacttcgataaactaacaaaatcaatcgtaaaaaaaacgaacccatctttctcttaaacccgcgaaccaaaaccacgttaatactaataatcatccaaactaaacgctaaacattcccaatctcgaacgatttcttaacgttacttccaaactaaaaaccataactaaacgaacttcgaccgtaaaaccgaaaacctcccaccctcaacactctaacctccccgaccctaccctcgctatacctcgttaaaatatccgcctccgaaatcttccgcgatccaaaaaccgcacctaccgaataaaaacgcgaaactaatctaaaatacgaaaataaaaaatcttcgatccaaccgcctccaacccattcctacttccgacgttctattcccgcgcttaataccctacccgatccaattccgacctcccatctccccttcccgcgtctccacgctctttccttccccgattctaccgtaaatactcccaaatcctaaaacaccgaaactccccgcgcgccttaactcctaaaccccaactccgtacaatcctaaactaa

SEQ ID NO: 24985 - DNA, 644 bp, Artificial Sequence
  chemically treated genomic DNA (Homo sapiens) CpG-island No: 24985
tcgatttgcgtaagttggtcgttaatatggtttttttttttcgtttgtatttttttatgttcggtttcgtatttttgattagtcggggtagttagtagtatcgggttttgacggtgttcgagtttatttagtagatgttcgatgttaagaatatgatggcggcgtgcgattcgcgttacggtcgttatttgatcgtggtcgtcgtgtttcggggtcgtatgtttatgaaggaggtggacgagtagatgttgagcgtgtagagtaagaatagtagttatttcgtggagtggatttttaataacgtgaagacggtcgtgtgcgatatttcgtttcgcggtttgaagatggtcgcgatttttatcggtaatagtacggttatttaggagttgtttaagcgtattttcgagtagtttacggttatgtttcggcgtaaggtttttttgtattggtatacgggcgagggtatggacgagatggagtttatcgaggtcgagagtaatatgaatgatttggtatttgagtattagtagtattaggacgttacggtcgaggagggcgagttcgaggaggaggcggaggaggaggtggtttaggttgtttttatcgttttttatttgttttttcgaggtttttgatttttgatt

SEQ ID NO: 24986 - DNA, 644 bp, Artificial Sequence
  chemically treated genomic DNA (Homo sapiens) CpG-island No: 24986
aatcaaaaatcaaaaacctcgaaaaaacaaataaaaaacgataaaaacaacctaaaccacctcctcctccgcctcctcctcgaactcgccctcctcgaccgtaacgtcctaatactactaatactcaaataccaaatcattcatattactctcgacctcgataaactccatctcgtccataccctcgcccgtataccaatacaaaaaaaccttacgccgaaacataaccgtaaactactcgaaaatacgcttaaacaactcctaaataaccgtactattaccgataaaaatcgcgaccatcttcaaaccgcgaaacgaaatatcgcacacgaccgtcttcacgttattaaaaatccactccacgaaataactactattcttactctacacgctcaacatctactcgtccacctccttcataaacatacgaccccgaaacacgacgaccacgatcaaataacgaccgtaacgcgaatcgcacgccgccatcatattcttaacatcgaacatctactaaataaactcgaacaccgtcaaaacccgatactactaactaccccgactaatcaaaaatacgaaaccgaacataaaaaaatacaaacgaaaaaaaaaaaccatattaacgaccaacttacgcaaatcga

SEQ ID NO: 24987 - DNA, 644 bp, Artificial Sequence
  chemically treated genomic DNA (Homo sapiens) CpG-island No: 24987
gattaaaggttagaagtttcgaggggataggtgggaagcgatgggagtagtttaggttattttttttttcgtttttttttcgaattcgtttttttcggtcgtggcgttttggtattgttggtatttagatattaggttatttatgttgttttcggtttcggtgaattttatttcgtttatgttttcgttcgtgtattagtgtaagaaggttttgcgtcggaatatggtcgtgaattgttcggagatgcgtttgaatagtttttggatggtcgtgttgttgtcgatgaaggtcgcggttatttttaggtcgcggggcgggatgtcgtatacggtcgtttttacgttgttggggatttattttacgaagtagttgttgtttttgttttgtacgtttagtatttgttcgtttattttttttatggatatgcggtttcggaatacggcggttacggttaggtagcggtcgtggcgcgggtcgtacgtcgttattatgtttttggtatcgaatatttgttgggtgagttcgggtatcgttagggttcggtattgttggttgtttcggttggttaggggtgcgaagtcgggtatgaagaagtgtaggcgaggaaagggaattatgttgacggttagtttgcgtaggtcgg

SEQ ID NO: 24988 - DNA, 644 bp, Artificial Sequence
  chemically treated genomic DNA (Homo sapiens) CpG-island No: 24988
ccgacctacgcaaactaaccgtcaacataattccctttcctcgcctacacttcttcatacccgacttcgcacccctaaccaaccgaaacaaccaacaataccgaaccctaacgatacccgaactcacccaacaaatattcgataccaaaaacataataacgacgtacgacccgcgccacgaccgctacctaaccgtaaccgccgtattccgaaaccgcatatccataaaaaaaataaacgaacaaatactaaacgtacaaaacaaaaacaacaactacttcgtaaaataaatccccaacaacgtaaaaacgaccgtatacgacatcccgccccgcgacctaaaaataaccgcgaccttcatcgacaacaacacgaccatccaaaaactattcaaacgcatctccgaacaattcacgaccatattccgacgcaaaaccttcttacactaatacacgaacgaaaacataaacgaaataaaattcaccgaaaccgaaaacaacataaataacctaatatctaaataccaacaataccaaaacgccacgaccgaaaaaaacgaattcgaaaaaaaaacgaaaaaaaaaataacctaaactactcccatcgcttcccacctatcccctcgaaacttctaacctttaatc

SEQ ID NO: 24989 - DNA, 563 bp, Artificial Sequence
  chemically treated genomic DNA (Homo sapiens) CpG-island No: 24989
tttttagacgtacgtaagaatcgtgtattatttcgttcgttttttgttcgttcgcgttttatatttttttcgttcggtcgtagaaatagaagatttaggagcgatgtttttttattgtttttttttttcgttcgcgcgttttttttttcggtttttattttgattgggaaatagaaaattaacgcgcggcgcggttgtaaagtcggttttttattggttagcgttttttgggttgagttcgttcgtttcgtttttttttttatttaggcggggttttttcgtagattttcgattgtttttagttcgtagttttatcgtttgttaggagattttaaaggggtcgcggtcgtaattagacgttgagcggcgtggggagggggtggtttagtgattcgggcgcggggttgaggattttagtggtcgagcgttggaggtagggttttagtttgtcgtattcgttgtatttgcggaatgtttttattgttagtttcgggcgtagtttttcgatttattattagggggaagggagtttagattatttgatagcgaatattcgataataa

SEQ ID NO: 24990 - DNA, 563 bp, Artificial Sequence
  chemically treated genomic DNA (Homo sapiens) CpG-island No: 24990
ttattatcgaatattcgctatcaaataatctaaactcccttccccctaataataaatcgaaaaactacgcccgaaactaacaataaaaacattccgcaaatacaacgaatacgacaaactaaaaccctacctccaacgctcgaccactaaaatcctcaaccccgcgcccgaatcactaaaccaccccctccccacgccgctcaacgtctaattacgaccgcgacccctttaaaatctcctaacaaacgataaaactacgaactaaaaacaatcgaaaatctacgaaaaaaccccgcctaaataaaaaaaaaaacgaaacgaacgaactcaacccaaaaaacgctaaccaataaaaaaccgactttacaaccgcgccgcgcgttaattttctatttcccaatcaaaataaaaaccgaaaaaaaaaacgcgcgaacgaaaaaaaaaaacaataaaaaaacatcgctcctaaatcttctatttctacgaccgaacgaaaaaaatataaaacgcgaacgaacaaaaaacgaacgaaataatacacgattcttacgtacgtctaaaaa

SEQ ID NO: 24991 - DNA, 563 bp, Artificial Sequence
  chemically treated genomic DNA (Homo sapiens) CpG-island No: 24991
ttgttatcgagtattcgttgttaagtggtttgggtttttttttttttaatggtggatcgagaaattgcgttcgaaattagtagtagggatatttcgtaggtgtagcgagtgcgataggttggggttttgtttttagcgttcgattattgggatttttaatttcgcgttcgggttattgagttattttttttttacgtcgtttagcgtttgattgcggtcgcggtttttttaagattttttggtaggcggtgggattgcgggttggaggtagtcgggggtttgcggggaggtttcgtttaggtgggagaagaggcggggcgggcgggtttagtttaggaggcgttgattaataggaaatcgattttgtagtcgcgtcgcgcgttgattttttgttttttagttagagtgggaatcgagaaaggaagcgcgcgggcgggaagaagggatagtgggagagtatcgtttttggattttttgtttttgcggtcgagcggggaaggtgtaaggcgcgggcgggtagagagcgagcgagatggtgtacggtttttgcgtgcgtttgggaa

SEQ ID NO: 24992 - DNA, 563 bp, Artificial Sequence
  chemically treated genomic DNA (Homo sapiens) CpG-island No: 24992
ttcccaaacgcacgcaaaaaccgtacaccatctcgctcgctctctacccgcccgcgccttacaccttccccgctcgaccgcaaaaacaaaaaatccaaaaacgatactctcccactatcccttcttcccgcccgcgcgcttcctttctcgattcccactctaactaaaaaacaaaaaatcaacgcgcgacgcgactacaaaatcgatttcctattaatcaacgcctcctaaactaaacccgcccgccccgcctcttctcccacctaaacgaaacctccccgcaaacccccgactacctccaacccgcaatcccaccgcctaccaaaaaatcttaaaaaaaccgcgaccgcaatcaaacgctaaacgacgtaaaaaaaaaataactcaataacccgaacgcgaaattaaaaatcccaataatcgaacgctaaaaacaaaaccccaacctatcgcactcgctacacctacgaaatatccctactactaatttcgaacgcaatttctcgatccaccattaaaaaaaaaaaaacccaaaccacttaacaacgaatactcgataacaa

SEQ ID NO: 24993 - DNA, 511 bp, Artificial Sequence
  chemically treated genomic DNA (Homo sapiens) CpG-island No: 24993
tatatttgcgcgttttcgcggttttttttttcgtatttttattaagggattggggtttcgttataggtgcgtttatagcgcggtttcgttttttttttgatttcgtttttttagcgaggtttaggtgtataagtcggaagtgcgtttttttaggtgagtgattaaatttttcgggttacgtgatagggcggagtcggtggggtcggatttatagaacgatcgacggatcgagggttcgagggagggatacggattaggaatttgagttaggttaaagacgttcgggttaggtaggaaggtaggacgtatcgttaggtttgttttttcgttcgtttattttgttcgtttcgtttcgtttcgtttcgttttttttttttttttagtttaggaacgcgtttttgggagttaatttttaatcgttgatttttggcggttggggcggggcgggatttatgggtgttttggcgttagttgttttttttgtgggtttgcgtcggggtttttatttcga

SEQ ID NO: 24994 - DNA, 511 bp, Artificial Sequence
  chemically treated genomic DNA (Homo sapiens) CpG-island No: 24994
tcgaaataaaaaccccgacgcaaacccacaaaaaaaacaactaacgccaaaacacccataaatcccgccccgccccaaccgccaaaaatcaacgattaaaaattaactcccaaaaacgcgttcctaaactaaaaaaaaaaaaaaaacgaaacgaaacgaaacgaaacgaacaaaataaacgaacgaaaaaacaaacctaacgatacgtcctaccttcctacctaacccgaacgtctttaacctaactcaaattcctaatccgtatccctccctcgaaccctcgatccgtcgatcgttctataaatccgaccccaccgactccgccctatcacgtaacccgaaaaatttaatcactcacctaaaaaaacgcacttccgacttatacacctaaacctcgctaaaaaaacgaaatcaaaaaaaaaacgaaaccgcgctataaacgcacctataacgaaaccccaatcccttaataaaaatacgaaaaaaaaaaccgcgaaaacgcgcaaatata

SEQ ID NO: 24995 - DNA, 511 bp, Artificial Sequence
  chemically treated genomic DNA (Homo sapiens) CpG-island No: 24995
tcggggtggggatttcggcgtaggtttataggagagataattggcgttagggtatttatgagtttcgtttcgttttagtcgttagaggttagcgattaaagattaatttttaggagcgcgtttttgggttggggaaaggaaggggacgggacgggacgggacgggacgggtagggtggacgggcgagggggtaggtttagcggtgcgttttgtttttttatttggttcgggcgtttttgatttagtttaggtttttggttcgtgtttttttttcgaattttcggttcgtcggtcgttttgtgggttcgattttatcggtttcgttttgttacgtgattcggaaagtttagttatttatttgggagagcgtattttcggtttgtgtatttgagtttcgttgagagggcggagttaagaagggggcggggtcgcgttgtgggcgtatttgtaacgggattttagttttttaatggggatgcggggagggagatcgcggaagcgcgtaggtgtg

SEQ ID NO: 24996 - DNA, 511 bp, Artificial Sequence
  chemically treated genomic DNA (Homo sapiens) CpG-island No: 24996
cacacctacgcgcttccgcgatctccctccccgcatccccattaaaaaactaaaatcccgttacaaatacgcccacaacgcgaccccgcccccttcttaactccgccctctcaacgaaactcaaatacacaaaccgaaaatacgctctcccaaataaataactaaactttccgaatcacgtaacaaaacgaaaccgataaaatcgaacccacaaaacgaccgacgaaccgaaaattcgaaaaaaaaacacgaaccaaaaacctaaactaaatcaaaaacgcccgaaccaaataaaaaaacaaaacgcaccgctaaacctaccccctcgcccgtccaccctacccgtcccgtcccgtcccgtcccgtccccttcctttccccaacccaaaaacgcgctcctaaaaattaatctttaatcgctaacctctaacgactaaaacgaaacgaaactcataaataccctaacgccaattatctctcctataaacctacgccgaaatccccaccccga

SEQ ID NO: 24997 - DNA, 540 bp, Artificial Sequence
  chemically treated genomic DNA (Homo sapiens) CpG-island No: 24997
  unsure (125, 176)
ggagggtcgagattggtagggaatggaatcgatttatcggttttttatatgtgttagcggtgacgacgcgatttttcgaagttggtatcggtacgtgtggtattttattcgaattcgttgagtgnttcgtttcgaggagaggcgagaatacgaagtagtatagggagacgcgatanggagtaatttttttgcgtggtgatagaggttaggattattaatatgaaaggtagtaggcgaagagacgtcgaggttcgagtggaaggtggtcgtcgtggcgtaattcgtttggataatgtatttaagtggatttgtgattttgaggggcgcgacgggcggagttaatcgatggagaggtatgcgtacgtgttcgttgtgttttggatttttttcgtaacgtttagtttgtggtaggaatatttattgttcgattcgagtcgatgtaggtgaggattaagggtgttacgtacgagttatttaggttttacgtgtttttttttttattttttacgagagaggttttgcgataaagattattttaaa

SEQ ID NO: 24998 - DNA, 540 bp, Artificial Sequence
  chemically treated genomic DNA (Homo sapiens) CpG-island No: 24998
  unsure (365, 416)
tttaaaataatctttatcgcaaaacctctctcgtaaaaaataaaaaaaaaaacacgtaaaacctaaataactcgtacgtaacacccttaatcctcacctacatcgactcgaatcgaacaataaatattcctaccacaaactaaacgttacgaaaaaaatccaaaacacaacgaacacgtacgcatacctctccatcgattaactccgcccgtcgcgcccctcaaaatcacaaatccacttaaatacattatccaaacgaattacgccacgacgaccaccttccactcgaacctcgacgtctcttcgcctactacctttcatattaataatcctaacctctatcaccacgcaaaaaaattactccntatcgcgtctccctatactacttcgtattctcgcctctcctcgaaacgaancactcaacgaattcgaataaaataccacacgtaccgataccaacttcgaaaaatcgcgtcgtcaccgctaacacatataaaaaaccgataaatcgattccattccctaccaatctcgaccctcc

SEQ ID NO: 24999 - DNA, 540 bp, Artificial Sequence
  chemically treated genomic DNA (Homo sapiens) CpG-island No: 24999
  unsure (365, 416)
tttggaatgatttttgtcgtagaatttttttcgtaaagaatgggaggggaagtacgtgagatttagatgattcgtgcgtagtatttttagtttttatttatatcgattcgagtcggataatggatatttttattataaattagacgttgcggaggggatttaaggtatagcgagtacgtgcgtatgtttttttatcggttgatttcgttcgtcgcgttttttaaagttataggtttatttgggtgtattgtttaagcggattgcgttacgacgattattttttattcgagtttcggcgttttttcgtttattgttttttatgttgatgattttggtttttattattacgtagaagggttattttntgtcgcgtttttttatattatttcgtgttttcgttttttttcgaggcgagntatttagcgagttcgagtggagtgttatacgtgtcgatgttaatttcggagggtcgcgtcgttatcgttggtatatgtgagaggtcgatggatcgattttattttttattagtttcgatttttt

SEQ ID NO: 25000 - DNA, 540 bp, Artificial Sequence
  chemically treated genomic DNA (Homo sapiens) CpG-island No: 25000
  unsure (125, 176)
aaaaaatcgaaactaataaaaaataaaatcgatccatcgacctctcacatataccaacgataacgacgcgaccctccgaaattaacatcgacacgtataacactccactcgaactcgctaaatanctcgcctcgaaaaaaaacgaaaacacgaaataatataaaaaaacgcgacanaaaataacccttctacgtaataataaaaaccaaaatcatcaacataaaaaacaataaacgaaaaaacgccgaaactcgaataaaaaataatcgtcgtaacgcaatccgcttaaacaatacacccaaataaacctataactttaaaaaacgcgacgaacgaaatcaaccgataaaaaaacatacgcacgtactcgctataccttaaatcccctccgcaacgtctaatttataataaaaatatccattatccgactcgaatcgatataaataaaaactaaaaatactacgcacgaatcatctaaatctcacgtacttcccctcccattctttacgaaaaaaattctacgacaaaaatcattccaaa

SEQ ID NO: 25001 - DNA, 753 bp, Artificial Sequence
  chemically treated genomic DNA (Homo sapiens) CpG-island No: 25001
ttcgttacgggtacgtagtcgcgtcgtaatattttgcgttagcgtatcgttaagggaatattttagtaggtaataagggttatgcggttgttgtttaagtaacgttgttagatgcgtttcgtagattttatttaggtttgtcgtcgtttgtatggggttattggggcgcggtgattgaatgtcgataatcgattattgtggatcgagataacgcgagagtacgttgaattgttaggtaaaatcggacgtaggatggaaataaaatagcgtcgggttattatttttacgtaacggtagaatggtttcgaattttatacgtcgggtgttgttttttttagtattaataatcgttgttagtttggcgatagttgacgcgattattatttgtttcggcgtatattgtcggcgtaattgtcgaattaattgcgttgttagtttattgttagtagcgaatgacgttatcgaaagaaatagattagcggatcgttagagttgatgaagtagcgtcgaaggttgcgtatgtgttggaagcgggtattcgcgagtcgatgattatgcgggttaattaggcgttgtatgcgtaattatattttataaaagaatttattttttggcgttaggttgacggcggatatgatgcgttttgttggcgcggtggtttgatgtaggggttaatcgatttttggtaattatttttttatgataggagttgaatatggtatttagtaattttttcgatgattcgtagggagt

SEQ ID NO: 25002 - DNA, 753 bp, Artificial Sequence
  chemically treated genomic DNA (Homo sapiens) CpG-island No: 25002
actccctacgaatcatcgaaaaaattactaaataccatattcaactcctatcataaaaaaataattaccaaaaatcgattaacccctacatcaaaccaccgcgccaacaaaacgcatcatatccgccgtcaacctaacgccaaaaaataaattcttttataaaatataattacgcatacaacgcctaattaacccgcataatcatcgactcgcgaatacccgcttccaacacatacgcaaccttcgacgctacttcatcaactctaacgatccgctaatctatttctttcgataacgtcattcgctactaacaataaactaacaacgcaattaattcgacaattacgccgacaatatacgccgaaacaaataataatcgcgtcaactatcgccaaactaacaacgattattaatactaaaaaaaacaacacccgacgtataaaattcgaaaccattctaccgttacgtaaaaataataacccgacgctattttatttccatcctacgtccgattttacctaacaattcaacgtactctcgcgttatctcgatccacaataatcgattatcgacattcaatcaccgcgccccaataaccccatacaaacgacgacaaacctaaataaaatctacgaaacgcatctaacaacgttacttaaacaacaaccgcataacccttattacctactaaaatattcccttaacgatacgctaacgcaaaatattacgacgcgactacgtacccgtaacgaa

SEQ ID NO: 25003 - DNA, 753 bp, Artificial Sequence
  chemically treated genomic DNA (Homo sapiens) CpG-island No: 25003
gttttttgcggattatcgaagggattattgaatgttatatttaatttttgttatggaaaagtggttgttagaggtcgattagtttttgtattaagttatcgcgttaataaagcgtattatgttcgtcgttaatttgacgttagaaaatggatttttttatggggtgtaattgcgtatatagcgtttgattggttcgtatgattatcggttcgcgaatattcgtttttagtatatgcgtaattttcggcgttattttattagttttggcggttcgttagtttatttttttcggtggcgttattcgttattggtaatgaattggtagcgtagttaattcggtagttgcgtcggtagtgtacgtcggggtaagtgatggtcgcgttaattgtcgttaaattggtaacgattattgatgttgaagaagatagtattcggcgtatgggattcgaaattattttgtcgttgcgtgaaggtaatggttcgacgttgttttgtttttattttgcgttcggttttgtttggtagtttagcgtgttttcgcgttatttcgatttataatggtcgattatcggtatttagttatcgcgttttaatggttttatgtagacggcggtaaatttggatgaagtttgcgaagcgtatttggtaacgttatttgaataataatcgtatggtttttattatttgttggggtatttttttggcggtacgttggcgtagggtattgcggcgcgattgcgtgttcgtggcgaa

SEQ ID NO: 25004 - DNA, 753 bp, Artificial Sequence
  chemically treated genomic DNA (Homo sapiens) CpG-island No: 25004
ttcgccacgaacacgcaatcgcgccgcaataccctacgccaacgtaccgccaaaaaaataccccaacaaataataaaaaccatacgattattattcaaataacgttaccaaatacgcttcgcaaacttcatccaaatttaccgccgtctacataaaaccattaaaacgcgataactaaataccgataatcgaccattataaatcgaaataacgcgaaaacacgctaaactaccaaacaaaaccgaacgcaaaataaaaacaaaacaacgtcgaaccattaccttcacgcaacgacaaaataatttcgaatcccatacgccgaatactatcttcttcaacatcaataatcgttaccaatttaacgacaattaacgcgaccatcacttaccccgacgtacactaccgacgcaactaccgaattaactacgctaccaattcattaccaataacgaataacgccaccgaaaaaaataaactaacgaaccgccaaaactaataaaataacgccgaaaattacgcatatactaaaaacgaatattcgcgaaccgataatcatacgaaccaatcaaacgctatatacgcaattacaccccataaaaaaatccattttctaacgtcaaattaacgacgaacataatacgctttattaacgcgataacttaatacaaaaactaatcgacctctaacaaccacttttccataacaaaaattaaatataacattcaataatcccttcgataatccgcaaaaaac

SEQ ID NO: 25005 - DNA, 579 bp, Artificial Sequence
  chemically treated genomic DNA (Homo sapiens) CpG-island No: 25005
cgattttcggtttgtacgtcggttttcgtcgtagtcgtcgttttttacgatcgtttcggttatgacgtattttatggtcggttcgggtttggttattttgtcgttgcgtaggtttattacgtaggttgcgattttcgcgtttttatatttcgttcggagcgttttatgtatcggggtcgtcgttcgggttagtttgcggagtatggcgcgggtagcgttcgattttttatttcggcgggagttgttgatttttttattttttagcgaaggcggcgagagcgacgtggtcggtgcggttagaatttttagagttgggaagtagtcgttttgggtcgggggtttagggagcgagtttcgtggtacgttgggagttgtagttcgcgttttttcgcggcgggcgtgcgcgagcgtttgcgaacgggtttcgtggtacgttgggagttgtagtacgggttgcgtcgcggcggagaattagcgagttcgtgatgttgaagtagaaggttttgtttattgaaggagaaatcgaggtcgagcgagtgtgtgtgtgtgtgtgtgtgtgtgtgtgtgtgtgtgtgtgtg

SEQ ID NO: 25006 - DNA, 579 bp, Artificial Sequence
  chemically treated genomic DNA (Homo sapiens) CpG-island No: 25006
cacacacacacacacacacacacacacacacacacacacacactcgctcgacctcgatttctccttcaataaacaaaaccttctacttcaacatcacgaactcgctaattctccgccgcgacgcaacccgtactacaactcccaacgtaccacgaaacccgttcgcaaacgctcgcgcacgcccgccgcgaaaaaacgcgaactacaactcccaacgtaccacgaaactcgctccctaaacccccgacccaaaacgactacttcccaactctaaaaattctaaccgcaccgaccacgtcgctctcgccgccttcgctaaaaaataaaaaaatcaacaactcccgccgaaataaaaaatcgaacgctacccgcgccatactccgcaaactaacccgaacgacgaccccgatacataaaacgctccgaacgaaatataaaaacgcgaaaatcgcaacctacgtaataaacctacgcaacgacaaaataaccaaacccgaaccgaccataaaatacgtcataaccgaaacgatcgtaaaaaacgacgactacgacgaaaaccgacgtacaaaccgaaaatcg

SEQ ID NO: 25007 - DNA, 579 bp, Artificial Sequence
  chemically treated genomic DNA (Homo sapiens) CpG-island No: 25007
tatatatatatatatatatatatatatatatatatatatatattcgttcggtttcggttttttttttaatgagtagaattttttgttttagtattacgggttcgttggtttttcgtcgcgacgtagttcgtattataatttttagcgtgttacggggttcgttcgtagacgttcgcgtacgttcgtcgcgagggagcgcgaattataatttttagcgtgttacggggttcgttttttggattttcggtttagggcggttgttttttagttttaggaattttggtcgtatcgattacgtcgttttcgtcgttttcgttggggagtagaggagttagtagttttcgtcggggtggggagtcgggcgttgttcgcgttatgtttcgtagattggttcgagcggcggtttcggtatatggggcgtttcgggcggggtgtgggagcgcgggggtcgtagtttacgtggtgggtttgcgtagcgataaggtgattaggttcgggtcggttatgaggtgcgttatggtcgaggcggtcgtgggggacgacgattacggcgaagatcggcgtgtaggtcgggggtcg

SEQ ID NO: 25008 - DNA, 579 bp, Artificial Sequence
  chemically treated genomic DNA (Homo sapiens) CpG-island No: 25008
cgacccccgacctacacgccgatcttcgccgtaatcgtcgtcccccacgaccgcctcgaccataacgcacctcataaccgacccgaacctaatcaccttatcgctacgcaaacccaccacgtaaactacgacccccgcgctcccacaccccgcccgaaacgccccatataccgaaaccgccgctcgaaccaatctacgaaacataacgcgaacaacgcccgactccccaccccgacgaaaactactaactcctctactccccaacgaaaacgacgaaaacgacgtaatcgatacgaccaaaattcctaaaactaaaaaacaaccgccctaaaccgaaaatccaaaaaacgaaccccgtaacacgctaaaaattataattcgcgctccctcgcgacgaacgtacgcgaacgtctacgaacgaaccccgtaacacgctaaaaattataatacgaactacgtcgcgacgaaaaaccaacgaacccgtaatactaaaacaaaaaattctactcattaaaaaaaaaaccgaaaccgaacgaatatatatatatatatatatatatatatatatatatatatata

SEQ ID NO: 25009 - DNA, 508 bp, Artificial Sequence
  chemically treated genomic DNA (Homo sapiens) CpG-island No: 25009
gtgttgcggtcggcgtggttcggagattagttttttaatttcgaggtggggtggattcgggtgtttcgcggttatagttttttttcgtttttagaagcgtagtttcgcggttcgttcgtcgttcgcgagggtcgtattttgttttcggtttttagcggcgtttggttacgttttcggcgggtggagtcgggcggggcgtcgggtaggtttttttgcgtttcgcggcggcggtagcggcggcgacggcgatatggagagcggggtttacggcgcggttaaggcgggcggttttttcgatttgcggcgttttttgacgtagtcgtaggtggtggcgcgcgtcgtgtgtttggtgagttcggggagggcgggtcgagggtattttggggatttttttttcgtcgttaggttcggcgggggttttaggttacgagcgtttggaattgttgttggttttatttattgttgaattcggggggtggtttgttttttgtgttttgtggtgtttgtt

SEQ ID NO: 25010 - DNA, 508 bp, Artificial Sequence
  chemically treated genomic DNA (Homo sapiens) CpG-island No: 25010
aacaaacaccacaaaacacaaaaaacaaaccaccccccgaattcaacaataaataaaaccaacaacaattccaaacgctcgtaacctaaaacccccgccgaacctaacgacgaaaaaaaaatccccaaaataccctcgacccgccctccccgaactcaccaaacacacgacgcgcgccaccacctacgactacgtcaaaaaacgccgcaaatcgaaaaaaccgcccgccttaaccgcgccgtaaaccccgctctccatatcgccgtcgccgccgctaccgccgccgcgaaacgcaaaaaaacctacccgacgccccgcccgactccacccgccgaaaacgtaaccaaacgccgctaaaaaccgaaaacaaaatacgaccctcgcgaacgacgaacgaaccgcgaaactacgcttctaaaaacgaaaaaaaactataaccgcgaaacacccgaatccaccccacctcgaaattaaaaaactaatctccgaaccacgccgaccgcaacac

SEQ ID NO: 25011 - DNA, 508 bp, Artificial Sequence
  chemically treated genomic DNA (Homo sapiens) CpG-island No: 25011
aataaatattataaaatataaggaataaattatttttcgaatttaataataagtggagttaatagtaattttaagcgttcgtggtttagggttttcgtcgggtttggcgacggagagggggtttttagggtgttttcggttcgtttttttcgggtttattaagtatacggcgcgcgttattatttgcggttgcgttaggaagcgtcgtaggtcgaaggagtcgttcgttttggtcgcgtcgtaggtttcgttttttatgtcgtcgtcgtcgtcgttgtcgtcgtcgcggaacgtagaggaatttgttcggcgtttcgttcgattttattcgtcgggggcgtggttaggcgtcgttagggatcgagggtaaagtgcggttttcgcgagcggcgggcgagtcgcgggattgcgtttttagaggcggggaggggttgtggtcgcggagtattcgggtttattttatttcggggttgaggggttagttttcgggttacgtcggtcgtagtat

SEQ ID NO: 25012 - DNA, 508 bp, Artificial Sequence
  chemically treated genomic DNA (Homo sapiens) CpG-island No: 25012
atactacgaccgacgtaacccgaaaactaacccctcaaccccgaaataaaataaacccgaatactccgcgaccacaacccctccccgcctctaaaaacgcaatcccgcgactcgcccgccgctcgcgaaaaccgcactttaccctcgatccctaacgacgcctaaccacgcccccgacgaataaaatcgaacgaaacgccgaacaaattcctctacgttccgcgacgacgacaacgacgacgacgacgacataaaaaacgaaacctacgacgcgaccaaaacgaacgactccttcgacctacgacgcttcctaacgcaaccgcaaataataacgcgcgccgtatacttaataaacccgaaaaaaacgaaccgaaaacaccctaaaaaccccctctccgtcgccaaacccgacgaaaaccctaaaccacgaacgcttaaaattactattaactccacttattattaaattcgaaaaataatttattccttatattttataatatttatt

SEQ ID NO: 25013 - DNA, 943 bp, Artificial Sequence
  chemically treated genomic DNA (Homo sapiens) CpG-island No: 25013
cgattgatgcgggtattatttggtgggagggcgatttgttttaggtaagtcggattggaaaaagttgtataattattcgtagtcgcgtttgatcgtcgaagagtaagcgtttttcgacggttcggtagaagaagtttgtcggatggcgaatgatttttagattatttatgagttggcggatttgtcgtcggagttgtgggcgtattttaaagagtatcgttttttcgcgatgattattaaaaaagagtacggcgggttggagttttcggtttatgtttagtttcgcgtgttgtaaaaatttttcggcgtgagcgggattttggcgattatcgtcggcgtgttaaatttattaggttcgggcgaattgttgtaatattacggtattgacgagtagaaagattattatttgtcgcgtttggcgcgtggttaggagattttttgttttgtattgattagttcggaagcgggtttcgatgcgggcgcgatttcggatatcgggattgtttgtatgggcgaatggtagggttagtaggtgttggggatgcgtttgatttggaataaacgttatattacgttggtatcgattgcgatcgtgtttgggttggcgtttaaatttttcgattcggaaaaattattcggcggtgtagaagatttaggtattatttgtgcgttgattttaattattacgtcgggcgtggaaattggtcgtcgttatttttcgttgaacgtatcgttttagaacggatcgacgcgcggtaaagatgttttcgtgtcgatcgattatattatcggcgggtcgaaaatggtcgggtaaggttggcggatgttggtggagtgtttttcggtaggtttagttagaagttgcgaattttgttgttatcgacgtgatcgatatgtttgaataatagtttatcgaacgcgttgacgttattgtttttcgtcg

SEQ ID NO: 25014 - DNA, 943 bp, Artificial Sequence
  chemically treated genomic DNA (Homo sapiens) CpG-island No: 25014
cgacgaaaaacaataacgtcaacgcgttcgataaactattattcaaacatatcgatcacgtcgataacaacaaaattcgcaacttctaactaaacctaccgaaaaacactccaccaacatccgccaaccttacccgaccattttcgacccgccgataatataatcgatcgacacgaaaacatctttaccgcgcgtcgatccgttctaaaacgatacgttcaacgaaaaataacgacgaccaatttccacgcccgacgtaataattaaaatcaacgcacaaataatacctaaatcttctacaccgccgaataatttttccgaatcgaaaaatttaaacgccaacccaaacacgatcgcaatcgataccaacgtaatataacgtttattccaaatcaaacgcatccccaacacctactaaccctaccattcgcccatacaaacaatcccgatatccgaaatcgcgcccgcatcgaaacccgcttccgaactaatcaatacaaaacaaaaaatctcctaaccacgcgccaaacgcgacaaataataatctttctactcgtcaataccgtaatattacaacaattcgcccgaacctaataaatttaacacgccgacgataatcgccaaaatcccgctcacgccgaaaaatttttacaacacgcgaaactaaacataaaccgaaaactccaacccgccgtactcttttttaataatcatcgcgaaaaaacgatactctttaaaatacgcccacaactccgacgacaaatccgccaactcataaataatctaaaaatcattcgccatccgacaaacttcttctaccgaaccgtcgaaaaacgcttactcttcgacgatcaaacgcgactacgaataattatacaactttttccaatccgacttacctaaaacaaatcgccctcccaccaaataatacccgcatcaatcg

SEQ ID NO: 25015 - DNA, 943 bp, Artificial Sequence
  chemically treated genomic DNA (Homo sapiens) CpG-island No: 25015
cggcgaagaataatgacgttaacgcgttcgataaattgttgtttaaatatatcggttacgtcggtagtaataaagttcgtagtttttggttgggtttatcgagaggtattttattagtattcgttagttttgttcggttattttcggttcgtcgatgatgtaatcgatcggtacgaagatatttttatcgcgcgtcggttcgttttggaacggtacgtttagcgggaagtggcgacgattaatttttacgttcggcgtggtggttgggattagcgtataggtaatgtttaaattttttgtatcgtcgagtaattttttcgggtcggagagtttaaacgttagtttaagtacggtcgtaatcggtgttagcgtaatgtagcgtttgttttaggttagacgtatttttagtatttgttggttttgttattcgtttatgtagataatttcggtgttcggaatcgcgttcgtatcggaattcgttttcgggttggttagtgtaaagtaggggattttttgattacgcgttagacgcggtagatagtgatttttttgttcgttagtgtcgtaatgttgtaatagttcgttcgggtttaatgagtttggtacgtcgacggtaatcgttaggatttcgtttacgtcggagagtttttgtagtacgcgagattgggtataagtcgagaattttagttcgtcgtatttttttttgatgattatcgcgaagaaacgatgttttttaaggtacgtttataatttcggcggtagattcgttagtttatgggtgatttggaaattattcgttattcggtaggttttttttatcgggtcgtcgagaaacgtttgtttttcggcggttaggcgcggttgcggatagttatgtagttttttttagttcggtttgtttggaataagtcgtttttttattaggtggtgttcgtattaatcg

SEQ ID NO: 25016 - DNA, 943 bp, Artificial Sequence
  chemically treated genomic DNA (Homo sapiens) CpG-island No: 25016
cgattaatacgaacaccacctaataaaaaaacgacttattccaaacaaaccgaactaaaaaaaactacataactatccgcaaccgcgcctaaccgccgaaaaacaaacgtttctcgacgacccgataaaaaaaacctaccgaataacgaataatttccaaatcacccataaactaacgaatctaccgccgaaattataaacgtaccttaaaaaacatcgtttcttcgcgataatcatcaaaaaaaaatacgacgaactaaaattctcgacttatacccaatctcgcgtactacaaaaactctccgacgtaaacgaaatcctaacgattaccgtcgacgtaccaaactcattaaacccgaacgaactattacaacattacgacactaacgaacaaaaaaatcactatctaccgcgtctaacgcgtaatcaaaaaatcccctactttacactaaccaacccgaaaacgaattccgatacgaacgcgattccgaacaccgaaattatctacataaacgaataacaaaaccaacaaatactaaaaatacgtctaacctaaaacaaacgctacattacgctaacaccgattacgaccgtacttaaactaacgtttaaactctccgacccgaaaaaattactcgacgatacaaaaaatttaaacattacctatacgctaatcccaaccaccacgccgaacgtaaaaattaatcgtcgccacttcccgctaaacgtaccgttccaaaacgaaccgacgcgcgataaaaatatcttcgtaccgatcgattacatcatcgacgaaccgaaaataaccgaacaaaactaacgaatactaataaaatacctctcgataaacccaaccaaaaactacgaactttattactaccgacgtaaccgatatatttaaacaacaatttatcgaacgcgttaacgtcattattcttcgccg

SEQ ID NO: 25017 - DNA, 679 bp, Artificial Sequence
  chemically treated genomic DNA (Homo sapiens) CpG-island No: 25017
atgtcgttaacgtggttaacgattagcggaatttcggttttttttgtcgtttttagtagattttttgttagacgtgttgttagtttatttagcgtttcgtgaacgttcggttgcgcgattttatttagataggcgaaattcgttgttatcgtaatcgggttatcggaaagcgtattcgtttgatagatcggattcgtcggggttagcgtatttattatattacgacgattatcgaatgcgtttatcggtattttatcgtcgatgattttgtcgaggtaggttaaatttggtattacgtcgtaataattttgtgcgttagttagcgttacgcggaaatcggttattattttatcgatgattagtaacgcgttaaattcgtcgatagcgcgcgcggttacggaaatcgtggaggtttttagtttgtcgattattacgttagtcgtcgtattggtaaagaagtaggttttttttagcgaattattcgttgttagcgttgtcgttaggacgttaattatcgtgtcgttcgtatcggtaacgttatatattttaggcgatagggtgcgttgttttagcgtttgggtagcggtggtaattttttttattgaaggttttattcgtataaaggaaaagcgattattatatcgacgcgtatataaagtttgtcgatttaattggcgat

SEQ ID NO: 25018 - DNA, 679 bp, Artificial Sequence
  chemically treated genomic DNA (Homo sapiens) CpG-island No: 25018
atcgccaattaaatcgacaaactttatatacgcgtcgatataataatcgcttttcctttatacgaataaaaccttcaataaaaaaaattaccaccgctacccaaacgctaaaacaacgcaccctatcgcctaaaatatataacgttaccgatacgaacgacacgataattaacgtcctaacgacaacgctaacaacgaataattcgctaaaaaaaacctacttctttaccaatacgacgactaacgtaataatcgacaaactaaaaacctccacgatttccgtaaccgcgcgcgctatcgacgaatttaacgcgttactaatcatcgataaaataataaccgatttccgcgtaacgctaactaacgcacaaaattattacgacgtaataccaaatttaacctacctcgacaaaatcatcgacgataaaataccgataaacgcattcgataatcgtcgtaatataataaatacgctaaccccgacgaatccgatctatcaaacgaatacgctttccgataacccgattacgataacaacgaatttcgcctatctaaataaaatcgcgcaaccgaacgttcacgaaacgctaaataaactaacaacacgtctaacaaaaaatctactaaaaacgacaaaaaaaaccgaaattccgctaatcgttaaccacgttaacgacat

SEQ ID NO: 25019 - DNA, 679 bp, Artificial Sequence
  chemically treated genomic DNA (Homo sapiens) CpG-island No: 25019
atcgttagttagatcggtagattttgtatgcgcgtcgatgtagtagtcgttttttttttgtgcgggtaaaatttttagtagaagggattgttatcgttgtttagacgttggggtaacgtattttgtcgtttgaagtgtatgacgttatcggtgcgggcgatacggtgattggcgttttggcggtaacgttggtagcgggtaattcgttggaagaagtttgtttttttgttaatgcggcggttggcgtggtggtcggtaaattgggaatttttacggttttcgtgatcgcgcgcgttgtcgacgaatttggcgcgttgttgattatcgatgaagtgatgatcggttttcgcgtagcgttagttggcgtataggattattacggcgtagtgttagatttaatttgtttcggtaaaattatcggcggtggaatgtcggtaggcgtattcggtggtcgtcgtgatgtaatggatgcgttggtttcgacgggttcggtttattaggcgggtacgtttttcggtaattcgattgcgatggtagcgggtttcgtttgtttgaatgaagtcgcgtagtcgggcgtttacgaaacgttggatgagttgataatacgtttggtagaaggtttgttggaagcggtagaagaagtcggaatttcgttggtcgttaattacgttggcggtat

SEQ ID NO: 25020 - DNA, 679 bp, Artificial Sequence
  chemically treated genomic DNA (Homo sapiens) CpG-island No: 25020
ataccgccaacgtaattaacgaccaacgaaattccgacttcttctaccgcttccaacaaaccttctaccaaacgtattatcaactcatccaacgtttcgtaaacgcccgactacgcgacttcattcaaacaaacgaaacccgctaccatcgcaatcgaattaccgaaaaacgtacccgcctaataaaccgaacccgtcgaaaccaacgcatccattacatcacgacgaccaccgaatacgcctaccgacattccaccgccgataattttaccgaaacaaattaaatctaacactacgccgtaataatcctatacgccaactaacgctacgcgaaaaccgatcatcacttcatcgataatcaacaacgcgccaaattcgtcgacaacgcgcgcgatcacgaaaaccgtaaaaattcccaatttaccgaccaccacgccaaccgccgcattaacaaaaaaacaaacttcttccaacgaattacccgctaccaacgttaccgccaaaacgccaatcaccgtatcgcccgcaccgataacgtcatacacttcaaacgacaaaatacgttaccccaacgtctaaacaacgataacaatcccttctactaaaaattttacccgcacaaaaaaaaaacgactactacatcgacgcgcatacaaaatctaccgatctaactaacgat

SEQ ID NO: 25021 - DNA, 742 bp, Artificial Sequence
  chemically treated genomic DNA (Homo sapiens) CpG-island No: 25021
tttcgtcggggtttttttcgttttttttttacggtatatgcgtagattttgatgcgacgttggcgcgttttattatgtttataaatttgtgtttgaacggtaacggataaggcgttacgtcgtattcggtagtgtgtattaatgttggattttataatatataatcgcgatatcgtgtagcggatggatgattcggtggtgcgcgaaagcggcgaaatgttgcgtcgttcgcgggggtatgtgtcggatgcgttggttttgttttcgggttttaaaaatgtttcgtttgtgttgtgtttcggcgcggatttgaaaaatattttttgtttggtgcgcggtgaataagcggtgttgagttagtatttgggcgatttaagtgacgatggtatttagatgtagtggcgcgaagcgttacgtttgatgtaaaatatttacgattttatttcgtaatacgttgtgtatgacgcgtattcgggttatgtttttagttagtgggcgcgtgaaatgaatttgtcgacgtaaacggtattgtattattatgtttatgtagcggcgtgtttggtagagtattagtggtcgttggatggcggtgatgttattgttttgacgttcgacggtatcggtatgggggagaacggcgttttgtggggcggcgagtgttgttataattgaatattattcgttttcgggttttttcgtagtcggatttttacgttatcgtcgttattaattgggagacgga

SEQ ID NO: 25022 - DNA, 742 bp, Artificial Sequence
  chemically treated genomic DNA (Homo sapiens) CpG-island No: 25022
tccgtctcccaattaataacgacgataacgtaaaaatccgactacgaaaaaacccgaaaacgaataatattcaattataacaacactcgccgccccacaaaacgccgttctcccccataccgataccgtcgaacgtcaaaacaataacatcaccgccatccaacgaccactaatactctaccaaacacgccgctacataaacataataatacaataccgtttacgtcgacaaattcatttcacgcgcccactaactaaaaacataacccgaatacgcgtcatacacaacgtattacgaaataaaatcgtaaatattttacatcaaacgtaacgcttcgcgccactacatctaaataccatcgtcacttaaatcgcccaaatactaactcaacaccgcttattcaccgcgcaccaaacaaaaaatatttttcaaatccgcgccgaaacacaacacaaacgaaacatttttaaaacccgaaaacaaaaccaacgcatccgacacatacccccgcgaacgacgcaacatttcgccgctttcgcgcaccaccgaatcatccatccgctacacgatatcgcgattatatattataaaatccaacattaatacacactaccgaatacgacgtaacgccttatccgttaccgttcaaacacaaatttataaacataataaaacgcgccaacgtcgcatcaaaatctacgcatataccgtaaaaaaaaaacgaaaaaaaccccgacgaaa

SEQ ID NO: 25023 - DNA, 742 bp, Artificial Sequence
  chemically treated genomic DNA (Homo sapiens) CpG-island No: 25023
ttcgttttttagttaatgacggcgatggcgtagaagttcggttgcgggaagattcggaaacgggtagtgtttaattgtagtagtattcgtcgttttataaagcgtcgtttttttttatatcgatatcgtcgagcgttaaagtaatgatattatcgttatttagcggttattgatgttttgttagatacgtcgttgtatgggtatgatgatgtagtatcgtttgcgtcggtagatttattttacgcgtttattggttggagatatagttcggatgcgcgttatgtataacgtattgcggggtaaaatcgtagatgttttgtattaggcgtaacgtttcgcgttattgtatttggatgttatcgttatttaaatcgtttagatgttgatttaatatcgtttgtttatcgcgtattaggtagaaggtattttttagattcgcgtcgagatatagtataggcggaatatttttaaagttcggaggtaaagttagcgtattcggtatatattttcgcgaacggcgtagtatttcgtcgttttcgcgtattatcgaattatttattcgttgtacgatgtcgcggttatgtattgtaagatttagtattggtgtatattgtcggatgcggcgtgacgttttattcgttatcgtttaggtataagtttgtaggtatgataagacgcgttagcgtcgtattaggatttgcgtatatatcgtgagggaaaggcgaaaagaatttcggcgagg

SEQ ID NO: 25024 - DNA, 742 bp, Artificial Sequence
  chemically treated genomic DNA (Homo sapiens) CpG-island No: 25024
cctcgccgaaattcttttcgcctttccctcacgatatatacgcaaatcctaatacgacgctaacgcgtcttatcatacctacaaacttatacctaaacgataacgaataaaacgtcacgccgcatccgacaatatacaccaatactaaatcttacaatacataaccgcgacatcgtacaacgaataaataattcgataatacgcgaaaacgacgaaatactacgccgttcgcgaaaatatataccgaatacgctaactttacctccgaactttaaaaatattccgcctatactatatctcgacgcgaatctaaaaaataccttctacctaatacgcgataaacaaacgatattaaatcaacatctaaacgatttaaataacgataacatccaaatacaataacgcgaaacgttacgcctaatacaaaacatctacgattttaccccgcaatacgttatacataacgcgcatccgaactatatctccaaccaataaacgcgtaaaataaatctaccgacgcaaacgatactacatcatcatacccatacaacgacgtatctaacaaaacatcaataaccgctaaataacgataatatcattactttaacgctcgacgatatcgatataaaaaaaaacgacgctttataaaacgacgaatactactacaattaaacactacccgtttccgaatcttcccgcaaccgaacttctacgccatcgccgtcattaactaaaaaacgaa

SEQ ID NO: 25025 - DNA, 765 bp, Artificial Sequence
  chemically treated genomic DNA (Homo sapiens) CpG-island No: 25025
  unsure (300)
tcgtatcgtcgtgtttttcggtttaagttttaatattcgggcgaattggcgtgttttattagttcggtagtatgaattattattcgttagttattttattggagacgacggaagatcgttgtcgaagcggcgttttatcgtttttagtatgacgttttgtattgttttattgttgaagtcgtcggtagtgatcgtttagtgtagtgttttacgattatagtagtttagcgcgaacgtgatacgtagttttttttcgttattatagtagaattcgaattcgttagagtattatcgttgatngtttttttttacggttattttgtttgtatgtgttcgtttcgatggcggtatagtaggttttcgtttaagtaatagcgtattttggcgtatgattcggtaaatacgtttggtattgatcgtaggtatattattaagttttgtttgtttgcgaagtagcgtttatattcgacgataattatacgttggtagtttttcgataatatggtgtatacggagaagtatattcgtattattagtgtgacgattgcggcggttatttatttagttatcggttcgtttgagaatgacgtgtaattgcgtacgcgatattcggagataacggttgattaagtttattttttattttcgggtaataagggcgcgtgcgttatttatttttttgttcgtttatatttaacgagggaaggtgagatggaggggaagaaaggttatagggataagtgagtagagcggttacgtgtggtt

SEQ ID NO: 25026 - DNA, 765 bp, Artificial Sequence
  chemically treated genomic DNA (Homo sapiens) CpG-island No: 25026
  unsure (466)
aaccacacgtaaccgctctactcacttatccctataacctttcttcccctccatctcaccttccctcgttaaatataaacgaacaaaaaaataaataacgcacgcgcccttattacccgaaaataaaaaataaacttaatcaaccgttatctccgaatatcgcgtacgcaattacacgtcattctcaaacgaaccgataactaaataaataaccgccgcaatcgtcacactaataatacgaatatacttctccgtatacaccatattatcgaaaaactaccaacgtataattatcgtcgaatataaacgctacttcgcaaacaaacaaaacttaataatatacctacgatcaataccaaacgtatttaccgaatcatacgccaaaatacgctattacttaaacgaaaacctactataccgccatcgaaacgaacacatacaaacaaaataaccgtaaaaaaaaacnatcaacgataatactctaacgaattcgaattctactataataacgaaaaaaaactacgtatcacgttcgcgctaaactactataatcgtaaaacactacactaaacgatcactaccgacgacttcaacaataaaacaatacaaaacgtcatactaaaaacgataaaacgccgcttcgacaacgatcttccgtcgtctccaataaaataactaacgaataataattcatactaccgaactaataaaacacgccaattcgcccgaatattaaaacttaaaccgaaaaacacgacgatacga

SEQ ID NO: 25027 - DNA, 765 bp, Artificial Sequence
  chemically treated genomic DNA (Homo sapiens) CpG-island No: 25027
  unsure (466)
ggttatacgtagtcgttttgtttatttatttttgtggtttttttttttttttattttattttttttcgttgaatatggacgggtaaaaaagtggatagcgtacgcgtttttattgttcggggatggggagtaagtttagttagtcgttgttttcgggtgtcgcgtgcgtagttgtacgttatttttagacgaatcgatgattggatggatggtcgtcgtagtcgttatattgatgatacggatgtgttttttcgtatatattatgttatcggagagttgttaacgtatggttatcgtcgggtatgggcgttgtttcgtagataggtagaatttgatggtatgtttgcgattaatgttaaacgtgtttatcggattatgcgttagaatgcgttgttgtttgagcgaaaatttgttgtatcgttatcgaaacgggtatatataggtagagtggtcgtgaaagaaagtnattagcgatggtgttttgacgggttcgagttttgttgtgataacggagagagattgcgtgttacgttcgcgttggattgttgtgatcgtgaggtattgtattgggcggttattatcggcggttttaatagtgaaatagtataggacgttatgttgggagcggtggaacgtcgtttcggtaacgatttttcgtcgtttttagtggagtggttgacggataatggtttatgttatcgggttaatgaaatacgttagttcgttcggatgttgggatttgaatcgaagaatacggcggtgcgg

SEQ ID NO: 25028 - DNA, 765 bp, Artificial Sequence
  chemically treated genomic DNA (Homo sapiens) CpG-island No: 25028
  unsure (300)
ccgcaccgccgtattcttcgattcaaatcccaacatccgaacgaactaacgtatttcattaacccgataacataaaccattatccgtcaaccactccactaaaaacgacgaaaaatcgttaccgaaacgacgttccaccgctcccaacataacgtcctatactatttcactattaaaaccgccgataataaccgcccaatacaatacctcacgatcacaacaatccaacgcgaacgtaacacgcaatctctctccgttatcacaacaaaactcgaacccgtcaaaacaccatcgctaatnactttctttcacgaccactctacctatatatacccgtttcgataacgatacaacaaattttcgctcaaacaacaacgcattctaacgcataatccgataaacacgtttaacattaatcgcaaacataccatcaaattctacctatctacgaaacaacgcccatacccgacgataaccatacgttaacaactctccgataacataatatatacgaaaaaacacatccgtatcatcaatataacgactacgacgaccatccatccaatcatcgattcgtctaaaaataacgtacaactacgcacgcgacacccgaaaacaacgactaactaaacttactccccatccccgaacaataaaaacgcgtacgctatccacttttttacccgtccatattcaacgaaaaaaaataaaataaaaaaaaaaaaaaaccacaaaaataaataaacaaaacgactacgtataacc

SEQ ID NO: 25029 - DNA, 940 bp, Artificial Sequence
  chemically treated genomic DNA (Homo sapiens) CpG-island No: 25029
ttacgtcggcggttttttttttatcgatttcgcgttgggtttttacgtcggcggttttttttttatcgatttcgcgttgggtttttacgtcggcggttttttttttatcgatttcgcgttgggtttttacgtcggcggttttttttttatcgatttcgcgttgggtttttacgtcggcggttttttttttatcgatttcgcgttgggtttttacgtcggcggttttttttttatcgatttcgcgttgggtttttacgtcggcggttttttttttatcgatttcgcgttgggtttttacgtcggcggttttttttttatcgatttcgcgttgggtttttacgtcggcggttttttttttatcgatttcgcgttgggtttttacgtcggcggttttttttttatcgatttcgcgttgggtttttacgtcggcggttttttttttatcgatttcgcgttgggtttttacgtcggcggttttttttttatcgatttcgcgttgggtgtttacgtcggcggttttttttttacggatttcgcgttgggtttttacgtcggcggttttttttttatcgatttcgcgttgggtttttacgtcggcggttttttttttatcgatttcgcgttgggtttttacgtcggcggttttttttttatcgatttcgcgttgggtttttacgtcggcggttttttttttatcgatttcgcgttgggtttttacgtcggcggttttttttttatcgatttcgcgttgggtttttacgtcggcggttttttttttatcgatttcgtattgggtttttacgtcggcggttttttttttattgatttcgtattgggtttttacgtcggcggttttttttttattgatttcgtattgggtttttatggtttttttcgtcgagttggtggtttttttataggatttagatgatggtttagt

SEQ ID NO: 25030 - DNA, 940 bp, Artificial Sequence
  chemically treated genomic DNA (Homo sapiens) CpG-island No: 25030
actaaaccatcatctaaatcctataaaaaaaccaccaactcgacgaaaaaaaccataaaaacccaatacgaaatcaataaaaaaaaaaccgccgacgtaaaaacccaatacgaaatcaataaaaaaaaaaccgccgacgtaaaaacccaatacgaaatcgataaaaaaaaaaccgccgacgtaaaaacccaacgcgaaatcgataaaaaaaaaaccgccgacgtaaaaacccaacgcgaaatcgataaaaaaaaaaccgccgacgtaaaaacccaacgcgaaatcgataaaaaaaaaaccgccgacgtaaaaacccaacgcgaaatcgataaaaaaaaaaccgccgacgtaaaaacccaacgcgaaatcgataaaaaaaaaaccgccgacgtaaaaacccaacgcgaaatccgtaaaaaaaaaaccgccgacgtaaacacccaacgcgaaatcgataaaaaaaaaaccgccgacgtaaaaacccaacgcgaaatcgataaaaaaaaaaccgccgacgtaaaaacccaacgcgaaatcgataaaaaaaaaaccgccgacgtaaaaacccaacgcgaaatcgataaaaaaaaaaccgccgacgtaaaaacccaacgcgaaatcgataaaaaaaaaaccgccgacgtaaaaacccaacgcgaaatcgataaaaaaaaaaccgccgacgtaaaaacccaacgcgaaatcgataaaaaaaaaaccgccgacgtaaaaacccaacgcgaaatcgataaaaaaaaaaccgccgacgtaaaaacccaacgcgaaatcgataaaaaaaaaaccgccgacgtaaaaacccaacgcgaaatcgataaaaaaaaaaccgccgacgtaaaaacccaacgcgaaatcgataaaaaaaaaaccgccgacgtaaaaacccaacgcgaaatcgataaaaaaaaaaccgccgacgtaa

SEQ ID NO: 25031 - DNA, 940 bp, Artificial Sequence
  chemically treated genomic DNA (Homo sapiens) CpG-island No: 25031
gttgagttattatttgggttttatggaaagattattaattcgacggaaaaggttatggagatttagtgcggggttagtggagaaaaggtcgtcgacgtggagatttagtgcggggttagtggagaaaaggtcgtcgacgtggagatttagtgcggggtcggtggagaaaaggtcgtcgacgtggggatttagcgcggggtcggtggagaaaaggtcgtcgacgtggggatttagcgcggggtcggtggagaaaaggtcgtcgacgtggggatttagcgcggggtcggtggagaaaaggtcgtcgacgtggagatttagcgcggggtcggtggagaaaaggtcgtcgacgtggggatttagcgcggggtcggtggagaaaaggtcgtcgacgtggagatttagcgcggggttcgtggagaaaaggtcgtcgacgtggatatttagcgcggggtcggtggagaaaaggtcgtcgacgtggggatttagcgcggggtcggtggagaaaaggtcgtcgacgtggggatttagcgcggggtcggtggagaaaaggtcgtcgacgtggggatttagcgcggggtcggtggagaaaaggtcgtcgacgtggggatttagcgcggggtcggtggagaaaaggtcgtcgacgtggggatttagcgcggggtcggtggagaaaaggtcgtcgacgtggagatttagcgcggggtcggtggagaaaaggtcgtcgacgtggagatttagcgcggggtcggtggagaaaaggtcgtcgacgtggagatttagcgcggggtcggtggagaaaaggtcgtcgacgtggagatttagcgcggggtcggtggagaaaaggtcgtcgacgtggagatttagcgcggggtcggtggagaaaaggtcgtcgacgtggagatttagcgcggggtcggtggagaaaaggtcgtcgacgtgg

SEQ ID NO: 25032 - DNA, 940 bp, Artificial Sequence
  chemically treated genomic DNA (Homo sapiens) CpG-island No: 25032
ccacgtcgacgaccttttctccaccgaccccgcgctaaatctccacgtcgacgaccttttctccaccgaccccgcgctaaatctccacgtcgacgaccttttctccaccgaccccgcgctaaatctccacgtcgacgaccttttctccaccgaccccgcgctaaatctccacgtcgacgaccttttctccaccgaccccgcgctaaatctccacgtcgacgaccttttctccaccgaccccgcgctaaatctccacgtcgacgaccttttctccaccgaccccgcgctaaatccccacgtcgacgaccttttctccaccgaccccgcgctaaatccccacgtcgacgaccttttctccaccgaccccgcgctaaatccccacgtcgacgaccttttctccaccgaccccgcgctaaatccccacgtcgacgaccttttctccaccgaccccgcgctaaatccccacgtcgacgaccttttctccaccgaccccgcgctaaatatccacgtcgacgaccttttctccacgaaccccgcgctaaatctccacgtcgacgaccttttctccaccgaccccgcgctaaatccccacgtcgacgaccttttctccaccgaccccgcgctaaatctccacgtcgacgaccttttctccaccgaccccgcgctaaatccccacgtcgacgaccttttctccaccgaccccgcgctaaatccccacgtcgacgaccttttctccaccgaccccgcgctaaatccccacgtcgacgaccttttctccaccgaccccgcactaaatctccacgtcgacgaccttttctccactaaccccgcactaaatctccacgtcgacgaccttttctccactaaccccgcactaaatctccataaccttttccgtcgaattaataatctttccataaaacccaaataataactcaac

SEQ ID NO: 25033 - DNA, 821 bp, Artificial Sequence
  chemically treated genomic DNA (Homo sapiens) CpG-island No: 25033
  unsure (638, 729)
agggttcgcgtgaagtcgttaggtagcgttggatttcgttttatgtagtttaagtttagcgggagtttttaagttcgaattcgtcgcgggtgtaaattttttttataaataagtggttcgcggtttagtttgtaaagtttagttcgggcgttgaatttagtagcgttcgagttggatttcggagtttgttttttttaagtttcgggttcgttttttcgcgggcgcgaggtatttttgagttcgtttcggttttttagatttttagggatcggttgtcggggggttttgagttcgtttcgtttcggttttcgttttcgtcgcggggaattttgggattgtcgttttcgttcgtgtcggaagtttcggcgcggtagcgcgatacgaggttttttagatttagtcgggtagtgtcgttagcgaggcgggtagagttgttcgggtggtatttcgcgtattttgtgtttcggaggtatcgtgaagaagttttttttacgaatatattttagacggatttgttcgtattttagatttgggtttcgttatgtcgagcgttggtttcgttttttttgcgcgtaggcgtagacgcggacggtttcgcggcgtaggcgcgaaagttttttttcgggtttttttttttnagtaacggttattaagagacgttttcgcgggttcgttttaggcgttgggttttagggatggtttcgattgttgtagttcgggttttatttnagggtgaagttcgggtagtcgattcggttgcgtcgtagtgggaggttacggcgatattttaggtgaaggttttttaggtgagacgggttttt

SEQ ID NO: 25034 - DNA, 821 bp, Artificial Sequence
  chemically treated genomic DNA (Homo sapiens) CpG-island No: 25034
  unsure (93, 184)
aaaaacccgtctcacctaaaaaaccttcacctaaaatatcgccgtaacctcccactacgacgcaaccgaatcgactacccgaacttcaccctnaaataaaacccgaactacaacaatcgaaaccatccctaaaacccaacgcctaaaacgaacccgcgaaaacgtctcttaataaccgttactnaaaaaaaaaaacccgaaaaaaaactttcgcgcctacgccgcgaaaccgtccgcgtctacgcctacgcgcaaaaaaaacgaaaccaacgctcgacataacgaaacccaaatctaaaatacgaacaaatccgtctaaaatatattcgtaaaaaaaacttcttcacgatacctccgaaacacaaaatacgcgaaataccacccgaacaactctacccgcctcgctaacgacactacccgactaaatctaaaaaacctcgtatcgcgctaccgcgccgaaacttccgacacgaacgaaaacgacaatcccaaaattccccgcgacgaaaacgaaaaccgaaacgaaacgaactcaaaaccccccgacaaccgatccctaaaaatctaaaaaaccgaaacgaactcaaaaatacctcgcgcccgcgaaaaaacgaacccgaaacttaaaaaaaacaaactccgaaatccaactcgaacgctactaaattcaacgcccgaactaaactttacaaactaaaccgcgaaccacttatttataaaaaaaatttacacccgcgacgaattcgaacttaaaaactcccgctaaacttaaactacataaaacgaaatccaacgctacctaacgacttcacgcgaaccct

SEQ ID NO: 25035 - DNA, 821 bp, Artificial Sequence
  chemically treated genomic DNA (Homo sapiens) CpG-island No: 25035
  unsure (93, 184)
gggaattcgttttatttggaagatttttatttggggtatcgtcgtggttttttattacggcgtagtcgggtcggttgttcgggttttattttnaaataaggttcgaattgtagtagtcggagttatttttggagtttagcgtttagggcggattcgcgggagcgttttttggtaatcgttgttnaggagaggaagttcgggaaggagttttcgcgtttgcgtcgcggggtcgttcgcgtttgcgtttgcgcgtaagagaggcggggttagcgttcggtatggcggagtttagatttggagtgcgagtagattcgtttgaagtgtattcgtaaggagggtttttttacggtgttttcggaatatagggtgcgcggggtgttattcgggtagttttgttcgtttcgttagcggtattgttcggttgggtttggggagtttcgtgtcgcgttgtcgcgtcgaggttttcggtacgggcgggaacgatagttttagagtttttcgcggcgggggcggaagtcggggcggggcgggtttaggatttttcgatagtcggtttttggagatttgaggggtcggggcgggtttagggatgtttcgcgttcgcggagagacgggttcgggatttgggaagagtaagtttcgggatttagttcgggcgttgttgggtttagcgttcgagttgggttttgtaggttgagtcgcgagttatttgtttgtggggagaatttatattcgcgacgagttcgagtttgaaggttttcgttgggtttgggttgtatggagcggggtttagcgttgtttggcggttttacgcgaatttt

SEQ ID NO: 25036 - DNA, 821 bp, Artificial Sequence
  chemically treated genomic DNA (Homo sapiens) CpG-island No: 25036
  unsure (638, 729)
aaaattcgcgtaaaaccgccaaacaacgctaaaccccgctccatacaacccaaacccaacgaaaaccttcaaactcgaactcgtcgcgaatataaattctccccacaaacaaataactcgcgactcaacctacaaaacccaactcgaacgctaaacccaacaacgcccgaactaaatcccgaaacttactcttcccaaatcccgaacccgtctctccgcgaacgcgaaacatccctaaacccgccccgacccctcaaatctccaaaaaccgactatcgaaaaatcctaaacccgccccgccccgacttccgcccccgccgcgaaaaactctaaaactatcgttcccgcccgtaccgaaaacctcgacgcgacaacgcgacacgaaactccccaaacccaaccgaacaataccgctaacgaaacgaacaaaactacccgaataacaccccgcgcaccctatattccgaaaacaccgtaaaaaaaccctccttacgaatacacttcaaacgaatctactcgcactccaaatctaaactccgccataccgaacgctaaccccgcctctcttacgcgcaaacgcaaacgcgaacgaccccgcgacgcaaacgcgaaaactccttcccgaacttcctctcctnaacaacgattaccaaaaaacgctcccgcgaatccgccctaaacgctaaactccaaaaataactccgactactacaattcgaaccttatttnaaaataaaacccgaacaaccgacccgactacgccgtaataaaaaaccacgacgataccccaaataaaaatcttccaaataaaacgaattccc

SEQ ID NO: 25037 - DNA, 958 bp, Artificial Sequence
  chemically treated genomic DNA (Homo sapiens) CpG-island No: 25037
  unsure (55, 631)
ttcgaaaatcggggagttaggggaattcgaaaggttttggggggaaggggttttncgggttcgaagggttcgaggtttcgggggtaaaggatttcgggttgggggtcgggggtttgggaagggtttcggtcggtggtcgggggtcgaggttcgggagaaggggtttcgggtcggtggtagaggttttggggaaggggtttcgggtcggggatcgagggtcgaggttcgggaaaaggggtttcgggttggtggtttaggtattggggaaggggtttcgggtcgggtatcgggggacgaggttcggaaaaagggttttaggtcgtgtcgaggtttggggatggggttcgggtcgggattcggggaggacgatcgggaaaagggtttaagtcgggtgtttaaggttttggggatggggttcgggggatcgacggtcgaggtcgagtttttttgagttttgttcgcggatttaggatgggcggagtttacgttagtgggagaagcggttcgttcgcgcgcgagttttcggaggacggtcgtagatcgtcgttaagcggtttaatgggttataatgataggagtagtattcggagagggagaaggaacgttaatttcggcggtgttagttttcgtnggcgatcgaatcgattaagttgtattcggcggggattttcggggtcgtcgttttattttcggtcgtacgggatgttttcgcgagaggatggtggtcggtttcgttagaggggcggggcgcggttgcgcggcgcgcggtcgttatggtgacgtacgtcgttggcgcgaggattttttgtgagtcgttttcggtttcgcggtcgcggaggtgtggggattcgggtttgcgtcggagggggcggtgggtttatttatgggtttttttaaaagtaaagagaaatttaggaaaggtaaaggaggcgtaggcgttgggtttttcgcgttttcg

SEQ ID NO: 25038 - DNA, 958 bp, Artificial Sequence
  chemically treated genomic DNA (Homo sapiens) CpG-island No: 25038
  unsure (328, 904)
cgaaaacgcgaaaaacccaacgcctacgcctcctttacctttcctaaatttctctttacttttaaaaaaacccataaataaacccaccgccccctccgacgcaaacccgaatccccacacctccgcgaccgcgaaaccgaaaacgactcacaaaaaatcctcgcgccaacgacgtacgtcaccataacgaccgcgcgccgcgcaaccgcgccccgcccctctaacgaaaccgaccaccatcctctcgcgaaaacatcccgtacgaccgaaaataaaacgacgaccccgaaaatccccgccgaatacaacttaatcgattcgatcgccnacgaaaactaacaccgccgaaattaacgttccttctccctctccgaatactactcctatcattataacccattaaaccgcttaacgacgatctacgaccgtcctccgaaaactcgcgcgcgaacgaaccgcttctcccactaacgtaaactccgcccatcctaaatccgcgaacaaaactcaaaaaaactcgacctcgaccgtcgatcccccgaaccccatccccaaaaccttaaacacccgacttaaacccttttcccgatcgtcctccccgaatcccgacccgaaccccatccccaaacctcgacacgacctaaaaccctttttccgaacctcgtcccccgatacccgacccgaaaccccttccccaatacctaaaccaccaacccgaaaccccttttcccgaacctcgaccctcgatccccgacccgaaaccccttccccaaaacctctaccaccgacccgaaaccccttctcccgaacctcgacccccgaccaccgaccgaaacccttcccaaacccccgacccccaacccgaaatcctttacccccgaaacctcgaacccttcgaacccgnaaaaccccttccccccaaaacctttcgaattcccctaactccccgattttcgaa

SEQ ID NO: 25039 - DNA, 958 bp, Artificial Sequence
  chemically treated genomic DNA (Homo sapiens) CpG-island No: 25039
  unsure (328, 904)
cggagacgcggggagtttagcgtttgcgttttttttattttttttgggtttttttttgtttttggaaaggtttatgggtgagtttatcgtttttttcgacgtaagttcgggtttttatattttcgcggtcgcggagtcgggagcgatttataaaaggttttcgcgttagcggcgtgcgttattatggcgatcgcgcgtcgcgtagtcgcgtttcgtttttttggcgggatcggttattattttttcgcgagagtatttcgtgcgatcggaagtggggcggcgatttcggaagttttcgtcgggtgtagtttggtcggttcgatcgttngcgggaattgatatcgtcggagttggcgtttttttttttttttcgagtgttgtttttgttattgtggtttattggatcgtttaacgacggtttgcggtcgtttttcggggattcgcgcgcgggcgggtcgttttttttattggcgtgggtttcgtttattttgggttcgcgggtaggatttaggagagttcggtttcgatcgtcgatttttcggattttatttttagggttttgaatattcgatttggatttttttttcggtcgtttttttcggatttcgattcggattttatttttaggtttcgatacgatttgggatttttttttcgagtttcgtttttcgatattcgattcggaattttttttttagtgtttagattattaattcgggattttttttttcgggtttcgattttcgattttcgattcggaattttttttttagggtttttattatcgattcgggattttttttttcgggtttcgattttcgattatcgatcgggattttttttaggttttcgatttttaattcgagattttttattttcggggtttcggatttttcggattcgngggattttttttttttaaggtttttcggatttttttgatttttcgattttcggg

SEQ ID NO: 25040 - DNA, 958 bp, Artificial Sequence
  chemically treated genomic DNA (Homo sapiens) CpG-island No: 25040
  unsure (55, 631)
cccgaaaatcgaaaaatcaaaaaaatccgaaaaaccttaaaaaaaaaaaatcccncgaatccgaaaaatccgaaaccccgaaaataaaaaatctcgaattaaaaatcgaaaacctaaaaaaaatcccgatcgataatcgaaaatcgaaacccgaaaaaaaaaatcccgaatcgataataaaaaccctaaaaaaaaaattccgaatcgaaaatcgaaaatcgaaacccgaaaaaaaaaatcccgaattaataatctaaacactaaaaaaaaaattccgaatcgaatatcgaaaaacgaaactcgaaaaaaaaatcccaaatcgtatcgaaacctaaaaataaaatccgaatcgaaatccgaaaaaaacgaccgaaaaaaaaatccaaatcgaatattcaaaaccctaaaaataaaatccgaaaaatcgacgatcgaaaccgaactctcctaaatcctacccgcgaacccaaaataaacgaaacccacgccaataaaaaaaacgacccgcccgcgcgcgaatccccgaaaaacgaccgcaaaccgtcgttaaacgatccaataaaccacaataacaaaaacaacactcgaaaaaaaaaaaaaaacgccaactccgacgatatcaattcccgcnaacgatcgaaccgaccaaactacacccgacgaaaacttccgaaatcgccgccccacttccgatcgcacgaaatactctcgcgaaaaaataataaccgatcccgccaaaaaaacgaaacgcgactacgcgacgcgcgatcgccataataacgcacgccgctaacgcgaaaaccttttataaatcgctcccgactccgcgaccgcgaaaatataaaaacccgaacttacgtcgaaaaaaacgataaactcacccataaacctttccaaaaacaaaaaaaaacccaaaaaaaataaaaaaaacgcaaacgctaaactccccgcgtctccg

SEQ ID NO: 25041 - DNA, 1551 bp, Artificial Sequence
  chemically treated genomic DNA (Homo sapiens) CpG-island No: 25041
gatgggatgttttatgtgatgggtgattagatatttcgtgttagcgggagacggaatgtttcgtgtgacgggtgacgggatgttttatgtgatgggtgagatgttttgtgtgattggtgagatgttttatgtgacgggtgatgggatgtttcgtgtgataggtgacgggatgttttatgtgatgggttacgggatgtttcgtgtgacgggtgacgggatgtttcgtgtgataggtgatgggatgtttcgtgtgatgggtgagatgttttatgttagcgggtgacgggatgtttcgtgtgatgggtgagatgttttatgtgacgggtgatgggatgtttcgtgtgacgggtgatggtatgtttcgtgtgacgggtgatgggatgtttcgtgtgatgggtgacgggatgtttcgtgttataggtgacgggatgtttcgtgtgacgggtgagatgttttgtgttagcgggtgatgggatgtttcgtgtgatgggtgagatgttttgtgttagcgggtgacgggatgtttcgtgtgataggtgagatgtttcgtgtgatgggtgatgggatgttttatgtgacgggtgatgggatgtttcgtgtgataggtgagatgtttcgtgttagcgggtgacgggatgtttcgtgtgatgggtgagatgttttgtgtgatgggtgatgggatgtttcgtgtgacgggtgatgggatgtttcgtgtgacgggtgagatgttttgtgttagcgggtgacgggatgtttcgtgtgatgggtgagatgtttcgtgtgatgggtgagatgttttgtgtgatgggtgatgggatgtttcgtgtgacgggtgatgggatgttttatgtgacgggtgatgggatgtttcgtgtgacgggtgatgggatgtttcgtgtgacgggtgagatgttttgtgttagcgggtgacgggatgtttcgtgtgatgggtgagatgttttgtgtttgtaggtgatgggatgtttcgtgtgatgggggagatgtttcgtgttagcgggtgacgggatgtttcgtgtgacgggtgagatgttttgtgttagcgggtgacgggatgtttcgtgtgacgggtgagatgttttgtgttagcgggtgacgggatgttttgtgtgatgggtgagatgtttcgtgtttgtaggtgatgggatgtttcgtgtgacgggtgagatgtttcgtgttagcgggtgataggatgtttcgtgtgatgggtgagatgtttcgtgtgatgggatgtttcgtgtgacgggtgacgggatgttttatgtgacgggtgagatgttttgtgttagcgggtgacgggatgtttcgtgtgatgggtgagatgtttcgtgttagtaggtgacgggatgtttcgtgtgatgggtgagatgtttcgtgtgatgggtgtgggatgtttcgtgtgacgggtgaatgtttcgtgttagcgggtgacgggatgtttcgtgtgatgggtgaatgttttgtgtgatgggtgatgggatgtttcgtgtgatgggtgatgggatgttttatgtgatagatacgggatgtttt

SEQ ID NO: 25042 - DNA, 1551 bp, Artificial Sequence
  chemically treated genomic DNA (Homo sapiens) CpG-island No: 25042
aaaacatcccgtatctatcacataaaacatcccatcacccatcacacgaaacatcccatcacccatcacacaaaacattcacccatcacacgaaacatcccgtcacccgctaacacgaaacattcacccgtcacacgaaacatcccacacccatcacacgaaacatctcacccatcacacgaaacatcccgtcacctactaacacgaaacatctcacccatcacacgaaacatcccgtcacccgctaacacaaaacatctcacccgtcacataaaacatcccgtcacccgtcacacgaaacatcccatcacacgaaacatctcacccatcacacgaaacatcctatcacccgctaacacgaaacatctcacccgtcacacgaaacatcccatcacctacaaacacgaaacatctcacccatcacacaaaacatcccgtcacccgctaacacaaaacatctcacccgtcacacgaaacatcccgtcacccgctaacacaaaacatctcacccgtcacacgaaacatcccgtcacccgctaacacgaaacatctcccccatcacacgaaacatcccatcacctacaaacacaaaacatctcacccatcacacgaaacatcccgtcacccgctaacacaaaacatctcacccgtcacacgaaacatcccatcacccgtcacacgaaacatcccatcacccgtcacataaaacatcccatcacccgtcacacgaaacatcccatcacccatcacacaaaacatctcacccatcacacgaaacatctcacccatcacacgaaacatcccgtcacccgctaacacaaaacatctcacccgtcacacgaaacatcccatcacccgtcacacgaaacatcccatcacccatcacacaaaacatctcacccatcacacgaaacatcccgtcacccgctaacacgaaacatctcacctatcacacgaaacatcccatcacccgtcacataaaacatcccatcacccatcacacgaaacatctcacctatcacacgaaacatcccgtcacccgctaacacaaaacatctcacccatcacacgaaacatcccatcacccgctaacacaaaacatctcacccgtcacacgaaacatcccgtcacctataacacgaaacatcccgtcacccatcacacgaaacatcccatcacccgtcacacgaaacataccatcacccgtcacacgaaacatcccatcacccgtcacataaaacatctcacccatcacacgaaacatcccgtcacccgctaacataaaacatctcacccatcacacgaaacatcccatcacctatcacacgaaacatcccgtcacccgtcacacgaaacatcccgtaacccatcacataaaacatcccgtcacctatcacacgaaacatcccatcacccgtcacataaaacatctcaccaatcacacaaaacatctcacccatcacataaaacatcccgtcacccgtcacacgaaacattccgtctcccgctaacacgaaatatctaatcacccatcacataaaacatcccatc

SEQ ID NO: 25043 - DNA, 1551 bp, Artificial Sequence
  chemically treated genomic DNA (Homo sapiens) CpG-island No: 25043
ggaatatttcgtatttgttatatggaatattttattatttattatacggaatattttattatttattatatagaatatttatttattatacggaatatttcgttattcgttgatacggaatatttattcgttatacggaatattttatatttattatacggaatattttatttattatacggaatatttcgttatttgttgatacggaatattttatttattatacggaatatttcgttattcgttgatatagaatattttattcgttatatggaatatttcgttattcgttatacggaatattttattatacggaatattttatttattatacggaatattttgttattcgttgatacggaatattttattcgttatacggaatattttattatttgtagatacggaatattttatttattatatagaatatttcgttattcgttgatatagaatattttattcgttatacggaatatttcgttattcgttgatatagaatattttattcgttatacggaatatttcgttattcgttgatacggaatattttttttattatacggaatattttattatttgtagatatagaatattttatttattatacggaatatttcgttattcgttgatatagaatattttattcgttatacggaatattttattattcgttatacggaatattttattattcgttatatggaatattttattattcgttatacggaatattttattatttattatatagaatattttatttattatacggaatattttatttattatacggaatatttcgttattcgttgatatagaatattttattcgttatacggaatattttattattcgttatacggaatattttattatttattatatagaatattttatttattatacggaatatttcgttattcgttgatacggaatattttatttgttatacggaatattttattattcgttatatggaatattttattatttattatacggaatattttatttgttatacggaatatttcgttattcgttgatatagaatattttatttattatacggaatattttattattcgttgatatagaatattttattcgttatacggaatatttcgttatttgtaatacggaatatttcgttatttattatacggaatattttattattcgttatacggaatatgttattattcgttatacggaatattttattattcgttatatggaatattttatttattatacggaatatttcgttattcgttgatatggaatattttatttattatacggaatattttattatttgttatacggaatatttcgttattcgttatacggaatatttcgtaatttattatatggaatatttcgttatttgttatacggaatattttattattcgttatatggaatattttattaattatatagaatattttatttattatatggaatatttcgttattcgttatacggaatatttcgtttttcgttgatacggaatatttgattatttattatatggaatattttatt

SEQ ID NO: 25044 - DNA, 1551 bp, Artificial Sequence
  chemically treated genomic DNA (Homo sapiens) CpG-island No: 25044
aataaaatattccatataataaataatcaaatattccgtatcaacgaaaaacgaaatattccgtataacgaataacgaaatattccatataataaataaaatattctatataattaataaaatattccatataacgaataataaaatattccgtataacaaataacgaaatattccatataataaattacgaaatattccgtataacgaataacgaaatattccgtataacaaataataaaatattccgtataataaataaaatattccatatcaacgaataacgaaatattccgtataataaataaaatattccatataacgaataataaaatattccgtataacgaataataacatattccgtataacgaataataaaatattccgtataataaataacgaaatattccgtattacaaataacgaaatattccgtataacgaataaaatattctatatcaacgaataataaaatattccgtataataaataaaatattctatatcaacgaataacgaaatattccgtataacaaataaaatattccgtataataaataataaaatattccatataacgaataataaaatattccgtataacaaataaaatattccgtatcaacgaataacgaaatattccgtataataaataaaatattctatataataaataataaaatattccgtataacgaataataaaatattccgtataacgaataaaatattctatatcaacgaataacgaaatattccgtataataaataaaatattccgtataataaataaaatattctatataataaataataaaatattccgtataacgaataataaaatattccatataacgaataataaaatattccgtataacgaataataaaatattccgtataacgaataaaatattctatatcaacgaataacgaaatattccgtataataaataaaatattctatatctacaaataataaaatattccgtataataaaaaaaatattccgtatcaacgaataacgaaatattccgtataacgaataaaatattctatatcaacgaataacgaaatattccgtataacgaataaaatattctatatcaacgaataacgaaatattctatataataaataaaatattccgtatctacaaataataaaatattccgtataacgaataaaatattccgtatcaacgaataacaaaatattccgtataataaataaaatattccgtataataaaatattccgtataacgaataacgaaatattccatataacgaataaaatattctatatcaacgaataacgaaatattccgtataataaataaaatattccgtatcaacaaataacgaaatattccgtataataaataaaatattccgtataataaatataaaatattccgtataacgaataaatattccgtatcaacgaataacgaaatattccgtataataaataaatattctatataataaataataaaatattccgtataataaataataaaatattccatataacaaatacgaaatattcc

SEQ ID NO: 25045 - DNA, 909 bp, Artificial Sequence
  chemically treated genomic DNA (Homo sapiens) CpG-island No: 25045
gggggcgttggtatcgcgggtggaatttcggtcggcggggtttcgttattggttttggttcgtttcgttcgtttcgttttgtttttcgtttcgtttttttttcgtttcgtttcgtttttagcgcgtcgagcggagtttaacgtcgggttttttaggaatttcgggtcgggtagtattcgcgggattttgttggcgtttttcgttgttatgaagcgggatcggttgggtcgttttttgttttttgggtcgtttcgatagtgcggggtttcggacggcggcggcggcgttagtcggattcggggtcgttttttttttagcggtgggtcgagggtggacggggcgacggcgcggcgcgtttggggttcggtggggttttgcggggacgcgggcgaggacggcgcggacgaggtaggtgggttcgcggttcgggcgtggcgggttggggtcgcggtaggggttgttcgtgggaggagtcgtattgacgttcggaagtcggcgcggttttttttttattcggttaagggcgtagcggattcggggttgcgtcgggataggcgttgggcggtcggttcggtttttttcgcgtttcgtgacgtcggcgtcgtcggttcggttttttcggtcgcgggttcggttagaagggattcggcgtgaggagcgttgttatcgcgggtaggtcgttttggggtgttcgcgcgtgggaatcgtttttttttgtttcgtgttttcgcggagtcggaaaggaggcggtatttgtaattggtagataggaaatcgcggcgttttttggagggcgtagcgtttgtttcgggtttcgcggtcgttgggaggagggtgtagttttaggttttatttttgaagttgtttcgttggagaggttttagaggtttttgaaatttgaaagatttt

SEQ ID NO: 25046 - DNA, 909 bp, Artificial Sequence
  chemically treated genomic DNA (Homo sapiens) CpG-island No: 25046
aaaatctttcaaatttcaaaaacctctaaaacctctccaacgaaacaacttcaaaaataaaacctaaaactacaccctcctcccaacgaccgcgaaacccgaaacaaacgctacgccctccaaaaaacgccgcgatttcctatctaccaattacaaataccgcctcctttccgactccgcgaaaacacgaaacaaaaaaaaacgattcccacgcgcgaacaccccaaaacgacctacccgcgataacaacgctcctcacgccgaatcccttctaaccgaacccgcgaccgaaaaaaccgaaccgacgacgccgacgtcacgaaacgcgaaaaaaaccgaaccgaccgcccaacgcctatcccgacgcaaccccgaatccgctacgcccttaaccgaataaaaaaaaaaccgcgccgacttccgaacgtcaatacgactcctcccacgaacaacccctaccgcgaccccaacccgccacgcccgaaccgcgaacccacctacctcgtccgcgccgtcctcgcccgcgtccccgcaaaaccccaccgaaccccaaacgcgccgcgccgtcgccccgtccaccctcgacccaccgctaaaaaaaaaacgaccccgaatccgactaacgccgccgccgccgtccgaaaccccgcactatcgaaacgacccaaaaaacaaaaaacgacccaaccgatcccgcttcataacaacgaaaaacgccaacaaaatcccgcgaatactacccgacccgaaattcctaaaaaacccgacgttaaactccgctcgacgcgctaaaaacgaaacgaaacgaaaaaaaaacgaaacgaaaaacaaaacgaaacgaacgaaacgaaccaaaaccaataacgaaaccccgccgaccgaaattccacccgcgataccaacgccccc

SEQ ID NO: 25047 - DNA, 909 bp, Artificial Sequence
  chemically treated genomic DNA (Homo sapiens) CpG-island No: 25047
gaaattttttaaattttaaaggtttttaaggtttttttagcgaagtaattttaagagtgaaatttggaattgtattttttttttagcgatcgcgagattcggggtaggcgttgcgttttttaggaaacgtcgcggttttttgtttgttaattgtaggtgtcgtttttttttcggtttcgcgagggtacgaagtaggggagggcgatttttacgcgcgggtattttagggcgatttgttcgcggtgatagcgttttttacgtcgggttttttttggtcgagttcgcggtcggggaggtcgggtcggcgacgtcggcgttacggagcgcgaggaaaatcgagtcggtcgtttagcgtttatttcgacgtagtttcgagttcgttacgtttttggtcgggtggaggagaggtcgcgtcggttttcgggcgttagtgcggttttttttacgagtaatttttgtcgcgattttaattcgttacgttcgggtcgcggatttatttgtttcgttcgcgtcgttttcgttcgcgttttcgtaggattttatcgggttttaggcgcgtcgcgtcgtcgtttcgtttattttcggtttatcgttaagggaagggcggtttcgagttcggttgacgtcgtcgtcgtcgttcgaggtttcgtattgtcgggacgatttaggagataggaagcggtttagtcggtttcgttttatggtagcggaggacgttagtagaatttcgcgggtgttgttcggttcgaggtttttagaggattcggcgttaggtttcgttcggcgcgttggaagcgaggcggggcgggggaggggcggagcgagaagtaaagcgaggcgggcggggcgggttagggttagtggcgggatttcgtcggtcgaggttttattcgcggtgttagcgttttt

SEQ ID NO: 25048 - DNA, 909 bp, Artificial Sequence
  chemically treated genomic DNA (Homo sapiens) CpG-island No: 25048
aaaaacgctaacaccgcgaataaaacctcgaccgacgaaatcccgccactaaccctaacccgccccgcccgcctcgctttacttctcgctccgcccctcccccgccccgcctcgcttccaacgcgccgaacgaaacctaacgccgaatcctctaaaaacctcgaaccgaacaacacccgcgaaattctactaacgtcctccgctaccataaaacgaaaccgactaaaccgcttcctatctcctaaatcgtcccgacaatacgaaacctcgaacgacgacgacgacgtcaaccgaactcgaaaccgcccttcccttaacgataaaccgaaaataaacgaaacgacgacgcgacgcgcctaaaacccgataaaatcctacgaaaacgcgaacgaaaacgacgcgaacgaaacaaataaatccgcgacccgaacgtaacgaattaaaatcgcgacaaaaattactcgtaaaaaaaaccgcactaacgcccgaaaaccgacgcgacctctcctccacccgaccaaaaacgtaacgaactcgaaactacgtcgaaataaacgctaaacgaccgactcgattttcctcgcgctccgtaacgccgacgtcgccgacccgacctccccgaccgcgaactcgaccaaaaaaaacccgacgtaaaaaacgctatcaccgcgaacaaatcgccctaaaatacccgcgcgtaaaaatcgccctcccctacttcgtaccctcgcgaaaccgaaaaaaaaacgacacctacaattaacaaacaaaaaaccgcgacgtttcctaaaaaacgcaacgcctaccccgaatctcgcgatcgctaaaaaaaaaatacaattccaaatttcactcttaaaattacttcgctaaaaaaaccttaaaaacctttaaaatttaaaaaatttc

SEQ ID NO: 25049 - DNA, 1425 bp, Artificial Sequence
  chemically treated genomic DNA (Homo sapiens) CpG-island No: 25049
cgtatttatttgtaatatggtagtgtgcgtttttagatcggagtaattatcggtgtcgttcgaattttagtaatcgtgtttaagggtgacgttagattttgttggcgatagaggttcgtcgtatcgttgcgtacgttacgttttagttagttatttttttcgtcgttacgggttagtcgggtaaggtgtcgttattttgcggacgcgtcgtagttatatcggatgcgattatggcgtttttgtaggtttttagcgtttgcgttggatcgttcgttgtagttttaaatttcgtattatatacgtagtattatcgcgttttttatcgacggtggttgagattttgtttgcgggattaatttattaaacgttcgttgcgttgttgcggtatcgttaagttgcgtttgtgttagcgttacgcgtcgttgtgtgtttagtagaggacggttatcggtagtcggagtatgtattttgattatgtatggtatattagtgttacgttcgacgtgtttgttatacggttagcgaatatcgcgatttttagttagatttaagaatggcgatcggtagttacgatggtttattacgacgtataggatatatcgtgatatgatagacgcgaggtcggacggtgtaattacgtcgttgttggcgttttacgtgtagattagcgtgaggttaatacggcgtggaaggtggattgcgtaggcgtagtatcgatttatcgtttgttgtttattattgtcgttttttttgtatggcggttagcggttatttagtatttgatcgattcgtagtcgattaattagtttttgaatattgttgttttattgcgtacgcggtaggttattgatatgtttagcgtcgttttgttttggttatgattagagaggtatagttcgtaagcgtaaatttgtttcgggtcgttcgatttttgttgcgttagattgcgtattaacgtatcggtttggttgcgttgttcggtttgttagagattttgcgaaagtcggtaagtaatttatacgttgtcggggtttagcgttagtcgttgtcgttgaagtgttgtcgtttgcgtttatttgttttggttttttagtgtttttgtttgttgtgttagacggtcgttttgtaggttgcgttcgatattattaatgttacgtcgttaattggtagagagcgaggcgataaacgttttagttttttttggcgattgttggcggtaaatatttgttagttcgcgtacggcgttagtgttgtcgttgtttatacgtaaggtttgttgataataacgttcggcggcgggataattttttcgcgttatcgttatatcgtttagttttagtattgtataattgtcggtgttatcgatattacgcgtttgttggaataggcgttttgttcggttaggattattggtttttagcgtag

SEQ ID NO: 25050 - DNA, 1425 bp, Artificial Sequence
  chemically treated genomic DNA (Homo sapiens) CpG-island No: 25050
ctacgctaaaaaccaataatcctaaccgaacaaaacgcctattccaacaaacgcgtaatatcgataacaccgacaattatacaatactaaaactaaacgatataacgataacgcgaaaaaattatcccgccgccgaacgttattatcaacaaaccttacgtataaacaacgacaacactaacgccgtacgcgaactaacaaatatttaccgccaacaatcgccaaaaaaaactaaaacgtttatcgcctcgctctctaccaattaacgacgtaacattaataatatcgaacgcaacctacaaaacgaccgtctaacacaacaaacaaaaacactaaaaaaccaaaacaaataaacgcaaacgacaacacttcaacgacaacgactaacgctaaaccccgacaacgtataaattacttaccgactttcgcaaaatctctaacaaaccgaacaacgcaaccaaaccgatacgttaatacgcaatctaacgcaacaaaaatcgaacgacccgaaacaaatttacgcttacgaactatacctctctaatcataaccaaaacaaaacgacgctaaacatatcaataacctaccgcgtacgcaataaaacaacaatattcaaaaactaattaatcgactacgaatcgatcaaatactaaataaccgctaaccgccatacaaaaaaaacgacaataataaacaacaaacgataaatcgatactacgcctacgcaatccaccttccacgccgtattaacctcacgctaatctacacgtaaaacgccaacaacgacgtaattacaccgtccgacctcgcgtctatcatatcacgatatatcctatacgtcgtaataaaccatcgtaactaccgatcgccattcttaaatctaactaaaaatcgcgatattcgctaaccgtataacaaacacgtcgaacgtaacactaatataccatacataatcaaaatacatactccgactaccgataaccgtcctctactaaacacacaacgacgcgtaacgctaacacaaacgcaacttaacgataccgcaacaacgcaacgaacgtttaataaattaatcccgcaaacaaaatctcaaccaccgtcgataaaaaacgcgataatactacgtatataatacgaaatttaaaactacaacgaacgatccaacgcaaacgctaaaaacctacaaaaacgccataatcgcatccgatataactacgacgcgtccgcaaaataacgacaccttacccgactaacccgtaacgacgaaaaaaataactaactaaaacgtaacgtacgcaacgatacgacgaacctctatcgccaacaaaatctaacgtcacccttaaacacgattactaaaattcgaacgacaccgataattactccgatctaaaaacgcacactaccatattacaaataaatacg

SEQ ID NO: 25051 - DNA, 1425 bp, Artificial Sequence
  chemically treated genomic DNA (Homo sapiens) CpG-island No: 25051
ttgcgttgaaagttaataattttgatcgggtagaacgtttgttttagtaggcgcgtaatgtcgataatatcgatagttatgtagtgttggggttgggcgatgtggcgatggcgcgaaaagattatttcgtcgtcgaacgttattattagtagattttgcgtatggatagcggtaatattaacgtcgtgcgcgggttggtaaatatttatcgttagtaatcgttagaaaaagttgaagcgtttatcgtttcgttttttgttagttagcggcgtagtattgatgatatcgaacgtagtttgtaaaacgatcgtttggtatagtaggtagaggtattggaaaattagggtaaatgggcgtaggcggtagtattttagcggtaacgattggcgttggatttcggtagcgtatggattatttatcgattttcgtaggatttttggtaggtcggataacgtagttaggtcgatacgttaatgcgtaatttggcgtagtagaagtcgaacgattcggagtaggtttacgtttacgggttgtatttttttggttatgattaggatagagcggcgttgggtatattaatagtttgtcgcgtgcgtagtggaatagtaatatttaggagttggttaatcgattgcgaatcgattaggtgttggataatcgttaatcgttatgtagagaaagcggtaatagtaggtagtaagcggtaagtcgatgttgcgtttacgtaatttattttttacgtcgtattgattttacgttggtttgtacgtggggcgttaataacgacgtgattatatcgttcgatttcgcgtttgttatattacgatatgttttgtacgtcgtggtagattatcgtaattgtcgatcgttatttttggatttgattggaagtcgcgatattcgttagtcgtgtgataaatacgtcgggcgtggtattgatatgttatgtatggttagaatatatgtttcgattatcgataatcgttttttgttgaatatatagcggcgcgtggcgttggtataggcgtagtttggcgatatcgtagtagcgtagcggacgtttaataagttgatttcgtaggtaaaattttagttatcgtcgatggaaagcgcgatggtgttgcgtgtatggtgcgaagtttgaagttgtagcgggcgatttaacgtaggcgttggaaatttataaagacgttatggtcgtattcggtgtgattacgacgcgttcgtaggataacgatattttattcgattgattcgtaacgacgagaaagatgattggttgaaacgtggcgtgcgtagcgatgcggcggatttttatcgttagtaggatttaacgttatttttgagtacgattattggggttcgagcggtatcggtggttatttcgatttgaaagcgtatattattatgttgtaggtggatgcg

SEQ ID NO: 25052 - DNA, 1425 bp, Artificial Sequence
  chemically treated genomic DNA (Homo sapiens) CpG-island No: 25052
cgcatccacctacaacataataatatacgctttcaaatcgaaataaccaccgataccgctcgaaccccaataatcgtactcaaaaataacgttaaatcctactaacgataaaaatccgccgcatcgctacgcacgccacgtttcaaccaatcatctttctcgtcgttacgaatcaatcgaataaaatatcgttatcctacgaacgcgtcgtaatcacaccgaatacgaccataacgtctttataaatttccaacgcctacgttaaatcgcccgctacaacttcaaacttcgcaccatacacgcaacaccatcgcgctttccatcgacgataactaaaattttacctacgaaatcaacttattaaacgtccgctacgctactacgatatcgccaaactacgcctataccaacgccacgcgccgctatatattcaacaaaaaacgattatcgataatcgaaacatatattctaaccatacataacatatcaataccacgcccgacgtatttatcacacgactaacgaatatcgcgacttccaatcaaatccaaaaataacgatcgacaattacgataatctaccacgacgtacaaaacatatcgtaatataacaaacgcgaaatcgaacgatataatcacgtcgttattaacgccccacgtacaaaccaacgtaaaatcaatacgacgtaaaaaataaattacgtaaacgcaacatcgacttaccgcttactacctactattaccgctttctctacataacgattaacgattatccaacacctaatcgattcgcaatcgattaaccaactcctaaatattactattccactacgcacgcgacaaactattaatatacccaacgccgctctatcctaatcataaccaaaaaaatacaacccgtaaacgtaaacctactccgaatcgttcgacttctactacgccaaattacgcattaacgtatcgacctaactacgttatccgacctaccaaaaatcctacgaaaatcgataaataatccatacgctaccgaaatccaacgccaatcgttaccgctaaaatactaccgcctacgcccatttaccctaattttccaatacctctacctactataccaaacgatcgttttacaaactacgttcgatatcatcaatactacgccgctaactaacaaaaaacgaaacgataaacgcttcaactttttctaacgattactaacgataaatatttaccaacccgcgcacgacgttaatattaccgctatccatacgcaaaatctactaataataacgttcgacgacgaaataatcttttcgcgccatcgccacatcgcccaaccccaacactacataactatcgatattatcgacattacgcgcctactaaaacaaacgttctacccgatcaaaattattaactttcaacgcaa

SEQ ID NO: 25053 - DNA, 521 bp, Artificial Sequence
  chemically treated genomic DNA (Homo sapiens) CpG-island No: 25053
agggcgttcgttaattgggcgttcgtattgaagttattcgtattgtggtattttcgttgaacggttgtatggcggtattggcgggaattgtgtttgttttcgtagattggttttatttttaattagatcggtatcgggttggagatgaaagtaattgtagtttgcgtgttgggcggtattagtttgttcggtggtttcggtgcgattattggtgcggtattcggcgtatggtttttgacgtagatcgatagcgtattggtgttgttgcgtatttcggtatggtggaatgattttatcgcgggtttggttttgttggcggtgttggtgtttgatggacgtttgcgttgtgcgttggaacgtaatttacggcggtaaaaatatgttcgttttatgacgttatcgttattcgttaaattcgtttcgttaggtaaaaaacgggaggtcgtataatgcgtattcgttacggttgggaattggtttttgtcgtattgttcgttattgagattgtcgtatttggtgta

SEQ ID NO: 25054 - DNA, 521 bp, Artificial Sequence
  chemically treated genomic DNA (Homo sapiens) CpG-island No: 25054
tacaccaaatacgacaatctcaataacgaacaatacgacaaaaaccaattcccaaccgtaacgaatacgcattatacgacctcccgttttttacctaacgaaacgaatttaacgaataacgataacgtcataaaacgaacatatttttaccgccgtaaattacgttccaacgcacaacgcaaacgtccatcaaacaccaacaccgccaacaaaaccaaacccgcgataaaatcattccaccataccgaaatacgcaacaacaccaatacgctatcgatctacgtcaaaaaccatacgccgaataccgcaccaataatcgcaccgaaaccaccgaacaaactaataccgcccaacacgcaaactacaattactttcatctccaacccgataccgatctaattaaaaataaaaccaatctacgaaaacaaacacaattcccgccaataccgccatacaaccgttcaacgaaaataccacaatacgaataacttcaatacgaacgcccaattaacgaacgccct

SEQ ID NO: 25055 - DNA, 521 bp, Artificial Sequence
  chemically treated genomic DNA (Homo sapiens) CpG-island No: 25055
tgtattaaatgcgataattttaataacgagtagtgcggtaagagttagtttttaatcgtagcgaatacgtattatgcggtttttcgttttttatttgacgaagcgggtttaacggatggcggtggcgttataaagcgggtatatttttgtcgtcgtagattacgttttagcgtataacgtaggcgtttattaaatattagtatcgttagtagaattagattcgcgataaaattattttattatgtcggaatgcgtaatagtattagtacgttatcgatttgcgttaggaattatgcgtcgagtatcgtattaatgatcgtatcggaattatcgagtaaattaatgtcgtttagtacgtaggttgtaattgtttttatttttagttcggtatcggtttggttggggataaaattaatttgcgagagtaaatataattttcgttagtgtcgttatgtagtcgtttaacgaaaatgttataatgcgaatggttttagtacgaacgtttagttgacgagcgtttt

SEQ ID NO: 25056 - DNA, 521 bp, Artificial Sequence
  chemically treated genomic DNA (Homo sapiens) CpG-island No: 25056
aaaacgctcgtcaactaaacgttcgtactaaaaccattcgcattataacattttcgttaaacgactacataacgacactaacgaaaattatatttactctcgcaaattaattttatccccaaccaaaccgataccgaactaaaaataaaaacaattacaacctacgtactaaacgacattaatttactcgataattccgatacgatcattaatacgatactcgacgcataattcctaacgcaaatcgataacgtactaatactattacgcattccgacataataaaataattttatcgcgaatctaattctactaacgatactaatatttaataaacgcctacgttatacgctaaaacgtaatctacgacgacaaaaatatacccgctttataacgccaccgccatccgttaaacccgcttcgtcaaataaaaaacgaaaaaccgcataatacgtattcgctacgattaaaaactaactcttaccgcactactcgttattaaaattatcgcatttaataca

SEQ ID NO: 25057 - DNA, 510 bp, Artificial Sequence
  chemically treated genomic DNA (Homo sapiens) CpG-island No: 25057
taatagcgcgttaaagtaggtacggttatatcgtcgtcgttgtagttattgacgaagacggaattaggtttttaggcgtcggtttatgcggtgcgcgcgggagaggtcgcgcgtttatatcgtcgcgttaaggtcgtattggttgtcgttggtaagttgtagcgtttgtttttttgatgtgaaacgcgtgattattagtatcggatcgaaaattttttcgcgatttaaggacgtattcgggtttatatttataaagatgtcgggtcgatgcggtagttagttcggcgttacggttatttaataatagttgttttttgttttcgttttttcgaataaagttatggatcgagtcggcgtgggcgtagtcgattaaggtgtttatggtggttgcgggattaagtggattgttcggttgttagttttgcgtttgttgttttaatagggttaagaatttatcgggcgaatgttttttttttaataataagggcgtttcgggaattttatattgtt

SEQ ID NO: 25058 - DNA, 510 bp, Artificial Sequence
  chemically treated genomic DNA (Homo sapiens) CpG-island No: 25058
aacaatataaaattcccgaaacgcccttattattaaaaaaaaaacattcgcccgataaattcttaaccctattaaaacaacaaacgcaaaactaacaaccgaacaatccacttaatcccgcaaccaccataaacaccttaatcgactacgcccacgccgactcgatccataactttattcgaaaaaacgaaaacaaaaaacaactattattaaataaccgtaacgccgaactaactaccgcatcgacccgacatctttataaatataaacccgaatacgtccttaaatcgcgaaaaaattttcgatccgatactaataatcacgcgtttcacatcaaaaaaacaaacgctacaacttaccaacgacaaccaatacgaccttaacgcgacgatataaacgcgcgacctctcccgcgcgcaccgcataaaccgacgcctaaaaacctaattccgtcttcgtcaataactacaacgacgacgatataaccgtacctactttaacgcgctatta

SEQ ID NO: 25059 - DNA, 510 bp, Artificial Sequence
  chemically treated genomic DNA (Homo sapiens) CpG-island No: 25059
aatagtgtggaattttcgaaacgtttttgttgttggaaagagagtattcgttcgatgaatttttagttttgttaaaatagtaggcgtaaaattggtagtcgggtaatttatttgatttcgtaattattatgggtattttaatcgattgcgtttacgtcgattcggtttatagttttattcgggaaggcgaaagtaaagggtaattgttgttggatggtcgtaacgtcgggttggttgtcgtatcggttcgatatttttgtggatgtggattcgaatgcgtttttaagtcgcgaagagattttcggttcggtgttggtggttacgcgttttatattagaagaataggcgttatagtttgttaacgatagttagtacggttttggcgcggcggtatggacgcgcgatttttttcgcgcgtatcgtatgagtcgacgtttgaaagtttggtttcgttttcgttaataattataacgacggcgatatgatcgtgtttgttttggcgcgttgttg

SEQ ID NO: 25060 - DNA, 510 bp, Artificial Sequence
  chemically treated genomic DNA (Homo sapiens) CpG-island No: 25060
caacaacgcgccaaaacaaacacgatcatatcgccgtcgttataattattaacgaaaacgaaaccaaactttcaaacgtcgactcatacgatacgcgcgaaaaaaatcgcgcgtccataccgccgcgccaaaaccgtactaactatcgttaacaaactataacgcctattcttctaatataaaacgcgtaaccaccaacaccgaaccgaaaatctcttcgcgacttaaaaacgcattcgaatccacatccacaaaaatatcgaaccgatacgacaaccaacccgacgttacgaccatccaacaacaattaccctttactttcgccttcccgaataaaactataaaccgaatcgacgtaaacgcaatcgattaaaatacccataataattacgaaatcaaataaattacccgactaccaattttacgcctactattttaacaaaactaaaaattcatcgaacgaatactctctttccaacaacaaaaacgtttcgaaaattccacactatt

SEQ ID NO: 25061 - DNA, 572 bp, Artificial Sequence
  chemically treated genomic DNA (Homo sapiens) CpG-island No: 25061
cgttagcggcgtgcgtaagtcgtgatttattttcgttattagtagcgtgcggttattcgttagttgtttaatattagtcgttatatggttaaaggtacgggtaacggaacgtattttcgaagcgttatatttacgtagcggcggcggaataatttttttattaatttgtaaggttgcgtgttcgagatcgattaacggtcggttttggatacgaataaatagttacgtttcgtttatcgttaatagtataatcgttagcgtatagcggaatagcggagagaaatcgttttgatgaatttcggttagcggtacgcgtatttagatattgggcgatagttaggtttttagttagacgataggcgaatttttgttgattttaacgcgtattttcgtcgggtcgtttagttgttgcgttatttgatggtttaagaatttatagtgttgcgtttaacgtagatttgttttttcggtagtttcgttggagtagagagagatttttagtttacggtagatttttcgacggaaagcgggaggtataattaattgcgtgtcgttttttagttgtagtttgt

SEQ ID NO: 25062 - DNA, 572 bp, Artificial Sequence
  chemically treated genomic DNA (Homo sapiens) CpG-island No: 25062
acaaactacaactaaaaaacgacacgcaattaattatacctcccgctttccgtcgaaaaatctaccgtaaactaaaaatctctctctactccaacgaaactaccgaaaaaacaaatctacgttaaacgcaacactataaattcttaaaccatcaaataacgcaacaactaaacgacccgacgaaaatacgcgttaaaatcaacaaaaattcgcctatcgtctaactaaaaacctaactatcgcccaatatctaaatacgcgtaccgctaaccgaaattcatcaaaacgatttctctccgctattccgctatacgctaacgattatactattaacgataaacgaaacgtaactatttattcgtatccaaaaccgaccgttaatcgatctcgaacacgcaaccttacaaattaataaaaaaattattccgccgccgctacgtaaatataacgcttcgaaaatacgttccgttacccgtacctttaaccatataacgactaatattaaacaactaacgaataaccgcacgctactaataacgaaaataaatcacgacttacgcacgccgctaacg

SEQ ID NO: 25063 - DNA, 572 bp, Artificial Sequence
  chemically treated genomic DNA (Homo sapiens) CpG-island No: 25063
ataaattgtaattggaggacggtacgtagttggttgtgtttttcgtttttcgtcgggagatttatcgtgagttggggatttttttttattttaacgaggttgtcgaagaggtaggtttgcgttgggcgtaatattatgaatttttaagttattagatggcgtagtaattgggcggttcgacggaagtgcgcgttgaggttaataaaagttcgtttgtcgtttggttgaaaatttggttgtcgtttaatatttgggtacgcgtgtcgttgatcgaaatttattagggcgattttttttcgttgtttcgttatacgttggcgattatgttattggcgataggcggggcgtggttgtttattcgtatttagaatcgatcgttggtcgatttcgaatacgtagttttgtaggttggtaaagggattatttcgtcgtcgttgcgtgagtatggcgtttcggaggtgcgtttcgttattcgtgtttttaattatatggcggttggtgttaagtaattggcggatgatcgtacgttgttgatggcgggggtaagttacgatttgcgtacgtcgttgacg

SEQ ID NO: 25064 - DNA, 572 bp, Artificial Sequence
  chemically treated genomic DNA (Homo sapiens) CpG-island No: 25064
cgtcaacgacgtacgcaaatcgtaacttacccccgccatcaacaacgtacgatcatccgccaattacttaacaccaaccgccatataattaaaaacacgaataacgaaacgcacctccgaaacgccatactcacgcaacgacgacgaaataatccctttaccaacctacaaaactacgtattcgaaatcgaccaacgatcgattctaaatacgaataaacaaccacgccccgcctatcgccaataacataatcgccaacgtataacgaaacaacgaaaaaaaatcgccctaataaatttcgatcaacgacacgcgtacccaaatattaaacgacaaccaaattttcaaccaaacgacaaacgaacttttattaacctcaacgcgcacttccgtcgaaccgcccaattactacgccatctaataacttaaaaattcataatattacgcccaacgcaaacctacctcttcgacaacctcgttaaaataaaaaaaaatccccaactcacgataaatctcccgacgaaaaacgaaaaacacaaccaactacgtaccgtcctccaattacaatttat

SEQ ID NO: 25065 - DNA, 501 bp, Artificial Sequence
  chemically treated genomic DNA (Homo sapiens) CpG-island No: 25065
atgaaaaagagtgcgttaaacgcggtgatgattattaggagatttttgtttagtaggttcgggaaattatggagcgtcgtgttgcgggtttgaaattatcggtatgggtcgttgtagtttttgaggtcggagtgaaaaaattaaacgaggaggagtaagatggcgtacgagttgcgtaatttttcgtatattgttattcgattagagttaatttagttggtatttttttaggttgttttcgttttttggaaattgaatcgggttttcgaaggaagcgtgattacgcggcggataatcgtttttttaagttagtaaagaaatatttgataggtttgtcgggatgttataaatttgcgacgttttataaagtacgtttaggattcgttagtatttgcgcgtgcggtcgagtagttattgcgaatagtttcgcgaaagttgtttatacgatatattaagtttagcggtaatataacgtagtagggattgtttaaaagtcgagta

SEQ ID NO: 25066 - DNA, 501 bp, Artificial Sequence
  chemically treated genomic DNA (Homo sapiens) CpG-island No: 25066
tactcgacttttaaacaatccctactacgttatattaccgctaaacttaatatatcgtataaacaactttcgcgaaactattcgcaataactactcgaccgcacgcgcaaatactaacgaatcctaaacgtactttataaaacgtcgcaaatttataacatcccgacaaacctatcaaatatttctttactaacttaaaaaaacgattatccgccgcgtaatcacgcttccttcgaaaacccgattcaatttccaaaaaacgaaaacaacctaaaaaaataccaactaaattaactctaatcgaataacaatatacgaaaaattacgcaactcgtacgccatcttactcctcctcgtttaattttttcactccgacctcaaaaactacaacgacccataccgataatttcaaacccgcaacacgacgctccataatttcccgaacctactaaacaaaaatctcctaataatcatcaccgcgtttaacgcactctttttcat

SEQ ID NO: 25067 - DNA, 501 bp, Artificial Sequence
  chemically treated genomic DNA (Homo sapiens) CpG-island No: 25067
tattcgatttttgaatagtttttgttgcgttatattgtcgttgggtttggtgtgtcgtatgagtagttttcgcgaaattattcgtaatagttattcgatcgtacgcgtaagtgttaacgagttttgggcgtattttatggggcgtcgtaagtttgtggtatttcgataggtttgttagatgtttttttgttggtttgaagaggcgattgttcgtcgcgtggttacgtttttttcgaaagttcggtttagtttttaggaggcgagaatagtttgggggaatgttaattggattggttttggtcgaatggtaatatgcggaagattacgtagttcgtgcgttattttgttttttttcgtttgatttttttatttcggttttaaaagttgtagcggtttatgtcggtggttttagattcgtagtacgacgttttatggtttttcggatttgttgggtaaaaattttttgataattattatcgcgtttggcgtatttttttttat

SEQ ID NO: 25068 - DNA, 501 bp, Artificial Sequence
  chemically treated genomic DNA (Homo sapiens) CpG-island No: 25068
ataaaaaaaaatacgccaaacgcgataataattatcaaaaaatttttacccaacaaatccgaaaaaccataaaacgtcgtactacgaatctaaaaccaccgacataaaccgctacaacttttaaaaccgaaataaaaaaatcaaacgaaaaaaaacaaaataacgcacgaactacgtaatcttccgcatattaccattcgaccaaaaccaatccaattaacattcccccaaactattctcgcctcctaaaaactaaaccgaactttcgaaaaaaacgtaaccacgcgacgaacaatcgcctcttcaaaccaacaaaaaaacatctaacaaacctatcgaaataccacaaacttacgacgccccataaaatacgcccaaaactcgttaacacttacgcgtacgatcgaataactattacgaataatttcgcgaaaactactcatacgacacaccaaacccaacgacaatataacgcaacaaaaactattcaaaaatcgaata

SEQ ID NO: 25069 - DNA, 573 bp, Artificial Sequence
  chemically treated genomic DNA (Homo sapiens) CpG-island No: 25069
  unsure (93)
atcgcggcgatgacgttaaattttagatcgtttgcggtatttgcgttattagaatcgaggcgcgtcgttaataaaatgtcggttatcgtcgtntataatttcgaaagggtaaagataagaatgcgtattcgacgaacgttgatgtcgtataattgcgtcgtcgtagtattatcgttaacggtaaaaatcgagcgttcgaaggcggttttgcggttgatgaatataaatagcgtaaataatataattatgattagcgcggatatcggtatatcgagaaattgttcgtttagttagtttagtatttcgtttttattaatcggtattggtagtgcgttcgttataaatagttttatttcgcgtagggcgttttatagttttagtgtggtaacgaaatttggtatattaaatacgtcgcgtagtatttcggttagcgtttttattagcgcgtttaatagtaatattagtaggtacgttatcgttagcggaattttaaattgtagtaaaaatgttaggtatatcgagataaaagttatttatcggtttaacgttgatattaattttatcggagataat

SEQ ID NO: 25070 - DNA, 573 bp, Artificial Sequence
  chemically treated genomic DNA (Homo sapiens) CpG-island No: 25070
  unsure (481)
attatctccgataaaattaatatcaacgttaaaccgataaataacttttatctcgatatacctaacatttttactacaatttaaaattccgctaacgataacgtacctactaatattactattaaacgcgctaataaaaacgctaaccgaaatactacgcgacgtatttaatataccaaatttcgttaccacactaaaactataaaacgccctacgcgaaataaaactatttataacgaacgcactaccaataccgattaataaaaacgaaatactaaactaactaaacgaacaatttctcgatataccgatatccgcgctaatcataattatattatttacgctatttatattcatcaaccgcaaaaccgccttcgaacgctcgatttttaccgttaacgataatactacgacgacgcaattatacgacatcaacgttcgtcgaatacgcattcttatctttaccctttcgaaattatanacgacgataaccgacattttattaacgacgcgcctcgattctaataacgcaaataccgcaaacgatctaaaatttaacgtcatcgccgcgat

SEQ ID NO: 25071 - DNA, 573 bp, Artificial Sequence
  chemically treated genomic DNA (Homo sapiens) CpG-island No: 25071
  unsure (481)
attattttcggtgaaattgatgttagcgttgggtcgatgggtggtttttgtttcggtgtgtttggtatttttgttgtaatttgaagtttcgttggcggtggcgtgtttgttggtgttgttgttaggcgcgttgatgggaacgttggtcggggtgttgcgcggcgtgtttaatgtattaagtttcgttgttatattggggttgtggagcgttttgcgcggaatggggttgtttatgacgaacgtattgttagtgtcgattgatgaaaacgaggtgttggattggttgggcggataatttttcggtgtgtcggtattcgcgttgattatgattgtgttgtttgcgttgtttgtgtttattagtcgtaaaatcgttttcgggcgttcggtttttgtcgttggcggtaatgttacggcggcgtagttgtgcggtattaacgttcgtcgggtgcgtatttttatttttattttttcgggattatangcggcggtgatcggtattttgttggcggcgcgtttcggttttggtaacgtaggtgtcgtaaacggtttggagtttgacgttatcgtcgcggt

SEQ ID NO: 25072 - DNA, 573 bp, Artificial Sequence
  chemically treated genomic DNA (Homo sapiens) CpG-island No: 25072
  unsure (93)
accgcgacgataacgtcaaactccaaaccgtttacgacacctacgttaccaaaaccgaaacgcgccgccaacaaaataccgatcaccgccgcntataatcccgaaaaaataaaaataaaaatacgcacccgacgaacgttaataccgcacaactacgccgccgtaacattaccgccaacgacaaaaaccgaacgcccgaaaacgattttacgactaataaacacaaacaacgcaaacaacacaatcataatcaacgcgaataccgacacaccgaaaaattatccgcccaaccaatccaacacctcgttttcatcaatcgacactaacaatacgttcgtcataaacaaccccattccgcgcaaaacgctccacaaccccaatataacaacgaaacttaatacattaaacacgccgcgcaacaccccgaccaacgttcccatcaacgcgcctaacaacaacaccaacaaacacgccaccgccaacgaaacttcaaattacaacaaaaataccaaacacaccgaaacaaaaaccacccatcgacccaacgctaacatcaatttcaccgaaaataat

SEQ ID NO: 25073 - DNA, 753 bp, Artificial Sequence
  chemically treated genomic DNA (Homo sapiens) CpG-island No: 25073
gcgatggatttgttgatttattacgattggtcgggaaatattcgtgagttggaaaacgcggtggaacgggtagtggtgttgttgatcggggaatatattttcgaacgcgagttgtcgttggcgattgttagtacgtcgatttcgttgggataaagttaggatatttagtcgttggtggaagtggaaaaagaggtgattttggcggcgttggagaaaacgggcggtaataaaatcgaagtcgttcgttagttagggattacgcgtaaaacgttattggtaaaattgtcgcgttagttttgttcgcgttcgatagcgcgttagtcgatattttttcggtagaagtagtcgttttagtggatatcggttattaaggtataggcgcgtttttgcgtttttgttacggtatgatttagcgcggtgacgtatagtacgcgttcgtcgttggttattatttgttcgttattcgttagttttgtgttcgcgtggaatattttgtcgtttgttattttttttagcggtaggtcgtggattacgttatcggtgcggtaattattcggatatttattcgtagttattattacgtcgagagaagcgcgtttattttattcggacgttttttcgtttagtttgtttttataggtcgttaggtagagtttaattagatcggattttatgcgtagtataatcggttgggttttcggatcgttaaagcggtagttaaatttaataattttcggattgttttgtttgtcg

SEQ ID NO: 25074 - DNA, 753 bp, Artificial Sequence
  chemically treated genomic DNA (Homo sapiens) CpG-island No: 25074
cgacaaacaaaacaatccgaaaattattaaatttaactaccgctttaacgatccgaaaacccaaccgattatactacgcataaaatccgatctaattaaactctacctaacgacctataaaaacaaactaaacgaaaaaacgtccgaataaaataaacgcgcttctctcgacgtaataataactacgaataaatatccgaataattaccgcaccgataacgtaatccacgacctaccgctaaaaaaaataacaaacgacaaaatattccacgcgaacacaaaactaacgaataacgaacaaataataaccaacgacgaacgcgtactatacgtcaccgcgctaaatcataccgtaacaaaaacgcaaaaacgcgcctataccttaataaccgatatccactaaaacgactacttctaccgaaaaaatatcgactaacgcgctatcgaacgcgaacaaaactaacgcgacaattttaccaataacgttttacgcgtaatccctaactaacgaacgacttcgattttattaccgcccgttttctccaacgccgccaaaatcacctctttttccacttccaccaacgactaaatatcctaactttatcccaacgaaatcgacgtactaacaatcgccaacgacaactcgcgttcgaaaatatattccccgatcaacaacaccactacccgttccaccgcgttttccaactcacgaatatttcccgaccaatcgtaataaatcaacaaatccatcgc

SEQ ID NO: 25075 - DNA, 753 bp, Artificial Sequence
  chemically treated genomic DNA (Homo sapiens) CpG-island No: 25075
cgataaatagggtaattcgaaggttattgaatttaattgtcgttttggcgattcggaaatttagtcgattatgttgcgtatgaagttcgatttggttgagttttgtttggcggtttgtgaaagtaaattggacgagaaaacgttcgagtgggatgaacgcgtttttttcggcgtggtgatggttgcgggtggatattcgggtgattatcgtatcggtgacgtgatttacggtttgtcgttggaagaagtggtaggcggtaaagtgttttacgcgggtataaaattggcggatgacgagtaggtagtgattaacggcgggcgcgtattgtgcgttatcgcgttgggttatatcgtggtagaagcgtagaaacgcgtttatgttttaatgatcgatatttattgggacgattgtttttgtcggaaagatatcggttggcgcgttatcgaacgcgagtagaattaacgcgatagttttgttaatagcgttttgcgcgtgatttttaattgacgggcggtttcggttttgttgtcgttcgttttttttagcgtcgttagaattatttttttttttatttttattaacggttgaatattttgattttgttttagcgggatcggcgtattggtaatcgttagcggtagttcgcgttcggaaatatatttttcggttagtagtattattgttcgttttatcgcgttttttagtttacgaatatttttcggttagtcgtaatgaattaatagatttatcgt

SEQ ID NO: 25076 - DNA, 753 bp, Artificial Sequence
  chemically treated genomic DNA (Homo sapiens) CpG-island No: 25076
acgataaatctattaattcattacgactaaccgaaaaatattcgtaaactaaaaaacgcgataaaacgaacaataatactactaaccgaaaaatatatttccgaacgcgaactaccgctaacgattaccaatacgccgatcccgctaaaacaaaatcaaaatattcaaccgttaataaaaataaaaaaaaaaataattctaacgacgctaaaaaaaacgaacgacaacaaaaccgaaaccgcccgtcaattaaaaatcacgcgcaaaacgctattaacaaaactatcgcgttaattctactcgcgttcgataacgcgccaaccgatatctttccgacaaaaacaatcgtcccaataaatatcgatcattaaaacataaacgcgtttctacgcttctaccacgatataacccaacgcgataacgcacaatacgcgcccgccgttaatcactacctactcgtcatccgccaattttatacccgcgtaaaacactttaccgcctaccacttcttccaacgacaaaccgtaaatcacgtcaccgatacgataatcacccgaatatccacccgcaaccatcaccacgccgaaaaaaacgcgttcatcccactcgaacgttttctcgtccaatttactttcacaaaccgccaaacaaaactcaaccaaatcgaacttcatacgcaacataatcgactaaatttccgaatcgccaaaacgacaattaaattcaataaccttcgaattaccctatttatcg

SEQ ID NO: 25077 - DNA, 865 bp, Artificial Sequence
  chemically treated genomic DNA (Homo sapiens) CpG-island No: 25077
tattacggttatgcgcgtttcggtattgcggatatattttggggttcgcgcgatgtgtcggtgacggattttttcggtaatcggttgacgtttattaacgtcgttagtatttgtagcgtttttagtatagatttcgcgtcgtcgattttattttatgtagtagttgtcgcgttttcggtgatattagatgtttttcgcgggtgatgatgtcgaaggcgtttatatggtagggtaggtcgatgggtaggatggttagtacgtttagcgacgcgtagtagcgcgttatttttatcggtattatatgtagtgaattagtttgttgtagtagggtcgtgatgagtagtagggtcgtcgtgtcgacgttgttggacggcggttttagcgcggttcggcggaatattagtttttagcgatggcgtagtacgttgtcggtgggcggtaggatttagggttggtcggttaggttagcgagtttgaggttgttttttttgagtagcggatgatttacgcgcgttacggcgtaggcgggttcgacggttaatttttcgtagtgtaggtcggcggcgttttttttttcgacgatgcggtcgattatgaagtttaatttgtttcgttgtagtatgtttagtaattgtttgttcgattttatgtgtacgtcgatgcgtaagcggggcgtttgtagtttgatgcgcgaaatggcgcgcggtagtagatttatggtcggggttatgatgacgtttatttcgatttggtcggttaagtcgttttttagcgagacgatgtcgtcgtgcgttgtcgatagcgaggttagggttatgcgcgtatggcggattatggtttcgtcgtatagcgtgggttttatgtt

SEQ ID NO: 25078 - DNA, 865 bp, Artificial Sequence
  chemically treated genomic DNA (Homo sapiens) CpG-island No: 25078
aacataaaacccacgctatacgacgaaaccataatccgccatacgcgcataaccctaacctcgctatcgacaacgcacgacgacatcgtctcgctaaaaaacgacttaaccgaccaaatcgaaataaacgtcatcataaccccgaccataaatctactaccgcgcgccatttcgcgcatcaaactacaaacgccccgcttacgcatcgacgtacacataaaatcgaacaaacaattactaaacatactacaacgaaacaaattaaacttcataatcgaccgcatcgtcgaaaaaaaaaacgccgccgacctacactacgaaaaattaaccgtcgaacccgcctacgccgtaacgcgcgtaaatcatccgctactcaaaaaaaacaacctcaaactcgctaacctaaccgaccaaccctaaatcctaccgcccaccgacaacgtactacgccatcgctaaaaactaatattccgccgaaccgcgctaaaaccgccgtccaacaacgtcgacacgacgaccctactactcatcacgaccctactacaacaaactaattcactacatataataccgataaaaataacgcgctactacgcgtcgctaaacgtactaaccatcctacccatcgacctaccctaccatataaacgccttcgacatcatcacccgcgaaaaacatctaatatcaccgaaaacgcgacaactactacataaaataaaatcgacgacgcgaaatctatactaaaaacgctacaaatactaacgacgttaataaacgtcaaccgattaccgaaaaaatccgtcaccgacacatcgcgcgaaccccaaaatatatccgcaataccgaaacgcgcataaccgtaata

SEQ ID NO: 25079 - DNA, 865 bp, Artificial Sequence
  chemically treated genomic DNA (Homo sapiens) CpG-island No: 25079
ggtatggagtttacgttgtacggcgagattatgattcgttatgcgcgtatggttttgatttcgttgtcggtagcgtacgacgatatcgtttcgttgaagaacggtttggtcggttaggtcgaagtgggcgttattatgatttcggttatgggtttgttgtcgcgcgttatttcgcgtattaagttgtaggcgtttcgtttgcgtatcggcgtgtatatggagtcgagtaagtagttgttggatatgttgtagcggggtaagttggattttatgatcggtcgtatcgtcgaagaggaagacgtcgtcggtttgtattacgaggagttgatcgtcgagttcgtttgcgtcgtggcgcgcgtaggttattcgttgtttaaggaagataattttaagttcgttgatttggtcgattagttttggattttgtcgtttatcggtagcgtgttgcgttatcgttgggagttgatgtttcgtcgagtcgcgttggagtcgtcgtttaataacgtcgatacgacggttttgttgtttattacggttttgttgtagtagattgatttattgtatgtgatgtcggtggaggtggcgcgttattacgcgtcgttgaacgtgttggttattttgtttatcgatttgttttgttatatggacgttttcggtattattattcgcgaggggtatttgatgttatcgggggcgcggtagttgttgtatgaggtgaggtcggcggcgcgggatttgtattgaaggcgttataggtattgacggcgttggtgaacgttagtcggttgtcgaagggattcgttatcgatatatcgcgcgaattttagggtgtgttcgtaatgtcggggcgcgtatggtcgtagtg

SEQ ID NO: 25080 - DNA, 865 bp, Artificial Sequence
  chemically treated genomic DNA (Homo sapiens) CpG-island No: 25080
cactacgaccatacgcgccccgacattacgaacacaccctaaaattcgcgcgatatatcgataacgaatcccttcgacaaccgactaacgttcaccaacgccgtcaatacctataacgccttcaatacaaatcccgcgccgccgacctcacctcatacaacaactaccgcgcccccgataacatcaaatacccctcgcgaataataataccgaaaacgtccatataacaaaacaaatcgataaacaaaataaccaacacgttcaacgacgcgtaataacgcgccacctccaccgacatcacatacaataaatcaatctactacaacaaaaccgtaataaacaacaaaaccgtcgtatcgacgttattaaacgacgactccaacgcgactcgacgaaacatcaactcccaacgataacgcaacacgctaccgataaacgacaaaatccaaaactaatcgaccaaatcaacgaacttaaaattatcttccttaaacaacgaataacctacgcgcgccacgacgcaaacgaactcgacgatcaactcctcgtaatacaaaccgacgacgtcttcctcttcgacgatacgaccgatcataaaatccaacttaccccgctacaacatatccaacaactacttactcgactccatatacacgccgatacgcaaacgaaacgcctacaacttaatacgcgaaataacgcgcgacaacaaacccataaccgaaatcataataacgcccacttcgacctaaccgaccaaaccgttcttcaacgaaacgatatcgtcgtacgctaccgacaacgaaatcaaaaccatacgcgcataacgaatcataatctcgccgtacaacgtaaactccatacc

SEQ ID NO: 25081 - DNA, 1002 bp, Artificial Sequence
  chemically treated genomic DNA (Homo sapiens) CpG-island No: 25081
ttcgcgttttacgtcgtattgtcgttttcgttgataagcgttagcggtagttttcggtggtcgtagtgataaagatgagtttttcgcgtcggtgtgtatttcggttttatttgtttggttagttgttttatcgttagttcgtattgcgtaagttacgttcggtttttattgtttacgcggtttgttcggatttttttttttagtttgtttagtagtcgtattagtttagtcgggaatattacgtcgtggtcgtttttattttttttttgttggagcgtttttgttaggttgcgtcgttgcgttttttttcgttcgtcgttttttgtttcgattcggatgagcggcgtgaagtttttcggttcgtatatcgtttggatacgtgtggtgttagtttgtatcgtcgttagtttgttttcgttttagttatattacgttattttcggtttacgcgatagcgatatttatttcgttaggttacgttttcgtcgttagattcgttttgttattcgtcgttttagcgggtcgtagaggtagcggttttcgattagtggttcgttatgttgtattcgcgtgtagaatattaggcggtgttggttgtcgtagtggtagtggtgggttcgttcgtcgttcgttcgtattatattcgtcgggatgcggttcgtttttttcgttagtttgtcgtatttatcgtggcggtagatatagtgcgtatttttcgcgatgcggttattcggttatattgtgagtgtattgttcgggtgtagtttcgggttcggtagtcggttgttcgtcgggttcgtggtatacgggatgcggatgtttaggtttggtgcgagggtgcgtatattttttagtttgttcgtggcgttgtagtcgtattttcgcgtttgtcgcgggtcgttgatgcgtattaggtcgtcgttgttattttattcgtagttacggttatatattaggttgtttaggtgttggttttgtaattggtttgcgggggtgtatgtg

SEQ ID NO: 25082 - DNA, 1002 bp, Artificial Sequence
  chemically treated genomic DNA (Homo sapiens) CpG-island No: 25082
cacatacacccccgcaaaccaattacaaaaccaacacctaaacaacctaatatataaccgtaactacgaataaaataacaacgacgacctaatacgcatcaacgacccgcgacaaacgcgaaaatacgactacaacgccacgaacaaactaaaaaatatacgcaccctcgcaccaaacctaaacatccgcatcccgtataccacgaacccgacgaacaaccgactaccgaacccgaaactacacccgaacaatacactcacaatataaccgaataaccgcatcgcgaaaaatacgcactatatctaccgccacgataaatacgacaaactaacgaaaaaaacgaaccgcatcccgacgaatataatacgaacgaacgacgaacgaacccaccactaccactacgacaaccaacaccgcctaatattctacacgcgaatacaacataacgaaccactaatcgaaaaccgctacctctacgacccgctaaaacgacgaataacaaaacgaatctaacgacgaaaacgtaacctaacgaaataaatatcgctatcgcgtaaaccgaaaataacgtaatataactaaaacgaaaacaaactaacgacgatacaaactaacaccacacgtatccaaacgatatacgaaccgaaaaacttcacgccgctcatccgaatcgaaacaaaaaacgacgaacgaaaaaaaacgcaacgacgcaacctaacaaaaacgctccaacaaaaaaaaaataaaaacgaccacgacgtaatattcccgactaaactaatacgactactaaacaaactaaaaaaaaaaatccgaacaaaccgcgtaaacaataaaaaccgaacgtaacttacgcaatacgaactaacgataaaacaactaaccaaacaaataaaaccgaaatacacaccgacgcgaaaaactcatctttatcactacgaccaccgaaaactaccgctaacgcttatcaacgaaaacgacaatacgacgtaaaacgcgaa

SEQ ID NO: 25083 - DNA, 1002 bp, Artificial Sequence
  chemically treated genomic DNA (Homo sapiens) CpG-island No: 25083
tatatatattttcgtaggttagttatagagttagtatttgaatagtttggtgtatgatcgtgattacgggtggagtgataacggcgatttggtgcgtattagcggttcgcgatagacgcgggaatacggttatagcgttacgggtaggttggagagtgtgcgtattttcgtattagatttggatattcgtatttcgtatgttacggattcggcgggtaatcggttgtcggattcggagttgtattcggatagtatatttatagtgtggtcggataatcgtatcgcggaggatgcgtattatgtttatcgttacgatgaatacggtaggttgacggagaagacggatcgtatttcggcgggtgtgatacggacggacgacgagcggatttattattattattacgatagttagtatcgtttggtgttttatacgcggatatagtatggcgagttattggtcgagagtcgttatttttacgattcgttgggacggcgaatggtaaaacgggtttggcggcgggagcgtgatttgacggggtggatgtcgttgtcgcgtaaatcggaggtgacgtggtatggttgggacggagataggttgacgacggtgtagattgatattatacgtatttagacggtatacgagtcgggaagttttacgtcgtttattcgggtcgagatagagaacggcgagcgggaaaaagcgtagcggcgtagtttggtagagacgttttagtaggaagggagtgagaacggttacggcgtggtgttttcggttgaattggtgcggttgttggataggttggaggaagaaattcgggtagatcgcgtgagtagtgaaagtcgggcgtggtttgcgtagtgcgggttgacggtggagtaattggttagataggtggagtcggaatatatatcggcgcgaaaagtttatttttattattgcgattatcggggattgtcgttggcgtttattagcgaagacggtaatacggcgtggagcgcgga

SEQ ID NO: 25084 - DNA, 1002 bp, Artificial Sequence
  chemically treated genomic DNA (Homo sapiens) CpG-island No: 25084
tccgcgctccacgccgtattaccgtcttcgctaataaacgccaacgacaatccccgataatcgcaataataaaaataaacttttcgcgccgatatatattccgactccacctatctaaccaattactccaccgtcaacccgcactacgcaaaccacgcccgactttcactactcacgcgatctacccgaatttcttcctccaacctatccaacaaccgcaccaattcaaccgaaaacaccacgccgtaaccgttctcactcccttcctactaaaacgtctctaccaaactacgccgctacgctttttcccgctcgccgttctctatctcgacccgaataaacgacgtaaaacttcccgactcgtataccgtctaaatacgtataatatcaatctacaccgtcgtcaacctatctccgtcccaaccataccacgtcacctccgatttacgcgacaacgacatccaccccgtcaaatcacgctcccgccgccaaacccgttttaccattcgccgtcccaacgaatcgtaaaaataacgactctcgaccaataactcgccatactatatccgcgtataaaacaccaaacgatactaactatcgtaataataataataaatccgctcgtcgtccgtccgtatcacacccgccgaaatacgatccgtcttctccgtcaacctaccgtattcatcgtaacgataaacataatacgcatcctccgcgatacgattatccgaccacactataaatatactatccgaatacaactccgaatccgacaaccgattacccgccgaatccgtaacatacgaaatacgaatatccaaatctaatacgaaaatacgcacactctccaacctacccgtaacgctataaccgtattcccgcgtctatcgcgaaccgctaatacgcaccaaatcgccgttatcactccacccgtaatcacgatcatacaccaaactattcaaatactaactctataactaacctacgaaaatatatata

SEQ ID NO: 25085 - DNA, 537 bp, Artificial Sequence
  chemically treated genomic DNA (Homo sapiens) CpG-island No: 25085
  unsure (355)
ggggcgttggtgtcgatttacggtacgttggtgatttcgtttatcgcgttgttgatcgtcgtttcggtgagtttcggtatcgttttgtttttgattgagtttgcgtttggttggttgaaacgttcgttgggtatcgttattgagttgttggtagttattttaagtatcgtttacggtatgtggggtttgtttatttttgcgtcgttgttcgtcgtttatttttaggagtcggtcggtaatattatgtcgaatatttcgattgttggcgcgttgttttttggtttcgtatttggtatcggtattttcgcggtaggcgtgattttcgttattatgattatttcgtatattgcggcgngtatgcgtgatgtgttcgaataaatttcggtgatggataaagagtcggtttacggtattggttgtattatttgggaagttatttggcgtatcgttttttcgtttattaaaatggtgttatcggcggtattatgttgggttgggttcggcgttcggtgaaattatggcggtgattttattatt

SEQ ID NO: 25086 - DNA, 537 bp, Artificial Sequence
  chemically treated genomic DNA (Homo sapiens) CpG-island No: 25086
  unsure (183)
aataataaaatcaccgccataatttcaccgaacgccgaacccaacccaacataataccgccgataacaccattttaataaacgaaaaaacgatacgccaaataacttcccaaataatacaaccaataccgtaaaccgactctttatccatcaccgaaatttattcgaacacatcacgcatacncgccgcaatatacgaaataatcataataacgaaaatcacgcctaccgcgaaaataccgataccaaatacgaaaccaaaaaacaacgcgccaacaatcgaaatattcgacataatattaccgaccgactcctaaaaataaacgacgaacaacgacgcaaaaataaacaaaccccacataccgtaaacgatacttaaaataactaccaacaactcaataacgatacccaacgaacgtttcaaccaaccaaacgcaaactcaatcaaaaacaaaacgataccgaaactcaccgaaacgacgatcaacaacgcgataaacgaaatcaccaacgtaccgtaaatcgacaccaacgcccc

SEQ ID NO: 25087 - DNA, 537 bp, Artificial Sequence
  chemically treated genomic DNA (Homo sapiens) CpG-island No: 25087
  unsure (183)
aatgataaggttatcgttatggttttatcgagcgtcgggtttagtttagtatgatgtcgtcgataatattattttggtgaacggaagaacgatacgttagataattttttaggtggtgtagttaatatcgtaggtcgattttttatttattatcggggtttgttcgaatatattacgtatatncgtcgtaatgtacggaataattatgatggcgaggattacgtttgtcgcgaggatatcgatattaaatgcggggttagagaatagcgcgttaataatcgggatattcgatatgatattgtcgatcggtttttgaaagtaaacggcgaatagcggcgtaaagataaataggttttatatgtcgtaaacgatatttggaatggttgttagtagtttaatggcgatatttagcgggcgttttagttagttaggcgtaagtttagttaggaatagggcgatatcgaaatttatcgggacggcgattagtagcgcgataaacgaagttattaacgtatcgtagatcggtattagcgtttt

SEQ ID NO: 25088 - DNA, 537 bp, Artificial Sequence
  chemically treated genomic DNA (Homo sapiens) CpG-island No: 25088
  unsure (355)
aaaacgctaataccgatctacgatacgttaataacttcgtttatcgcgctactaatcgccgtcccgataaatttcgatatcgccctattcctaactaaacttacgcctaactaactaaaacgcccgctaaatatcgccattaaactactaacaaccattccaaatatcgtttacgacatataaaacctatttatctttacgccgctattcgccgtttactttcaaaaaccgatcgacaatatcatatcgaatatcccgattattaacgcgctattctctaaccccgcatttaatatcgatatcctcgcgacaaacgtaatcctcgccatcataattattccgtacattacgacgnatatacgtaatatattcgaacaaaccccgataataaataaaaaatcgacctacgatattaactacaccacctaaaaaattatctaacgtatcgttcttccgttcaccaaaataatattatcgacgacatcatactaaactaaacccgacgctcgataaaaccataacgataaccttatcatt

SEQ ID NO: 25089 - DNA, 621 bp, Artificial Sequence
  chemically treated genomic DNA (Homo sapiens) CpG-island No: 25089
aatttatgggcgaagtgaatcgtttggtagggaattattcgcggcggtgtagttttatgttggcgcgtatcggttggtcgttgggttatatatttgcgtattagggttcggtggatttttttttgcgtttttgggaagtggatattagtcgtcgtattagtttcgattcgtcgttgtcggtataggtattggaagttagttcgaaaggttattatatttaattagtggtgtagtcgttggggtggtataacgaatcgttgacggtcgtgatgtatggcgacgatgtttcgtagcgtggcgagcgtttattcgttggtttgttatatgcgcggttgtataacggcgacgagcgtatcgaaattcgcgatgaggaatttgttttcgtataagcgtttgataggttgagtgaatgttaaacgttcggaggcgtttttcgcgattcgggttttttaatggtaaggtttgtaatttgtaggtttgataagacgcgttagcgtcgtattaggtattgattgtcggatgcggcgcgaacgttttattcggtttataaaattagtaattttaatacgttgtaaaattgtaggtttgataagacgcggtaagcgtcgtattaggtattgt

SEQ ID NO: 25090 - DNA, 621 bp, Artificial Sequence
  chemically treated genomic DNA (Homo sapiens) CpG-island No: 25090
acaatacctaatacgacgcttaccgcgtcttatcaaacctacaattttacaacgtattaaaattactaattttataaaccgaataaaacgttcgcgccgcatccgacaatcaatacctaatacgacgctaacgcgtcttatcaaacctacaaattacaaaccttaccattaaaaaacccgaatcgcgaaaaacgcctccgaacgtttaacattcactcaacctatcaaacgcttatacgaaaacaaattcctcatcgcgaatttcgatacgctcgtcgccgttatacaaccgcgcatataacaaaccaacgaataaacgctcgccacgctacgaaacatcgtcgccatacatcacgaccgtcaacgattcgttataccaccccaacgactacaccactaattaaatataataacctttcgaactaacttccaatacctataccgacaacgacgaatcgaaactaatacgacgactaatatccacttcccaaaaacgcaaaaaaaaatccaccgaaccctaatacgcaaatatataacccaacgaccaaccgatacgcgccaacataaaactacaccgccgcgaataattccctaccaaacgattcacttcgcccataaatt

SEQ ID NO: 25091 - DNA, 621 bp, Artificial Sequence
  chemically treated genomic DNA (Homo sapiens) CpG-island No: 25091
ataatgtttgatgcgacgtttatcgcgttttattaggtttatagttttataacgtattgaaattgttggttttgtaggtcggataaggcgttcgcgtcgtattcggtaattaatgtttgatgcgacgttggcgcgttttattaggtttataggttataaattttgttattaaaaagttcggatcgcgggaagcgttttcgggcgtttaatatttatttaatttattaggcgtttgtgcgagagtaagttttttatcgcgggtttcgatacgttcgtcgtcgttatatagtcgcgtatgtagtagattaacgaataaacgttcgttacgttgcggggtatcgtcgttatgtattacgatcgttagcggttcgttgtattattttagcggttgtattattaattgggtgtagtgatttttcgggttggtttttagtatttgtatcggtagcggcgaatcgaggttggtacggcggttgatatttattttttaagggcgtaggaagagatttatcggattttgatacgtaggtgtgtagtttagcggttagtcgatgcgcgttaatatggaattgtatcgtcgcgaatggttttttgttaggcggtttatttcgtttataaatt

SEQ ID NO: 25092 - DNA, 621 bp, Artificial Sequence
  chemically treated genomic DNA (Homo sapiens) CpG-island No: 25092
aatttataaacgaaataaaccgcctaacaaaaaaccattcgcgacgatacaattccatattaacgcgcatcgactaaccgctaaactacacacctacgtatcaaaatccgataaatctcttcctacgcccttaaaaaataaatatcaaccgccgtaccaacctcgattcgccgctaccgatacaaatactaaaaaccaacccgaaaaatcactacacccaattaataatacaaccgctaaaataatacaacgaaccgctaacgatcgtaatacataacgacgataccccgcaacgtaacgaacgtttattcgttaatctactacatacgcgactatataacgacgacgaacgtatcgaaacccgcgataaaaaacttactctcgcacaaacgcctaataaattaaataaatattaaacgcccgaaaacgcttcccgcgatccgaactttttaataacaaaatttataacctataaacctaataaaacgcgccaacgtcgcatcaaacattaattaccgaatacgacgcgaacgccttatccgacctacaaaaccaacaatttcaatacgttataaaactataaacctaataaaacgcgataaacgtcgcatcaaacattat

SEQ ID NO: 25093 - DNA, 903 bp, Artificial Sequence
  chemically treated genomic DNA (Homo sapiens) CpG-island No: 25093
ttacgttgttgtttttttcgtgttgatgagcgttagcggtaggtcgcgatggtcgtagtggtataggtggatttttcgcgtcggcgtgtatatcgggtttatttggttttgtatttgttttacggttaggtcgtacgatgttagttagcggcggttttttttatttattcggttagttaggattttattttttagtcggtcgagtatttgtattagtatcggcgggaatattatattgttatcgttttcgtcgtcggattgttgaagggtattcgttaggttgcggcgttgcgttttcgttagtttatcggatgtagtttcgattttgatgagtggcgtgaagtttttcggttgataaatcgtttggatgcggtttttgtcgttttgtatcgtggttagtcggtcgtcgttttagtcgtattaggttatttgcggttttcgtgatagcgatatttagttcgttaggtttcgtttacgtcgttatattcgttttgttattttgcggtttagcgggtcgtaaagatagcgattttcgattagcggttttttatattgtgttcgcgtgtagtgtattagtcggtgttgattgtcgtaatggtatcggtgagttcgtttattattcgtgcggataatttttttcgggatgaggtcggttttttttgttagtttgtcgtgacggttatatcggtaagatgtgcgcgttacgggcgatacggttattcggttatatgttgagggtgttgttcgggtgtagtttcgggtcgggtaggcggttatttgtcgggtttgtggtatacgggattgcggattatttagattcgttgcggtggtgtgaacgtcggttagtttgtcggtgtgttgtagttgtaattttcggtttggcgcggtttgttgattcgatga

SEQ ID NO: 25094 - DNA, 903 bp, Artificial Sequence
  chemically treated genomic DNA (Homo sapiens) CpG-island No: 25094
tcatcgaatcaacaaaccgcgccaaaccgaaaattacaactacaacacaccgacaaactaaccgacgttcacaccaccgcaacgaatctaaataatccgcaatcccgtataccacaaacccgacaaataaccgcctacccgacccgaaactacacccgaacaacaccctcaacatataaccgaataaccgtatcgcccgtaacgcgcacatcttaccgatataaccgtcacgacaaactaacaaaaaaaaccgacctcatcccgaaaaaaattatccgcacgaataataaacgaactcaccgataccattacgacaatcaacaccgactaatacactacacgcgaacacaatataaaaaaccgctaatcgaaaatcgctatctttacgacccgctaaaccgcaaaataacaaaacgaatataacgacgtaaacgaaacctaacgaactaaatatcgctatcacgaaaaccgcaaataacctaatacgactaaaacgacgaccgactaaccacgatacaaaacgacaaaaaccgcatccaaacgatttatcaaccgaaaaacttcacgccactcatcaaaatcgaaactacatccgataaactaacgaaaacgcaacgccgcaacctaacgaatacccttcaacaatccgacgacgaaaacgataacaatataatattcccgccgatactaatacaaatactcgaccgactaaaaaataaaatcctaactaaccgaataaataaaaaaaaccgccgctaactaacatcgtacgacctaaccgtaaaacaaatacaaaaccaaataaacccgatatacacgccgacgcgaaaaatccacctataccactacgaccatcgcgacctaccgctaacgctcatcaacacgaaaaaaacaacaacgtaa

SEQ ID NO: 25095 - DNA, 903 bp, Artificial Sequence
  chemically treated genomic DNA (Homo sapiens) CpG-island No: 25095
ttatcgaattagtaagtcgcgttagatcgggaattatagttatagtatatcggtaggttgatcggcgtttatattatcgtagcgaatttggataattcgtaatttcgtatgttatagattcggtaggtaatcgtttgttcgattcggagttgtattcggatagtatttttagtatgtggtcggataatcgtatcgttcgtgacgcgtatattttatcggtatgatcgttacggtaggttgatagagaaaatcgattttatttcggaaggggttattcgtacggatgatgagcggatttatcggtattattacgatagttagtatcggttggtgtattatacgcggatataatatgaagagtcgttggtcgaaagtcgttatttttacgattcgttgggtcgtagggtggtaaaacgggtgtggcggcgtgaacgggatttgacgggttggatgtcgttgttacggaaatcgtaagtgatttggtacggttgggacggcgatcggttgattacgatatagaacgataggagtcgtatttagacgatttattagtcggggagttttacgttatttattagggtcgaaattgtattcggtgagttggcgaaaacgtagcgtcgtagtttggcggatgttttttagtagttcggcggcgaagacggtggtagtgtggtgttttcgtcggtgttggtgtagatgttcgatcggttggaaagtgaaattttggttgatcgggtgagtgaggaaagtcgtcgttggttggtatcgtgcggtttgatcgtggagtagatgtaaaattagatggattcggtgtatacgtcggcgcgaaaaatttatttgtattattgcgattatcgcggtttgtcgttggcgtttattagtacggaaggggtaatagcgtgg

SEQ ID NO: 25096 - DNA, 903 bp, Artificial Sequence
  chemically treated genomic DNA (Homo sapiens) CpG-island No: 25096
ccacgctattaccccttccgtactaataaacgccaacgacaaaccgcgataatcgcaataatacaaataaatttttcgcgccgacgtatacaccgaatccatctaattttacatctactccacgatcaaaccgcacgataccaaccaacgacgactttcctcactcacccgatcaaccaaaatttcactttccaaccgatcgaacatctacaccaacaccgacgaaaacaccacactaccaccgtcttcgccgccgaactactaaaaaacatccgccaaactacgacgctacgttttcgccaactcaccgaatacaatttcgaccctaataaataacgtaaaactccccgactaataaatcgtctaaatacgactcctatcgttctatatcgtaatcaaccgatcgccgtcccaaccgtaccaaatcacttacgatttccgtaacaacgacatccaacccgtcaaatcccgttcacgccgccacacccgttttaccaccctacgacccaacgaatcgtaaaaataacgactttcgaccaacgactcttcatattatatccgcgtataatacaccaaccgatactaactatcgtaataataccgataaatccgctcatcatccgtacgaataaccccttccgaaataaaatcgattttctctatcaacctaccgtaacgatcataccgataaaatatacgcgtcacgaacgatacgattatccgaccacatactaaaaatactatccgaatacaactccgaatcgaacaaacgattacctaccgaatctataacatacgaaattacgaattatccaaattcgctacgataatataaacgccgatcaacctaccgatatactataactataattcccgatctaacgcgacttactaattcgataa

SEQ ID NO: 25097 - DNA, 587 bp, Artificial Sequence
  chemically treated genomic DNA (Homo sapiens) CpG-island No: 25097
  unsure (49)
tattttgtttatcgatgttcgtatttataacggttggcgggagatattncgttagcgatgagacgttacgggagatttatgttttgatgaaatgggggtcgatattagttaattgtttttcggtacggatcgtgtttattcgtacggtagaaggaaaagaacgtttgcgttcggtattttttagcggtaatttgtaaaaaattttgatcgcgttcgttatcgttatcgtcgtttgggatagtgaattttatgaacggttattattattgtttttttacggtgatgttcgtagttggtttatttttagtttataatttgtcgaagaaatagcgtttcgtaatagttttatgtaggcggtttatttgatcgtcgtttgtcgggcgttgggattggatatcggttcgatgtcgggttttgatcgttaatacgtggacgacgttttttttacgggtagtacgttgaagagtaatttgttgattaatatcggttatggcgatagtagtaagttttatgcgcgtttgttacgtttgttttttgaagaagtttgcgggttgttgtaaggagtaaattatgaatattgtcgatta

SEQ ID NO: 25098 - DNA, 587 bp, Artificial Sequence
  chemically treated genomic DNA (Homo sapiens) CpG-island No: 25098
  unsure (539)
taatcgacaatattcataatttactccttacaacaacccgcaaacttcttcaaaaaacaaacgtaacaaacgcgcataaaacttactactatcgccataaccgatattaatcaacaaattactcttcaacgtactacccgtaaaaaaaacgtcgtccacgtattaacgatcaaaacccgacatcgaaccgatatccaatcccaacgcccgacaaacgacgatcaaataaaccgcctacataaaactattacgaaacgctatttcttcgacaaattataaactaaaaataaaccaactacgaacatcaccgtaaaaaaacaataataataaccgttcataaaattcactatcccaaacgacgataacgataacgaacgcgatcaaaattttttacaaattaccgctaaaaaataccgaacgcaaacgttcttttccttctaccgtacgaataaacacgatccgtaccgaaaaacaattaactaatatcgacccccatttcatcaaaacataaatctcccgtaacgtctcatcgctaacgnaatatctcccgccaaccgttataaatacgaacatcgataaacaaaata

SEQ ID NO: 25099 - DNA, 587 bp, Artificial Sequence
  chemically treated genomic DNA (Homo sapiens) CpG-island No: 25099
  unsure (539)
tgatcgataatgtttatagtttgttttttataatagttcgtaggtttttttaaaggatagacgtggtaggcgcgtataaagtttgttgttatcgttatagtcgatattaattagtagattgttttttagcgtgttgttcgtaaaaaaggcgtcgtttacgtgttgacggttaaagttcgatatcgggtcggtatttagttttagcgttcggtaggcgacgattagataggtcgtttgtatggaattgttgcgaaacgttgttttttcggtaagttgtgggttggaggtaaattaattgcgggtattatcgtggggaaatagtagtggtaatcgtttataaaatttattgttttaggcgacgatagcggtgacgggcgcggttagggttttttgtagattgtcgttggaaagtgtcgggcgtagacgtttttttttttttgtcgtgcgggtaaatacgattcgtgtcggagaatagttagttgatgtcggtttttattttattagggtataaatttttcgtaacgttttatcgttgacgnggtgtttttcgttagtcgttgtgagtgcgggtatcggtgaatagggtg

SEQ ID NO: 25100 - DNA, 587 bp, Artificial Sequence
  chemically treated genomic DNA (Homo sapiens) CpG-island No: 25100
  unsure (49)
caccctattcaccgatacccgcactcacaacgactaacgaaaaacaccncgtcaacgataaaacgttacgaaaaatttataccctaataaaataaaaaccgacatcaactaactattctccgacacgaatcgtatttacccgcacgacaaaaaaaaaaaaacgtctacgcccgacactttccaacgacaatctacaaaaaaccctaaccgcgcccgtcaccgctatcgtcgcctaaaacaataaattttataaacgattaccactactatttccccacgataatacccgcaattaatttacctccaacccacaacttaccgaaaaaacaacgtttcgcaacaattccatacaaacgacctatctaatcgtcgcctaccgaacgctaaaactaaataccgacccgatatcgaactttaaccgtcaacacgtaaacgacgccttttttacgaacaacacgctaaaaaacaatctactaattaatatcgactataacgataacaacaaactttatacgcgcctaccacgtctatcctttaaaaaaacctacgaactattataaaaaacaaactataaacattatcgatca

SEQ ID NO: 25101 - DNA, 548 bp, Artificial Sequence
  chemically treated genomic DNA (Homo sapiens) CpG-island No: 25101
cgtagacgttcgttattcggttcggtttgttttggttttggataatcgggatttattcggtttatcgggtaggcggtggtgtagacggtgtatttaatgtagttttcgaagttggtgttatttattgttggttttttgcgcgttgggtaatttgttgagcggtatgtaaagtattgacggtataaatatcgtcgtcgtatttttgggcgatgggattaaattcgtttagtatcgaatcgatggtaaataggtttttaatggtttgttttgtttgtgacgggcgtagcgttttattagtggttatatcgaattgttgttacggttgcggcgtaaaaaaattttttttatattatttatttcgcgtggcggtttgtagtatattaagggtcgagaatcggttttcgaatgtcgttacgtttcgttattagttcgatattaaagaaattgtcgttggcgagaatcgcgaaacgtggacgtagcggaatatcggcgtgattgcgggtttagatttcgtttattacgttatttttataggttattttttttat

SEQ ID NO: 25102 - DNA, 548 bp, Artificial Sequence
  chemically treated genomic DNA (Homo sapiens) CpG-island No: 25102
ataaaaaaaataacctataaaaataacgtaataaacgaaatctaaacccgcaatcacgccgatattccgctacgtccacgtttcgcgattctcgccaacgacaatttctttaatatcgaactaataacgaaacgtaacgacattcgaaaaccgattctcgacccttaatatactacaaaccgccacgcgaaataaataatataaaaaaaatttttttacgccgcaaccgtaacaacaattcgatataaccactaataaaacgctacgcccgtcacaaacaaaacaaaccattaaaaacctatttaccatcgattcgatactaaacgaatttaatcccatcgcccaaaaatacgacgacgatatttataccgtcaatactttacataccgctcaacaaattacccaacgcgcaaaaaaccaacaataaataacaccaacttcgaaaactacattaaatacaccgtctacaccaccgcctacccgataaaccgaataaatcccgattatccaaaaccaaaacaaaccgaaccgaataacgaacgtctacg

SEQ ID NO: 25103 - DNA, 548 bp, Artificial Sequence
  chemically treated genomic DNA (Homo sapiens) CpG-island No: 25103
gtgaaaaaagtgatttgtaaaaatggcgtagtgaacgaaatttggattcgtaattacgtcgatatttcgttacgtttacgtttcgcggttttcgttagcggtagtttttttagtgtcggattggtagcggaacgtaacggtattcgagagtcgattttcggtttttgatgtgttataaatcgttacgcggggtgaatggtataagggagatttttttgcgtcgtaatcgtggtagtagttcggtgtaattattgatgagacgttacgttcgttataggtagggtaaattattgaaaatttgtttgttatcggttcggtgttgggcggatttgattttatcgtttagggatgcggcggcggtgtttgtgtcgttagtgttttatatgtcgtttaatagattgtttaacgcgtaggaggttaataatgaatgatattagtttcgaaaattgtattaagtgtatcgtttgtattatcgtttgttcggtgagtcgggtgaatttcggttatttagggttaaaataagtcgggtcggatggcgagcgtttgcg

SEQ ID NO: 25104 - DNA, 548 bp, Artificial Sequence
  chemically treated genomic DNA (Homo sapiens) CpG-island No: 25104
cgcaaacgctcgccatccgacccgacttattttaaccctaaataaccgaaattcacccgactcaccgaacaaacgataatacaaacgatacacttaatacaattttcgaaactaatatcattcattattaacctcctacgcgttaaacaatctattaaacgacatataaaacactaacgacacaaacaccgccgccgcatccctaaacgataaaatcaaatccgcccaacaccgaaccgataacaaacaaattttcaataatttaccctacctataacgaacgtaacgtctcatcaataattacaccgaactactaccacgattacgacgcaaaaaaatctcccttataccattcaccccgcgtaacgatttataacacatcaaaaaccgaaaatcgactctcgaataccgttacgttccgctaccaatccgacactaaaaaaactaccgctaacgaaaaccgcgaaacgtaaacgtaacgaaatatcgacgtaattacgaatccaaatttcgttcactacgccatttttacaaatcacttttttcac

SEQ ID NO: 25105 - DNA, 621 bp, Artificial Sequence
  chemically treated genomic DNA (Homo sapiens) CpG-island No: 25105
  unsure (179)
tttagcgcgtcgatcgttagtcgataattgtgtcgttagatagtagattaaagtcggtgaaattttaatcgttgcgttacgtattacgtcgttttttgttgttgatttcgatggtgttcgtcgtttcggtgattatttttttgattttgcgtttcggtattcggcgatttcgtgcgttntcggattttattgtgcgatttgtttaatttgttcgtcgacgttcggagatgttggtttttattcgtattatgttgggattggattatgtcgttgtacgttcgtacgtattagttttgaggagttttattattacgtttcgcgaagaagaacggatcgtggttaagcgttgttttatgggtatgacgtcgaggttattatgataaagttaatcgtcgcgaggtcgaaggttagttatagtaaggtgcgatcgtatatgattaggttgtcggtatttttttttcgcgagtttattatttagttttttagcgtcgtggagatttagattaggatattgaattttggtaggcgcggtatttttaggcgagggagagataaacgtattaatttaattttttcgttagacgggtaaatttattgtttcgttgtttaaagtttttgaat

SEQ ID NO: 25106 - DNA, 621 bp, Artificial Sequence
  chemically treated genomic DNA (Homo sapiens) CpG-island No: 25106
  unsure (443)
attcaaaaactttaaacaacgaaacaataaatttacccgtctaacgaaaaaattaaattaatacgtttatctctccctcgcctaaaaataccgcgcctaccaaaattcaatatcctaatctaaatctccacgacgctaaaaaactaaataataaactcgcgaaaaaaaaataccgacaacctaatcatatacgatcgcaccttactataactaaccttcgacctcgcgacgattaactttatcataataacctcgacgtcatacccataaaacaacgcttaaccacgatccgttcttcttcgcgaaacgtaataataaaactcctcaaaactaatacgtacgaacgtacaacgacataatccaatcccaacataatacgaataaaaaccaacatctccgaacgtcgacgaacaaattaaacaaatcgcacaataaaatccganaacgcacgaaatcgccgaataccgaaacgcaaaatcaaaaaaataatcaccgaaacgacgaacaccatcgaaatcaacaacaaaaaacgacgtaatacgtaacgcaacgattaaaatttcaccgactttaatctactatctaacgacacaattatcgactaacgatcgacgcgctaaa

SEQ ID NO: 25107 - DNA, 621 bp, Artificial Sequence
  chemically treated genomic DNA (Homo sapiens) CpG-island No: 25107
  unsure (443)
gtttaagaattttgaataacgaggtaatgagtttgttcgtttggcgaaggagttaggttgatgcgtttatttttttttcgtttgaaaatgtcgcgtttgttaggatttagtattttggtttggatttttacggcgttaaagggttgggtgatgggttcgcgggaaaaagatatcgatagtttgattatgtacgatcgtattttattgtggttgattttcggtttcgcggcgattggttttattatggtgatttcggcgttatgtttatagggtaacgtttaattacgattcgttttttttcgcgaagcgtgatggtggggttttttaaagttggtgcgtacggacgtatagcggtatgatttagttttagtatggtgcgggtagaggttagtattttcggacgtcggcggataggttagatagatcgtataatagaattcgangacgtacggggtcgtcgggtatcgaggcgtaggattagaaaaatgattatcgaggcggcgagtattatcgggattagtagtagaaagcggcgtaatacgtaacgtaacgattaaggttttatcggttttaatttgttgtttaacggtatagttgtcggttggcgatcggcgcgttagg

SEQ ID NO: 25108 - DNA, 621 bp, Artificial Sequence
  chemically treated genomic DNA (Homo sapiens) CpG-island No: 25108
  unsure (179)
cctaacgcgccgatcgccaaccgacaactataccgttaaacaacaaattaaaaccgataaaaccttaatcgttacgttacgtattacgccgctttctactactaatcccgataatactcgccgcctcgataatcatttttctaatcctacgcctcgatacccgacgaccccgtacgtcntcgaattctattatacgatctatctaacctatccgccgacgtccgaaaatactaacctctacccgcaccatactaaaactaaatcataccgctatacgtccgtacgcaccaactttaaaaaaccccaccatcacgcttcgcgaaaaaaaacgaatcgtaattaaacgttaccctataaacataacgccgaaatcaccataataaaaccaatcgccgcgaaaccgaaaatcaaccacaataaaatacgatcgtacataatcaaactatcgatatctttttcccgcgaacccatcacccaaccctttaacgccgtaaaaatccaaaccaaaatactaaatcctaacaaacgcgacattttcaaacgaaaaaaaaataaacgcatcaacctaactccttcgccaaacgaacaaactcattacctcgttattcaaaattcttaaac

SEQ ID NO: 25109 - DNA, 706 bp, Artificial Sequence
  chemically treated genomic DNA (Homo sapiens) CpG-island No: 25109
  unsure (72)
cgttaattttcgtcgttttcgttattttatttattagcgtggtgatcgtgtttttgtcgttagagtcggtantcgattattattgcgtgggttcggtacgttcgaaggaacgattttcgggttagtttgatcgaagatggtattatttgtcgcgatagttaggtcgtatattatgtgtagaacgtgatcgtcgtcgatggagtagttagttattatcgcgataatcggtttcggataggtacggatttgacgttggaagtttagtatatttaggtgatgtacgtcggaattatttttatagtcgtcgtaattattacgtattttttggttattatcggagtagaacgttttatcgtttgtattagttagaatgattacgtcgatgttgtcgttataacgcgtatttgttagttttatgatgttgtaatattatttgacgtggtttttttgaagcggttgcggaatgtcgtcgattggtttggtatatttgtcgtataaatatttgttgtacgcgatcgtagttacggtttgtataagcggaaagagattgcgttttgtcgatggaatagtaattagtgcgtttcgggggcggtagcgttgaatggcgattatatatgggttgtgatttttatatttgttagtttattgatttttgagttaatcggataggagaggtttggtcgggatcgtacgttaggttagtatt

SEQ ID NO: 25110 - DNA, 706 bp, Artificial Sequence
  chemically treated genomic DNA (Homo sapiens) CpG-island No: 25110
  unsure (635)
aatactaacctaacgtacgatcccgaccaaacctctcctatccgattaactcaaaaatcaataaactaacaaatataaaaatcacaacccatatataatcgccattcaacgctaccgcccccgaaacgcactaattactattccatcgacaaaacgcaatctctttccgcttatacaaaccgtaactacgatcgcgtacaacaaatatttatacgacaaatataccaaaccaatcgacgacattccgcaaccgcttcaaaaaaaccacgtcaaataatattacaacatcataaaactaacaaatacgcgttataacgacaacatcgacgtaatcattctaactaatacaaacgataaaacgttctactccgataataaccaaaaaatacgtaataattacgacgactataaaaataattccgacgtacatcacctaaatatactaaacttccaacgtcaaatccgtacctatccgaaaccgattatcgcgataataactaactactccatcgacgacgatcacgttctacacataatatacgacctaactatcgcgacaaataataccatcttcgatcaaactaacccgaaaatcgttccttcgaacgtaccgaacccacgcaataataatcgantaccgactctaacgacaaaaacacgatcaccacgctaataaataaaataacgaaaacgacgaaaattaacg

SEQ ID NO: 25111 - DNA, 706 bp, Artificial Sequence
  chemically treated genomic DNA (Homo sapiens) CpG-island No: 25111
  unsure (635)
aatattgatttgacgtacggtttcggttagattttttttgttcggttagtttaaaagttagtgaattgataggtatgaggattatagtttatatgtagtcgttatttagcgttgtcgttttcggggcgtattgattgttgttttatcgataagacgtaattttttttcgtttgtataagtcgtaattgcggtcgcgtatagtaagtgtttgtgcggtaagtatgttaaattagtcggcggtatttcgtaatcgttttaggagagttacgttagataatgttgtaatattatggagttggtagatgcgcgttatgacgataatatcggcgtgattattttgattggtgtaggcgataaagcgttttgtttcggtggtgattagaaagtgcgtggtgattacggcggttataaagatgatttcggcgtatattatttgaatgtgttggatttttagcgttagattcgtatttgttcgaaatcggttgtcgcgatggtggttggttattttatcggcggcggttacgttttgtatatgatgtgcgatttgattatcgcggtagataatgttattttcggttagattggttcgaaagtcgttttttcgagcgtgtcggatttacgtagtggtggtcgantatcggttttaacggtaaaagtacggttattacgttagtgggtgaaatggcgaaagcggcgggggttaacg

SEQ ID NO: 25112 - DNA, 706 bp, Artificial Sequence
  chemically treated genomic DNA (Homo sapiens) CpG-island No: 25112
  unsure (72)
cgttaacccccgccgctttcgccatttcacccactaacgtaataaccgtacttttaccgttaaaaccgatantcgaccaccactacgtaaatccgacacgctcgaaaaaacgactttcgaaccaatctaaccgaaaataacattatctaccgcgataatcaaatcgcacatcatatacaaaacgtaaccgccgccgataaaataaccaaccaccatcgcgacaaccgatttcgaacaaatacgaatctaacgctaaaaatccaacacattcaaataatatacgccgaaatcatctttataaccgccgtaatcaccacgcactttctaatcaccaccgaaacaaaacgctttatcgcctacaccaatcaaaataatcacgccgatattatcgtcataacgcgcatctaccaactccataatattacaacattatctaacgtaactctcctaaaacgattacgaaataccgccgactaatttaacatacttaccgcacaaacacttactatacgcgaccgcaattacgacttatacaaacgaaaaaaaattacgtcttatcgataaaacaacaatcaatacgccccgaaaacgacaacgctaaataacgactacatataaactataatcctcatacctatcaattcactaacttttaaactaaccgaacaaaaaaaatctaaccgaaaccgtacgtcaaatcaatatt

SEQ ID NO: 25113 - DNA, 527 bp, Artificial Sequence
  chemically treated genomic DNA (Homo sapiens) CpG-island No: 25113
aagtcgatttcggtacgtcgcgcgttggtattggcgtattatttggcgaatcgtattatttggattaaatacgatgagttgattattggtaattaggtaagcgaagttcgcgtcgcgtcgattttttcggaatatattgtttcgtggatcgaaaaagagattgatgatttggtagatcgtttcgggtatcgaattcgacgtgtattcgtttatattatggtggagtattattcggttatcggtagaatcggcgcgcgataaaggaaaaggatttcgtttatgtttggtcgttggttttaaggggtttcgtagattgtatttcgtttatagcgtaggttaggcgttatgtataatttcggtattgacgtcgttgtgtaagtacgtggcgcgtgggtagatattcgtcgaagttagttattcgagtcgtcgttagtcgaggtttagttatgttttttttgattatttttttgtagttaggcgtaggtttttggattagtgagatcgataacgtcgtcgtaaaattcgtt

SEQ ID NO: 25114 - DNA, 527 bp, Artificial Sequence
  chemically treated genomic DNA (Homo sapiens) CpG-island No: 25114
aacgaattttacgacgacgttatcgatctcactaatccaaaaacctacgcctaactacaaaaaaataatcaaaaaaaacataactaaacctcgactaacgacgactcgaataactaacttcgacgaatatctacccacgcgccacgtacttacacaacgacgtcaataccgaaattatacataacgcctaacctacgctataaacgaaatacaatctacgaaaccccttaaaaccaacgaccaaacataaacgaaatccttttcctttatcgcgcgccgattctaccgataaccgaataatactccaccataatataaacgaatacacgtcgaattcgatacccgaaacgatctaccaaatcatcaatctctttttcgatccacgaaacaatatattccgaaaaaatcgacgcgacgcgaacttcgcttacctaattaccaataatcaactcatcgtatttaatccaaataatacgattcgccaaataatacgccaataccaacgcgcgacgtaccgaaatcgactt

SEQ ID NO: 25115 - DNA, 527 bp, Artificial Sequence
  chemically treated genomic DNA (Homo sapiens) CpG-island No: 25115
ggcgagttttacggcggcgttgtcgattttattaatttagaagtttacgtttggttataaggaagtgattaaaaagaatatgattgaatttcggttagcggcggttcggatggttgatttcggcgagtatttgtttacgcgttacgtatttgtataacggcgttagtgtcgaaattatgtataacgtttggtttgcgttgtgggcgaagtgtaatttacgaagttttttgaagttaacggttaagtataggcgagattttttttttttatcgcgcgtcggttttatcggtagtcgagtaatattttattatgatgtgggcgggtatacgtcgagttcggtattcgggacgatttgttagattattaatttttttttcgatttacgagatagtatatttcgggaagatcggcgcggcgcgaatttcgtttgtttggttgttaatgattaatttatcgtgtttgatttagatggtgcgattcgttaggtgatgcgttagtgttagcgcgcgacgtatcgggatcggttt

SEQ ID NO: 25116 - DNA, 527 bp, Artificial Sequence
  chemically treated genomic DNA (Homo sapiens) CpG-island No: 25116
aaaccgatcccgatacgtcgcgcgctaacactaacgcatcacctaacgaatcgcaccatctaaatcaaacacgataaattaatcattaacaaccaaacaaacgaaattcgcgccgcgccgatcttcccgaaatatactatctcgtaaatcgaaaaaaaaattaataatctaacaaatcgtcccgaataccgaactcgacgtatacccgcccacatcataataaaatattactcgactaccgataaaaccgacgcgcgataaaaaaaaaaaatctcgcctatacttaaccgttaacttcaaaaaacttcgtaaattacacttcgcccacaacgcaaaccaaacgttatacataatttcgacactaacgccgttatacaaatacgtaacgcgtaaacaaatactcgccgaaatcaaccatccgaaccgccgctaaccgaaattcaatcatattctttttaatcacttccttataaccaaacgtaaacttctaaattaataaaatcgacaacgccgccgtaaaactcgcc

SEQ ID NO: 25117 - DNA, 698 bp, Artificial Sequence
  chemically treated genomic DNA (Homo sapiens) CpG-island No: 25117
  unsure (440, 443, 504, 600)
tgttgcgcgtaatttaatagtttatgcgcggtagatcgtagagtatataacgaggcgttagcgtaagcggtatgaagtaacgtttgaattggttgggcgaatagcgaatttttttataattgatcggtagtatgacgaatatgttcgaggttcgttagatcggtatgacgttagcgtttgttaagcgcggtatgggtaaaattttttatttagcgttgttgttttggcggtggtaatttatcgttgttggttaatttatagcgcgttcgattcgttaggtagttttatatcgacgatatcggaaatatttgttgtggcgtaatatagttttttattagcgtttcggaaattagtgttcgtatttggtcggcgtcgttattgttacgattttgttgatcgaatttattgattagtacgtatagcggtatcgatttgtttancgntaaaatcgttttacggatttttttatcggagatcgattttcgttgcgtataatatagtatncgtagtatcggcgagaggcgtggtagtttgttgttaaggtttttttggaaatgtcggtggtcggtttatattggttcgggggtatttataacgttnattggtcggggaaattttttagtttcgttatgtggaaatttttttaaaatcgcgaattttttcgggcggtataaattttaaggggattttcgtaatgt

SEQ ID NO: 25118 - DNA, 698 bp, Artificial Sequence
  chemically treated genomic DNA (Homo sapiens) CpG-island No: 25118
  unsure (99, 195, 256, 259)
acattacgaaaatccccttaaaatttataccgcccgaaaaaattcgcgattttaaaaaaatttccacataacgaaactaaaaaatttccccgaccaatnaacgttataaatacccccgaaccaatataaaccgaccaccgacatttccaaaaaaaccttaacaacaaactaccacgcctctcgccgatactacgnatactatattatacgcaacgaaaatcgatctccgataaaaaaatccgtaaaacgattttancgntaaacaaatcgataccgctatacgtactaatcaataaattcgatcaacaaaatcgtaacaataacgacgccgaccaaatacgaacactaatttccgaaacgctaataaaaaactatattacgccacaacaaatatttccgatatcgtcgatataaaactacctaacgaatcgaacgcgctataaattaaccaacaacgataaattaccaccgccaaaacaacaacgctaaataaaaaattttacccataccgcgcttaacaaacgctaacgtcataccgatctaacgaacctcgaacatattcgtcatactaccgatcaattataaaaaaattcgctattcgcccaaccaattcaaacgttacttcataccgcttacgctaacgcctcgttatatactctacgatctaccgcgcataaactattaaattacgcgcaaca

SEQ ID NO: 25119 - DNA, 698 bp, Artificial Sequence
  chemically treated genomic DNA (Homo sapiens) CpG-island No: 25119
  unsure (99, 195, 256, 259)
gtattgcgaaaatttttttaaaatttgtatcgttcgggggaattcgcggttttaaagggatttttatataacggggttgagagattttttcggttagtngacgttatggatattttcgggttaatgtaagtcggttatcggtatttttaaaaaagttttaatagtaagttgttacgtttttcgtcggtattgcgngtgttgtattatacgtaacggaaatcgattttcgatgaagaggttcgtgaggcgattttgncgntgggtaaatcggtgtcgttgtacgtgttggttaataagttcgattaataggatcgtaatagtgacgacgtcgattaggtgcgggtattgattttcgggacgttgatgaaaggttgtattacgttatagtagatattttcggtgtcgtcgatgtggggttatttggcgaatcgggcgcgttatgagttagttaataacggtaagttattatcgttagagtaataacgttgggtggaagattttgtttatgtcgcgtttggtaggcgttggcgttatgtcgatttggcggatttcgaatatattcgttatgttgtcgattagttgtgggaagattcgttgttcgtttagttaatttaggcgttgttttatgtcgtttacgttaacgtttcgttgtatgttttgcgatttgtcgcgtataaattgttgaattacgcgtagta

SEQ ID NO: 25120 - DNA, 698 bp, Artificial Sequence
  chemically treated genomic DNA (Homo sapiens) CpG-island No: 25120
  unsure (440, 443, 504, 600)
tactacgcgtaattcaacaatttatacgcgacaaatcgcaaaacatacaacgaaacgttaacgtaaacgacataaaacaacgcctaaattaactaaacgaacaacgaatcttcccacaactaatcgacaacataacgaatatattcgaaatccgccaaatcgacataacgccaacgcctaccaaacgcgacataaacaaaatcttccacccaacgttattactctaacgataataacttaccgttattaactaactcataacgcgcccgattcgccaaataaccccacatcgacgacaccgaaaatatctactataacgtaatacaacctttcatcaacgtcccgaaaatcaatacccgcacctaatcgacgtcgtcactattacgatcctattaatcgaacttattaaccaacacgtacaacgacaccgatttacccancgncaaaatcgcctcacgaacctcttcatcgaaaatcgatttccgttacgtataatacaacacncgcaataccgacgaaaaacgtaacaacttactattaaaacttttttaaaaataccgataaccgacttacattaacccgaaaatatccataacgtcnactaaccgaaaaaatctctcaaccccgttatataaaaatccctttaaaaccgcgaattcccccgaacgatacaaattttaaaaaaattttcgcaatac

SEQ ID NO: 25121 - DNA, 878 bp, Artificial Sequence
  chemically treated genomic DNA (Homo sapiens) CpG-island No: 25121
gataattatcgttattagtcgggtagcggtattttggatttttacgcgttgtttgaatagttgcgcgcggataattattagggttatgtagtgtacgaagggcgtattcgggcggaagattttgtttaggcgtatcgtgattcgttggtttggttgcgtatttgttaagaggtttttgtgaaaagtgtaatgataagtttttcgttgcgggtcgcgataataggcgtaggttaggtggcggataaggtttatgtttcgtattattgtattcgtaacgatttggaattggtggttgtttgtgatagtcgttttttttaggcgtaggcgttggtagaaaaatacgggaatgtattcgtgtgggacgattcgtaggttatgttgttggcggtgaaatttgatgtggttagcgtttgtttatttaatcgtttttattacgaatatattttgatggtattggaagcggggttgttatgtgatgtgcgaaaaatcgttcgttatgacgttagaataggcgcgggaaatgtgcgatatcgcgcgtaaattgggtaaggtgttggtttacgatttttattatcgttttgcgttcgatacgtaatagttgcgtgaataggtgattaacggcgttttgggagagatttacgttattatcgttcgcgttttgcgtcgttgcggcgttttcggttggggtgtttttattaataaagaattgtagggtggtggttcgttgatcgatatcggtatttatatgttggatgttgcgatgtatgtgttgggtttttcggcggtgaaaagcgtgaatgcgtatagtttttaaaagatcggtacgtaaaagagttgtggttaatttggtgagtgggattcggtaatttatagcgtcg

SEQ ID NO: 25122 - DNA, 878 bp, Artificial Sequence
  chemically treated genomic DNA (Homo sapiens) CpG-island No: 25122
cgacgctataaattaccgaatcccactcaccaaattaaccacaactcttttacgtaccgatcttttaaaaactatacgcattcacgcttttcaccgccgaaaaacccaacacatacatcgcaacatccaacatataaataccgatatcgatcaacgaaccaccaccctacaattctttattaataaaaacaccccaaccgaaaacgccgcaacgacgcaaaacgcgaacgataataacgtaaatctctcccaaaacgccgttaatcacctattcacgcaactattacgtatcgaacgcaaaacgataataaaaatcgtaaaccaacaccttacccaatttacgcgcgatatcgcacatttcccgcgcctattctaacgtcataacgaacgatttttcgcacatcacataacaaccccgcttccaataccatcaaaatatattcgtaataaaaacgattaaataaacaaacgctaaccacatcaaatttcaccgccaacaacataacctacgaatcgtcccacacgaatacattcccgtatttttctaccaacgcctacgcctaaaaaaaacgactatcacaaacaaccaccaattccaaatcgttacgaatacaataatacgaaacataaaccttatccgccacctaacctacgcctattatcgcgacccgcaacgaaaaacttatcattacacttttcacaaaaacctcttaacaaatacgcaaccaaaccaacgaatcacgatacgcctaaacaaaatcttccgcccgaatacgcccttcgtacactacataaccctaataattatccgcgcgcaactattcaaacaacgcgtaaaaatccaaaataccgctacccgactaataacgataattatc

SEQ ID NO: 25123 - DNA, 878 bp, Artificial Sequence
  chemically treated genomic DNA (Homo sapiens) CpG-island No: 25123
cgacgttgtaagttgtcggattttatttattaaattgattatagtttttttgcgtgtcgattttttgaaagttatgcgtatttacgttttttatcgtcggaaagtttagtatatatatcgtagtatttagtatatgaatgtcgatgtcgattagcgggttattattttgtagttttttattggtaaagatattttagtcgggaacgtcgtagcgacgtagggcgcgggcggtggtaacgtaaattttttttaaaacgtcgttggttatttgtttacgtagttgttgcgtatcgagcgtaaaacgatggtgaaagtcgtaggttagtattttgtttagtttgcgcgcggtatcgtatatttttcgcgtttgttttggcgttatggcgggcggtttttcgtatattatatggtagtttcgtttttagtgttattagggtatgttcgtaatgaaaacggttaggtgagtagacgttaattatattaggttttatcgttagtagtatggtttgcggatcgttttatacggatgtattttcgtatttttttgttagcgtttgcgtttgggaaaggcggttgttatagatagttattagttttagatcgttgcgggtgtagtagtacgaagtatgaattttattcgttatttggtttgcgtttattatcgcgattcgtagcggagagtttgttattgtattttttataaagattttttagtaggtacgtaattaggttaacgaattacggtacgtttgggtaggatttttcgttcggatacgtttttcgtatattatatagttttgatagttattcgcgcgtagttgtttaaatagcgcgtggaaatttagggtgtcgttgttcggttggtagcgatggttatt

SEQ ID NO: 25124 - DNA, 878 bp, Artificial Sequence
  chemically treated genomic DNA (Homo sapiens) CpG-island No: 25124
aataaccatcgctaccaaccgaacaacgacaccctaaatttccacgcgctatttaaacaactacgcgcgaataactatcaaaactatataatatacgaaaaacgtatccgaacgaaaaatcctacccaaacgtaccgtaattcgttaacctaattacgtacctactaaaaaatctttataaaaaatacaataacaaactctccgctacgaatcgcgataataaacgcaaaccaaataacgaataaaattcatacttcgtactactacacccgcaacgatctaaaactaataactatctataacaaccgcctttcccaaacgcaaacgctaacaaaaaaatacgaaaatacatccgtataaaacgatccgcaaaccatactactaacgataaaacctaatataattaacgtctactcacctaaccgttttcattacgaacataccctaataacactaaaaacgaaactaccatataatatacgaaaaaccgcccgccataacgccaaaacaaacgcgaaaaatatacgataccgcgcgcaaactaaacaaaatactaacctacgactttcaccatcgttttacgctcgatacgcaacaactacgtaaacaaataaccaacgacgttttaaaaaaaatttacgttaccaccgcccgcgccctacgtcgctacgacgttcccgactaaaatatctttaccaataaaaaactacaaaataataacccgctaatcgacatcgacattcatatactaaatactacgatatatatactaaactttccgacgataaaaaacgtaaatacgcataactttcaaaaaatcgacacgcaaaaaaactataatcaatttaataaataaaatccgacaacttacaacgtcg

SEQ ID NO: 25125 - DNA, 622 bp, Artificial Sequence
  chemically treated genomic DNA (Homo sapiens) CpG-island No: 25125
tagatagcggggtttgcgtttcgttgtcgggtttttcgttataaattcgattgtagtaggcgttggcggaatgaacggaaagttttttttggtttatttttttatttacggatagggttggttgtttttagggacgtgtgttatcgtcgtttgttatcgttttttttgttattttatttaagtttacggtcgagaagttttttttgaagtaggttttaaatttcgttcggttttagcgtttttcgttattttttcgtcgttcgtcgtttgggaagggcgcgggttttatttgagggtttaggtcgcgaggcggaagtttagttttggttttgcgcggtcgaatttattttagtatgtcgggttcggcgaggtttaggcgcggggttaggcgttcgattagtttcgattttatggcgtcggtattaaagcgaataattttcgtgaacgtcgcgggttaacgaaattcgcgcgtaaaggttgtatcggttagtgagagtaggttttacgtcggcgtatttggatggttaggacggacgttgggacgttttaaaataatgagggttttttgggtagtgttaaaaagtaagataaagaatagggtaacgtttggggtatcgtttat

SEQ ID NO: 25126 - DNA, 622 bp, Artificial Sequence
  chemically treated genomic DNA (Homo sapiens) CpG-island No: 25126
ataaacgataccccaaacgttaccctattctttatcttactttttaacactacccaaaaaaccctcattattttaaaacgtcccaacgtccgtcctaaccatccaaatacgccgacgtaaaacctactctcactaaccgatacaacctttacgcgcgaatttcgttaacccgcgacgttcacgaaaattattcgctttaataccgacgccataaaatcgaaactaatcgaacgcctaaccccgcgcctaaacctcgccgaacccgacatactaaaataaattcgaccgcgcaaaaccaaaactaaacttccgcctcgcgacctaaaccctcaaataaaacccgcgcccttcccaaacgacgaacgacgaaaaaataacgaaaaacgctaaaaccgaacgaaatttaaaacctacttcaaaaaaaacttctcgaccgtaaacttaaataaaataacaaaaaaaacgataacaaacgacgataacacacgtccctaaaaacaaccaaccctatccgtaaataaaaaaataaaccaaaaaaaactttccgttcattccgccaacgcctactacaatcgaatttataacgaaaaacccgacaacgaaacgcaaaccccgctatcta

SEQ ID NO: 25127 - DNA, 622 bp, Artificial Sequence
  chemically treated genomic DNA (Homo sapiens) CpG-island No: 25127
atgagcggtattttaagcgttgttttattttttgttttgttttttagtattgtttaaggaatttttattgttttgggacgttttaacgttcgttttaattatttagatgcgtcggcgtgggatttgtttttattggtcggtgtagtttttgcgcgcgggtttcgttgattcgcggcgtttacgggaattgttcgttttagtgtcggcgttatggggtcggagttgatcgggcgtttagtttcgcgtttgggtttcgtcgagttcgatatgttgaggtgagttcggtcgcgtaagattagggttgggttttcgtttcgcggtttgggtttttaggtgaggttcgcgttttttttaggcgacgggcggcgggggagtgacggggagcgttggggtcgggcggggtttagggtttattttaagaaaaatttttcggtcgtgagtttgaatgagatggtaagaagggcgatagtaaacggcgatggtatacgtttttgggaatagttagttttgttcgtgggtagaaaaatgagttagggagaatttttcgtttatttcgttaacgtttattgtagtcgggtttatagcggggaattcgataacgaggcgtagatttcgttgtttg

SEQ ID NO: 25128 - DNA, 622 bp, Artificial Sequence
  chemically treated genomic DNA (Homo sapiens) CpG-island No: 25128
caaacaacgaaatctacgcctcgttatcgaattccccgctataaacccgactacaataaacgttaacgaaataaacgaaaaattctccctaactcatttttctacccacgaacaaaactaactattcccaaaaacgtataccatcgccgtttactatcgcccttcttaccatctcattcaaactcacgaccgaaaaatttttcttaaaataaaccctaaaccccgcccgaccccaacgctccccgtcactcccccgccgcccgtcgcctaaaaaaaacgcgaacctcacctaaaaacccaaaccgcgaaacgaaaacccaaccctaatcttacgcgaccgaactcacctcaacatatcgaactcgacgaaacccaaacgcgaaactaaacgcccgatcaactccgaccccataacgccgacactaaaacgaacaattcccgtaaacgccgcgaatcaacgaaacccgcgcgcaaaaactacaccgaccaataaaaacaaatcccacgccgacgcatctaaataattaaaacgaacgttaaaacgtcccaaaacaataaaaattccttaaacaatactaaaaaacaaaacaaaaaataaaacaacgcttaaaataccgctcat

SEQ ID NO: 25129 - DNA, 619 bp, Artificial Sequence
  chemically treated genomic DNA (Homo sapiens) CpG-island No: 25129
tcggaacgggtttttatagtgttaagacgttcgttatggagttttattttaatatcgaaacggttatgaatacggttggtaaatttacgcgttttggtagttaatggttgttcggtgtcgtttatatttagcggtaaatcgacgatgatttcgttcggttgttatttttttagtaaacgttcgataatgttttagttcggcgtatcgttttgtgttttaattgtaggtaaagggcgagcggtgtcggtaatgcgttggtcgatcgttacgttaatgtttttgttcgaagtcgaggcgagttaggtgtttttattatcgggggttttttttatattgatttgttgaaatattttttttatttcgggttttttttaggggttttcgttcgtatttcgttttcgtttagtatatgtataatcggcgtatcggcgttttgttagatatttagatttgtcgggttttatttacgcgtatcgagtattcgtgttgtagtgatttgttttaggaggtataatttagagttattaatacgttagacgtttgtttatcggtttcgacgttttagtatatcgcgggaagtgttattatcgtgttgtttgaaatgcgaatgttggaagta

SEQ ID NO: 25130 - DNA, 619 bp, Artificial Sequence
  chemically treated genomic DNA (Homo sapiens) CpG-island No: 25130
tacttccaacattcgcatttcaaacaacacgataataacacttcccgcgatatactaaaacgtcgaaaccgataaacaaacgtctaacgtattaataactctaaattatacctcctaaaacaaatcactacaacacgaatactcgatacgcgtaaataaaacccgacaaatctaaatatctaacaaaacgccgatacgccgattatacatatactaaacgaaaacgaaatacgaacgaaaacccctaaaaaaaacccgaaataaaaaaaatatttcaacaaatcaatataaaaaaaacccccgataataaaaacacctaactcgcctcgacttcgaacaaaaacattaacgtaacgatcgaccaacgcattaccgacaccgctcgccctttacctacaattaaaacacaaaacgatacgccgaactaaaacattatcgaacgtttactaaaaaaataacaaccgaacgaaatcatcgtcgatttaccgctaaatataaacgacaccgaacaaccattaactaccaaaacgcgtaaatttaccaaccgtattcataaccgtttcgatattaaaataaaactccataacgaacgtcttaacactataaaaacccgttccga

SEQ ID NO: 25131 - DNA, 619 bp, Artificial Sequence
  chemically treated genomic DNA (Homo sapiens) CpG-island No: 25131
tgtttttagtattcgtattttagataatacggtaatgatatttttcgcgatgtgttggaacgtcgggatcgataaataagcgtttgacgtattggtggttttgggttatgttttttggaataagttattgtaatacgaatattcgatacgcgtggataaggttcggtagatttgaatatttgataaaacgtcgatgcgtcgattgtgtatgtgttgaacgaaggcgggatgcgaacgggggtttttaaggggaattcgagatgggggagatattttaataaattagtgtgggagaaattttcgataatgggggtatttaattcgtttcgatttcggataaaagtattggcgtagcggtcggttaacgtattatcggtatcgttcgttttttgtttgtaattaaagtataggacggtacgtcggattggaatattatcgagcgtttattgaaagagtggtagtcggacgaaattatcgtcggtttgtcgttgaatatggacggtatcgagtaattattgattgttagagcgcgtaaatttgttaatcgtatttatggtcgtttcggtgttgaagtaaagttttatgacgagcgttttagtattgtggaagttcgtttcgg

SEQ ID NO: 25132 - DNA, 619 bp, Artificial Sequence
  chemically treated genomic DNA (Homo sapiens) CpG-island No: 25132
ccgaaacgaacttccacaatactaaaacgctcgtcataaaactttacttcaacaccgaaacgaccataaatacgattaacaaatttacgcgctctaacaatcaataattactcgataccgtccatattcaacgacaaaccgacgataatttcgtccgactaccactctttcaataaacgctcgataatattccaatccgacgtaccgtcctatactttaattacaaacaaaaaacgaacgataccgataatacgttaaccgaccgctacgccaatacttttatccgaaatcgaaacgaattaaatacccccattatcgaaaatttctcccacactaatttattaaaatatctcccccatctcgaattccccttaaaaacccccgttcgcatcccgccttcgttcaacacatacacaatcgacgcatcgacgttttatcaaatattcaaatctaccgaaccttatccacgcgtatcgaatattcgtattacaataacttattccaaaaaacataacccaaaaccaccaatacgtcaaacgcttatttatcgatcccgacgttccaacacatcgcgaaaaatatcattaccgtattatctaaaatacgaatactaaaaaca

SEQ ID NO: 25133 - DNA, 893 bp, Artificial Sequence
  chemically treated genomic DNA (Homo sapiens) CpG-island No: 25133
ttgttttcgcgtcggtggttttgagcgtacggcgttcggaattcggaggtgttagaggttcgggtaaagtaggtttggggagggcgcgaagtcgcgttgtttcgatttttagttatttgagttttagtttggaattttcggattttcgcgttcggttcgaacgttcgggttttttcggtgttaggcgtttcgagtgtcgcggcgcgtcgggcgcgggttgggagcggcggattgcgggcgggatagcgttttcgtttttttcgtgggagagcgcgcgtttttttaggaagttttcgtttcgttttttatttttttttttattttttttttcggtcggagggaggagttcgagtcgtcgtcgtcgtcgtcgttcgttcgttcggttcgggaggaggatcggatttcgagcggttgggagcgtacgcgagcgggtcgtggtcgcgcgggtagcgttttgagtttgtttcgcgttcgcgggttcggtcgagtaggagtagttttcggggatgttcgggcggttcggagcgcgggtagcggtagatcgtgcggtgagggcggtggcgttcgcgggatttgcggtgagtggggttcgggtaggcggggtagtttggcgtgagtgtttaatttcggttttggggttgggttttttgatttagttgcgggttcgaaggaattcgggtttcgtttcggggggttgcggcgttttagttttcgtcgttagcgcgaattcggatttcggcgtttcggtgatttagtttcgattcggttacgcgggggcgtttcgacggtatttcggattgcggggaagggcgggcggggtttttgcggaggggggcgttttcgggggttcgagtttagttgttttggggatttttttattcgtttcgaggggt

SEQ ID NO: 25134 - DNA, 893 bp, Artificial Sequence
  chemically treated genomic DNA (Homo sapiens) CpG-island No: 25134
acccctcgaaacgaataaaaaaatccccaaaacaactaaactcgaacccccgaaaacgcccccctccgcaaaaaccccgcccgcccttccccgcaatccgaaataccgtcgaaacgcccccgcgtaaccgaatcgaaactaaatcaccgaaacgccgaaatccgaattcgcgctaacgacgaaaactaaaacgccgcaaccccccgaaacgaaacccgaattccttcgaacccgcaactaaatcaaaaaacccaaccccaaaaccgaaattaaacactcacgccaaactaccccgcctacccgaaccccactcaccgcaaatcccgcgaacgccaccgccctcaccgcacgatctaccgctacccgcgctccgaaccgcccgaacatccccgaaaactactcctactcgaccgaacccgcgaacgcgaaacaaactcaaaacgctacccgcgcgaccacgacccgctcgcgtacgctcccaaccgctcgaaatccgatcctcctcccgaaccgaacgaacgaacgacgacgacgacgacgactcgaactcctccctccgaccgaaaaaaaaaataaaaaaaaaaataaaaaacgaaacgaaaacttcctaaaaaaacgcgcgctctcccacgaaaaaaacgaaaacgctatcccgcccgcaatccgccgctcccaacccgcgcccgacgcgccgcgacactcgaaacgcctaacaccgaaaaaacccgaacgttcgaaccgaacgcgaaaatccgaaaattccaaactaaaactcaaataactaaaaatcgaaacaacgcgacttcgcgccctccccaaacctactttacccgaacctctaacacctccgaattccgaacgccgtacgctcaaaaccaccgacgcgaaaacaa

SEQ ID NO: 25135 - DNA, 893 bp, Artificial Sequence
  chemically treated genomic DNA (Homo sapiens) CpG-island No: 25135
gtttttcggggcgggtggaagggtttttaaagtagttgggttcggattttcgagggcgttttttttcgtagggatttcgttcgttttttttcgtagttcgggatgtcgtcggggcgttttcgcgtggtcgggtcggagttgagttatcgaagcgtcggagttcgggttcgcgttggcggcgggggttagagcgtcgtagtttttcgaggcggaattcgggttttttcggattcgtagttggattaaagagtttagttttaaggtcgaagttgggtatttacgttaagttgtttcgtttgttcgggttttatttatcgtaggtttcgcgggcgttatcgtttttatcgtacggtttgtcgttgttcgcgtttcgagtcgttcgggtattttcgggagttgtttttgttcggtcgggttcgcgggcgcgggataggtttagggcgttgttcgcgcggttacggttcgttcgcgtgcgtttttagtcgttcggggttcggtttttttttcgggtcgggcgggcgggcggcggcggcggcggcggttcgggttttttttttcggtcgaggaggggagtggggagggaagtgggaggcgaggcgggagttttttggaggggcgcgcgtttttttacgggaggagcgggggcgttgtttcgttcgtagttcgtcgtttttagttcgcgttcggcgcgtcgcggtattcggggcgtttggtatcgagggggttcgaacgttcgggtcgaacgcgagggttcgaaggttttaggttgggatttaggtggttgaggatcggaataacgcggtttcgcgttttttttaggtttgttttgttcgagtttttggtattttcgagtttcgagcgtcgtgcgtttagggttatcgacgcgggaatag

SEQ ID NO: 25136 - DNA, 893 bp, Artificial Sequence
  chemically treated genomic DNA (Homo sapiens) CpG-island No: 25136
ctattcccgcgtcgataaccctaaacgcacgacgctcgaaactcgaaaataccaaaaactcgaacaaaacaaacctaaaaaaaacgcgaaaccgcgttattccgatcctcaaccacctaaatcccaacctaaaaccttcgaaccctcgcgttcgacccgaacgttcgaaccccctcgataccaaacgccccgaataccgcgacgcgccgaacgcgaactaaaaacgacgaactacgaacgaaacaacgcccccgctcctcccgtaaaaaaacgcgcgcccctccaaaaaactcccgcctcgcctcccacttccctccccactcccctcctcgaccgaaaaaaaaaacccgaaccgccgccgccgccgccgcccgcccgcccgacccgaaaaaaaaaccgaaccccgaacgactaaaaacgcacgcgaacgaaccgtaaccgcgcgaacaacgccctaaacctatcccgcgcccgcgaacccgaccgaacaaaaacaactcccgaaaatacccgaacgactcgaaacgcgaacaacgacaaaccgtacgataaaaacgataacgcccgcgaaacctacgataaataaaacccgaacaaacgaaacaacttaacgtaaatacccaacttcgaccttaaaactaaactctttaatccaactacgaatccgaaaaaacccgaattccgcctcgaaaaactacgacgctctaacccccgccgccaacgcgaacccgaactccgacgcttcgataactcaactccgacccgaccacgcgaaaacgccccgacgacatcccgaactacgaaaaaaaacgaacgaaatccctacgaaaaaaaacgccctcgaaaatccgaacccaactactttaaaaacccttccacccgccccgaaaaac

SEQ ID NO: 25137 - DNA, 591 bp, Artificial Sequence
  chemically treated genomic DNA (Homo sapiens) CpG-island No: 25137
ggacgttcggggtagacgcggtttaggtgggttttgaggtggtttatattttagtcgcggtcgttatttagttttaagtcgcggtggcgttggttggggttttttattaggagcgtgacgggttcgggttcggtttcggattttatggcggcggcggcggtgtcggggtttcgttgcgtttttaggtgttaggtaggcggcgttttagtcgttcgtaatttttgtaacgatcgtttacgtttttggggcgcgcgttttcgtttcgggcgttttttatagaagtttcgcgtttggttttgcggatagaacgttttgtggttgtcgtttattggttgaggcggaggtatttttttaacgtggtttaatcggcgttcggattcgggtggtagagggcggatcgagtacgtgggtacgggttgatgtaattcgtcgcgtttgcgttatttagaggcgcggttgtgtttcgggaattcgggttcggtggttatgtttgggtgcgttgtaggtcgcgcggggagtttggtttgagatttgcgaggtttttagttcgggtggttgagggcgttcgaggtagggggtggggagtggggt

SEQ ID NO: 25138 - DNA, 591 bp, Artificial Sequence
  chemically treated genomic DNA (Homo sapiens) CpG-island No: 25138
accccactccccaccccctacctcgaacgccctcaaccacccgaactaaaaacctcgcaaatctcaaaccaaactccccgcgcgacctacaacgcacccaaacataaccaccgaacccgaattcccgaaacacaaccgcgcctctaaataacgcaaacgcgacgaattacatcaacccgtacccacgtactcgatccgccctctaccacccgaatccgaacgccgattaaaccacgttaaaaaaatacctccgcctcaaccaataaacgacaaccacaaaacgttctatccgcaaaaccaaacgcgaaacttctataaaaaacgcccgaaacgaaaacgcgcgccccaaaaacgtaaacgatcgttacaaaaattacgaacgactaaaacgccgcctacctaacacctaaaaacgcaacgaaaccccgacaccgccgccgccgccataaaatccgaaaccgaacccgaacccgtcacgctcctaataaaaaaccccaaccaacgccaccgcgacttaaaactaaataacgaccgcgactaaaatataaaccacctcaaaacccacctaaaccgcgtctaccccgaacgtcc

SEQ ID NO: 25139 - DNA, 591 bp, Artificial Sequence
  chemically treated genomic DNA (Homo sapiens) CpG-island No: 25139
attttattttttattttttgtttcgggcgtttttagttattcgagttgggggtttcgtaggttttagattaagtttttcgcgcggtttgtagcgtatttaaatatggttatcgaattcgggttttcggggtatagtcgcgtttttgggtgacgtagacgcggcgggttgtattagttcgtgtttacgtgttcggttcgttttttgttattcggattcggacgtcgattgggttacgttgggagagtgttttcgttttagttaatgggcggtagttatagagcgttttgttcgtagagttaggcgcggggtttttataaaaggcgttcgaagcgggggcgcgcgttttagagacgtgaacggtcgttgtagagattgcgggcggttgagacgtcgtttgtttggtatttaggagcgtagcggagtttcgatatcgtcgtcgtcgttatggagttcgagatcgaattcgagttcgttacgtttttggtgaagagttttaattagcgttatcgcgatttggagttgagtggcgatcgcggttggagtgtgggttattttaaggtttatttgagtcgcgtttatttcgagcgttt

SEQ ID NO: 25140 - DNA, 591 bp, Artificial Sequence
  chemically treated genomic DNA (Homo sapiens) CpG-island No: 25140
aaacgctcgaaataaacgcgactcaaataaaccttaaaataacccacactccaaccgcgatcgccactcaactccaaatcgcgataacgctaattaaaactcttcaccaaaaacgtaacgaactcgaattcgatctcgaactccataacgacgacgacgatatcgaaactccgctacgctcctaaataccaaacaaacgacgtctcaaccgcccgcaatctctacaacgaccgttcacgtctctaaaacgcgcgcccccgcttcgaacgccttttataaaaaccccgcgcctaactctacgaacaaaacgctctataactaccgcccattaactaaaacgaaaacactctcccaacgtaacccaatcgacgtccgaatccgaataacaaaaaacgaaccgaacacgtaaacacgaactaatacaacccgccgcgtctacgtcacccaaaaacgcgactataccccgaaaacccgaattcgataaccatatttaaatacgctacaaaccgcgcgaaaaacttaatctaaaacctacgaaacccccaactcgaataactaaaaacgcccgaaacaaaaaataaaaaataaaat

SEQ ID NO: 25141 - DNA, 777 bp, Artificial Sequence
  chemically treated genomic DNA (Homo sapiens) CpG-island No: 25141
gaagcggcggcgttggtaacgttttcggcgttgatagatgagttggttagttacggcgagttgatgtcgattttgttgtttgttgagattttgcgcgaacgcgatgtttaggtatagtggtttgatgtacgtaaagtgatgcgtattaacgatcgatttggtcgtgtagagttagatatagtcgcgttggcggaattggtcgcgttgtagttgtttttacgttttaatgaaggtttagtgattatttagggatttatcggtagcgaaaataaaggtcgtataacgacgtttggtcgtggaggtagcgattatacggtagttttgttggcggaggttttatacgtatttcgtgttgatatttggatcgacgtttcgggtatttatattatcgatttacgcgtagttttcgtagtaaaacgtattgatgaaatcgcgtttgtcgaagcggtagagatggtaatttttggtgtaaaagtattgtattcggtaacgttgttattcgtagtacgtagcgatatttcggtttttgtcggttttagtaaagatttatgcgtaggtggtacgttggtgtgtatgaaaaggaagattcgtcgttgtatcgcgttttggcgtatcgtcgcgattagattttggttattttgtatagattgaatatgttgtattttcggggttttttcggggaagttacggtatttcggcggggtatattcggagatttaaataaatttttggtttgttattttgaaagtttattgttggtttgaagggaaggtaaat

SEQ ID NO: 25142 - DNA, 777 bp, Artificial Sequence
  chemically treated genomic DNA (Homo sapiens) CpG-island No: 25142
atttaccttcccttcaaaccaacaataaactttcaaaataacaaaccaaaaatttatttaaatctccgaatataccccgccgaaataccgtaacttccccgaaaaaaccccgaaaatacaacatattcaatctatacaaaataaccaaaatctaatcgcgacgatacgccaaaacgcgatacaacgacgaatcttccttttcatacacaccaacgtaccacctacgcataaatctttactaaaaccgacaaaaaccgaaatatcgctacgtactacgaataacaacgttaccgaatacaatacttttacaccaaaaattaccatctctaccgcttcgacaaacgcgatttcatcaatacgttttactacgaaaactacgcgtaaatcgataatataaatacccgaaacgtcgatccaaatatcaacacgaaatacgtataaaacctccgccaacaaaactaccgtataatcgctacctccacgaccaaacgtcgttatacgacctttattttcgctaccgataaatccctaaataatcactaaaccttcattaaaacgtaaaaacaactacaacgcgaccaattccgccaacgcgactatatctaactctacacgaccaaatcgatcgttaatacgcatcactttacgtacatcaaaccactatacctaaacatcgcgttcgcgcaaaatctcaacaaacaacaaaatcgacatcaactcgccgtaactaaccaactcatctatcaacgccgaaaacgttaccaacgccgccgcttc

SEQ ID NO: 25143 - DNA, 777 bp, Artificial Sequence
  chemically treated genomic DNA (Homo sapiens) CpG-island No: 25143
gtttattttttttttaagttagtagtgggtttttaggatgataggttaaagatttgtttaggttttcgaatatatttcgtcgaggtgtcgtaattttttcgaggaaatttcgagaatgtagtatatttagtttgtgtaaagtgattagagtttgatcgcgacgatgcgttagagcgcggtatagcgacggatttttttttttatgtatattagcgtattatttgcgtatgggtttttgttggagtcgataaagatcgggatatcgttgcgtattgcgggtagtaacgttgtcggatgtagtatttttgtattaaaagttgttatttttgtcgtttcggtaaacgcgattttattaatgcgttttgttgcggaaattacgcgtggatcggtggtgtagatgttcgggacgtcggtttagatattaatacgagatgcgtgtaaagttttcgttagtaaggttgtcgtataatcgttgtttttacggttaagcgtcgttgtacgatttttattttcgttatcgataaatttttgggtgattattaagtttttattgagacgtgggagtagttgtagcgcggttagtttcgttagcgcggttatatttggttttgtacgattaaatcggtcgttggtacgtattattttacgtatattaaattattgtgtttgaatatcgcgttcgcgtaggattttaataaatagtagggtcgatattagttcgtcgtggttgattagtttatttgttagcgtcggagacgttgttagcgtcgtcgtttt

SEQ ID NO: 25144 - DNA, 777 bp, Artificial Sequence
  chemically treated genomic DNA (Homo sapiens) CpG-island No: 25144
aaaacgacgacgctaacaacgtctccgacgctaacaaataaactaatcaaccacgacgaactaatatcgaccctactatttattaaaatcctacgcgaacgcgatattcaaacacaataatttaatatacgtaaaataatacgtaccaacgaccgatttaatcgtacaaaaccaaatataaccgcgctaacgaaactaaccgcgctacaactactcccacgtctcaataaaaacttaataatcacccaaaaatttatcgataacgaaaataaaaatcgtacaacgacgcttaaccgtaaaaacaacgattatacgacaaccttactaacgaaaactttacacgcatctcgtattaatatctaaaccgacgtcccgaacatctacaccaccgatccacgcgtaatttccgcaacaaaacgcattaataaaatcgcgtttaccgaaacgacaaaaataacaacttttaatacaaaaatactacatccgacaacgttactacccgcaatacgcaacgatatcccgatctttatcgactccaacaaaaacccatacgcaaataatacgctaatatacataaaaaaaaaaatccgtcgctataccgcgctctaacgcatcgtcgcgatcaaactctaatcactttacacaaactaaatatactacattctcgaaatttcctcgaaaaaattacgacacctcgacgaaatatattcgaaaacctaaacaaatctttaacctatcatcctaaaaacccactactaacttaaaaaaaaaataaac

SEQ ID NO: 25145 - DNA, 559 bp, Artificial Sequence
  chemically treated genomic DNA (Homo sapiens) CpG-island No: 25145
  unsure (505, 509..510, 538)
cgggacgtacgcgcggggttttatcgtcgtcggcggtatcgcgcggtattcggggcggtcgatcggttttcggcgattttcgcggttttttttattatcgtcgtcgtagtcgcggtcggtttttcggaatcgttttttttttcgtacgcgtcgtaggtcgattttcggaatttttcgggaagtttatcgggttttacgcggggcgttatcgattcggtttttaaggcgcgcgtcgggggacgcggacgtcgggtcgattagtggtcggcggcggcgttttacgaggcggtgtcgggttcggttttaggcggggttattaacgaacgtgaagtcggtgagtcgttcggggggaagaagaggatcggcgggcggcgggcggggaagagggtatagacgggcgggcgagggtcggggatcgcgagggtaagggtattcgggagttcgtagaggcggcggttcggggagaaattttaggtacggtcgggttttcggggatatttttagngtgnnttgttcgagtgtagattagagtatgggnttttaatttatttttggtttt

SEQ ID NO: 25146 - DNA, 559 bp, Artificial Sequence
  chemically treated genomic DNA (Homo sapiens) CpG-island No: 25146
  unsure (22, 50..51, 55)
aaaaccaaaaataaattaaaancccatactctaatctacactcgaacaanncacnctaaaaatatccccgaaaacccgaccgtacctaaaatttctccccgaaccgccgcctctacgaactcccgaatacccttaccctcgcgatccccgaccctcgcccgcccgtctataccctcttccccgcccgccgcccgccgatcctcttcttccccccgaacgactcaccgacttcacgttcgttaataaccccgcctaaaaccgaacccgacaccgcctcgtaaaacgccgccgccgaccactaatcgacccgacgtccgcgtcccccgacgcgcgccttaaaaaccgaatcgataacgccccgcgtaaaacccgataaacttcccgaaaaattccgaaaatcgacctacgacgcgtacgaaaaaaaaaacgattccgaaaaaccgaccgcgactacgacgacgataataaaaaaaaccgcgaaaatcgccgaaaaccgatcgaccgccccgaataccgcgcgataccgccgacgacgataaaaccccgcgcgtacgtcccg

SEQ ID NO: 25147 - DNA, 559 bp, Artificial Sequence
  chemically treated genomic DNA (Homo sapiens) CpG-island No: 25147
  unsure (22, 50..51, 55)
agaattaaaagtaaattggggntttatattttgatttatattcgaatagnntatnttagaggtattttcggaggttcggtcgtgtttgaggttttttttcgagtcgtcgtttttgcgggttttcgggtgtttttgttttcgcggttttcggttttcgttcgttcgtttgtgttttttttttcgttcgtcgttcgtcgatttttttttttttttcgagcggtttatcggttttacgttcgttggtggtttcgtttgggatcgaattcggtatcgtttcgtggggcgtcgtcgtcggttattgatcggttcggcgttcgcgtttttcggcgcgcgttttggggatcgggtcggtggcgtttcgcgtggggttcggtgggtttttcggagggtttcgggggtcggtttgcggcgcgtgcgggggaggagacggtttcgggggatcggtcgcgattgcggcggcggtggtggggggagtcgcggggatcgtcgagggtcggtcggtcgtttcgggtgtcgcgcggtgtcgtcggcggcggtgaggtttcgcgcgtgcgtttcg

SEQ ID NO: 25148 - DNA, 559 bp, Artificial Sequence
  chemically treated genomic DNA (Homo sapiens) CpG-island No: 25148
  unsure (505, 509..510, 538)
cgaaacgcacgcgcgaaacctcaccgccgccgacgacaccgcgcgacacccgaaacgaccgaccgaccctcgacgatccccgcgactccccccaccaccgccgccgcaatcgcgaccgatcccccgaaaccgtctcctcccccgcacgcgccgcaaaccgacccccgaaaccctccgaaaaacccaccgaaccccacgcgaaacgccaccgacccgatccccaaaacgcgcgccgaaaaacgcgaacgccgaaccgatcaataaccgacgacgacgccccacgaaacgataccgaattcgatcccaaacgaaaccaccaacgaacgtaaaaccgataaaccgctcgaaaaaaaaaaaaaaatcgacgaacgacgaacgaaaaaaaaaacacaaacgaacgaacgaaaaccgaaaaccgcgaaaacaaaaacacccgaaaacccgcaaaaacgacgactcgaaaaaaaacctcaaacacgaccgaacctccgaaaatacctctaanatannctattcgaatataaatcaaaatataaanccccaatttacttttaattct

SEQ ID NO: 25149 - DNA, 524 bp, Artificial Sequence
  chemically treated genomic DNA (Homo sapiens) CpG-island No: 25149
agggggtacgaaaagttataggggagcggaagttagtcggtcggttagagagataaacggattcggataaatttatatataggggaaggggcgggggataaattcgcggaaacgagaacgtttgatacgtacggaacggagttagcggggagggggtgacgcggacgtttcgggcgttcgtagcggagagcgtacgggggtacggtggttttcgtcgtttttttcgtcgttttcgggtgggttagagattcggattcgggtcggtatcgggagtcgggacgttcggacgcgcgagagaatagtaggttcgcgggtttcggtaggcggtttaagtaggagcgcggtcggttagtcgggttatcggtaggttagagtttcgcgcgtattcggaggtttaatttttttagcgataggtcgttagaggatagcgtgttagtaataattcggagggataaaaaagttaattcggagcgaagaatatattatatatagagtcgagagagatatagtaatagagatatata

SEQ ID NO: 25150 - DNA, 524 bp, Artificial Sequence
  chemically treated genomic DNA (Homo sapiens) CpG-island No: 25150
tatatatctctattactatatctctctcgactctatatataatatattcttcgctccgaattaacttttttatccctccgaattattactaacacgctatcctctaacgacctatcgctaaaaaaattaaacctccgaatacgcgcgaaactctaacctaccgataacccgactaaccgaccgcgctcctacttaaaccgcctaccgaaacccgcgaacctactattctctcgcgcgtccgaacgtcccgactcccgataccgacccgaatccgaatctctaacccacccgaaaacgacgaaaaaaacgacgaaaaccaccgtacccccgtacgctctccgctacgaacgcccgaaacgtccgcgtcaccccctccccgctaactccgttccgtacgtatcaaacgttctcgtttccgcgaatttatcccccgccccttcccctatatataaatttatccgaatccgtttatctctctaaccgaccgactaacttccgctcccctataacttttcgtaccccct

SEQ ID NO: 25151 - DNA, 524 bp, Artificial Sequence
  chemically treated genomic DNA (Homo sapiens) CpG-island No: 25151
tgtgtgtttttgttattgtgtttttttcggttttgtgtgtggtatatttttcgtttcgagttggtttttttgttttttcgggttattgttgatacgttgttttttggcgatttgtcgttggagaggttgggttttcggatgcgcgcggggttttggtttatcggtgattcggttagtcggtcgcgtttttgtttgagtcgtttgtcggggttcgcgggtttgttgttttttcgcgcgttcgagcgtttcgattttcggtgtcggttcgggttcgggtttttgatttattcgggggcggcggggaaggcggcgagggttatcgtgttttcgtgcgtttttcgttgcgggcgttcggggcgttcgcgttatttttttttcgttggtttcgtttcgtgcgtgttaggcgttttcgttttcgcgggtttgtttttcgtttttttttttgtgtgtgggtttgttcggattcgtttgtttttttggtcggtcggttggttttcgtttttttgtggtttttcgtgtttttt

SEQ ID NO: 25152 - DNA, 524 bp, Artificial Sequence
  chemically treated genomic DNA (Homo sapiens) CpG-island No: 25152
aaaaaacacgaaaaaccacaaaaaaacgaaaaccaaccgaccgaccaaaaaaacaaacgaatccgaacaaacccacacacaaaaaaaaaaacgaaaaacaaacccgcgaaaacgaaaacgcctaacacgcacgaaacgaaaccaacgaaaaaaaaataacgcgaacgccccgaacgcccgcaacgaaaaacgcacgaaaacacgataaccctcgccgccttccccgccgcccccgaataaatcaaaaacccgaacccgaaccgacaccgaaaatcgaaacgctcgaacgcgcgaaaaaacaacaaacccgcgaaccccgacaaacgactcaaacaaaaacgcgaccgactaaccgaatcaccgataaaccaaaaccccgcgcgcatccgaaaacccaacctctccaacgacaaatcgccaaaaaacaacgtatcaacaataacccgaaaaaacaaaaaaaccaactcgaaacgaaaaatataccacacacaaaaccgaaaaaaacacaataacaaaaacacaca

SEQ ID NO: 25153 - DNA, 981 bp, Artificial Sequence
  chemically treated genomic DNA (Homo sapiens) CpG-island No: 25153
ttatattacggggaggcgcgcgtcgtttattcgggggcgagcgcggatattattttataggcgttcgggggttttcgtttttacggcgcggggcgtacgttatacgcgcggtaggcgcgcgacggtcgtcgggtaaagtttttattcgacggtcgtttcggcggcggcggcggcgcggtttcggtcggggagcggaattttcgggggaggcgtaggagggttttttaagttcgcgtcggcgttttttcgtgggggggtcgggttattttttttacggcgcgatcgtttttttatttttttttttcgcgttttcgtttcggcgacggggggggtgtcgcgcgcgggtcggggggcggggcggattgtttttagtgcgtttcgggcgggtcgcgtcgtcgggttcgggggaggttttttcggggttacgcgcgcgtttttcgaagagggggacggcggagcgagcgtacggggtcggcggcgacgtcggttatttattcgattcgttttgaaatacggattaaggagtttaatacgtgcgcgagtcgggggttcgtacgaaagtcgtcgtggcgtaatgaaggtgaaggtcggcgcgttcgtcggtcgaggtgggatttcgaggtttttttagttcgttagggcgtattatcggttcgtttcgttcgtcgcgtcggggaggtggagtacgagcgtacgtgttaggattcgaaagatggtgaattatgtttgggtagggcgaagttagaggaaattttggtggaggttcgtagcggttttgacgtgtaaatcggtcgttcgatttgggtataggggcgaaagattaatcgaattatttagtagttggtttttttcgaagttttttttaggatagttggcgttttcgtagattcgacgtattttcgttacgtagttttattcggtaaagcgaatgattagaggttttggggtcgaaacgattttaatttatttttaaattttaaa

SEQ ID NO: 25154 - DNA, 981 bp, Artificial Sequence
  chemically treated genomic DNA (Homo sapiens) CpG-island No: 25154
tttaaaatttaaaaataaattaaaatcgtttcgaccccaaaacctctaatcattcgctttaccgaataaaactacgtaacgaaaatacgtcgaatctacgaaaacgccaactatcctaaaaaaaacttcgaaaaaaaccaactactaaataattcgattaatctttcgcccctatacccaaatcgaacgaccgatttacacgtcaaaaccgctacgaacctccaccaaaatttcctctaacttcgccctacccaaacataattcaccatctttcgaatcctaacacgtacgctcgtactccacctccccgacgcgacgaacgaaacgaaccgataatacgccctaacgaactaaaaaaacctcgaaatcccacctcgaccgacgaacgcgccgaccttcaccttcattacgccacgacgactttcgtacgaacccccgactcgcgcacgtattaaactccttaatccgtatttcaaaacgaatcgaataaataaccgacgtcgccgccgaccccgtacgctcgctccgccgtccccctcttcgaaaaacgcgcgcgtaaccccgaaaaaacctcccccgaacccgacgacgcgacccgcccgaaacgcactaaaaacaatccgccccgccccccgacccgcgcgcgacaccccccccgtcgccgaaacgaaaacgcgaaaaaaaaaaataaaaaaacgatcgcgccgtaaaaaaaataacccgacccccccacgaaaaaacgccgacgcgaacttaaaaaaccctcctacgcctcccccgaaaattccgctccccgaccgaaaccgcgccgccgccgccgccgaaacgaccgtcgaataaaaactttacccgacgaccgtcgcgcgcctaccgcgcgtataacgtacgccccgcgccgtaaaaacgaaaacccccgaacgcctataaaataatatccgcgctcgcccccgaataaacgacgcgcgcctccccgtaatataa

SEQ ID NO: 25155 - DNA, 981 bp, Artificial Sequence
  chemically treated genomic DNA (Homo sapiens) CpG-island No: 25155
tttaaagtttgagaataggttgagatcgtttcggttttaagatttttaattattcgttttatcggataaaattgcgtggcgggggtgcgtcgggtttgcgagagcgttagttattttgagggaaatttcggagggaattagttattagatggttcgattagtttttcgtttttatatttaggtcggacgatcgatttgtacgttaggatcgttacggatttttattagagttttttttggtttcgttttgtttaggtatagtttattatttttcgggttttaatacgtgcgttcgtgttttattttttcggcgcggcgggcgagacgggtcggtggtgcgttttggcggattggagaggtttcgggattttatttcggtcggcgagcgcgtcggtttttatttttattgcgttacggcggttttcgtgcgagttttcgattcgcgtacgtgttagattttttggttcgtgttttaagacgggtcgggtgggtagtcgacgtcgtcgtcgatttcgtgcgttcgtttcgtcgttttttttttcgggggacgcgcgcgtggtttcgagagaatttttttcgggttcgacggcgcgattcgttcggggcgtattggggatagttcgtttcgtttttcgattcgcgcgcggtatttttttcgtcgtcggggcgggggcgcggggaggaggggtgggagagcggtcgcgtcgtgggaggggtggttcggtttttttacgaggagacgtcggcgcgaatttgggggatttttttgcgtttttttcggggatttcgtttttcggtcggggtcgcgtcgtcgtcgtcgtcgaggcggtcgtcgggtgggggttttattcggcggtcgtcgcgcgtttgtcgcgcgtgtggcgtgcgtttcgcgtcgtgggggcgggaattttcgggcgtttgtggggtggtgttcgcgttcgttttcgagtgggcggcgcgcgttttttcgtggtgtga

SEQ ID NO: 25156 - DNA, 981 bp, Artificial Sequence
  chemically treated genomic DNA (Homo sapiens) CpG-island No: 25156
tcacaccacgaaaaaacgcgcgccgcccactcgaaaacgaacgcgaacaccaccccacaaacgcccgaaaattcccgcccccacgacgcgaaacgcacgccacacgcgcgacaaacgcgcgacgaccgccgaataaaacccccacccgacgaccgcctcgacgacgacgacgacgcgaccccgaccgaaaaacgaaatccccgaaaaaaacgcaaaaaaatcccccaaattcgcgccgacgtctcctcgtaaaaaaaccgaaccacccctcccacgacgcgaccgctctcccacccctcctccccgcgcccccgccccgacgacgaaaaaaataccgcgcgcgaatcgaaaaacgaaacgaactatccccaatacgccccgaacgaatcgcgccgtcgaacccgaaaaaaattctctcgaaaccacgcgcgcgtcccccgaaaaaaaaaacgacgaaacgaacgcacgaaatcgacgacgacgtcgactacccacccgacccgtcttaaaacacgaaccaaaaaatctaacacgtacgcgaatcgaaaactcgcacgaaaaccgccgtaacgcaataaaaataaaaaccgacgcgctcgccgaccgaaataaaatcccgaaacctctccaatccgccaaaacgcaccaccgacccgtctcgcccgccgcgccgaaaaaataaaacacgaacgcacgtattaaaacccgaaaaataataaactatacctaaacaaaacgaaaccaaaaaaaactctaataaaaatccgtaacgatcctaacgtacaaatcgatcgtccgacctaaatataaaaacgaaaaactaatcgaaccatctaataactaattccctccgaaatttccctcaaaataactaacgctctcgcaaacccgacgcacccccgccacgcaattttatccgataaaacgaataattaaaaatcttaaaaccgaaacgatctcaacctattctcaaactttaaa

SEQ ID NO: 25157 - DNA, 560 bp, Artificial Sequence
  chemically treated genomic DNA (Homo sapiens) CpG-island No: 25157
  unsure (547)
gcggcgggttttcgcgggtcgcggttcgggtttcgggagttacggcgcgttggtcgatcggttcgggtagttttacgttcgtcgcgggtttagaagcgtagcgatagttttttttttatataaatttgtacgttagagttgtgatttataagcgacgcgttatagttttggtttatcgggttagtcgggttgacgatcgcgggtttttcggagttttgtttagtttatagcggggacggttttttttttcggtagttgttatcgtagtttcggaagtcgagagtacgattttaaagcggtcgttagatggagttcgataatcgtcgcggacgttagcgagatagattcggttggtagggcgggtcgtggatcgcgaaagcgaaatcgggagtcgagaagtttttttcgaggtcgaaaacgtaggttttttgttttaattttatataaacggtgtttaaaacgcgtttatgttttgatttcgatagagttagaagataatttacggcgtgtgggtgtttggagatgtttttcggaagtagggatgganggaaggaaggagg

SEQ ID NO: 25158 - DNA, 560 bp, Artificial Sequence
  chemically treated genomic DNA (Homo sapiens) CpG-island No: 25158
  unsure (14)
cctccttccttccntccatccctacttccgaaaaacatctccaaacacccacacgccgtaaattatcttctaactctatcgaaatcaaaacataaacgcgttttaaacaccgtttatataaaattaaaacaaaaaacctacgttttcgacctcgaaaaaaacttctcgactcccgatttcgctttcgcgatccacgacccgccctaccaaccgaatctatctcgctaacgtccgcgacgattatcgaactccatctaacgaccgctttaaaatcgtactctcgacttccgaaactacgataacaactaccgaaaaaaaaaaccgtccccgctataaactaaacaaaactccgaaaaacccgcgatcgtcaacccgactaacccgataaaccaaaactataacgcgtcgcttataaatcacaactctaacgtacaaatttatataaaaaaaaaactatcgctacgcttctaaacccgcgacgaacgtaaaactacccgaaccgatcgaccaacgcgccgtaactcccgaaacccgaaccgcgacccgcgaaaacccgccgc

SEQ ID NO: 25159 - DNA, 560 bp, Artificial Sequence
  chemically treated genomic DNA (Homo sapiens) CpG-island No: 25159
  unsure (14)
tttttttttttttntttatttttgttttcgagaggtatttttaaatatttatacgtcgtgggttgttttttgattttgtcgggattaaggtatagacgcgttttgggtatcgtttgtgtggggttggggtagagggtttgcgttttcggtttcggaaagagtttttcgattttcggtttcgttttcgcggtttacggttcgttttgttagtcggatttgtttcgttgacgttcgcggcggttgtcgggttttatttggcggtcgttttgagatcgtgttttcggttttcggagttgcggtggtagttgtcgagggaggggatcgttttcgttgtgagttaggtagagtttcggaaagttcgcggtcgttagttcggttggttcggtgggttagagttgtggcgcgtcgtttgtgagttatagttttggcgtgtaggtttatgtgggggagaggttgtcgttgcgtttttgggttcgcggcgggcgtggggttgttcgggtcggtcgattagcgcgtcgtagttttcgaggttcgagtcgcgattcgcggggattcgtcgt

SEQ ID NO: 25160 - DNA, 560 bp, Artificial Sequence
  chemically treated genomic DNA (Homo sapiens) CpG-island No: 25160
  unsure (547)
acgacgaatccccgcgaatcgcgactcgaacctcgaaaactacgacgcgctaatcgaccgacccgaacaaccccacgcccgccgcgaacccaaaaacgcaacgacaacctctcccccacataaacctacacgccaaaactataactcacaaacgacgcgccacaactctaacccaccgaaccaaccgaactaacgaccgcgaactttccgaaactctacctaactcacaacgaaaacgatcccctccctcgacaactaccaccgcaactccgaaaaccgaaaacacgatctcaaaacgaccgccaaataaaacccgacaaccgccgcgaacgtcaacgaaacaaatccgactaacaaaacgaaccgtaaaccgcgaaaacgaaaccgaaaatcgaaaaactctttccgaaaccgaaaacgcaaaccctctaccccaaccccacacaaacgatacccaaaacgcgtctataccttaatcccgacaaaatcaaaaaacaacccacgacgtataaatatttaaaaatacctctcgaaaacaaaaataaanaaaaaaaaaaaaa

SEQ ID NO: 25161 - DNA, 546 bp, Artificial Sequence
  chemically treated genomic DNA (Homo sapiens) CpG-island No: 25161
  unsure (382)
tcgcggtggggttgaaaaaaatgtgggagagggagtttcgcgtggttttagttttatcgcgggtcgaggtcggtggaggtcgcgggcgcgcgaacgggaatcgacgttttcgcgtcggtgcgtcgtagcgttcggcggtcgtttgttggtcgattcgggatacgtgtaggcgtcggttaagttcggagttcgcgggcggtagttggtcgatttcggaggtgtcgatcgagacggggacgtttcggttgcggttcgtttcgacgggtatttttatacgtcgttcggtggagaaggttcgtcggtcgattcgggatacggcgagacgtcggttgagttttacgttcgcgggcggtaggcggtcgatttcggaggttcgatcgangagaggtcgcgagcggcggtcggtcggttgcggggatatatatttggggttttgtcgatcgtcggtcgttattcgtggggtgttggttaatttttgcggagggacgaggaggaaggacgtttatagatcgggtatttatgggttgaaaataggaatatgagtcg

SEQ ID NO: 25162 - DNA, 546 bp, Artificial Sequence
  chemically treated genomic DNA (Homo sapiens) CpG-island No: 25162
  unsure (165)
cgactcatattcctattttcaacccataaatacccgatctataaacgtccttcctcctcgtccctccgcaaaaattaaccaacaccccacgaataacgaccgacgatcgacaaaaccccaaatatatatccccgcaaccgaccgaccgccgctcgcgacctctcntcgatcgaacctccgaaatcgaccgcctaccgcccgcgaacgtaaaactcaaccgacgtctcgccgtatcccgaatcgaccgacgaaccttctccaccgaacgacgtataaaaatacccgtcgaaacgaaccgcaaccgaaacgtccccgtctcgatcgacacctccgaaatcgaccaactaccgcccgcgaactccgaacttaaccgacgcctacacgtatcccgaatcgaccaacaaacgaccgccgaacgctacgacgcaccgacgcgaaaacgtcgattcccgttcgcgcgcccgcgacctccaccgacctcgacccgcgataaaactaaaaccacgcgaaactccctctcccacatttttttcaaccccaccgcga

SEQ ID NO: 25163 - DNA, 546 bp, Artificial Sequence
  chemically treated genomic DNA (Homo sapiens) CpG-island No: 25163
  unsure (165)
cggtttatatttttatttttagtttatgggtattcggtttatgagcgtttttttttttcgttttttcgtaggggttgattagtattttacgggtggcggtcggcggtcggtaaggttttaaatgtgtgttttcgtaatcggtcgatcgtcgttcgcgattttttntcggtcgggttttcggggtcgatcgtttgtcgttcgcgggcgtgagatttagtcggcgtttcgtcgtgtttcgggtcgatcggcgggttttttttatcgagcggcgtgtaggagtgttcgtcgggacgaatcgtaatcggagcgttttcgtttcggtcggtattttcggggtcgattagttgtcgttcgcgagtttcggatttagtcggcgtttgtacgtgtttcgggtcgattagtaggcggtcgtcggacgttgcggcgtatcgacgcgagggcgtcgattttcgttcgcgcgttcgcgatttttatcggtttcggttcgcggtggagttgggattacgcggaatttttttttttatattttttttagttttatcgcga

SEQ ID NO: 25164 - DNA, 546 bp, Artificial Sequence
  chemically treated genomic DNA (Homo sapiens) CpG-island No: 25164
  unsure (382)
tcgcgataaaactaaaaaaaatataaaaaaaaaaattccgcgtaatcccaactccaccgcgaaccgaaaccgataaaaatcgcgaacgcgcgaacgaaaatcgacgccctcgcgtcgatacgccgcaacgtccgacgaccgcctactaatcgacccgaaacacgtacaaacgccgactaaatccgaaactcgcgaacgacaactaatcgaccccgaaaataccgaccgaaacgaaaacgctccgattacgattcgtcccgacgaacactcctacacgccgctcgataaaaaaaacccgccgatcgacccgaaacacgacgaaacgccgactaaatctcacgcccgcgaacgacaaacgatcgaccccgaaaacccgaccganaaaaaatcgcgaacgacgatcgaccgattacgaaaacacacatttaaaaccttaccgaccgccgaccgccacccgtaaaatactaatcaacccctacgaaaaaacgaaaaaaaaaaacgctcataaaccgaatacccataaactaaaaataaaaatataaaccg

SEQ ID NO: 25165 - DNA, 536 bp, Artificial Sequence
  chemically treated genomic DNA (Homo sapiens) CpG-island No: 25165
  unsure (132)
attcgagtcggttttttattcgattaagttttagttttgttttttttttttcgtagtttcggttttagtcgattttttcgattaaaaattttttcgtttagttcgtttattttttcgtttatttaacgtttngttttttttagttatttgatttcggtttgtttattcgttttatttaggcggcgtattagttagttagtacgttttttttttttaattttttaatttttttttcgtgtgttttgttcgtttattaggcgtagtttgtttaacgttttgtacgggttttatcggtttcgttagtcgttttcgcgttagttcgttttttttagttagttcgttcgcggttcgttcgtcgttcgttcgtcgtttttttcgtttgcggagcgttagattcgttttcgagaggtttttaggtcggtcgttcggtcgcgtcggggtttcgacgcgttttattttatttatttggttgattttgttagtagtatatgtttgttttaaagattaagttatgtatgtttaagtacgtacggacg

SEQ ID NO: 25166 - DNA, 536 bp, Artificial Sequence
  chemically treated genomic DNA (Homo sapiens) CpG-island No: 25166
  unsure (405)
cgtccgtacgtacttaaacatacataacttaatctttaaaacaaacatatactactaacaaaatcaaccaaataaataaaataaaacgcgtcgaaaccccgacgcgaccgaacgaccgacctaaaaacctctcgaaaacgaatctaacgctccgcaaacgaaaaaaacgacgaacgaacgacgaacgaaccgcgaacgaactaactaaaaaaaacgaactaacgcgaaaacgactaacgaaaccgataaaacccgtacaaaacgttaaacaaactacgcctaataaacgaacaaaacacacgaaaaaaaaattaaaaaattaaaaaaaaaaaacgtactaactaactaatacgccgcctaaataaaacgaataaacaaaccgaaatcaaataactaaaaaaaacnaaacgttaaataaacgaaaaaataaacgaactaaacgaaaaaatttttaatcgaaaaaatcgactaaaaccgaaactacgaaaaaaaaaaaacaaaactaaaacttaatcgaataaaaaaccgactcgaat

SEQ ID NO: 25167 - DNA, 536 bp, Artificial Sequence
  chemically treated genomic DNA (Homo sapiens) CpG-island No: 25167
  unsure (405)
cgttcgtgcgtatttagatatgtatggtttaatttttgagataagtatatgttattggtaggattaattaggtaggtaaggtagagcgcgtcgaggtttcgacgcggtcggacggtcggtttgggggtttttcgaggacgggtttggcgtttcgtaagcgaggaggacgacggacggacggcggacgggtcgcggacgggttgattggagggagcgagttggcgcgggggcggttgacgggatcggtggggttcgtgtagagcgttaagtaaattacgtttaatgaacgggtagggtatacgagaagagggttggggggttgaggagaggaggcgtattggttggttggtgcgtcgtttgggtaaagcgggtgggtagatcggggttaggtgattggaagggatngggcgttaaatggacgaaaggatgggcgagttggacgagggggtttttaatcgggaaggtcggttggaatcgggattacgggaagaaaagggtagggttggggtttgatcgggtaggggatcggttcgggt

SEQ ID NO: 25168 - DNA, 536 bp, Artificial Sequence
  chemically treated genomic DNA (Homo sapiens) CpG-island No: 25168
  unsure (132)
acccgaaccgatcccctacccgatcaaaccccaaccctacccttttcttcccgtaatcccgattccaaccgaccttcccgattaaaaaccccctcgtccaactcgcccatcctttcgtccatttaacgcccnatcccttccaatcacctaaccccgatctacccacccgctttacccaaacgacgcaccaaccaaccaatacgcctcctctcctcaaccccccaaccctcttctcgtataccctacccgttcattaaacgtaatttacttaacgctctacacgaaccccaccgatcccgtcaaccgcccccgcgccaactcgctccctccaatcaacccgtccgcgacccgtccgccgtccgtccgtcgtcctcctcgcttacgaaacgccaaacccgtcctcgaaaaacccccaaaccgaccgtccgaccgcgtcgaaacctcgacgcgctctaccttacctacctaattaatcctaccaataacatatacttatctcaaaaattaaaccatacatatctaaatacgcacgaacg

SEQ ID NO: 25169 - DNA, 878 bp, Artificial Sequence
  chemically treated genomic DNA (Homo sapiens) CpG-island No: 25169
atcgttttaaaaaaaaaaaaaaagttacgattttttaggggttcggggggcgttgttcgttttttatttcgcgttaaggagggaaattattatcggttatcgttttttgcgtcgtcgttgtcgttatcggttgtagttttagtcgttcggttcgttcgttttttttttttatatagcgagttaataagttgcgcgagttattatcgtcgtcgtcgtcgtcgtcgagagatagggtgaagggggagggaggggcggaaagggcgggggtagaggtgggcggggttgagcgcgagatatcgcgagagtcgcgtgcgtaggcgcgtcggggcggaggtcgtcggcgagtcgcgttgttacgcgtcgtggcgggtattggattggcggagttcggggagtgaagtagtgaaatcggatttacgtttttttaacgttcgcgtgattacgtggttggtatttaggcggaagtttgcggtagttttttgcggtgaagaatttgtaaagcgttgttggaaaagacgggagttttattgatattttagtttaaagttaggtgggatcgttttttgtcgtacgttttcgtttggtttcgcgttttaggagttaggaaatgtgatagaggcggtgtttattgtttcgttaggaatggtcgcggaggaggattggttacgtggcgtggttttcggtttttggcgcgtttttattcgggaaggttttaaatgcggagttattttttgatttgttagcgaggttttgattgtgagtttcgcggcgttcgcgttttatcgttttatcgagggtgggtttttcgcgcgtagaattgtgtaggattttttaaagggagtaaaagtcgatcggggtttatttttaatattttataa

SEQ ID NO: 25170 - DNA, 878 bp, Artificial Sequence
  chemically treated genomic DNA (Homo sapiens) CpG-island No: 25170
ttataaaatattaaaaataaaccccgatcgacttttactccctttaaaaaatcctacacaattctacgcgcgaaaaacccaccctcgataaaacgataaaacgcgaacgccgcgaaactcacaatcaaaacctcgctaacaaatcaaaaaataactccgcatttaaaaccttcccgaataaaaacgcgccaaaaaccgaaaaccacgccacgtaaccaatcctcctccgcgaccattcctaacgaaacaataaacaccgcctctatcacatttcctaactcctaaaacgcgaaaccaaacgaaaacgtacgacaaaaaacgatcccacctaactttaaactaaaatatcaataaaactcccgtcttttccaacaacgctttacaaattcttcaccgcaaaaaactaccgcaaacttccgcctaaataccaaccacgtaatcacgcgaacgttaaaaaaacgtaaatccgatttcactacttcactccccgaactccgccaatccaatacccgccacgacgcgtaacaacgcgactcgccgacgacctccgccccgacgcgcctacgcacgcgactctcgcgatatctcgcgctcaaccccgcccacctctacccccgccctttccgcccctccctcccccttcaccctatctctcgacgacgacgacgacgacgataataactcgcgcaacttattaactcgctatataaaaaaaaaaaacgaacgaaccgaacgactaaaactacaaccgataacgacaacgacgacgcaaaaaacgataaccgataataatttccctccttaacgcgaaataaaaaacgaacaacgccccccgaacccctaaaaaatcgtaactttttttttttttttaaaacgat

SEQ ID NO: 25171 - DNA, 878 bp, Artificial Sequence
  chemically treated genomic DNA (Homo sapiens) CpG-island No: 25171
ttgtggaatgttaaaagtaggtttcgatcggtttttattttttttggaaaattttatataattttgcgcgcgaaagatttattttcggtgaggcggtgaggcgcgaacgtcgcgaagtttatagttaaagtttcgttgataaattaagagatgatttcgtatttaaaattttttcgaataggaacgcgttagaggtcggaagttacgttacgtgattagttttttttcgcggttatttttagcgaggtagtaggtatcgtttttgttatattttttagtttttaaagcgcgggattaggcggaaacgtgcgataggaggcggttttatttagttttggattggagtgttagtagaattttcgttttttttagtaacgttttgtaagttttttatcgtaaagaattgtcgtagattttcgtttgggtgttaattacgtgattacgcgagcgttggagaggcgtaggttcgattttattattttatttttcgggtttcgttagtttagtattcgttacggcgcgtgataacgcggttcgtcggcggttttcgtttcggcgcgtttgcgtacgcggttttcgcggtgtttcgcgtttagtttcgtttatttttgttttcgtttttttcgtttttttttttttttttattttgtttttcggcggcggcggcggcggcggtggtggttcgcgtagtttgttggttcgttatataaaggagagaagcgggcggatcggacggttggagttgtagtcggtggcggtagcggcggcgtagggagcggtgatcggtggtggtttttttttttggcgcggggtggggagcgggtaacgtttttcggatttttgaagggtcgtggttttttttttttttttaaggcgat

SEQ ID NO: 25172 - DNA, 878 bp, Artificial Sequence
  chemically treated genomic DNA (Homo sapiens) CpG-island No: 25172
atcgccttaaaaaaaaaaaaaaaaccacgacccttcaaaaatccgaaaaacgttacccgctccccaccccgcgccaaaaaaaaaaaccaccaccgatcaccgctccctacgccgccgctaccgccaccgactacaactccaaccgtccgatccgcccgcttctctcctttatataacgaaccaacaaactacgcgaaccaccaccgccgccgccgccgccgccgaaaaacaaaataaaaaaaaaaaaaaaaacgaaaaaaacgaaaacaaaaataaacgaaactaaacgcgaaacaccgcgaaaaccgcgtacgcaaacgcgccgaaacgaaaaccgccgacgaaccgcgttatcacgcgccgtaacgaatactaaactaacgaaacccgaaaaataaaataataaaatcgaacctacgcctctccaacgctcgcgtaatcacgtaattaacacccaaacgaaaatctacgacaattctttacgataaaaaacttacaaaacgttactaaaaaaaacgaaaattctactaacactccaatccaaaactaaataaaaccgcctcctatcgcacgtttccgcctaatcccgcgctttaaaaactaaaaaatataacaaaaacgatacctactacctcgctaaaaataaccgcgaaaaaaaactaatcacgtaacgtaacttccgacctctaacgcgttcctattcgaaaaaattttaaatacgaaatcatctcttaatttatcaacgaaactttaactataaacttcgcgacgttcgcgcctcaccgcctcaccgaaaataaatctttcgcgcgcaaaattatataaaattttccaaaaaaaataaaaaccgatcgaaacctacttttaacattccacaa

SEQ ID NO: 25173 - DNA, 612 bp, Artificial Sequence
  chemically treated genomic DNA (Homo sapiens) CpG-island No: 25173
  unsure (325, 330, 338, 526..527, 574)
gtcgggatcgggaagggcggttaagggtggaaaggggttggcggttgttaggtttggcggaatggagcggggcggggcgtagcggggcggggcgggtttggagttgtatttgtttttgggcggacgtaattggcgcgcggcgcgggttgtagacggttgcgaggcgttgggtataggttagacgttcgtattcgtacggggttcgaatttggaggagggttcgaagggagagggggttcgttaaggagcggggatgtgatggagaggaggtttcgattcgtaggggatatgcgggggaagggacgcggatagggaagggttttgngatangcgtgaangatgcgttaagggaggacgggacgggatggaaggttatgatgtcgcggaagttagttagggcgtattcggttgcggatcggtgcgataataatttaacgtatcgaatgttttgtcggttagcgcggtttggaagaatatgttaatattcgtaataagtttgcgtttttcgatagggacgtgtaagtanngttcgtttttagtaattcgggacgcggttcgggaattaatggatttngttttaatatatagtatatagtttggtaggatcgatcg

SEQ ID NO: 25174 - DNA, 612 bp, Artificial Sequence
  chemically treated genomic DNA (Homo sapiens) CpG-island No: 25174
  unsure (39, 86..87, 275, 283, 288)
cgatcgatcctaccaaactatatactatatattaaaacnaaatccattaattcccgaaccgcgtcccgaattactaaaaacgaacnntacttacacgtccctatcgaaaaacgcaaacttattacgaatattaacatattcttccaaaccgcgctaaccgacaaaacattcgatacgttaaattattatcgcaccgatccgcaaccgaatacgccctaactaacttccgcgacatcataaccttccatcccgtcccgtcctcccttaacgcatcnttcacgcntatcncaaaacccttccctatccgcgtcccttcccccgcatatcccctacgaatcgaaacctcctctccatcacatccccgctccttaacgaaccccctctcccttcgaaccctcctccaaattcgaaccccgtacgaatacgaacgtctaacctatacccaacgcctcgcaaccgtctacaacccgcgccgcgcgccaattacgtccgcccaaaaacaaatacaactccaaacccgccccgccccgctacgccccgccccgctccattccgccaaacctaacaaccgccaacccctttccacccttaaccgcccttcccgatcccgac

SEQ ID NO: 25175 - DNA, 612 bp, Artificial Sequence
  chemically treated genomic DNA (Homo sapiens) CpG-island No: 25175
  unsure (39, 86..87, 275, 283, 288)
cgatcgattttgttaagttatgtattgtatgttaaagtnagatttattgattttcgggtcgcgtttcgagttattggagacgagtnntgtttatacgtttttatcgggaagcgtagatttattgcgggtattagtatatttttttaggtcgcgttagtcgatagagtattcggtgcgttggattattgtcgtatcggttcgtagtcggatgcgttttagttggttttcgcgatattatggttttttatttcgtttcgtttttttttagcgtattntttacgtntgttntagagtttttttttgttcgcgttttttttttcgtatgttttttgcgagtcggaattttttttttattatattttcgttttttggcgggtttttttttttttcgagtttttttttaggttcgagtttcgtgcgggtacggacgtttgatttgtgtttagcgtttcgtagtcgtttgtagttcgcgtcgcgcgttaattgcgttcgtttagaagtaggtgtagttttaggttcgtttcgtttcgttgcgtttcgtttcgttttatttcgttaggtttggtagtcgttagtttttttttatttttgatcgtttttttcggtttcggt

SEQ ID NO: 25176 - DNA, 612 bp, Artificial Sequence
  chemically treated genomic DNA (Homo sapiens) CpG-island No: 25176
  unsure (325, 330, 338, 526..527, 574)
accgaaaccgaaaaaaacgatcaaaaataaaaaaaaactaacgactaccaaacctaacgaaataaaacgaaacgaaacgcaacgaaacgaaacgaacctaaaactacacctacttctaaacgaacgcaattaacgcgcgacgcgaactacaaacgactacgaaacgctaaacacaaatcaaacgtccgtacccgcacgaaactcgaacctaaaaaaaaactcgaaaaaaaaaaaaacccgccaaaaaacgaaaatataataaaaaaaaaattccgactcgcaaaaaacatacgaaaaaaaaaacgcgaacaaaaaaaaactctanaacanacgtaaanaatacgctaaaaaaaaacgaaacgaaataaaaaaccataatatcgcgaaaaccaactaaaacgcatccgactacgaaccgatacgacaataatccaacgcaccgaatactctatcgactaacgcgacctaaaaaaatatactaatacccgcaataaatctacgcttcccgataaaaacgtataaacannactcgtctccaataactcgaaacgcgacccgaaaatcaataaatctnactttaacatacaatacataacttaacaaaatcgatcg

SEQ ID NO: 25177 - DNA, 742 bp, Artificial Sequence
  chemically treated genomic DNA (Homo sapiens) CpG-island No: 25177
  unsure (353, 598)
ggttacggtaatattagattcggtaattatttgcggttgtttagttatcgcggtagcgattattttaggatgcgtcgttttaattattttcggttgcggttcggtaatttgaacgggggtttttacgatatcggttatttttttaataattggcgcgttaataatcggttcgatagcggcggcgatagggattttagttattatcggttgtatatgtatttttttttgttcgcgttgttttttaatttgtatattttgcggacgtataattggatagcggatttagattttgttagaggttagtttcggagacgcgtacgttacggttaacggtattggcgattgggttggantacgttcgttacgatagcgacgacgatattattatttacgcgtaggtacgaggcgagcggcgagaacgacgcggtatgtaacgttgttacggtatagtatgtttttttttgttgttttggtgtagttgcgttacgattggaagcgggatttttattagttttgtgcgtggagttggcgttttttgaataattggttcggtagcgatagtttttttaataatcggtgcgattatcgttttttggtnacgtttgttcgtaacgtattttttgattgagttgacgttgttacgacgcggttgaatcggacgtatacgttttttttgttcggttttttgaatagattgttttttaatatttagcgttttcgttttttgttgcgtttgacgtta

SEQ ID NO: 25178 - DNA, 742 bp, Artificial Sequence
  chemically treated genomic DNA (Homo sapiens) CpG-island No: 25178
  unsure (145, 390)
taacgtcaaacgcaacaaaaaacgaaaacgctaaatattaaaaaacaatctattcaaaaaaccgaacaaaaaaaacgtatacgtccgattcaaccgcgtcgtaacaacgtcaactcaatcaaaaaatacgttacgaacaaacgtnaccaaaaaacgataatcgcaccgattattaaaaaaactatcgctaccgaaccaattattcaaaaaacgccaactccacgcacaaaactaataaaaatcccgcttccaatcgtaacgcaactacaccaaaacaacaaaaaaaaacatactataccgtaacaacgttacataccgcgtcgttctcgccgctcgcctcgtacctacgcgtaaataataatatcgtcgtcgctatcgtaacgaacgtantccaacccaatcgccaataccgttaaccgtaacgtacgcgtctccgaaactaacctctaacaaaatctaaatccgctatccaattatacgtccgcaaaatatacaaattaaaaaacaacgcgaacaaaaaaaaatacatatacaaccgataataactaaaatccctatcgccgccgctatcgaaccgattattaacgcgccaattattaaaaaaataaccgatatcgtaaaaacccccgttcaaattaccgaaccgcaaccgaaaataattaaaacgacgcatcctaaaataatcgctaccgcgataactaaacaaccgcaaataattaccgaatctaatattaccgtaacc

SEQ ID NO: 25179 - DNA, 742 bp, Artificial Sequence
  chemically treated genomic DNA (Homo sapiens) CpG-island No: 25179
  unsure (145, 390)
taacgttaggcgtaataagaagcgaaggcgttgaatgttgaagagtaatttgtttaggaaatcgaataggaagaacgtgtacgttcggtttagtcgcgtcgtaatagcgttagtttaattagaaagtgcgttacgagtaagcgtnattaagaagcggtagtcgtatcggttgttgaagaaattgtcgttgtcgaattaattgtttaggaagcgttagttttacgtatagaattggtgaaagtttcgtttttagtcgtagcgtaattgtattagaatagtagaagagaatatgttatatcgtgataacgttgtatgtcgcgtcgttttcgtcgttcgtttcgtatttgcgcgtaagtggtagtgtcgtcgtcgttatcgtgacgagcgtantttaatttagtcgttaatgtcgttgatcgtagcgtgcgcgttttcggaattggtttttggtaaagtttggattcgttatttaattgtacgttcgtaagatgtataggttgaagagtagcgcgaataggaagaagtatatgtgtagtcgatggtgattgaggtttttgtcgtcgtcgttatcgaatcggttgttagcgcgttagttgttgaagaagtggtcggtgtcgtagaagttttcgtttaggttgtcgaatcgtaatcggaagtggttgaaacgacgtattttgaagtgatcgttgtcgcggtaattgaatagtcgtaggtgattatcgagtttgatgttgtcgtagtt

SEQ ID NO: 25180 - DNA, 742 bp, Artificial Sequence
  chemically treated genomic DNA (Homo sapiens) CpG-island No: 25180
  unsure (353, 598)
aactacgacaacatcaaactcgataatcacctacgactattcaattaccgcgacaacgatcacttcaaaatacgtcgtttcaaccacttccgattacgattcgacaacctaaacgaaaacttctacgacaccgaccacttcttcaacaactaacgcgctaacaaccgattcgataacgacgacgacaaaaacctcaatcaccatcgactacacatatacttcttcctattcgcgctactcttcaacctatacatcttacgaacgtacaattaaataacgaatccaaactttaccaaaaaccaattccgaaaacgcgcacgctacgatcaacgacattaacgactaaattaaantacgctcgtcacgataacgacgacgacactaccacttacgcgcaaatacgaaacgaacgacgaaaacgacgcgacatacaacgttatcacgatataacatattctcttctactattctaatacaattacgctacgactaaaaacgaaactttcaccaattctatacgtaaaactaacgcttcctaaacaattaattcgacaacgacaatttcttcaacaaccgatacgactaccgcttcttaatnacgcttactcgtaacgcactttctaattaaactaacgctattacgacgcgactaaaccgaacgtacacgttcttcctattcgatttcctaaacaaattactcttcaacattcaacgccttcgcttcttattacgcctaacgtta

SEQ ID NO: 25181 - DNA, 505 bp, Artificial Sequence
  chemically treated genomic DNA (Homo sapiens) CpG-island No: 25181
tggtttttatttaatataatcgtttggtttttatcgttattattatatgcgtttattaattaggtacggtttgtaacgattttttttttatttttttattttgttatttttaattaatcgcgttaacgaattttttacgtagtttttttttttcgtatttaatttatttttttaatttattttattagttttttaatcgtttcgtttatagtcgttttttcgtaattaatttcgttaattgtttttcgtagttagtagttaattttcgttatcggtaatatttaatttcgtatacgatcggtttcgaatatatttttattaataagttattacgtagttagttattatataatttttcgttttaatcgagttatacgttttatattttgtataatttacgcgttacgtttgtcgcggtttttatttgtgttatatatacgttttatataattatattataatgttgatgttttttatttttatattattatatttatttttttat

SEQ ID NO: 25182 - DNA, 505 bp, Artificial Sequence
  chemically treated genomic DNA (Homo sapiens) CpG-island No: 25182
ataaaaaaataaatataataatataaaaataaaaaacatcaacattataatataattatataaaacgtatatataacacaaataaaaaccgcgacaaacgtaacgcgtaaattatacaaaatataaaacgtataactcgattaaaacgaaaaattatataataactaactacgtaataacttattaataaaaatatattcgaaaccgatcgtatacgaaattaaatattaccgataacgaaaattaactactaactacgaaaaacaattaacgaaattaattacgaaaaaacgactataaacgaaacgattaaaaaactaataaaataaattaaaaaaataaattaaatacgaaaaaaaaaaactacgtaaaaaattcgttaacgcgattaattaaaaataacaaaataaaaaaataaaaaaaaaatcgttacaaaccgtacctaattaataaacgcatataataataacgataaaaaccaaacgattatattaaataaaaacca

SEQ ID NO: 25183 - DNA, 505 bp, Artificial Sequence
  chemically treated genomic DNA (Homo sapiens) CpG-island No: 25183
gtggggaggtgagtgtggtggtgtgggggtgggggatattaatattatgatatagttgtatgaggcgtgtgtgtggtataggtgagggtcgcggtaagcgtgacgcgtgggttgtgtaggatgtggagcgtatggttcggttgaggcggagggttgtgtagtgattggttgcgtaatggtttgttggtgggggtgtgttcgggatcggtcgtgtgcgggattgggtattgtcggtggcgagggttggttgttggttgcgggaggtaattggcggagttagttgcggggaggcggttgtggacggagcggttggaaggttggtgaagtaagttggggagatgggttgggtgcgggggggagaagttgcgtagaggattcgttgacgcggttggttgagaatagtagggtggaagggtaaggggagggtcgttgtaggtcgtatttgattggtggacgtatgtggtggtagcggtggaggttaggcggttgtgttgggtggaagtta

SEQ ID NO: 25184 - DNA, 505 bp, Artificial Sequence
  chemically treated genomic DNA (Homo sapiens) CpG-island No: 25184
taacttccacccaacacaaccgcctaacctccaccgctaccaccacatacgtccaccaatcaaatacgacctacaacgaccctccccttacccttccaccctactattctcaaccaaccgcgtcaacgaatcctctacgcaacttctcccccccgcacccaacccatctccccaacttacttcaccaaccttccaaccgctccgtccacaaccgcctccccgcaactaactccgccaattacctcccgcaaccaacaaccaaccctcgccaccgacaatacccaatcccgcacacgaccgatcccgaacacacccccaccaacaaaccattacgcaaccaatcactacacaaccctccgcctcaaccgaaccatacgctccacatcctacacaacccacgcgtcacgcttaccgcgaccctcacctataccacacacacgcctcatacaactatatcataatattaatatcccccacccccacaccaccacactcacctccccac

SEQ ID NO: 25185 - DNA, 849 bp, Artificial Sequence
  chemically treated genomic DNA (Homo sapiens) CpG-island No: 25185
gaacgcgcgttagggtataaaaggttttttttttttttattagcgcggtcgttaattcgagggcggaggttcgcgaggtcggagggcggggtagttcggttttacggttcggggcgtttttttcggggggtcgtcgagaggggttagcgtgttttagtttttttgtttgttaaaaggcggggtcgcgtttttggtcgcgagtatatattttttttttcgtagcggtcgaagatttcgcgtttgcgcgggtcgttgagtacgtcgtaggttttagcgatttttttgaattttttttcggcgtcgggttttttgtttttgttcgggtggtagcgtagcgtttggcggcggtaggttcgtttgattttttcgttcgacgcgtcgcgggttaggtttaacgtttggtagtagtttttatttatgatttttttttgcggttcgtcgattcgttgtcgtcgtttttcggtttcgtcgtcgattagtttcggattttatatattcgttcggcggaagtttttagagttcgttagttttttttagaatttttcgtttcgttcgttttcgcggcgtcggttaatcgtcgtcgtttttttagcgatacgcgatattcggggcggggtttcgtcgttaacggtcgttcgcgcggggttacgttttttttcgtttcgttttcggtaatattttttcgcggcgcgcgcgtataggtcggaggaggtttcgtttatttttcgggacgagttaatcgcgattttttttttttttttacgcggttttagttattttgcgtttcgtttttcgtttgggttagtaggtcgggatttatagcgaatttgttgttttaggaaggggtgg

SEQ ID NO: 25186 - DNA, 849 bp, Artificial Sequence
  chemically treated genomic DNA (Homo sapiens) CpG-island No: 25186
ccaccccttcctaaaacaacaaattcgctataaatcccgacctactaacccaaacgaaaaacgaaacgcaaaataactaaaaccgcgtaaaaaaaaaaaaaaaatcgcgattaactcgtcccgaaaaataaacgaaacctcctccgacctatacgcgcgcgccgcgaaaaaatattaccgaaaacgaaacgaaaaaaaacgtaaccccgcgcgaacgaccgttaacgacgaaaccccgccccgaatatcgcgtatcgctaaaaaaacgacgacgattaaccgacgccgcgaaaacgaacgaaacgaaaaattctaaaaaaaactaacgaactctaaaaacttccgccgaacgaatatataaaatccgaaactaatcgacgacgaaaccgaaaaacgacgacaacgaatcgacgaaccgcaaaaaaaaatcataaataaaaactactaccaaacgttaaacctaacccgcgacgcgtcgaacgaaaaaatcaaacgaacctaccgccgccaaacgctacgctaccacccgaacaaaaacaaaaaacccgacgccgaaaaaaaattcaaaaaaatcgctaaaacctacgacgtactcaacgacccgcgcaaacgcgaaatcttcgaccgctacgaaaaaaaaaatatatactcgcgaccaaaaacgcgaccccgccttttaacaaacaaaaaaactaaaacacgctaacccctctcgacgaccccccgaaaaaaacgccccgaaccgtaaaaccgaactaccccgccctccgacctcgcgaacctccgccctcgaattaacgaccgcgctaataaaaaaaaaaaaaaccttttataccctaacgcgcgttc

SEQ ID NO: 25187 - DNA, 849 bp, Artificial Sequence
  chemically treated genomic DNA (Homo sapiens) CpG-island No: 25187
ttatttttttttggaatagtaagttcgttgtgggtttcgatttattgatttaggcggagggcgggacgtagggtagttggggtcgcgtagagagggaaagaaggtcgcgattggttcgtttcgaaaggtgggcggggtttttttcgatttgtgcgcgcgcgtcgcggggaggtgttgtcgagggcggagcgggagggggcgtggtttcgcgcgggcggtcgttgacggcgaggtttcgtttcggatgtcgcgtgtcgttgaaagggcggcggcgattggtcggcgtcgcgggggcgggcggggcggaaggttttggagggggttggcgggttttggaagttttcgtcggacgggtatatagagttcgggattggtcggcggcggagtcgggggacggcgatagcgggtcggcgggtcgtaggagggggttatgggtaaagattattattagacgttgggtttggttcgcggcgcgtcggacgaggagattaagcgggtttatcgtcgttaggcgttgcgttattattcggataagaataaggagttcggcgtcgaggagaagtttaaggagatcgttgaggtttacgacgtgtttagcgattcgcgtaagcgcgagattttcgatcgttacggggaggaaggtgtgtgttcgcggttaggggcgcggtttcgttttttgatagatagggaaattgaggtacgttggtttttttcggcggtttttcgggaaggacgtttcgggtcgtggggtcgagttgtttcgtttttcggtttcgcgggttttcgttttcggattggcggtcgcgttggtgggaaggaaggaagttttttgtgttttagcgcgcgttt

SEQ ID NO: 25188 - DNA, 849 bp, Artificial Sequence
  chemically treated genomic DNA (Homo sapiens) CpG-island No: 25188
aaacgcgcgctaaaacacaaaaaacttccttccttcccaccaacgcgaccgccaatccgaaaacgaaaacccgcgaaaccgaaaaacgaaacaactcgaccccacgacccgaaacgtccttcccgaaaaaccgccgaaaaaaaccaacgtacctcaatttccctatctatcaaaaaacgaaaccgcgcccctaaccgcgaacacacaccttcctccccgtaacgatcgaaaatctcgcgcttacgcgaatcgctaaacacgtcgtaaacctcaacgatctccttaaacttctcctcgacgccgaactccttattcttatccgaataataacgcaacgcctaacgacgataaacccgcttaatctcctcgtccgacgcgccgcgaaccaaacccaacgtctaataataatctttacccataaccccctcctacgacccgccgacccgctatcgccgtcccccgactccgccgccgaccaatcccgaactctatatacccgtccgacgaaaacttccaaaacccgccaaccccctccaaaaccttccgccccgcccgcccccgcgacgccgaccaatcgccgccgccctttcaacgacacgcgacatccgaaacgaaacctcgccgtcaacgaccgcccgcgcgaaaccacgccccctcccgctccgccctcgacaacacctccccgcgacgcgcgcgcacaaatcgaaaaaaaccccgcccacctttcgaaacgaaccaatcgcgaccttctttccctctctacgcgaccccaactaccctacgtcccgccctccgcctaaatcaataaatcgaaacccacaacgaacttactattccaaaaaaaaataa

SEQ ID NO: 25189 - DNA, 522 bp, Artificial Sequence
  chemically treated genomic DNA (Homo sapiens) CpG-island No: 25189
attgttaaatggattgattgacgatagggggaatggtaggcgcgggaatagatagttaagtgtaagattcggatagtagatcgagtagatcgaaatggtagatatgatttaattattcgagtaaaaacgtacgatcgagtatatggcgtgttttagtgtaacggtgttcggtgtagtgcgacgcgtaacgggacgtatttttgttatcgtatgtgttattaagcgttcgtagtagtatttggtgtgcgagaggtagttacgtaacgggatggagtgtcgtcgatagtgtgattggatcggcgtttatcgtacgtaatgtgtgtttatgacgcgggtatggattatttggtaggttgtttgataaagcgcgcgatacgtgagggtgagacgagatgcggtgagggttcgtgtaagtagtattggagtagtataagacgtggtttggcgtatagcgttggatattgtttcggatgtggtgtgtttcgggcggagtgatttattatagatataatttaatatgtt

SEQ ID NO: 25190 - DNA, 522 bp, Artificial Sequence
  chemically treated genomic DNA (Homo sapiens) CpG-island No: 25190
aacatattaaattatatctataataaatcactccgcccgaaacacaccacatccgaaacaatatccaacgctatacgccaaaccacgtcttatactactccaatactacttacacgaaccctcaccgcatctcgtctcaccctcacgtatcgcgcgctttatcaaacaacctaccaaataatccatacccgcgtcataaacacacattacgtacgataaacgccgatccaatcacactatcgacgacactccatcccgttacgtaactacctctcgcacaccaaatactactacgaacgcttaataacacatacgataacaaaaatacgtcccgttacgcgtcgcactacaccgaacaccgttacactaaaacacgccatatactcgatcgtacgtttttactcgaataattaaatcatatctaccatttcgatctactcgatctactatccgaatcttacacttaactatctattcccgcgcctaccattccccctatcgtcaatcaatccatttaacaat

SEQ ID NO: 25191 - DNA, 522 bp, Artificial Sequence
  chemically treated genomic DNA (Homo sapiens) CpG-island No: 25191
ggtatattaaattatatttatagtaggttatttcgttcgggatatattatattcgaggtagtgtttaacgttatacgttaggttacgttttgtgttgttttaatgttgtttgtacgagtttttatcgtatttcgttttatttttacgtatcgcgcgttttgttaggtaatttgttaagtaatttatgttcgcgttatgaatatatattgcgtacggtaaacgtcggtttagttatattatcggcggtattttatttcgttgcgtggttgtttttcgtatattaggtgttgttgcgaacgtttaatggtatatacggtaataaaggtacgtttcgttgcgcgtcgtattatatcgggtatcgttgtattggggtacgttatgtgttcggtcgtacgtttttgttcgggtagttgggttatgtttgttatttcggtttattcggtttattattcgggttttgtatttggttatttgttttcgcgtttgttattttttttgtcgttagttaatttatttggtagt

SEQ ID NO: 25192 - DNA, 522 bp, Artificial Sequence
  chemically treated genomic DNA (Homo sapiens) CpG-island No: 25192
actaccaaataaattaactaacgacaaaaaaaataacaaacgcgaaaacaaataaccaaatacaaaacccgaataataaaccgaataaaccgaaataacaaacataacccaactacccgaacaaaaacgtacgaccgaacacataacgtaccccaatacaacgatacccgatataatacgacgcgcaacgaaacgtacctttattaccgtatataccattaaacgttcgcaacaacacctaatatacgaaaaacaaccacgcaacgaaataaaataccgccgataatataactaaaccgacgtttaccgtacgcaatatatattcataacgcgaacataaattacttaacaaattacctaacaaaacgcgcgatacgtaaaaataaaacgaaatacgataaaaactcgtacaaacaacattaaaacaacacaaaacgtaacctaacgtataacgttaaacactacctcgaatataatatatcccgaacgaaataacctactataaatataatttaatatacc

SEQ ID NO: 25193 - DNA, 651 bp, Artificial Sequence
  chemically treated genomic DNA (Homo sapiens) CpG-island No: 25193
ttgtcgtaggcgttttacgatagttcggtttcgatgattatgattacgatgtcgaatatgtcgaagatgagcgcgtagtcgttgagtcgtttgcgtttttcgaatagggcgcgtcggtggtttagtttgtagtcgatgttttggtttttttttttgttggatttggtgttattgttgttgtcgtgttcgttttcgttatcgtcgtcgttttttttagtgttgttttcgtcgtcggttttatagagcgttaggttgttggagttgttgtgttcgggtttagatattacgatttcgggggttgaggacgaaatagcggcggcggcggtagcggttgtagacggggaggacgcgtcgttatttttttcgatagacgcggggggttgtaggggttgcgtttttgagtttatttcgtgtaggtttcggcgggacgcgtttaagttgttgagcggtcgtatgacgttttcgttgtatttgtagttgtttatggttatttcggtgaaggggttgttttcgcggcgcgtttggggttggtggtgttggtggtgcgtcgggtgcgggtggtggtggtggtgcgagagcgggggttcggagtttagattgtcgaggttgttcgtggggttggcggcgggttgtaggttgtggtattggtgg

SEQ ID NO: 25194 - DNA, 651 bp, Artificial Sequence
  chemically treated genomic DNA (Homo sapiens) CpG-island No: 25194
ccaccaataccacaacctacaacccgccgccaaccccacgaacaacctcgacaatctaaactccgaacccccgctctcgcaccaccaccaccacccgcacccgacgcaccaccaacaccaccaaccccaaacgcgccgcgaaaacaaccccttcaccgaaataaccataaacaactacaaatacaacgaaaacgtcatacgaccgctcaacaacttaaacgcgtcccgccgaaacctacacgaaataaactcaaaaacgcaacccctacaaccccccgcgtctatcgaaaaaaataacgacgcgtcctccccgtctacaaccgctaccgccgccgccgctatttcgtcctcaacccccgaaatcgtaatatctaaacccgaacacaacaactccaacaacctaacgctctataaaaccgacgacgaaaacaacactaaaaaaaacgacgacgataacgaaaacgaacacgacaacaacaataacaccaaatccaacaaaaaaaaaaaccaaaacatcgactacaaactaaaccaccgacgcgccctattcgaaaaacgcaaacgactcaacgactacgcgctcatcttcgacatattcgacatcgtaatcataatcatcgaaaccgaactatcgtaaaacgcctacgacaa

SEQ ID NO: 25195 - DNA, 651 bp, Artificial Sequence
  chemically treated genomic DNA (Homo sapiens) CpG-island No: 25195
ttattagtgttatagtttgtagttcgtcgttagttttacgggtagtttcggtagtttgggtttcgggttttcgttttcgtattattattattattcgtattcggcgtattattagtattattagttttaggcgcgtcgcgagagtaatttttttatcgaaatagttatgagtagttgtaggtataacgggggcgttatgcggtcgtttagtaatttgagcgcgtttcgtcggaatttgtacgagatggatttagaggcgtagtttttgtagtttttcgcgtttgtcggaggaggtggcggcgcgtttttttcgtttgtagtcgttgtcgtcgtcgtcgttgtttcgtttttagttttcgagatcgtggtgtttaagttcgagtataataattttaataatttggcgttttatggaatcggcggcggaggtagtattggaggaggcggcggcggtggcgggagcgggtacggtagtagtagtggtattaagtttagtaaaaagaaaaattagaatatcggttataagttgggttatcggcgcgttttgttcgaaaagcgtaagcggtttagcgattacgcgtttattttcggtatgttcggtatcgtggttatggttatcgagatcgagttgtcgtggggcgtttacgataa

SEQ ID NO: 25196 - DNA, 651 bp, Artificial Sequence
  chemically treated genomic DNA (Homo sapiens) CpG-island No: 25196
ttatcgtaaacgccccacgacaactcgatctcgataaccataaccacgataccgaacataccgaaaataaacgcgtaatcgctaaaccgcttacgcttttcgaacaaaacgcgccgataacccaacttataaccgatattctaatttttctttttactaaacttaataccactactactaccgtacccgctcccgccaccgccgccgcctcctccaatactacctccgccgccgattccataaaacgccaaattattaaaattattatactcgaacttaaacaccacgatctcgaaaactaaaaacgaaacaacgacgacgacgacaacgactacaaacgaaaaaaacgcgccgccacctcctccgacaaacgcgaaaaactacaaaaactacgcctctaaatccatctcgtacaaattccgacgaaacgcgctcaaattactaaacgaccgcataacgcccccgttatacctacaactactcataactatttcgataaaaaaattactctcgcgacgcgcctaaaactaataatactaataatacgccgaatacgaataataataataatacgaaaacgaaaacccgaaacccaaactaccgaaactacccgtaaaactaacgacgaactacaaactataacactaataa

SEQ ID NO: 25197 - DNA, 508 bp, Artificial Sequence
  chemically treated genomic DNA (Homo sapiens) CpG-island No: 25197
gaggcggacgtcgattgttgcgcggattgttgcgcgtattgttgtcggagcgtattggtatggttggacggcgttagttcgtttatattgagttggttgtttcggcgcgacgagtagtagtagtagtagtaggacgagttcgatagcggcgaggaggtgcgggttcggaaggcgtcgtcgggcgaggaggtgcggagtagtagggataggttatttttcgttttcgtcgtcggggtatcggaggaggcgtagttgttgtatcggaggtatgggttgttgtcgtcgttggtcggttgttggtgcgcgaggtgcgggtggtggtgagggtgcgggaggggcgcgaagggcgggtacggtttgttttggttttgttgttgttgttggtaatgtaggtgtgaggagcgcggcggcggcggcggttgttttgggaagaagtcgcgttggaattgtaatggggtttttatgttagggttgttaaagttgtagggagattaagcggtggtgtatt

SEQ ID NO: 25198 - DNA, 508 bp, Artificial Sequence
  chemically treated genomic DNA (Homo sapiens) CpG-island No: 25198
aatacaccaccgcttaatctccctacaactttaacaaccctaacataaaaaccccattacaattccaacgcgacttcttcccaaaacaaccgccgccgccgccgcgctcctcacacctacattaccaacaacaacaacaaaaccaaaacaaaccgtacccgcccttcgcgcccctcccgcaccctcaccaccacccgcacctcgcgcaccaacaaccgaccaacgacgacaacaacccatacctccgatacaacaactacgcctcctccgataccccgacgacgaaaacgaaaaataacctatccctactactccgcacctcctcgcccgacgacgccttccgaacccgcacctcctcgccgctatcgaactcgtcctactactactactactactcgtcgcgccgaaacaaccaactcaatataaacgaactaacgccgtccaaccataccaatacgctccgacaacaatacgcgcaacaatccgcgcaacaatcgacgtccgcctc

SEQ ID NO: 25199 - DNA, 508 bp, Artificial Sequence
  chemically treated genomic DNA (Homo sapiens) CpG-island No: 25199
ggtgtattatcgtttggtttttttgtagttttaatagttttgatatggaaattttattgtagttttagcgcggtttttttttagagtagtcgtcgtcgtcgtcgcgttttttatatttgtattgttagtagtagtaatagagttaggataagtcgtgttcgtttttcgcgtttttttcgtatttttattattattcgtatttcgcgtattagtagtcggttagcggcggtagtagtttatgttttcggtgtaatagttgcgtttttttcggtgtttcggcggcgggggcgggagataatttgtttttgttgtttcgtattttttcgttcggcggcgtttttcggattcgtattttttcgtcgttgtcgggttcgttttgttgttgttgttgttgttcgtcgcgtcggggtagttagtttaatgtgagcgagttgacgtcgtttagttatgttagtgcgtttcggtagtagtacgcgtagtagttcgcgtagtagtcggcgttcgtttt

SEQ ID NO: 25200 - DNA, 508 bp, Artificial Sequence
  chemically treated genomic DNA (Homo sapiens) CpG-island No: 25200
aaaacgaacgccgactactacgcgaactactacgcgtactactaccgaaacgcactaacataactaaacgacgtcaactcgctcacattaaactaactaccccgacgcgacgaacaacaacaacaacaacaaaacgaacccgacaacgacgaaaaaatacgaatccgaaaaacgccgccgaacgaaaaaatacgaaacaacaaaaacaaattatctcccgcccccgccgccgaaacaccgaaaaaaacgcaactattacaccgaaaacataaactactaccgccgctaaccgactactaatacgcgaaatacgaataataataaaaatacgaaaaaaacgcgaaaaacgaacacgacttatcctaactctattactactactaacaatacaaatataaaaaacgcgacgacgacgacgactactctaaaaaaaaaccgcgctaaaactacaataaaatttccatatcaaaactattaaaactacaaaaaaaccaaacgataatacacc

SEQ ID NO: 25201 - DNA, 890 bp, Artificial Sequence
  chemically treated genomic DNA (Homo sapiens) CpG-island No: 25201
ttcgttaggtttcgtttacgtcgttatattcgttttgttattttgcggtttagcgggtcgtaaaagatagcgattttcgattagcggttttttatattgtgttcgcgtgtagttggtaattttaaggttcgggtggttgattgtcgtaatggtatcggtgagttcgtttattattcgtgcggataatttttttcgggatgaggtcggttttttttgttagtttgtcgtgacggttatatcggtaaagatagtgcgcgttacgggcgatacggttattcggttatatgttgagggtgttgttcgggtgtagtttcgggtcgggtaggcggttatttgtcgggtttgtggtatacgggatgcggatatttagattcgttgcggtggtgtgaacgtcggttagtttgtcggtggtgttgtagttgtaatttcgggtttggcgcgggttgttgatgcggatgagttcgtcgttgtcgttttaggtgtaatcgcggttagatagtaggttgtttaggtgttggttttgtaattgttcggtaggggtataagcggtggtgagtttataacggtcgaagttgcgtagcgtttttcggtgtaggcggtcgcgggtgtattttattagcggtgtgtcgtcgagttttatgtttgttaggtaatcgttgtcgtaggttagttattttacggcgggtaggttgttcggtatatagcggttcgttagtttttgcgcgttgtacgtatgtttggttttatgttgttagagtagtgttttcgtttgcgggtgatgtatcgtttgacgtttatcggttagtcggttttacgtatcgtatcgtgaagggtgaaatcgtagagcggtggtagtatgacgaacgtggttggttgatagatattagtta

SEQ ID NO: 25202 - DNA, 890 bp, Artificial Sequence
  chemically treated genomic DNA (Homo sapiens) CpG-island No: 25202
taactaatatctatcaaccaaccacgttcgtcatactaccaccgctctacgatttcacccttcacgatacgatacgtaaaaccgactaaccgataaacgtcaaacgatacatcacccgcaaacgaaaacactactctaacaacataaaaccaaacatacgtacaacgcgcaaaaactaacgaaccgctatataccgaacaacctacccgccgtaaaataactaacctacgacaacgattacctaacaaacataaaactcgacgacacaccgctaataaaatacacccgcgaccgcctacaccgaaaaacgctacgcaacttcgaccgttataaactcaccaccgcttatacccctaccgaacaattacaaaaccaacacctaaacaacctactatctaaccgcgattacacctaaaacgacaacgacgaactcatccgcatcaacaacccgcgccaaacccgaaattacaactacaacaccaccgacaaactaaccgacgttcacaccaccgcaacgaatctaaatatccgcatcccgtataccacaaacccgacaaataaccgcctacccgacccgaaactacacccgaacaacaccctcaacatataaccgaataaccgtatcgcccgtaacgcgcactatctttaccgatataaccgtcacgacaaactaacaaaaaaaaccgacctcatcccgaaaaaaattatccgcacgaataataaacgaactcaccgataccattacgacaatcaaccacccgaaccttaaaattaccaactacacgcgaacacaatataaaaaaccgctaatcgaaaatcgctatcttttacgacccgctaaaccgcaaaataacaaaacgaatataacgacgtaaacgaaacctaacgaa

SEQ ID NO: 25203 - DNA, 890 bp, Artificial Sequence
  chemically treated genomic DNA (Homo sapiens) CpG-island No: 25203
tggttgatgtttgttagttagttacgttcgttatattgttatcgttttgcggttttattttttacggtgcggtgcgtgaggtcggttgatcggtgagcgttagacggtgtattattcgtagacggaagtattgttttggtagtatgagattagatatgcgtataacgcgtaggggttggcgaatcgttgtatatcggatagtttgttcgtcgtggaatggttgatttacggtagcggttatttggtaggtatgaaattcggcgatatatcgttggtggagtatattcgcgatcgtttgtatcgggaaacgttgcgtagtttcggtcgttatgaatttattatcgtttatatttttgtcgggtagttatagagttagtatttgaatagtttgttgtttgatcgcgattatatttggaacgataacggcgaatttattcgtattagtagttcgcgttagattcggagttatagttatagtattatcggtaggttgatcggcgtttatattatcgtagcgaatttggatattcgtatttcgtatgttatagattcggtaggtaatcgtttgttcgattcggagttgtattcggatagtatttttagtatgtggtcggataatcgtatcgttcgtgacgcgtattatttttatcggtatgatcgttacggtaggttgatagagaaaatcgattttatttcggaaggggttattcgtacggatgatgagcggatttatcggtattattacgatagttagttattcgggttttggggttgttaattatacgcggatataatatgaagagtcgttggtcgaaagtcgttattttttacgattcgttgggtcgtagggtggtaaaacgggtgtggcggcgtgaacgggatttgacggg

SEQ ID NO: 25204 - DNA, 890 bp, Artificial Sequence
  chemically treated genomic DNA (Homo sapiens) CpG-island No: 25204
cccgtcaaatcccgttcacgccgccacacccgttttaccaccctacgacccaacgaatcgtaaaaaataacgactttcgaccaacgactcttcatattatatccgcgtataattaacaaccccaaaacccgaataactaactatcgtaataataccgataaatccgctcatcatccgtacgaataaccccttccgaaataaaatcgattttctctatcaacctaccgtaacgatcataccgataaaaataatacgcgtcacgaacgatacgattatccgaccacatactaaaaatactatccgaatacaactccgaatcgaacaaacgattacctaccgaatctataacatacgaaatacgaatatccaaattcgctacgataatataaacgccgatcaacctaccgataatactataactataactccgaatctaacgcgaactactaatacgaataaattcgccgttatcgttccaaatataatcgcgatcaaacaacaaactattcaaatactaactctataactacccgacaaaaatataaacgataataaattcataacgaccgaaactacgcaacgtttcccgatacaaacgatcgcgaatatactccaccaacgatatatcgccgaatttcatacctaccaaataaccgctaccgtaaatcaaccattccacgacgaacaaactatccgatatacaacgattcgccaacccctacgcgttatacgcatatctaatctcatactaccaaaacaatacttccgtctacgaataatacaccgtctaacgctcaccgatcaaccgacctcacgcaccgcaccgtaaaaaataaaaccgcaaaacgataacaatataacgaacgtaactaactaacaaacatcaacca

SEQ ID NO: 25205 - DNA, 647 bp, Artificial Sequence
  chemically treated genomic DNA (Homo sapiens) CpG-island No: 25205
ggcgtagcgcgatagttttattagagatgtttgttttatatacgttttcgtgcgcgcgttatggtttcgttatacgtgtaagttttgtaaggtttttatagttttttaatttagattttaaattttgtggttcgcgttttggtcgtatcgtttttatttttggacgttattgtattttcgtgtttattaagcggtttcgcggcgttaatatacgtttttcgcggcgtttttcgtttcggtatataaaagcgttcgttggttttattttttcgaatattttcggtaataacgtttttcggcggtttttttaattaatattcggtatttcgagttcggcggtcggcggtttacgcgttaatttcgggttttggtcgggcgttttttttttgggttttcgcgcgtttaatcgtttttcgggcggacggattttggggtttttttgttttttttcgtttcgattcgcgcgttcgttcgttcgttttttttttttttcgcgtacgttcgtttttcgaaagtcgtcgtttgtagtagaatcgttcgttttttttaggtacgtttttcgttggggttttcgcgtatttttcgcgtattttcgggagcgggtattattatttacgtagttagcgtattttttcggggtcgcggtt

SEQ ID NO: 25206 - DNA, 647 bp, Artificial Sequence
  chemically treated genomic DNA (Homo sapiens) CpG-island No: 25206
aaccgcgaccccgaaaaaatacgctaactacgtaaataataatacccgctcccgaaaatacgcgaaaaatacgcgaaaaccccaacgaaaaacgtacctaaaaaaaacgaacgattctactacaaacgacgactttcgaaaaacgaacgtacgcgaaaaaaaaaaaaaacgaacgaacgaacgcgcgaatcgaaacgaaaaaaaacaaaaaaaccccaaaatccgtccgcccgaaaaacgattaaacgcgcgaaaacccaaaaaaaaaacgcccgaccaaaacccgaaattaacgcgtaaaccgccgaccgccgaactcgaaataccgaatattaattaaaaaaaccgccgaaaaacgttattaccgaaaatattcgaaaaaataaaaccaacgaacgcttttatataccgaaacgaaaaacgccgcgaaaaacgtatattaacgccgcgaaaccgcttaataaacacgaaaatacaataacgtccaaaaataaaaacgatacgaccaaaacgcgaaccacaaaatttaaaatctaaattaaaaaactataaaaaccttacaaaacttacacgtataacgaaaccataacgcgcgcacgaaaacgtatataaaacaaacatctctaataaaactatcgcgctacgcc

SEQ ID NO: 25207 - DNA, 647 bp, Artificial Sequence
  chemically treated genomic DNA (Homo sapiens) CpG-island No: 25207
ggtcgcggtttcgggggagtgcgttggttgcgtgggtgatggtgttcgttttcggggatacgcggggggtgcgcgggggttttaacggggggcgtgtttgggggaagcgggcgattttgttgtaagcggcggttttcgggaaacgggcgtgcgcgggaaggggggggggcgagcgagcgggcgcgcgggtcggaacggaagggggtaggaggattttagggttcgttcgttcgaggagcggttaagcgcgcgggggtttaggaaggaggcgttcgattagggttcgaggttggcgcgtgggtcgtcggtcgtcgggttcggggtgtcgggtgttggttgggagggtcgtcgggaagcgttgttgtcgagggtgttcgggagggtggggttagcgggcgtttttgtgtgtcggggcggggagcgtcgcggggggcgtgtgttggcgtcgcgggatcgtttggtgaatacgagggtgtagtggcgtttagggatgggaacggtgcggttagagcgcgggttatagggtttgaaatttgggttggagggttgtaagggttttgtaaggtttgtacgtgtgacggggttatgacgcgcgtacgggggcgtgtgtgagataggtatttttagtggggttgtcgcgttgcgtt

SEQ ID NO: 25208 - DNA, 647 bp, Artificial Sequence
  chemically treated genomic DNA (Homo sapiens) CpG-island No: 25208
aacgcaacgcgacaaccccactaaaaatacctatctcacacacgcccccgtacgcgcgtcataaccccgtcacacgtacaaaccttacaaaacccttacaaccctccaacccaaatttcaaaccctataacccgcgctctaaccgcaccgttcccatccctaaacgccactacaccctcgtattcaccaaacgatcccgcgacgccaacacacgccccccgcgacgctccccgccccgacacacaaaaacgcccgctaaccccaccctcccgaacaccctcgacaacaacgcttcccgacgaccctcccaaccaacacccgacaccccgaacccgacgaccgacgacccacgcgccaacctcgaaccctaatcgaacgcctccttcctaaacccccgcgcgcttaaccgctcctcgaacgaacgaaccctaaaatcctcctacccccttccgttccgacccgcgcgcccgctcgctcgccccccccccttcccgcgcacgcccgtttcccgaaaaccgccgcttacaacaaaatcgcccgcttcccccaaacacgccccccgttaaaacccccgcgcaccccccgcgtatccccgaaaacgaacaccatcacccacgcaaccaacgcactcccccgaaaccgcgacc

SEQ ID NO: 25209 - DNA, 744 bp, Artificial Sequence
  chemically treated genomic DNA (Homo sapiens) CpG-island No: 25209
ggttaggcgtcgtagtgcgtttcgtcggtttagatattttagcggatttcgatttcgttaagttgcgcgttttgagtgtttttattacgatagtcgttgttttgaacgtgagcgtaaggtttaatagtttgttcgttagttattttttgatgttagttgacgcgataatttgtcgtttacgtttgaatattttggcggatatattgcgtcgtatcgaggtataggttttgggtaaattagtttgaatcgttcgggtgttattcgtcgttgtatttgtcgttattaaagaatgaggcgttggcgcgtagtatggtatcggatgcgttattttggtcgtttagcggtaattgttgttcgacggcgatgaaaaagatttgatcgcgtagcggtttttagcgtagatcggtgtcggatatcggattttttatcggtattattatttcgtttttttcggtatcggtaaagacgcggttataaattgagagtaggtcgttttttagtagtatattgcgttcgatgcggtattcggtttttagttgttcgtagttacgatagtttttttttggcgttgcgtcgtcgatattattgttagcggtatttatggcgtcggaacgtaagtcgatggaagaatcgaaattgaacgtttagcggcgatcgatttttttatgtaaacggcggaaattgaagcgttgttgattttgttttggggttagtggggttattagcgtttgattattaatgtta

SEQ ID NO: 25210 - DNA, 744 bp, Artificial Sequence
  chemically treated genomic DNA (Homo sapiens) CpG-island No: 25210
taacattaataatcaaacgctaataaccccactaaccccaaaacaaaatcaacaacgcttcaatttccgccgtttacataaaaaaatcgatcgccgctaaacgttcaatttcgattcttccatcgacttacgttccgacgccataaataccgctaacaataatatcgacgacgcaacgccaaaaaaaaactatcgtaactacgaacaactaaaaaccgaataccgcatcgaacgcaatatactactaaaaaacgacctactctcaatttataaccgcgtctttaccgataccgaaaaaaacgaaataataataccgataaaaaatccgatatccgacaccgatctacgctaaaaaccgctacgcgatcaaatctttttcatcgccgtcgaacaacaattaccgctaaacgaccaaaataacgcatccgataccatactacgcgccaacgcctcattctttaataacgacaaatacaacgacgaataacacccgaacgattcaaactaatttacccaaaacctatacctcgatacgacgcaatatatccgccaaaatattcaaacgtaaacgacaaattatcgcgtcaactaacatcaaaaaataactaacgaacaaactattaaaccttacgctcacgttcaaaacaacgactatcgtaataaaaacactcaaaacgcgcaacttaacgaaatcgaaatccgctaaaatatctaaaccgacgaaacgcactacgacgcctaacc

SEQ ID NO: 25211 - DNA, 744 bp, Artificial Sequence
  chemically treated genomic DNA (Homo sapiens) CpG-island No: 25211
tgatattgataattaggcgttgataattttattgattttagaataaaattaataacgttttaattttcgtcgtttgtatgaggaggtcggtcgtcgttggacgtttagtttcgatttttttatcggtttgcgtttcggcgttatgagtatcgttaataataatgtcggcggcgtagcgttagggaaaagttatcgtagttacggataattggaagtcgagtatcgtatcggacgtaatatgttgttggaaggcgatttgtttttagtttatagtcgcgtttttgtcgatatcggagaaaacggggtgatgatgtcggtgaaaaattcgatgttcggtatcggtttgcgttggaagtcgttgcgcgattagattttttttatcgtcgtcgaatagtagttgtcgttgaacggttaaaatggcgtattcgatattatgttgcgcgttagcgttttattttttaatggcggtaaatatagcgacgaatggtattcgaacggtttaggttggtttgtttaaaatttgtatttcgatgcggcgtaatatattcgttaggatatttaggcgtggacggtagattatcgcgttagttggtattagaaggtagttaacggatagattattgagttttacgtttacgtttaggataacggttatcgtgataaaggtatttagggcgcgtagtttggcggagtcggggttcgttggaatatttggatcggcgagacgtattacgacgtttggtt

SEQ ID NO: 25212 - DNA, 744 bp, Artificial Sequence
  chemically treated genomic DNA (Homo sapiens) CpG-island No: 25212
aaccaaacgtcgtaatacgtctcgccgatccaaatattccaacgaaccccgactccgccaaactacgcgccctaaatacctttatcacgataaccgttatcctaaacgtaaacgtaaaactcaataatctatccgttaactaccttctaataccaactaacgcgataatctaccgtccacgcctaaatatcctaacgaatatattacgccgcatcgaaatacaaattttaaacaaaccaacctaaaccgttcgaataccattcgtcgctatatttaccgccattaaaaaataaaacgctaacgcgcaacataatatcgaatacgccattttaaccgttcaacgacaactactattcgacgacgataaaaaaaatctaatcgcgcaacgacttccaacgcaaaccgataccgaacatcgaatttttcaccgacatcatcaccccgttttctccgatatcgacaaaaacgcgactataaactaaaaacaaatcgccttccaacaacatattacgtccgatacgatactcgacttccaattatccgtaactacgataacttttccctaacgctacgccgccgacattattattaacgatactcataacgccgaaacgcaaaccgataaaaaaatcgaaactaaacgtccaacgacgaccgacctcctcatacaaacgacgaaaattaaaacgttattaattttattctaaaatcaataaaattatcaacgcctaattatcaatatca

SEQ ID NO: 25213 - DNA, 839 bp, Artificial Sequence
  chemically treated genomic DNA (Homo sapiens) CpG-island No: 25213
  unsure (535)
ttgtcgagtcgtgttatataagtcgatatacggagtaagcgacggttggggtagtagtgtagtgttgtgttgatagtatggcgttgttttttgttcgttttttcgtcgattatacgtgtatttagtttgttgtattaggatcggtttaggtatgtcggtcgtagtaggatatttatgttattacgttaagagcgtacggtaagtacggcgttagtttagtacgcgttttagggcgattaatcgatagtgataacgaagtattgttgacgttaaatacgggttatagtaaatagagtataagggaaattaggtagaatataggtacgtcgcgttgattcgagacgtagtgaagtcgataagagcgttttggattttttatgtattgacgcgatttacgaaatagattcgagcgattatagagatttagtacggtcgggcgataatattagaattagggatttatgaatagtagtattacggtagttgtatcgtttaagcggaagcgttttattcgatgtcgtttttattttgatanatcgatatttggatcgcgttaatcgggaaaatttggttcggtttagaatattttacggggatagatagagcgtcgattttattgagcgtcgagtcgaggagggatttttaatacggtaggaggtagatagcgttttagacgtgggcgtgtgtataaaagttcgcgataacgtcgatcgaggcgttatattcgtataaacgcgcgacgattacgtcgagagaatcgatacgttttagcgatatttattaggtcggtagtaagttacggggatagtagttatcgtatattttcgagggcgatacgt

SEQ ID NO: 25214 - DNA, 839 bp, Artificial Sequence
  chemically treated genomic DNA (Homo sapiens) CpG-island No: 25214
  unsure (305)
acgtatcgccctcgaaaatatacgataactactatccccgtaacttactaccgacctaataaatatcgctaaaacgtatcgattctctcgacgtaatcgtcgcgcgtttatacgaatataacgcctcgatcgacgttatcgcgaacttttatacacacgcccacgtctaaaacgctatctacctcctaccgtattaaaaatccctcctcgactcgacgctcaataaaatcgacgctctatctatccccgtaaaatattctaaaccgaaccaaattttcccgattaacgcgatccaaatatcgatntatcaaaataaaaacgacatcgaataaaacgcttccgcttaaacgatacaactaccgtaatactactattcataaatccctaattctaatattatcgcccgaccgtactaaatctctataatcgctcgaatctatttcgtaaatcgcgtcaatacataaaaaatccaaaacgctcttatcgacttcactacgtctcgaatcaacgcgacgtacctatattctacctaatttcccttatactctatttactataacccgtatttaacgtcaacaatacttcgttatcactatcgattaatcgccctaaaacgcgtactaaactaacgccgtacttaccgtacgctcttaacgtaataacataaatatcctactacgaccgacatacctaaaccgatcctaatacaacaaactaaatacacgtataatcgacgaaaaaacgaacaaaaaacaacgccatactatcaacacaacactacactactaccccaaccgtcgcttactccgtatatcgacttatataacacgactcgacaa

SEQ ID NO: 25215 - DNA, 839 bp, Artificial Sequence
  chemically treated genomic DNA (Homo sapiens) CpG-island No: 25215
  unsure (305)
gcgtgtcgttttcggaggtgtgcggtggttgttgttttcgtggtttgttgtcggtttggtgggtgtcgttggggcgtgtcggttttttcggcgtggtcgtcgcgcgtttgtgcgggtgtggcgtttcggtcggcgttatcgcgggtttttgtgtatacgtttacgtttgagacgttgtttgttttttgtcgtgttggaggttttttttcggttcggcgtttagtgagatcggcgttttgtttgttttcgtagggtattttaggtcggattaggttttttcggttaacgcggtttaggtgtcggtntattaggatggaggcggtatcgagtgggacgttttcgtttgggcggtatagttgtcgtggtattgttgtttataggtttttggttttggtgttgtcgttcgatcgtgttggatttttgtagtcgttcggatttgtttcgtagatcgcgttagtatatgggaggtttaggacgtttttatcggttttattacgtttcgagttaacgcgacgtgtttgtgttttatttggttttttttgtgttttgtttgttgtggttcgtgtttggcgttagtagtgtttcgttgttattgtcggttagtcgttttggagcgcgtgttggattaacgtcgtatttgtcgtgcgtttttgacgtgatagtatgagtattttgttgcggtcggtatgtttggatcgattttgatgtagtaagttgagtgtacgtgtagtcgacggaaggacggataagaggtagcgttatattattagtataatattgtattgttgttttagtcgtcgtttgtttcgtatgtcgatttatatagtacgattcggtag

SEQ ID NO: 25216 - DNA, 839 bp, Artificial Sequence
  chemically treated genomic DNA (Homo sapiens) CpG-island No: 25216
  unsure (535)
ctaccgaatcgtactatataaatcgacatacgaaacaaacgacgactaaaacaacaatacaatattatactaataatataacgctacctcttatccgtccttccgtcgactacacgtacactcaacttactacatcaaaatcgatccaaacataccgaccgcaacaaaatactcatactatcacgtcaaaaacgcacgacaaatacgacgttaatccaacacgcgctccaaaacgactaaccgacaataacaacgaaacactactaacgccaaacacgaaccacaacaaacaaaacacaaaaaaaaccaaataaaacacaaacacgtcgcgttaactcgaaacgtaataaaaccgataaaaacgtcctaaacctcccatatactaacgcgatctacgaaacaaatccgaacgactacaaaaatccaacacgatcgaacgacaacaccaaaaccaaaaacctataaacaacaataccacgacaactataccgcccaaacgaaaacgtcccactcgataccgcctccatcctaatanaccgacacctaaaccgcgttaaccgaaaaaacctaatccgacctaaaataccctacgaaaacaaacaaaacgccgatctcactaaacgccgaaccgaaaaaaaacctccaacacgacaaaaaacaaacaacgtctcaaacgtaaacgtatacacaaaaacccgcgataacgccgaccgaaacgccacacccgcacaaacgcgcgacgaccacgccgaaaaaaccgacacgccccaacgacacccaccaaaccgacaacaaaccacgaaaacaacaaccaccgcacacctccgaaaacgacacgc

SEQ ID NO: 25217 - DNA, 784 bp, Artificial Sequence
  chemically treated genomic DNA (Homo sapiens) CpG-island No: 25217
aatatgacggttaaaaaagtgatagtttacgtttttttattgttcggggatggggagtaagtttagttattcgttgttttcgggtgtcgcgtgcgtagttgtacgttatttttagacgaatcgatgattggatggatggtcgtcgtagtcgttatattgatgatacggatgtgttttttcgtatatattatgttatcggagagttgttaacgtatggttatcgtcgggtatgggcgttgtttcgtagataggtagaatttgatggtatgtttgcgattaatgttaaacgtgtttatcggattatgcgttagaatgcgttgttgtttgagcgaaaatttgttgtatcgttatcgaaacgggtatatataggtagagtggtcgtgaaagaaagtaattagcgatggtgttttgacgggttcgagttttgttgtgataacggagagagattgcgtgttacgttcgcgttggattgttgtgatcgtgaggtattgtattgggcggttattatcggcggttttaatagtgaaatagtataggacgttatgttgggagcggtggaacgtcgtttcggtaacgatttttcgtcgtttttagtggagtggttgacggataatggtttatgttatcgggttaatgaaatacgttagttcgttcggatgttgggatttgaatcgaagaatacggcggtgcggagttcggagagtaacggaatagtagagagtttcgtgaaaacgataaagcgtgattatattagtattatgtttaaattagacgggttaacggt

SEQ ID NO: 25218 - DNA, 784 bp, Artificial Sequence
  chemically treated genomic DNA (Homo sapiens) CpG-island No: 25218
accgttaacccgtctaatttaaacataatactaatataatcacgctttatcgttttcacgaaactctctactattccgttactctccgaactccgcaccgccgtattcttcgattcaaatcccaacatccgaacgaactaacgtatttcattaacccgataacataaaccattatccgtcaaccactccactaaaaacgacgaaaaatcgttaccgaaacgacgttccaccgctcccaacataacgtcctatactatttcactattaaaaccgccgataataaccgcccaatacaatacctcacgatcacaacaatccaacgcgaacgtaacacgcaatctctctccgttatcacaacaaaactcgaacccgtcaaaacaccatcgctaattactttctttcacgaccactctacctatatatacccgtttcgataacgatacaacaaattttcgctcaaacaacaacgcattctaacgcataatccgataaacacgtttaacattaatcgcaaacataccatcaaattctacctatctacgaaacaacgcccatacccgacgataaccatacgttaacaactctccgataacataatatatacgaaaaaacacatccgtatcatcaatataacgactacgacgaccatccatccaatcatcgattcgtctaaaaataacgtacaactacgcacgcgacacccgaaaacaacgaataactaaacttactccccatccccgaacaataaaaaaacgtaaactatcacttttttaaccgtcatatt

SEQ ID NO: 25219 - DNA, 784 bp, Artificial Sequence
  chemically treated genomic DNA (Homo sapiens) CpG-island No: 25219
gtcgttaattcgtttggtttgggtatgatattgatgtagttacgttttatcgtttttacgaagttttttgttatttcgttatttttcggatttcgtatcgtcgtgtttttcggtttaagttttaatattcgggcgaattggcgtgttttattagttcggtagtatgaattattattcgttagttattttattggagacgacggaagatcgttgtcgaagcggcgttttatcgtttttagtatgacgttttgtattgttttattgttgaagtcgtcggtagtgatcgtttagtgtagtgttttacgattatagtagtttagcgcgaacgtgatacgtagttttttttcgttattatagtagaattcgaattcgttagagtattatcgttgattgtttttttttacggttattttgtttgtatgtgttcgtttcgatggcggtatagtaggttttcgtttaagtaatagcgtattttggcgtatgattcggtaaatacgtttggtattgatcgtaggtatattattaagttttgtttgtttgcgaagtagcgtttatattcgacgataattatacgttggtagtttttcgataatatggtgtatacggagaagtatattcgtattattagtgtgacgattgcggcggttatttatttagttatcggttcgtttgagaatgacgtgtaattgcgtacgcgatattcggagataacgggtgattaagtttattttttattttcgggtaataagggggcgtgggttattatttttttggtcgttatatt

SEQ ID NO: 25220 - DNA, 784 bp, Artificial Sequence
  chemically treated genomic DNA (Homo sapiens) CpG-island No: 25220
aatataacgaccaaaaaaataataacccacgcccccttattacccgaaaataaaaaataaacttaatcacccgttatctccgaatatcgcgtacgcaattacacgtcattctcaaacgaaccgataactaaataaataaccgccgcaatcgtcacactaataatacgaatatacttctccgtatacaccatattatcgaaaaactaccaacgtataattatcgtcgaatataaacgctacttcgcaaacaaacaaaacttaataatatacctacgatcaataccaaacgtatttaccgaatcatacgccaaaatacgctattacttaaacgaaaacctactataccgccatcgaaacgaacacatacaaacaaaataaccgtaaaaaaaaacaatcaacgataatactctaacgaattcgaattctactataataacgaaaaaaaactacgtatcacgttcgcgctaaactactataatcgtaaaacactacactaaacgatcactaccgacgacttcaacaataaaacaatacaaaacgtcatactaaaaacgataaaacgccgcttcgacaacgatcttccgtcgtctccaataaaataactaacgaataataattcatactaccgaactaataaaacacgccaattcgcccgaatattaaaacttaaaccgaaaaacacgacgatacgaaatccgaaaaataacgaaataacaaaaaacttcgtaaaaacgataaaacgtaactacatcaatatcatacccaaaccaaacgaattaacgac

SEQ ID NO: 25221 - DNA, 738 bp, Artificial Sequence
  chemically treated genomic DNA (Homo sapiens) CpG-island No: 25221
tttcggttttttttacgtagtttcggttatttttttcgttattcgttggatttcggtttttagtgttttgtttcggttcgttcgtttttaatttcgtatttgttttcggttttcgttttttttgtttagttcgattttttcgttcgtttttattttaggtgttatttttttttcgttttttttgtttcgcgatttttcgcgtttggcgttagtgttatcgtttttcggtttagttcggattttttcgttcggtttcggttttttcgtcgagtttcggtttttttcgtttagtttcggtttttttcgcgtttggtttcggtttttttcgtttagtttcggtttttttattcgttttcgtttggcgttttattatggcgttgtttgtttttttttgttttcgatttgaaatttttttttttttcgttttggttatggttcggttttttcgtcgtttttttcgttgtttttcggttttgttcggtttttttcgtttggtttcggttttttttattggttttggttttttcggtttttttcggtcgattcggtttttattattcgtttttggtttttttcgtttagttttggttttttcggcgtttttcggtttagttcgtttagttcggtttttttcgttcggttttagtttttttcgatttcgtcgttttagtgggaatgaagttatgttcgttgttaatatttttggatgttgtgaggttacgtggagtgtgtgagaga

SEQ ID NO: 25222 - DNA, 738 bp, Artificial Sequence
  chemically treated genomic DNA (Homo sapiens) CpG-island No: 25222
tctctcacacactccacgtaacctcacaacatccaaaaatattaacaacgaacataacttcattcccactaaaacgacgaaatcgaaaaaaactaaaaccgaacgaaaaaaaccgaactaaacgaactaaaccgaaaaacgccgaaaaaaccaaaactaaacgaaaaaaaccaaaaacgaataataaaaaccgaatcgaccgaaaaaaaccgaaaaaaccaaaaccaataaaaaaaaccgaaaccaaacgaaaaaaaccgaacaaaaccgaaaaacaacgaaaaaaacgacgaaaaaaccgaaccataaccaaaacgaaaaaaaaaaaaatttcaaatcgaaaacaaaaaaaaacaaacaacgccataataaaacgccaaacgaaaacgaataaaaaaaccgaaactaaacgaaaaaaaccgaaaccaaacgcgaaaaaaaccgaaactaaacgaaaaaaaccgaaactcgacgaaaaaaccgaaaccgaacgaaaaaatccgaactaaaccgaaaaacgataacactaacgccaaacgcgaaaaatcgcgaaacaaaaaaaacgaaaaaaaaataacacctaaaataaaaacgaacgaaaaaatcgaactaaacaaaaaaaacgaaaaccgaaaacaaatacgaaattaaaaacgaacgaaccgaaacaaaacactaaaaaccgaaatccaacgaataacgaaaaaaataaccgaaactacgtaaaaaaaaccgaaa

SEQ ID NO: 25223 - DNA, 738 bp, Artificial Sequence
  chemically treated genomic DNA (Homo sapiens) CpG-island No: 25223
ttttttatatattttacgtggttttataatatttaaaagtgttagtagcgaatatggttttatttttattgaagcggcgaaatcggagaaaattgaagtcgggcggagaaagtcgaattgaacgaattgagtcgaggagcgtcggagaagttaaggttgggcgaggggagttaaagacgggtggtgggagtcgagtcggtcgagaggaatcggaaaagttaaggttaatgggaggagtcgaggttaggcgggaggagtcgagtagggtcgaaaagtagcgggaagggcggcggagaagtcgagttatggttaggacggagggaggggaagttttaggtcggagatagagagggataggtagcgttatggtaggacgttaggcgaggacggatggggaagtcgaagttgggcggaaagagtcgaagttaggcgcgaaggaagtcgaagttgggcgggggaagtcgaggttcggcggaagagtcgaggtcgggcgggaggattcgagttggatcgaaaagcggtggtattggcgttaagcgcgggaggtcgcggggtagagagggcgaagggagggtagtatttggggtgagggcgggcgggagagtcgagttgggtagaaagagcggaagtcgagagtaagtgcggggttgagggcgggcgaatcgaggtagggtattggaagtcgaggtttagcgggtggcggagagggtaatcgaggttgcgtgggaggagtcgagg

SEQ ID NO: 25224 - DNA, 738 bp, Artificial Sequence
  chemically treated genomic DNA (Homo sapiens) CpG-island No: 25224
cctcgactcctcccacgcaacctcgattaccctctccgccacccgctaaacctcgacttccaataccctacctcgattcgcccgccctcaaccccgcacttactctcgacttccgctctttctacccaactcgactctcccgcccgccctcaccccaaatactaccctcccttcgccctctctaccccgcgacctcccgcgcttaacgccaataccaccgcttttcgatccaactcgaatcctcccgcccgacctcgactcttccgccgaacctcgacttcccccgcccaacttcgacttccttcgcgcctaacttcgactctttccgcccaacttcgacttccccatccgtcctcgcctaacgtcctaccataacgctacctatccctctctatctccgacctaaaacttcccctccctccgtcctaaccataactcgacttctccgccgcccttcccgctacttttcgaccctactcgactcctcccgcctaacctcgactcctcccattaaccttaacttttccgattcctctcgaccgactcgactcccaccacccgtctttaactcccctcgcccaaccttaacttctccgacgctcctcgactcaattcgttcaattcgactttctccgcccgacttcaattttctccgatttcgccgcttcaataaaaataaaaccatattcgctactaacacttttaaatattataaaaccacgtaaaatatataaaaaa

SEQ ID NO: 25225 - DNA, 874 bp, Artificial Sequence
  chemically treated genomic DNA (Homo sapiens) CpG-island No: 25225
gcgcgcggcgtggtgggtagacgtttttttttttgggtttcggaggttaggtcggattgggagcgtatttatttcggtgaagaagttatttattgttttagcgtagtttcggattcgtcgagtgtcgtttcgattcgcggaagttagcgtcgtcgcgggttcggggaaattatgcgtgttacggcgttattttcgaggacgcgcgttcgcggggtttttttgttgttatcgttcggtttttttttgttttttttattttttgttcgtttaaatttaagtttttaattcgttcgtttcgacggtagtttttgttttttttttttttaagttttttattattgggcgtagcgttcgtaagcggagaatagttggtggtatattttttttttaggcgggggaaggcggcggggtgttggcgagcgcggttttttttttttgcgtttcggtcgggggttttcggggcgggtaggaggatagcgggtcgtaaagtgagtaggagtcgcgattttcgcgcgagcgtttggaggtgagtagtttcgcgtcgcggtttagttagttttcgttcgcgggattatagtttagcgatttcgtttcgttttttcgtagtcggtttcgttttttcgtagtcggtttcgttttttcgttcgcggtttcgtttttaggagtttggtttttcgttaattatatcgtttggtttcgttcgggcggagcgtttcgtttttttttcgattaggtttcgtttattttaagttcgaagtagtcgtaggttcgttagcggattcgggagggggtcgcgtgtttttttaggtttttttacgtaggcgtggggaggggatttaatttttttttttgtagagagagattaaataattat

SEQ ID NO: 25226 - DNA, 874 bp, Artificial Sequence
  chemically treated genomic DNA (Homo sapiens) CpG-island No: 25226
ataattatttaatctctctctacaaaaaaaaaaattaaatcccctccccacgcctacgtaaaaaaacctaaaaaaacacgcgaccccctcccgaatccgctaacgaacctacgactacttcgaacttaaaataaacgaaacctaatcgaaaaaaaaacgaaacgctccgcccgaacgaaaccaaacgatataattaacgaaaaaccaaactcctaaaaacgaaaccgcgaacgaaaaaacgaaaccgactacgaaaaaacgaaaccgactacgaaaaaacgaaacgaaatcgctaaactataatcccgcgaacgaaaactaactaaaccgcgacgcgaaactactcacctccaaacgctcgcgcgaaaatcgcgactcctactcactttacgacccgctatcctcctacccgccccgaaaacccccgaccgaaacgcaaaaaaaaaaaaccgcgctcgccaacaccccgccgccttcccccgcctaaaaaaaaaatataccaccaactattctccgcttacgaacgctacgcccaataataaaaaacttaaaaaaaaaaaaaacaaaaactaccgtcgaaacgaacgaattaaaaacttaaatttaaacgaacaaaaaataaaaaaaacaaaaaaaaaccgaacgataacaacaaaaaaaccccgcgaacgcgcgtcctcgaaaataacgccgtaacacgcataatttccccgaacccgcgacgacgctaacttccgcgaatcgaaacgacactcgacgaatccgaaactacgctaaaacaataaataacttcttcaccgaaataaatacgctcccaatccgacctaacctccgaaacccaaaaaaaaaaacgtctacccaccacgccgcgcgc

SEQ ID NO: 25227 - DNA, 874 bp, Artificial Sequence
  chemically treated genomic DNA (Homo sapiens) CpG-island No: 25227
gtgattgtttagtttttttttgtagagggaagagttaaattttttttttacgtttacgtgggaagatttggggaaatacgcggttttttttcgggttcgttaacgagtttgcggttgtttcgggtttagagtgggcggggtttggtcgggaagggggcggggcgtttcgttcgggcggggttagacggtgtggttggcggagggttaagtttttgggggcggggtcgcgagcgggagggcggggtcggttgcgggagggcggggtcggttgcgggagggcggggcgaggtcgttgggttgtagtttcgcgggcgagagttggttgagtcgcggcgcgggattgtttatttttaagcgttcgcgcggggatcgcggtttttgtttattttgcggttcgttgtttttttgttcgtttcgagggttttcggtcggagcgtagagggagggggtcgcgttcgttagtatttcgtcgttttttttcgtttgggggaagaatgtgttattagttgtttttcgtttgcgagcgttgcgtttagtagtgaggaatttggaggaagaagagataaaggttgtcgtcgggacgggcgagttagggatttgggtttgggcgaataaaaggtgagaaggataagaagggatcgggcgatggtagtaggggagtttcgcgggcgcgcgttttcgggagtggcgtcgtgatacgtatggttttttcggattcgcggcggcgttgattttcgcgagtcggagcggtattcggcgagttcgggattgcgttggaataatggataatttttttatcgaggtaagtgcgtttttagttcgatttggttttcggagtttagggagagaggcgtttgtttattacgtcgcgcgt

SEQ ID NO: 25228 - DNA, 874 bp, Artificial Sequence
  chemically treated genomic DNA (Homo sapiens) CpG-island No: 25228
acgcgcgacgtaataaacaaacgcctctctccctaaactccgaaaaccaaatcgaactaaaaacgcacttacctcgataaaaaaattatccattattccaacgcaatcccgaactcgccgaataccgctccgactcgcgaaaatcaacgccgccgcgaatccgaaaaaaccatacgtatcacgacgccactcccgaaaacgcgcgcccgcgaaactcccctactaccatcgcccgatcccttcttatccttctcaccttttattcgcccaaacccaaatccctaactcgcccgtcccgacgacaacctttatctcttcttcctccaaattcctcactactaaacgcaacgctcgcaaacgaaaaacaactaataacacattcttcccccaaacgaaaaaaaacgacgaaatactaacgaacgcgaccccctccctctacgctccgaccgaaaaccctcgaaacgaacaaaaaaacaacgaaccgcaaaataaacaaaaaccgcgatccccgcgcgaacgcttaaaaataaacaatcccgcgccgcgactcaaccaactctcgcccgcgaaactacaacccaacgacctcgccccgccctcccgcaaccgaccccgccctcccgcaaccgaccccgccctcccgctcgcgaccccgcccccaaaaacttaaccctccgccaaccacaccgtctaaccccgcccgaacgaaacgccccgcccccttcccgaccaaaccccgcccactctaaacccgaaacaaccgcaaactcgttaacgaacccgaaaaaaaaccgcgtatttccccaaatcttcccacgtaaacgtaaaaaaaaaatttaactcttccctctacaaaaaaaaactaaacaatcac

SEQ ID NO: 25229 - DNA, 737 bp, Artificial Sequence
  chemically treated genomic DNA (Homo sapiens) CpG-island No: 25229
  unsure (706..707, 715..)
tggattcgtcgcgatttgcgttagttttgttgcgtttagtgttggttttatattttttttcgtacggtaatcgagttgttgatcgttgatattcgttagtatttgacgttagtatttattacgcgtttcgtttttaattaacgtaatattttgcggtttaatatcgtaggtatgtacgatatttatgttatttgttagcgtataatttacgttttttagtattgttcgcgttagtttattggggttatgttgatgagttaaattaaagaaaatttttttcgtttggggattattgtgtggcgtacgttcgtcggaaagataaggtagaaattaaattggttcggtatttttattagtttgttgagttgtagcgattaaagttgggatattgtttaggtcggttaatttcgcggtttaatttagatacgacgttgtatttagtattatagatattaaatgttaacgttgcggtagcgtatggtaaaagttatgtacggcgttttttgggttgtttaagaatttttcgttgatagtaaaatagattttcgacgtttttagcgataatatgtttgattagtattaattatttttatattaattgtattagttgtattgtcgttatcgtttgttaattggtatcgtcgttatattttacgttttcgtaattttaggtaataaagtattagtaattttcgcgtgttttcgnntataagtnngcgggtatttggttacgagat

SEQ ID NO: 25230 - DNA, 737 bp, Artificial Sequence
  chemically treated genomic DNA (Homo sapiens) CpG-island No: 25230
  unsure (22..23, 31..)
atctcgtaaccaaatacccgcnnacttatanncgaaaacacgcgaaaattactaatactttattacctaaaattacgaaaacgtaaaatataacgacgataccaattaacaaacgataacgacaatacaactaatacaattaatataaaaataattaatactaatcaaacatattatcgctaaaaacgtcgaaaatctattttactatcaacgaaaaattcttaaacaacccaaaaaacgccgtacataacttttaccatacgctaccgcaacgttaacatttaatatctataatactaaatacaacgtcgtatctaaattaaaccgcgaaattaaccgacctaaacaatatcccaactttaatcgctacaactcaacaaactaataaaaataccgaaccaatttaatttctaccttatctttccgacgaacgtacgccacacaataatccccaaacgaaaaaaattttctttaatttaactcatcaacataaccccaataaactaacgcgaacaatactaaaaaacgtaaattatacgctaacaaataacataaatatcgtacatacctacgatattaaaccgcaaaatattacgttaattaaaaacgaaacgcgtaataaatactaacgtcaaatactaacgaatatcaacgatcaacaactcgattaccgtacgaaaaaaaatataaaaccaacactaaacgcaacaaaactaacgcaaatcgcgacgaatcca

SEQ ID NO: 25231 - DNA, 737 bp, Artificial Sequence
  chemically treated genomic DNA (Homo sapiens) CpG-island No: 25231
  unsure (22..23, 31..)
atttcgtgattagatgttcgtnnatttatanncgaaggtacgcggaaattattggtgttttgttatttgaagttgcgaaagcgtggggtatggcgacggtgttagttggtaggcggtggcgataatgtagttggtgtagttggtgtgggaatggttgatgttaattaggtatgttatcgttggggacgtcgggggtttattttgttgttagcgaagggtttttaagtagtttagaaggcgtcgtatatagtttttgttatgcgttatcgtaacgttggtatttaatgtttgtgatgttgagtgtagcgtcgtgtttggattgggtcgcgaaattaatcggtttgagtaatgttttagttttaatcgttgtagtttaataggttgatgaaagtgtcgagttagtttggtttttgttttattttttcggcgagcgtacgttatataataatttttaggcgaagggggttttttttggtttgatttattaatatggttttaatgaattggcgcgagtagtgttggaaggcgtgggttatgcgttggtagatggtatggatgtcgtgtatgtttgcggtattaaatcgtaaagtgttacgttgattgggggcggggcgcgtagtgagtattggcgttagatgttggcggatattagcggttagtagttcgattatcgtacggggggggatgtggggttagtattgggcgtagtaaggttggcgtagatcgcggcgaattta

SEQ ID NO: 25232 - DNA, 737 bp, Artificial Sequence
  chemically treated genomic DNA (Homo sapiens) CpG-island No: 25232
  unsure (706..707, 715..)
taaattcgccgcgatctacgccaaccttactacgcccaatactaaccccacatccccccccgtacgataatcgaactactaaccgctaatatccgccaacatctaacgccaatactcactacgcgccccgcccccaatcaacgtaacactttacgatttaataccgcaaacatacacgacatccataccatctaccaacgcataacccacgccttccaacactactcgcgccaattcattaaaaccatattaataaatcaaaccaaaaaaaacccccttcgcctaaaaattattatataacgtacgctcgccgaaaaaataaaacaaaaaccaaactaactcgacactttcatcaacctattaaactacaacgattaaaactaaaacattactcaaaccgattaatttcgcgacccaatccaaacacgacgctacactcaacatcacaaacattaaataccaacgttacgataacgcataacaaaaactatatacgacgccttctaaactacttaaaaacccttcgctaacaacaaaataaacccccgacgtccccaacgataacatacctaattaacatcaaccattcccacaccaactacaccaactacattatcgccaccgcctaccaactaacaccgtcgccataccccacgctttcgcaacttcaaataacaaaacaccaataatttccgcgtaccttcgnntataaatnnacgaacatctaatcacgaaat

SEQ ID NO: 25233 - DNA, 525 bp, Artificial Sequence
  chemically treated genomic DNA (Homo sapiens) CpG-island No: 25233
ggtttttttagcgtatcggcgcgtataatgttgttaagacgcgaacggatattcgttagttacggttgttacggtttcgttagtttaatttgtagttatattgttagcgtaatggtgttgtcgagaatcgcgcgaaaatttagacgcggatcgtttttggcgattatttttttcgtcgataggtgagttagcgtattcggtttttttgttatcggttggcgatatagttcgtagtacgtttgcggatgtttatcgttattggttagtttatgaacgggttgcggttgttgttgtttatcgttaataaataggcggttttgttcgttaataaatttgatgcgtagatggcggttttttagtaattttcgggtagagggcgttaggcgattgttcgtagggagatggatttttgcgttttcgttgagcgtatggttcgtttttagttatgtttcggtgatgaaattttttatagggattgttagttagtcggttaggcgatatataggaattttacgttggatgtcg

SEQ ID NO: 25234 - DNA, 525 bp, Artificial Sequence
  chemically treated genomic DNA (Homo sapiens) CpG-island No: 25234
cgacatccaacgtaaaattcctatatatcgcctaaccgactaactaacaatccctataaaaaatttcatcaccgaaacataactaaaaacgaaccatacgctcaacgaaaacgcaaaaatccatctccctacgaacaatcgcctaacgccctctacccgaaaattactaaaaaaccgccatctacgcatcaaatttattaacgaacaaaaccgcctatttattaacgataaacaacaacaaccgcaacccgttcataaactaaccaataacgataaacatccgcaaacgtactacgaactatatcgccaaccgataacaaaaaaaccgaatacgctaactcacctatcgacgaaaaaaataatcgccaaaaacgatccgcgtctaaattttcgcgcgattctcgacaacaccattacgctaacaatataactacaaattaaactaacgaaaccgtaacaaccgtaactaacgaatatccgttcgcgtcttaacaacattatacgcgccgatacgctaaaaaaacc

SEQ ID NO: 25235 - DNA, 525 bp, Artificial Sequence
  chemically treated genomic DNA (Homo sapiens) CpG-island No: 25235
cgatatttagcgtgaaatttttgtatgtcgtttggtcggttaattggtaatttttatgaaagattttattatcgaagtatggttaagagcgaattatacgtttagcgaaggcgtagagatttatttttttgcggatagtcgtttgacgttttttgttcgggagttgttggaaagtcgttatttgcgtattaagtttattgacgagtagggtcgtttgtttgttgacgatgaatagtagtagtcgtagttcgtttatgggttgattagtagcgatgaatattcgtaggcgtgttgcgaattgtgtcgttagtcggtggtaaaaaagtcggatacgttgatttatttgtcggcggaaaaaatggtcgttaaaagcgattcgcgtttgggttttcgcgcggttttcgatagtattattgcgttggtagtgtggttgtaaattgaattggcggaatcgtggtagtcgtggttggcggatattcgttcgcgttttggtaatattatgcgcgtcgatgcgttgggggaatt

SEQ ID NO: 25236 - DNA, 525 bp, Artificial Sequence
  chemically treated genomic DNA (Homo sapiens) CpG-island No: 25236
aattcccccaacgcatcgacgcgcataatattaccaaaacgcgaacgaatatccgccaaccacgactaccacgattccgccaattcaatttacaaccacactaccaacgcaataatactatcgaaaaccgcgcgaaaacccaaacgcgaatcgcttttaacgaccattttttccgccgacaaataaatcaacgtatccgacttttttaccaccgactaacgacacaattcgcaacacgcctacgaatattcatcgctactaatcaacccataaacgaactacgactactactattcatcgtcaacaaacaaacgaccctactcgtcaataaacttaatacgcaaataacgactttccaacaactcccgaacaaaaaacgtcaaacgactatccgcaaaaaaataaatctctacgccttcgctaaacgtataattcgctcttaaccatacttcgataataaaatctttcataaaaattaccaattaaccgaccaaacgacatacaaaaatttcacgctaaatatcg

SEQ ID NO: 25237 - DNA, 865 bp, Artificial Sequence
  chemically treated genomic DNA (Homo sapiens) CpG-island No: 25237
ttcgcgtattcggcgaggcgttgttttgtaataataacggtgcgattaattattcgtggcggtttagcgcgtcgttggtatcgagtatcgtttttatgtcgtttgttagttgatagcgtttattttgtttacggcgacgagtaatgcgatcggtaaacgtttcggtaagtagcggcgcgataagcgaattgtttgttttatcgttacgtacgtttaagcgttttaatagttgttgattacgttgttgttaggttggttgattgcgcgaaaacgttacgtttaggttattattgtttattcgtggcggtttttcgagaatggcggtaatttttgtcgcggtagtagtttcgtcgtcgtttttcgcgttaattagtattgtcgttaaacgcggatcgttatttagcgttgttattttttgtttttggcgtattaagtcgtttattttttagtgtttttagtatttgtaatagacgtttcgcggttagtagatttattattggcggttgatttagttaggtttatttgcgtcggatcgttgtattttttattgtagtaattttattagtaaatcggaaagatcgcgttgtaagattttcggttattttgcgtcgcgggcgttttgggaggttttggggattaaagtaggggatatcggggtttaagtcgggcgttcgggatcgcgttaggagagtcgagaatcggggaaaatacgcgtaattttcgtaggaataataattttaatattaggatggtgataatatatagagcgtatatggtttacgaggttttcgacggagcgttgaggtattatcggttcgtcggagatataatattcgtataattaatcggtaattattagcggatt

SEQ ID NO: 25238 - DNA, 865 bp, Artificial Sequence
  chemically treated genomic DNA (Homo sapiens) CpG-island No: 25238
aatccgctaataattaccgattaattatacgaatattatatctccgacgaaccgataatacctcaacgctccgtcgaaaacctcgtaaaccatatacgctctatatattatcaccatcctaatattaaaattattattcctacgaaaattacgcgtattttccccgattctcgactctcctaacgcgatcccgaacgcccgacttaaaccccgatatcccctactttaatccccaaaacctcccaaaacgcccgcgacgcaaaataaccgaaaatcttacaacgcgatctttccgatttactaataaaattactacaataaaaaatacaacgatccgacgcaaataaacctaactaaatcaaccgccaataataaatctactaaccgcgaaacgtctattacaaatactaaaaacactaaaaaataaacgacttaatacgccaaaaacaaaaaataacaacgctaaataacgatccgcgtttaacgacaatactaattaacgcgaaaaacgacgacgaaactactaccgcgacaaaaattaccgccattctcgaaaaaccgccacgaataaacaataataacctaaacgtaacgttttcgcgcaatcaaccaacctaacaacaacgtaatcaacaactattaaaacgcttaaacgtacgtaacgataaaacaaacaattcgcttatcgcgccgctacttaccgaaacgtttaccgatcgcattactcgtcgccgtaaacaaaataaacgctatcaactaacaaacgacataaaaacgatactcgataccaacgacgcgctaaaccgccacgaataattaatcgcaccgttattattacaaaacaacgcctcgccgaatacgcgaa

SEQ ID NO: 25239 - DNA, 865 bp, Artificial Sequence
  chemically treated genomic DNA (Homo sapiens) CpG-island No: 25239
gattcgttaatgattatcggttggttatacgaatattgtgttttcggcgaatcggtagtgttttaacgtttcgtcggaagtttcgtaggttatatgcgttttgtgtgttgttattattttagtgttaggattattatttttgcgggggttacgcgtatttttttcggttttcggtttttttgacgcggtttcgggcgttcggtttggatttcggtattttttgttttaatttttaggattttttagagcgttcgcggcgtaaagtgatcggagattttataacgcgattttttcggtttgttgatggaattattgtaatgggggatgtagcgattcggcgtagatgagtttggttggattaatcgttagtagtgaatttattggtcgcgaaacgtttgttataaatgttgggggtattggagggtgaacggtttagtgcgttaagggtaaaaaatggtagcgttgggtaacgattcgcgtttagcggtaatgttggttagcgcgaagaacgacgacgaagttgttatcgcggtaaaaattgtcgttattttcgaagagtcgttacggatgggtaatagtgatttgggcgtggcgttttcgcgtaattaattagtttggtagtaacgtagttagtaattgttaaaacgtttaaacgtacgtggcggtgaggtagatagttcgtttatcgcgtcgttatttgtcggggcgtttgtcgatcgtattgttcgtcgtcgtgggtaagatggacgttattaattggtaaacggtatgggagcgatgttcgatgttaacgacgcgttaagtcgttacgaatggttgatcgtatcgttattattgtagggtagcgtttcgtcggatgcgcgga

SEQ ID NO: 25240 - DNA, 865 bp, Artificial Sequence
  chemically treated genomic DNA (Homo sapiens) CpG-island No: 25240
tccgcgcatccgacgaaacgctaccctacaataataacgatacgatcaaccattcgtaacgacttaacgcgtcgttaacatcgaacatcgctcccataccgtttaccaattaataacgtccatcttacccacgacgacgaacaatacgatcgacaaacgccccgacaaataacgacgcgataaacgaactatctacctcaccgccacgtacgtttaaacgttttaacaattactaactacgttactaccaaactaattaattacgcgaaaacgccacgcccaaatcactattacccatccgtaacgactcttcgaaaataacgacaatttttaccgcgataacaacttcgtcgtcgttcttcgcgctaaccaacattaccgctaaacgcgaatcgttacccaacgctaccattttttacccttaacgcactaaaccgttcaccctccaatacccccaacatttataacaaacgtttcgcgaccaataaattcactactaacgattaatccaaccaaactcatctacgccgaatcgctacatcccccattacaataattccatcaacaaaccgaaaaaatcgcgttataaaatctccgatcactttacgccgcgaacgctctaaaaaatcctaaaaattaaaacaaaaaataccgaaatccaaaccgaacgcccgaaaccgcgtcaaaaaaaccgaaaaccgaaaaaaatacgcgtaacccccgcaaaaataataatcctaacactaaaataataacaacacacaaaacgcatataacctacgaaacttccgacgaaacgttaaaacactaccgattcgccgaaaacacaatattcgtataaccaaccgataatcattaacgaatc

SEQ ID NO: 25241 - DNA, 729 bp, Artificial Sequence
  chemically treated genomic DNA (Homo sapiens) CpG-island No: 25241
gtttcgtttttattttttgtgagttacgtttttttcgagcggggttaatttggtaaaaggagtgatgcgtttcgtttggatcgtgtttttgttcgggtttttgtagttttgcgcgttagtgtattgcgtttttttcgtcgtcggttaatagtagttttcgcgcgagtcgtcggcggtttcgggcgtttggcgttagtagatttaatgggagaataacgggtaggtgtttagtttgttgagtttgggtttatagtattagttttagcgtcgtcgggattcgggcgtcgtcgtttttggtgtagttaacgttttcgtttagtagtttcgtatttcgattttgttgattcgcgataatcgtatcgtcgcggcgcgaacgcggacggtcggtttatttggagttatcgttggtcgttttaggtttatcgttcgttattggttttaagttggttattcgatatttagagttcgcgaagttggcgtttcgcgcgcggagaattagatagcgtcgggagaagtttttgcgtttagtaatttgcggtcgtttagtcgcgtggacggtatggtgggcgacgatttttataatttttataagtattttgacgataatttttattataattattacgatatttatgaaaggtttagatttgggggtaggtatcggttcggatacggtattggttatttttagtacggtaagtatttttaagttcgttggaagtattcgtg

SEQ ID NO: 25242 - DNA, 729 bp, Artificial Sequence
  chemically treated genomic DNA (Homo sapiens) CpG-island No: 25242
cacgaatacttccaacgaacttaaaaatacttaccgtactaaaaataaccaataccgtatccgaaccgatacctacccccaaatctaaacctttcataaatatcgtaataattataataaaaattatcgtcaaaatacttataaaaattataaaaatcgtcgcccaccataccgtccacgcgactaaacgaccgcaaattactaaacgcaaaaacttctcccgacgctatctaattctccgcgcgcgaaacgccaacttcgcgaactctaaatatcgaataaccaacttaaaaccaataacgaacgataaacctaaaacgaccaacgataactccaaataaaccgaccgtccgcgttcgcgccgcgacgatacgattatcgcgaatcaacaaaatcgaaatacgaaactactaaacgaaaacgttaactacaccaaaaacgacgacgcccgaatcccgacgacgctaaaactaatactataaacccaaactcaacaaactaaacacctacccgttattctcccattaaatctactaacgccaaacgcccgaaaccgccgacgactcgcgcgaaaactactattaaccgacgacgaaaaaaacgcaatacactaacgcgcaaaactacaaaaacccgaacaaaaacacgatccaaacgaaacgcatcactccttttaccaaattaaccccgctcgaaaaaaacgtaactcacaaaaaataaaaacgaaac

SEQ ID NO: 25243 - DNA, 729 bp, Artificial Sequence
  chemically treated genomic DNA (Homo sapiens) CpG-island No: 25243
tacgggtgtttttagcggatttgggggtatttatcgtattggaagtagttagtgtcgtattcgggtcggtatttgtttttaggtttgggttttttataagtatcgtagtagttgtaataagggttgtcgttagagtatttgtaggggttgtaagggtcgtcgtttattatgtcgtttacgcggttgggcggtcgtaggttattgagcgtaggaatttttttcggcgttgtttggtttttcgcgcgcgaggcgttagtttcgcgggttttagatgtcgagtagttagtttggaattagtgacgggcggtgggtttggggcggttagcggtgattttagatgagtcggtcgttcgcgttcgcgtcgcggcggtgcggttgtcgcggattagtaggatcggagtgcggggttgttgggcggaggcgttggttgtattagggacggcggcgttcgggtttcggcggcgttgaggttggtattgtgagtttaggtttagtaagttgaatatttgttcgttgtttttttattggatttgttggcgttaggcgttcggagtcgtcggcggttcgcgcgggggttgttgttggtcggcggcgggaggggcgtagtgtattagcgcgtagagttgtaaaggttcgagtaggagtacggtttaggcgaagcgtattattttttttgttagattgatttcgttcgaggaggacgtggtttatagaaaataaaaacggggt

SEQ ID NO: 25244 - DNA, 729 bp, Artificial Sequence
  chemically treated genomic DNA (Homo sapiens) CpG-island No: 25244
accccgtttttattttctataaaccacgtcctcctcgaacgaaatcaatctaacaaaaaaaataatacgcttcgcctaaaccgtactcctactcgaacctttacaactctacgcgctaatacactacgcccctcccgccgccgaccaacaacaacccccgcgcgaaccgccgacgactccgaacgcctaacgccaacaaatccaataaaaaaacaacgaacaaatattcaacttactaaacctaaactcacaataccaacctcaacgccgccgaaacccgaacgccgccgtccctaatacaaccaacgcctccgcccaacaaccccgcactccgatcctactaatccgcgacaaccgcaccgccgcgacgcgaacgcgaacgaccgactcatctaaaatcaccgctaaccgccccaaacccaccgcccgtcactaattccaaactaactactcgacatctaaaacccgcgaaactaacgcctcgcgcgcgaaaaaccaaacaacgccgaaaaaaattcctacgctcaataacctacgaccgcccaaccgcgtaaacgacataataaacgacgacccttacaacccctacaaatactctaacgacaacccttattacaactactacgatacttataaaaaacccaaacctaaaaacaaataccgacccgaatacgacactaactacttccaatacgataaatacccccaaatccgctaaaaacacccgta

SEQ ID NO: 25245 - DNA, 763 bp, Artificial Sequence
  chemically treated genomic DNA (Homo sapiens) CpG-island No: 25245
ataagattatttttatcgcgggagaggcggaggttcgcgcgggtgttgggatttagatcgggggattcgggtagcggatgtaggttttatttttttcgtcgttttggtttgcgttggattcggcgttcggttatttttgcgcgtcgttttcggttttcgtcgttttttttttttcggagttcgaattttggttgaagtttattcgttgggttagacgcgttagattttgcgatatggatagcgggggtaggtacgtttcggtgttatttaggtttattttatggatttgtttttcgtaggtcgattcgatgttgattcgtattgcgcgtatttcggatatgttggttgcgtcggttagcggtgggaggattttttacgagttaaaaaacgaggtacgaagaggaggtttttttgcggagagtcgggaatttagaagttcgtagtcgcggtgttttagaagattttcgggaaatcgaacgtaacgtttagattggaaataaaggagttggtttagtaatttttttagaacgtatcgtaagtttttttttcggtaagtttttcggagtaaaattgggtaggcgcggaagttttagggttttttagagcgttttcggtgaattacggtgtagggtggggtaaattttcgggtttataagaggcgtggtcggtagagggagggaaagagcggttcgggagtcgagagtgtggcgggtatattttttgttttttaagtttgcgtttgtttaaaaagtggatgaggaaa

SEQ ID NO: 25246 - DNA, 763 bp, Artificial Sequence
  chemically treated genomic DNA (Homo sapiens) CpG-island No: 25246
tttcctcatccactttttaaacaaacgcaaacttaaaaaacaaaaaatatacccgccacactctcgactcccgaaccgctctttccctccctctaccgaccacgcctcttataaacccgaaaatttaccccaccctacaccgtaattcaccgaaaacgctctaaaaaaccctaaaacttccgcgcctacccaattttactccgaaaaacttaccgaaaaaaaaacttacgatacgttctaaaaaaattactaaaccaactcctttatttccaatctaaacgttacgttcgatttcccgaaaatcttctaaaacaccgcgactacgaacttctaaattcccgactctccgcaaaaaaacctcctcttcgtacctcgttttttaactcgtaaaaaatcctcccaccgctaaccgacgcaaccaacatatccgaaatacgcgcaatacgaatcaacatcgaatcgacctacgaaaaacaaatccataaaataaacctaaataacaccgaaacgtacctacccccgctatccatatcgcaaaatctaacgcgtctaacccaacgaataaacttcaaccaaaattcgaactccgaaaaaaaaaaaacgacgaaaaccgaaaacgacgcgcaaaaataaccgaacgccgaatccaacgcaaaccaaaacgacgaaaaaaataaaacctacatccgctacccgaatcccccgatctaaatcccaacacccgcgcgaacctccgcctctcccgcgataaaaataatcttat

SEQ ID NO: 25247 - DNA, 763 bp, Artificial Sequence
  chemically treated genomic DNA (Homo sapiens) CpG-island No: 25247
tttttttatttattttttaaataaacgtaggtttaaaaagtaaggaatatattcgttatattttcggttttcgaatcgttttttttttttttttgtcggttacgttttttataggttcggaagtttattttattttgtatcgtgatttatcggaagcgttttagggaattttggagttttcgcgtttgtttagttttgtttcgaaagatttatcgaggagggagtttgcggtgcgttttgggaaagttgttgggttagtttttttgtttttagtttgagcgttgcgttcggtttttcgagggttttttgaggtatcgcggttgcgggtttttgagttttcggtttttcgtagggaagtttttttttcgtatttcgttttttggttcgtggggggtttttttatcgttggtcgacgtagttagtatgttcggggtgcgcgtagtgcggattagtatcgaatcggtttgcgagaagtaggtttatgaggtgggtttggatggtatcgagacgtatttgttttcgttgtttatgtcgtagaatttggcgcgtttggtttagcggatagattttagttagggttcgggtttcgaggaggaggaggcggcggggatcgagggcgacgcgtaggagtggtcgggcgtcgggtttagcgtagattaggacgacgaggaaggtaaggtttgtattcgttgttcgagtttttcggtttgggttttagtattcgcgcgggttttcgtttttttcgcgatgggggtgattttgt

SEQ ID NO: 25248 - DNA, 763 bp, Artificial Sequence
  chemically treated genomic DNA (Homo sapiens) CpG-island No: 25248
acaaaatcacccccatcgcgaaaaaaacgaaaacccgcgcgaatactaaaacccaaaccgaaaaactcgaacaacgaatacaaaccttaccttcctcgtcgtcctaatctacgctaaacccgacgcccgaccactcctacgcgtcgccctcgatccccgccgcctcctcctcctcgaaacccgaaccctaactaaaatctatccgctaaaccaaacgcgccaaattctacgacataaacaacgaaaacaaatacgtctcgataccatccaaacccacctcataaacctacttctcgcaaaccgattcgatactaatccgcactacgcgcaccccgaacatactaactacgtcgaccaacgataaaaaaaccccccacgaaccaaaaaacgaaatacgaaaaaaaaacttccctacgaaaaaccgaaaactcaaaaacccgcaaccgcgatacctcaaaaaaccctcgaaaaaccgaacgcaacgctcaaactaaaaacaaaaaaactaacccaacaactttcccaaaacgcaccgcaaactccctcctcgataaatctttcgaaacaaaactaaacaaacgcgaaaactccaaaattccctaaaacgcttccgataaatcacgatacaaaataaaataaacttccgaacctataaaaaacgtaaccgacaaaaaaaaaaaaaaaacgattcgaaaaccgaaaatataacgaatatattccttactttttaaacctacgtttatttaaaaaataaataaaaaaa

SEQ ID NO: 25249 - DNA, 712 bp, Artificial Sequence
  chemically treated genomic DNA (Homo sapiens) CpG-island No: 25249
gtcgaggagggcgcgtttttggttgtttgcgatttcgttcgttttgacggtttttgttcgcgtttttcgtttcgtttcgttcggttttaggtttatttgcggcgggagcgttagatcgttttcgtttttttgttcgcgtggggttttttgtcgtcgttatgtcggtcgcgttgcggacgggcgttgggtttcggttcgtggtttgtagtggtttgttagacgcgacggtcgttcgtcggcgttcgggttcgtttttttgaggcgggttggggagggcgggggaggcgtagggcggggatgggtatcgattgacgcgtcgggtagttaattagaggtcgggtaggggaggagcgggttttagaggggcggggttttcgcgcgttgtcggggtcgcgggttttagaattgcggagattttcgaggttcggtagcggggcgggaagttatttttggggtttaggcgcgtttttgaggttgtttttcgggaaatattttgggaattttatttgggcggattcggcgatttttttggtattttttatcgaaggttcgttgattgggaagtataatcgcggagggtcggttgatgagggcgaggaattagtgttgttttttttcgcgggtaggttgttgcgcgatgttgttttgttattgtcggggtgggcgagtttggagtttagatgtagttgtcggtttaggatttgtttatttg

SEQ ID NO: 25250 - DNA, 712 bp, Artificial Sequence
  chemically treated genomic DNA (Homo sapiens) CpG-island No: 25250
caaataaacaaatcctaaaccgacaactacatctaaactccaaactcgcccaccccgacaataacaaaacaacatcgcgcaacaacctacccgcgaaaaaaaacaacactaattcctcgccctcatcaaccgaccctccgcgattatacttcccaatcaacgaaccttcgataaaaaataccaaaaaaatcgccgaatccgcccaaataaaattcccaaaatatttcccgaaaaacaacctcaaaaacgcgcctaaaccccaaaaataacttcccgccccgctaccgaacctcgaaaatctccgcaattctaaaacccgcgaccccgacaacgcgcgaaaaccccgcccctctaaaacccgctcctcccctacccgacctctaattaactacccgacgcgtcaatcgatacccatccccgccctacgcctcccccgccctccccaacccgcctcaaaaaaacgaacccgaacgccgacgaacgaccgtcgcgtctaacaaaccactacaaaccacgaaccgaaacccaacgcccgtccgcaacgcgaccgacataacgacgacaaaaaaccccacgcgaacaaaaaaacgaaaacgatctaacgctcccgccgcaaataaacctaaaaccgaacgaaacgaaacgaaaaacgcgaacaaaaaccgtcaaaacgaacgaaatcgcaaacaaccaaaaacgcgccctcctcgac

SEQ ID NO: 25251 - DNA, 712 bp, Artificial Sequence
  chemically treated genomic DNA (Homo sapiens) CpG-island No: 25251
taagtgaataggttttgggtcgatagttgtatttggattttaggttcgtttatttcggtagtaatagagtagtatcgcgtagtaatttgttcgcggggggaaatagtattggtttttcgtttttattagtcggtttttcgcgattgtgttttttaattaacgggttttcgatgaaaagtgttaaggaggtcgtcggattcgtttaagtggaatttttaagatgtttttcggggagtagttttaggaacgcgtttggattttaggagtagtttttcgtttcgttgtcgagtttcggaggttttcgtagttttggggttcgcgatttcgatagcgcgcggaggtttcgtttttttagggttcgttttttttttgttcggtttttgattggttgttcggcgcgttagtcggtatttattttcgttttacgtttttttcgttttttttagttcgttttagggaagcgagttcgggcgtcggcgggcggtcgtcgcgtttgatagattattgtagattacgggtcgaggtttagcgttcgttcgtagcgcggtcggtatggcggcgataaggagttttacgcgggtaagggagcgggagcggtttggcgttttcgtcgtaggtgagtttggggtcgggcggggcggggcggggggcgcgagtagggatcgttaaggcgggcggggtcgtaggtagttagggacgcgtttttttcggt

SEQ ID NO: 25252 - DNA, 712 bp, Artificial Sequence
  chemically treated genomic DNA (Homo sapiens) CpG-island No: 25252
accgaaaaaaacgcgtccctaactacctacgaccccgcccgccttaacgatccctactcgcgccccccgccccgccccgcccgaccccaaactcacctacgacgaaaacgccaaaccgctcccgctcccttacccgcgtaaaactccttatcgccgccataccgaccgcgctacgaacgaacgctaaacctcgacccgtaatctacaataatctatcaaacgcgacgaccgcccgccgacgcccgaactcgcttccctaaaacgaactaaaaaaaacgaaaaaaacgtaaaacgaaaataaataccgactaacgcgccgaacaaccaatcaaaaaccgaacaaaaaaaaaacgaaccctaaaaaaacgaaacctccgcgcgctatcgaaatcgcgaaccccaaaactacgaaaacctccgaaactcgacaacgaaacgaaaaactactcctaaaatccaaacgcgttcctaaaactactccccgaaaaacatcttaaaaattccacttaaacgaatccgacgacctccttaacacttttcatcgaaaacccgttaattaaaaaacacaatcgcgaaaaaccgactaataaaaacgaaaaaccaatactatttccccccgcgaacaaattactacgcgatactactctattactaccgaaataaacgaacctaaaatccaaatacaactatcgacccaaaacctattcactta

SEQ ID NO: 25253 - DNA, 527 bp, Artificial Sequence
  chemically treated genomic DNA (Homo sapiens) CpG-island No: 25253
  unsure (53)
tggcgcggtatggaagagatcgtgaaaaatcgcgattcgcgcgatgtatggantattgtgtataatgtttgatgcgacgttggcgcgttttattaggtttataagtttgtgtcgaatcgtaggtcgtattcggtatgttataaatagagcgtcggaaatattaatcggtttatttcgcgtatttttaacgtattagttaacggtttaacgtttttcggcgtggcgttcgtttagttttgcgtttcgttatatacgtcgtgggtatgaaacgcgtttaggcgtatcggaatatcgtcgagttttttgataaacgtcgttagtttttcgatgtgttgtaaataatttatttggttagggattattagtaaacgtagtttcgttagtttgtcgcgttttgttagtaaatagatgttgcgtttaatttgttgattatcgcgttcggtgagttgttgatgatattcgtttttttacgttttgagatcgagtattgcgtcgtcgtatatcgggagtaatttttttttagtcgg

SEQ ID NO: 25254 - DNA, 527 bp, Artificial Sequence
  chemically treated genomic DNA (Homo sapiens) CpG-island No: 25254
  unsure (475)
ccgactaaaaaaaaattactcccgatatacgacgacgcaatactcgatctcaaaacgtaaaaaaacgaatatcatcaacaactcaccgaacgcgataatcaacaaattaaacgcaacatctatttactaacaaaacgcgacaaactaacgaaactacgtttactaataatccctaaccaaataaattatttacaacacatcgaaaaactaacgacgtttatcaaaaaactcgacgatattccgatacgcctaaacgcgtttcatacccacgacgtatataacgaaacgcaaaactaaacgaacgccacgccgaaaaacgttaaaccgttaactaatacgttaaaaatacgcgaaataaaccgattaatatttccgacgctctatttataacataccgaatacgacctacgattcgacacaaacttataaacctaataaaacgcgccaacgtcgcatcaaacattatacacaatantccatacatcgcgcgaatcgcgatttttcacgatctcttccataccgcgcca

SEQ ID NO: 25255 - DNA, 527 bp, Artificial Sequence
  chemically treated genomic DNA (Homo sapiens) CpG-island No: 25255
  unsure (475)
tcggttggggaaaaattgttttcggtgtgcgacggcgtaatgttcgattttaaagcgtgggggagcgaatgttattaataatttatcggacgcgataattagtagattaagcgtagtatttatttgttggtagagcgcggtaagttggcggaattgcgtttgttggtgatttttggttaggtggattatttgtaatatatcgaagaattggcggcgtttattaagggattcggcgatgtttcggtacgtttgaacgcgttttatgtttacggcgtgtatggcgaggcgtaaagttgggcgagcgttacgtcggaagacgttgagtcgttggttgatgcgttaaaggtgcgcggggtgagtcggttgatattttcggcgttttatttgtgatatgtcggatacggtttacggttcggtatagatttgtaggtttgataagacgcgttagcgtcgtattaggtattgtgtataatantttatgtatcgcgcggatcgcggttttttacgattttttttatgtcgcgtta

SEQ ID NO: 25256 - DNA, 527 bp, Artificial Sequence
  chemically treated genomic DNA (Homo sapiens) CpG-island No: 25256
  unsure (53)
taacgcgacataaaaaaaatcgtaaaaaaccgcgatccgcgcgatacataaantattatacacaatacctaatacgacgctaacgcgtcttatcaaacctacaaatctataccgaaccgtaaaccgtatccgacatatcacaaataaaacgccgaaaatatcaaccgactcaccccgcgcacctttaacgcatcaaccaacgactcaacgtcttccgacgtaacgctcgcccaactttacgcctcgccatacacgccgtaaacataaaacgcgttcaaacgtaccgaaacatcgccgaatcccttaataaacgccgccaattcttcgatatattacaaataatccacctaaccaaaaatcaccaacaaacgcaattccgccaacttaccgcgctctaccaacaaataaatactacgcttaatctactaattatcgcgtccgataaattattaataacattcgctcccccacgctttaaaatcgaacattacgccgtcgcacaccgaaaacaatttttccccaaccga

SEQ ID NO: 25257 - DNA, 678 bp, Artificial Sequence
  chemically treated genomic DNA (Homo sapiens) CpG-island No: 25257
cgtacgcgtatttttttagatagcgtcgatttgcgtatggaaatcgttagttatttgcgtcggatttgtcgcgtttgttagtgttcgttcggtaataaacgtttttacgcggatatttttaaatagcggtaggttagtaggggtaatttcgttagtaatggaaagtttaaggtcgatatttgaaagcgtttttatgcgtgttagatcggtttcgttttattgttgttcgttggtttgtgtattacgatcgcgatgataaatgggtttgtcgtacgttaatacgatgttagtcgcgggcgtcgtttagcgtttagttatcgaatagttttatttgaattttattttcgtagcgttgtgttattgcgtggtttttttttatcgtcgcgagcggcgcgggcgtagatgatggttatttagttagcgtttgcgttaaacgtttgttgcgcgagcgtttattagcgtcgggatttttagttagtaacgatgattggttcggggtacggtcggtaaggtttacgggtagtttcgtttaatagagaaatgggggtcggttcgaagaaatttaagcggcgtttaaaaagggtcgtagtcggggggataaggaggatgatgaaggacgacgttttaaaaaggggcgtcgtataagaggggttttaggggggggagattttaaagggg

SEQ ID NO: 25258 - DNA, 678 bp, Artificial Sequence
  chemically treated genomic DNA (Homo sapiens) CpG-island No: 25258
cccctttaaaatctcccccccctaaaacccctcttatacgacgcccctttttaaaacgtcgtccttcatcatcctccttatccccccgactacgaccctttttaaacgccgcttaaatttcttcgaaccgacccccatttctctattaaacgaaactacccgtaaaccttaccgaccgtaccccgaaccaatcatcgttactaactaaaaatcccgacgctaataaacgctcgcgcaacaaacgtttaacgcaaacgctaactaaataaccatcatctacgcccgcgccgctcgcgacgataaaaaaaaaccacgcaataacacaacgctacgaaaataaaattcaaataaaactattcgataactaaacgctaaacgacgcccgcgactaacatcgtattaacgtacgacaaacccatttatcatcgcgatcgtaatacacaaaccaacgaacaacaataaaacgaaaccgatctaacacgcataaaaacgctttcaaatatcgaccttaaactttccattactaacgaaattacccctactaacctaccgctatttaaaaatatccgcgtaaaaacgtttattaccgaacgaacactaacaaacgcgacaaatccgacgcaaataactaacgatttccatacgcaaatcgacgctatctaaaaaaatacgcgtacg

SEQ ID NO: 25259 - DNA, 678 bp, Artificial Sequence
  chemically treated genomic DNA (Homo sapiens) CpG-island No: 25259
tttttttggggttttttttttttggggttttttttgtgcggcgtttttttttgagacgtcgttttttattattttttttgttttttcggttacggttttttttaaacgtcgtttgaattttttcgaatcggtttttatttttttgttaagcgaggttgttcgtgaattttgtcgatcgtgtttcggattaattatcgttgttgattgaaggtttcgacgttggtgaacgttcgcgtaataggcgtttggcgtaggcgttaattggatgattattatttgcgttcgcgtcgttcgcgacggtagaaaaaggttacgtaatggtataacgttgcgggggtgaaatttagatagagttgttcggtaattggacgttggacgacgttcgcgattggtatcgtattggcgtgcggtaggtttatttattatcgcggtcgtgatgtataggttagcgggtaatagtggggcgaagtcgatttggtacgtatgaaggcgtttttagatatcggttttgagttttttattattggcgggattatttttgttgatttgtcgttgtttaaagatattcgcgtgaaagcgtttattgtcgggcgggtattggtaggcgcggtaaattcggcgtaagtggttggcgatttttatgcgtaaatcgacgttatttggggaggtgcgcgtgcg

SEQ ID NO: 25260 - DNA, 678 bp, Artificial Sequence
  chemically treated genomic DNA (Homo sapiens) CpG-island No: 25260
cgcacgcgcacctccccaaataacgtcgatttacgcataaaaatcgccaaccacttacgccgaatttaccgcgcctaccaatacccgcccgacaataaacgctttcacgcgaatatctttaaacaacgacaaatcaacaaaaataatcccgccaataataaaaaactcaaaaccgatatctaaaaacgccttcatacgtaccaaatcgacttcgccccactattacccgctaacctatacatcacgaccgcgataataaataaacctaccgcacgccaatacgataccaatcgcgaacgtcgtccaacgtccaattaccgaacaactctatctaaatttcacccccgcaacgttataccattacgtaacctttttctaccgtcgcgaacgacgcgaacgcaaataataatcatccaattaacgcctacgccaaacgcctattacgcgaacgttcaccaacgtcgaaaccttcaatcaacaacgataattaatccgaaacacgatcgacaaaattcacgaacaacctcgcttaacaaaaaaataaaaaccgattcgaaaaaattcaaacgacgtttaaaaaaaaccgtaaccgaaaaaacaaaaaaaataataaaaaacgacgtctcaaaaaaaaacgccgcacaaaaaaaaccccaaaaaaaaaaaaccccaaaaaaa

SEQ ID NO: 25261 - DNA, 523 bp, Artificial Sequence
  chemically treated genomic DNA (Homo sapiens) CpG-island No: 25261
ttcgcgcgtagcgcgttgagtcggtgtttaggttggggtttggagtcgtagtttcgaaaaggcgcgttgtttttttaaaaggtcgcgtattttcgggtcggttttttttttcggggttttagttgtgattgacgttgggcggcgagaggaggcgtttggcgttaataaaagttcggttcgcgggcgagttgcgtcgggtcgttagtttttattcgtttcggggattcgtaataagtggtcgtcgcgtttttttcggggaagtcgcgggcgcgtaggggtagtcgaaggaggcggtcgagtcgcggagtttaggggtttgttcggtttagcgtttatcggaggggatcggggcgggcggatggggattcggcggcggcggcgcggtgagtttttgggcggtttcggggcgcgggttgtgcgcggcgttgcgttcgtcggtttttagcgcggattgtaagtgttgtagttgtgttcggtttcgtttggagttatcgggggtgttaggaggggacgtagtattttt

SEQ ID NO: 25262 - DNA, 523 bp, Artificial Sequence
  chemically treated genomic DNA (Homo sapiens) CpG-island No: 25262
aaaaatactacgtcccctcctaacacccccgataactccaaacgaaaccgaacacaactacaacacttacaatccgcgctaaaaaccgacgaacgcaacgccgcgcacaacccgcgccccgaaaccgcccaaaaactcaccgcgccgccgccgccgaatccccatccgcccgccccgatcccctccgataaacgctaaaccgaacaaacccctaaactccgcgactcgaccgcctccttcgactacccctacgcgcccgcgacttccccgaaaaaaacgcgacgaccacttattacgaatccccgaaacgaataaaaactaacgacccgacgcaactcgcccgcgaaccgaacttttattaacgccaaacgcctcctctcgccgcccaacgtcaatcacaactaaaaccccgaaaaaaaaaaccgacccgaaaatacgcgaccttttaaaaaaacaacgcgccttttcgaaactacgactccaaaccccaacctaaacaccgactcaacgcgctacgcgcgaa

SEQ ID NO: 25263 - DNA, 523 bp, Artificial Sequence
  chemically treated genomic DNA (Homo sapiens) CpG-island No: 25263
gggggtgttgcgtttttttttggtattttcggtggttttaggcggggtcgggtatagttgtagtatttataattcgcgttgggggtcggcgggcgtagcgtcgcgtatagttcgcgtttcggggtcgtttagaggtttatcgcgtcgtcgtcgtcgggtttttattcgttcgtttcgatttttttcggtgggcgttgagtcgggtaggtttttgggtttcgcggttcgatcgtttttttcggttgtttttgcgcgttcgcggttttttcggggagggcgcggcggttatttgttgcgggttttcggagcgagtgaagattagcgattcggcgtagttcgttcgcgggtcggatttttgttagcgttaggcgttttttttcgtcgtttagcgttaattatagttggagtttcggggaggaaggtcggttcggagatgcgcggttttttaaaggggtagcgcgttttttcggggttgcggttttaggttttagtttgggtatcggtttagcgcgttacgcgcgaa

SEQ ID NO: 25264 - DNA, 523 bp, Artificial Sequence
  chemically treated genomic DNA (Homo sapiens) CpG-island No: 25264
ttcgcgcgtaacgcgctaaaccgatacccaaactaaaacctaaaaccgcaaccccgaaaaaacgcgctacccctttaaaaaaccgcgcatctccgaaccgaccttcctccccgaaactccaactataattaacgctaaacgacgaaaaaaaacgcctaacgctaacaaaaatccgacccgcgaacgaactacgccgaatcgctaatcttcactcgctccgaaaacccgcaacaaataaccgccgcgccctccccgaaaaaaccgcgaacgcgcaaaaacaaccgaaaaaaacgatcgaaccgcgaaacccaaaaacctacccgactcaacgcccaccgaaaaaaatcgaaacgaacgaataaaaacccgacgacgacgacgcgataaacctctaaacgaccccgaaacgcgaactatacgcgacgctacgcccgccgacccccaacgcgaattataaatactacaactatacccgaccccgcctaaaaccaccgaaaataccaaaaaaaaacgcaacaccccc

SEQ ID NO: 25265 - DNA, 520 bp, Artificial Sequence
  chemically treated genomic DNA (Homo sapiens) CpG-island No: 25265
  unsure (331)
tttgtttgggtcgtcgggtttcggaaaatttatttttttacgttatttaagcggtttgattatcggcgataaatttgtcggtagttatatcgagttgttgggtcgtatagtttagcgcgaaggtcgtttggttcgcgatattcgtaaaagtcgcgtttatatcggttatatattttaataatttaatttggtgaatcgtttgagcgtattggagaacgtgttgattggcgcgttcggtagtacgtcgttttggcgtatttgttttagttggtttatcggcgagtagaaatagcgcgcgttataggcgttgattcgcgttggtatggtgtanttttgttattagcgcgtttttattttttcggcgggtagtagtaacgtgtggcgattgttcgtgcgttgatttagtaggggaaagtgatttttggcgatgaaatttcgtttttttggggtttaattatgcgttttttgtggggattttcgggggtttttcggaggagggggttcggggggttagtcgttt

SEQ ID NO: 25266 - DNA, 520 bp, Artificial Sequence
  chemically treated genomic DNA (Homo sapiens) CpG-island No: 25266
  unsure (190)
aaacgactaaccccccgaaccccctcctccgaaaaacccccgaaaatccccacaaaaaacgcataattaaaccccaaaaaaacgaaatttcatcgccaaaaatcactttcccctactaaatcaacgcacgaacaatcgccacacgttactactacccgccgaaaaaataaaaacgcgctaataacaaaantacaccataccaacgcgaatcaacgcctataacgcgcgctatttctactcgccgataaaccaactaaaacaaatacgccaaaacgacgtactaccgaacgcgccaatcaacacgttctccaatacgctcaaacgattcaccaaattaaattattaaaatatataaccgatataaacgcgacttttacgaatatcgcgaaccaaacgaccttcgcgctaaactatacgacccaacaactcgatataactaccgacaaatttatcgccgataatcaaaccgcttaaataacgtaaaaaaataaattttccgaaacccgacgacccaaacaaa

SEQ ID NO: 25267 - DNA, 520 bp, Artificial Sequence
  chemically treated genomic DNA (Homo sapiens) CpG-island No: 25267
  unsure (190)
gagcggttgatttttcggattttttttttcggaaaattttcgagagtttttataagaagcgtataattgggttttagggagacggggttttatcgttaagaattatttttttttgttgaattagcgtacggataatcgttatacgttgttgttgttcgtcgaagaggtggaaacgcgttgatggtaaaantgtattatgttaacgcgggttagcgtttgtaacgcgcgttgtttttgttcgtcggtgaattagttaaaataggtgcgttagaacggcgtgttgtcgagcgcgttaattagtacgttttttagtacgtttaggcggtttattaggttgaattgttggaatatgtagtcggtatgggcgcggtttttgcggatatcgcgggttaggcggttttcgcgttggattgtgcggtttagtagttcgatatggttatcgatagatttatcgtcggtaattaaatcgtttaagtgacgtaaaagggtggatttttcggaattcgacggtttaagtaga

SEQ ID NO: 25268 - DNA, 520 bp, Artificial Sequence
  chemically treated genomic DNA (Homo sapiens) CpG-island No: 25268
  unsure (331)
tctacttaaaccgtcgaattccgaaaaatccacccttttacgtcacttaaacgatttaattaccgacgataaatctatcgataaccatatcgaactactaaaccgcacaatccaacgcgaaaaccgcctaacccgcgatatccgcaaaaaccgcgcccataccgactacatattccaacaattcaacctaataaaccgcctaaacgtactaaaaaacgtactaattaacgcgctcgacaacacgccgttctaacgcacctattttaactaattcaccgacgaacaaaaacaacgcgcgttacaaacgctaacccgcgttaacataatacanttttaccatcaacgcgtttccacctcttcgacgaacaacaacaacgtataacgattatccgtacgctaattcaacaaaaaaaaataattcttaacgataaaaccccgtctccctaaaacccaattatacgcttcttataaaaactctcgaaaattttccgaaaaaaaaaatccgaaaaatcaaccgctc

SEQ ID NO: 25269 - DNA, 1109 bp, Artificial Sequence
  chemically treated genomic DNA (Homo sapiens) CpG-island No: 25269
cgggtgagtcgtcgtattttacgcgcggttacgggttggtgttcggtatgagcgagcgtaaagcgatggcgatggcgttggtcgatcgcgttttgtaagtttcggagtacggcgagtacgcgataggttcggcgtaggatgaagagttcgtgttggtatatgtcgataacgtcgaagtcgtaggttttgttttatattttaaatttttttattacgtcgatttttaggtcgaattggagtttatttaaacgtttgtaataggagtagaattatggttaatttgagcggttataattttgtttatttcgacgagtagattaaacgtatgattcgtcgcgttattttaaaagcggtggcgattttcggttattaggtgtcgtttggcgggcgcgagatgtcgatgtcgtacggttggggaatcggcggtatttagtttatcgatagcgtgattggcgaaagcgacgtgttgaaggtgatgagtagggttcgaagatattattaacgcggttcgattcgtaatttttttaagcgcgtgatcggggaaatattacggaacgtacggacgatgcgacggtaatttagacgcgttatcgtattttcgaaacgtcgttgatcgaagattagataattattttttaggtgttaattttcgagtcgttgcgttttatcgagtcgcgcgaaacggaaattcgtattatgtacgcgttggaagagtacggcgtgatgtaggtgaaattgtatgaagatatcgttcgtttcggttatatcgttattatttacgtttattcggtgaaggtaaatgggcgttacgtgatggattcgtcgtcgatttcgaaattcgataatttaaaaatggatatgatgttcgttttgtaattgttcggcgcggggcgcgagaagcgtatttatgcggtgtcgtcgtttattcgcgtggaaagtttcgatttcgacgattattcgtttatcgtttagtagtgggatgagttatgcgttatttgcggatcgatttatagttattttgatgaagtggtgttggatgacgtcggaaatcgtatgtttgtttgtttcgatatcgattattgtcgttaatagagcgaggtaaaaaatta

SEQ ID NO: 25270 - DNA, 1109 bp, Artificial Sequence
  chemically treated genomic DNA (Homo sapiens) CpG-island No: 25270
taattttttacctcgctctattaacgacaataatcgatatcgaaacaaacaaacatacgatttccgacgtcatccaacaccacttcatcaaaataactataaatcgatccgcaaataacgcataactcatcccactactaaacgataaacgaataatcgtcgaaatcgaaactttccacgcgaataaacgacgacaccgcataaatacgcttctcgcgccccgcgccgaacaattacaaaacgaacatcatatccatttttaaattatcgaatttcgaaatcgacgacgaatccatcacgtaacgcccatttaccttcaccgaataaacgtaaataataacgatataaccgaaacgaacgatatcttcatacaatttcacctacatcacgccgtactcttccaacgcgtacataatacgaatttccgtttcgcgcgactcgataaaacgcaacgactcgaaaattaacacctaaaaaataattatctaatcttcgatcaacgacgtttcgaaaatacgataacgcgtctaaattaccgtcgcatcgtccgtacgttccgtaatatttccccgatcacgcgcttaaaaaaattacgaatcgaaccgcgttaataatatcttcgaaccctactcatcaccttcaacacgtcgctttcgccaatcacgctatcgataaactaaataccgccgattccccaaccgtacgacatcgacatctcgcgcccgccaaacgacacctaataaccgaaaatcgccaccgcttttaaaataacgcgacgaatcatacgtttaatctactcgtcgaaataaacaaaattataaccgctcaaattaaccataattctactcctattacaaacgtttaaataaactccaattcgacctaaaaatcgacgtaataaaaaaatttaaaatataaaacaaaacctacgacttcgacgttatcgacatataccaacacgaactcttcatcctacgccgaacctatcgcgtactcgccgtactccgaaacttacaaaacgcgatcgaccaacgccatcgccatcgctttacgctcgctcataccgaacaccaacccgtaaccgcgcgtaaaatacgacgactcacccg

SEQ ID NO: 25271 - DNA, 1109 bp, Artificial Sequence
  chemically treated genomic DNA (Homo sapiens) CpG-island No: 25271
tggttttttgtttcgttttgttggcggtaataatcggtatcggagtagataaatatgcggttttcggcgttatttagtattattttattaagatagttgtgggtcgattcgtagatggcgtatggtttattttattgttgaacggtgaacgggtgatcgtcgaaatcgagattttttacgcgggtaaacggcggtatcgtatagatgcgtttttcgcgtttcgcgtcgaatagttgtagggcgggtattatgtttatttttgggttatcgaatttcgggatcggcgacgggtttattacgtagcgtttatttatttttatcggataggcgtaggtggtggcgatatgatcgaagcgggcgatatttttatatagttttatttgtattacgtcgtatttttttagcgcgtgtatggtgcgggttttcgtttcgcgcggttcgataaagcgtagcggttcggggattggtatttggaagataattatttgattttcggttagcggcgtttcggggatgcggtgacgcgtttggattatcgtcgtatcgttcgtacgtttcgtggtgttttttcggttacgcgtttgaagaagttgcgaatcgaatcgcgttggtggtgttttcgggttttgtttattatttttagtacgtcgttttcgttaattacgttgtcggtaagttgaatgtcgtcggttttttagtcgtacggtatcggtatttcgcgttcgttaaacggtatttgataatcggggatcgttatcgtttttaagatggcgcggcggattatgcgtttggtttgttcgtcgaggtaggtaaagttgtagtcgtttagattagttatggttttgtttttgttgtagacgtttgagtagattttagttcggtttggaaatcgacgtagtgggggagtttgaggtgtgagataaagtttgcggtttcgacgttgtcggtatgtgttagtacgaattttttattttgcgtcgggtttgtcgcgtgttcgtcgtatttcggggtttgtagagcgcggtcgattagcgttatcgttatcgttttgcgttcgtttatgtcgaatattagttcgtagtcgcgcgtgaagtgcggcggtttattcg

SEQ ID NO: 25272 - DNA, 1109 bp, Artificial Sequence
  chemically treated genomic DNA (Homo sapiens) CpG-island No: 25272
cgaataaaccgccgcacttcacgcgcgactacgaactaatattcgacataaacgaacgcaaaacgataacgataacgctaatcgaccgcgctctacaaaccccgaaatacgacgaacacgcgacaaacccgacgcaaaataaaaaattcgtactaacacataccgacaacgtcgaaaccgcaaactttatctcacacctcaaactcccccactacgtcgatttccaaaccgaactaaaatctactcaaacgtctacaacaaaaacaaaaccataactaatctaaacgactacaactttacctacctcgacgaacaaaccaaacgcataatccgccgcgccatcttaaaaacgataacgatccccgattatcaaataccgtttaacgaacgcgaaataccgataccgtacgactaaaaaaccgacgacattcaacttaccgacaacgtaattaacgaaaacgacgtactaaaaataataaacaaaacccgaaaacaccaccaacgcgattcgattcgcaacttcttcaaacgcgtaaccgaaaaaacaccacgaaacgtacgaacgatacgacgataatccaaacgcgtcaccgcatccccgaaacgccgctaaccgaaaatcaaataattatcttccaaataccaatccccgaaccgctacgctttatcgaaccgcgcgaaacgaaaacccgcaccatacacgcgctaaaaaaatacgacgtaatacaaataaaactatataaaaatatcgcccgcttcgatcatatcgccaccacctacgcctatccgataaaaataaataaacgctacgtaataaacccgtcgccgatcccgaaattcgataacccaaaaataaacataatacccgccctacaactattcgacgcgaaacgcgaaaaacgcatctatacgataccgccgtttacccgcgtaaaaaatctcgatttcgacgatcacccgttcaccgttcaacaataaaataaaccatacgccatctacgaatcgacccacaactatcttaataaaataatactaaataacgccgaaaaccgcatatttatctactccgataccgattattaccgccaacaaaacgaaacaaaaaacca

SEQ ID NO: 25273 - DNA, 520 bp, Artificial Sequence
  chemically treated genomic DNA (Homo sapiens) CpG-island No: 25273
cggacgcgcggcgacgatgattaaattcgacggttgtaagttagcggtttttttgttgagatcgttataatcggtgtttatttcggtaacgttatcgtgtggttgttgaaataattgtttaatacgcgttacggttgcgtcgagtatatcggcgatgtttttcggtttttcgtttttgttcgtacgattttcggtaattttaaagacgcgggatttagttagatttagtagattttcgttggtacgtttttgcggattaaaattagtttcggtaattttattcgtaatcgagattattttacggataacggtacgtttacgtacgatgttcgtataggtattgatgttagtcgtatttggcgtattttttgatagttttgttagataagtaaaattatcgacgttatcgagttgtttttggcgttttagcgatttcgtaagagtaattagatcgatagggttatcgtttttttgtaaacgcgttattttagtaaagatatgacggtgtgggcgggtgtaa

SEQ ID NO: 25274 - DNA, 520 bp, Artificial Sequence
  chemically treated genomic DNA (Homo sapiens) CpG-island No: 25274
ttacacccgcccacaccgtcatatctttactaaaataacgcgtttacaaaaaaacgataaccctatcgatctaattactcttacgaaatcgctaaaacgccaaaaacaactcgataacgtcgataattttacttatctaacaaaactatcaaaaaatacgccaaatacgactaacatcaatacctatacgaacatcgtacgtaaacgtaccgttatccgtaaaataatctcgattacgaataaaattaccgaaactaattttaatccgcaaaaacgtaccaacgaaaatctactaaatctaactaaatcccgcgtctttaaaattaccgaaaatcgtacgaacaaaaacgaaaaaccgaaaaacatcgccgatatactcgacgcaaccgtaacgcgtattaaacaattatttcaacaaccacacgataacgttaccgaaataaacaccgattataacgatctcaacaaaaaaaccgctaacttacaaccgtcgaatttaatcatcgtcgccgcgcgtccg

SEQ ID NO: 25275 - DNA, 520 bp, Artificial Sequence
  chemically treated genomic DNA (Homo sapiens) CpG-island No: 25275
ttatattcgtttatatcgttatatttttattgaaatggcgcgtttgtaggaaagcggtagttttatcgatttgattatttttgcggaatcgttggaacgttaggggtaattcgatagcgtcggtggttttgtttatttggtagagttgttaaaaaatacgttaagtgcggttaatattagtgtttatgcggatatcgtgcgtgaacgtgtcgttgttcgtgagatgatttcggttgcgaatgagattgtcgaagttggttttgattcgtaggggcgtattagcgaagatttgttggatttggttgaatttcgcgtttttaaaattgtcgaaagtcgtgcgaataaagacgaagggtcgaagaatatcgtcgatgtgttcgacgtaatcgtggcgcgtattgagtagttgttttagtagttatacgatggcgttatcggggtaaatatcggttatgacgattttaataaaaaaatcgttggtttgtagtcgtcggatttgattatcgtcgtcgcgcgttcg

SEQ ID NO: 25276 - DNA, 520 bp, Artificial Sequence
  chemically treated genomic DNA (Homo sapiens) CpG-island No: 25276
cgaacgcgcgacgacgataatcaaatccgacgactacaaaccaacgatttttttattaaaatcgtcataaccgatatttaccccgataacgccatcgtataactactaaaacaactactcaatacgcgccacgattacgtcgaacacatcgacgatattcttcgacccttcgtctttattcgcacgactttcgacaattttaaaaacgcgaaattcaaccaaatccaacaaatcttcgctaatacgcccctacgaatcaaaaccaacttcgacaatctcattcgcaaccgaaatcatctcacgaacaacgacacgttcacgcacgatatccgcataaacactaatattaaccgcacttaacgtattttttaacaactctaccaaataaacaaaaccaccgacgctatcgaattacccctaacgttccaacgattccgcaaaaataatcaaatcgataaaactaccgctttcctacaaacgcgccatttcaataaaaatataacgatataaacgaatataa

SEQ ID NO: 25277 - DNA, 584 bp, Artificial Sequence
  chemically treated genomic DNA (Homo sapiens) CpG-island No: 25277
cgggattttattgacgaattttaggattttagttagcgtcgttttggaaagtatcgttagcggagatttttgttcgttttttgttatatacgtttgttgggtaaatattatattatcgtgcgtttcgatatgtataatgttggtatgttcgtcgacgatggtgatatacgtttattttttatcgttttagattttggcgcgtgagaagaggattttatcgtaaggtttttggattttaacggagatttttttcgtcgttagtagtgttttggtatcggtaattgtttgcgttgttgcgttttttagtatttttagttcggcgttggtatttttatttaacgtttttagcgtcgtcgtaatcggtagttttattattttcgtgtcgggaacggtgacgtttagatcgttttttattagatttggcgaaatttaggtttttatacgtttaatcggattttttagttttgtcgtagtaatcgtcgtcgttagcgttagtgaaatcggtttagtatattttagcgtcggttttatttttttttgaacggcgaggatgtaacgttgttataacggatttaaagtcgaat

SEQ ID NO: 25278 - DNA, 584 bp, Artificial Sequence
  chemically treated genomic DNA (Homo sapiens) CpG-island No: 25278
attcgactttaaatccgttataacaacgttacatcctcgccgttcaaaaaaaaataaaaccgacgctaaaatatactaaaccgatttcactaacgctaacgacgacgattactacgacaaaactaaaaaatccgattaaacgtataaaaacctaaatttcgccaaatctaataaaaaacgatctaaacgtcaccgttcccgacacgaaaataataaaactaccgattacgacgacgctaaaaacgttaaataaaaataccaacgccgaactaaaaatactaaaaaacgcaacaacgcaaacaattaccgataccaaaacactactaacgacgaaaaaaatctccgttaaaatccaaaaaccttacgataaaatcctcttctcacgcgccaaaatctaaaacgataaaaaataaacgtatatcaccatcgtcgacgaacataccaacattatacatatcgaaacgcacgataatataatatttacccaacaaacgtatataacaaaaaacgaacaaaaatctccgctaacgatactttccaaaacgacgctaactaaaatcctaaaattcgtcaataaaatcccg

SEQ ID NO: 25279 - DNA, 584 bp, Artificial Sequence
  chemically treated genomic DNA (Homo sapiens) CpG-island No: 25279
attcgattttaaattcgttatggtagcgttatattttcgtcgtttaggaggaagtaaaatcggcgttgggatgtattgaatcgattttattggcgttggcggcggcggttgttgcggtagaattggaaggttcggttgaacgtgtagaagtttgggtttcgttaaatttgatgaagaacggtttgggcgttatcgttttcggtacgggaatggtggggttgtcgattgcggcggcgttgggggcgttaggtggaaatgttaacgtcgggttggaagtgttgaaagacgtaatagcgtaggtaattgtcgatgttaaagtattgttggcggcggggaaagttttcgttaagatttaggaattttgcgatgaaattttttttttacgcgttaaagtttggaacggtgagaagtgggcgtgtgttattatcgtcggcgggtatattaatattgtgtatatcgagacgtacgatggtgtggtgtttatttagtaggcgtgtgtggtagagggcgagtaagagttttcgttgacggtgttttttagaacgacgttggttgagattttgaagttcgttaatgaagtttcg

SEQ ID NO: 25280 - DNA, 584 bp, Artificial Sequence
  chemically treated genomic DNA (Homo sapiens) CpG-island No: 25280
cgaaacttcattaacgaacttcaaaatctcaaccaacgtcgttctaaaaaacaccgtcaacgaaaactcttactcgccctctaccacacacgcctactaaataaacaccacaccatcgtacgtctcgatatacacaatattaatatacccgccgacgataataacacacgcccacttctcaccgttccaaactttaacgcgtaaaaaaaaaatttcatcgcaaaattcctaaatcttaacgaaaactttccccgccgccaacaatactttaacatcgacaattacctacgctattacgtctttcaacacttccaacccgacgttaacatttccacctaacgcccccaacgccgccgcaatcgacaaccccaccattcccgtaccgaaaacgataacgcccaaaccgttcttcatcaaatttaacgaaacccaaacttctacacgttcaaccgaaccttccaattctaccgcaacaaccgccgccgccaacgccaataaaatcgattcaatacatcccaacgccgattttacttcctcctaaacgacgaaaatataacgctaccataacgaatttaaaatcgaat

SEQ ID NO: 25281 - DNA, 607 bp, Artificial Sequence
  chemically treated genomic DNA (Homo sapiens) CpG-island No: 25281
ttgtcggtggataaagataaatttttcgttatgtttagtgaatttcgtatttcggcgattattgttacgattatcgcggtggttattattatcgttttgttgggtatgttgattcgtatttttttgtagttattgtatattatgattcgcgttatggaagatatcgtcgacggcgagggcgatttgattcgtcgtttgattatttagaattacgacgaattcggcgtgttcggtatcgcgtttaatcgtttcgtggagcggatttatatttcgattcgcgaggtattttcggttatcgagtacgttaatgaagtggttttgcgggtggttagcgtttttaatttttcgatggttaatttcgacgagtaggttaatcgtattaatagcgtagcggtcgttattaacgaattgggggtcgtcgtttaggaaatcgttcgtaacgtcgtataggtttttaattaggttagcgatgttcgataattggtcgaagacgggtagtaggtggtggagcgtaatattaaggcgatgaattagttgtcgtagatgattagcgtttttagtattaatatcgaagcgtttaataatagacggtgaatatcgggtagat

SEQ ID NO: 25282 - DNA, 607 bp, Artificial Sequence
  chemically treated genomic DNA (Homo sapiens) CpG-island No: 25282
atctacccgatattcaccgtctattattaaacgcttcgatattaatactaaaaacgctaatcatctacgacaactaattcatcgccttaatattacgctccaccacctactacccgtcttcgaccaattatcgaacatcgctaacctaattaaaaacctatacgacgttacgaacgatttcctaaacgacgacccccaattcgttaataacgaccgctacgctattaatacgattaacctactcgtcgaaattaaccatcgaaaaattaaaaacgctaaccacccgcaaaaccacttcattaacgtactcgataaccgaaaatacctcgcgaatcgaaatataaatccgctccacgaaacgattaaacgcgataccgaacacgccgaattcgtcgtaattctaaataatcaaacgacgaatcaaatcgccctcgccgtcgacgatatcttccataacgcgaatcataatatacaataactacaaaaaaatacgaatcaacatacccaacaaaacgataataataaccaccgcgataatcgtaacaataatcgccgaaatacgaaattcactaaacataacgaaaaatttatctttatccaccgacaa

SEQ ID NO: 25283 - DNA, 607 bp, Artificial Sequence
  chemically treated genomic DNA (Homo sapiens) CpG-island No: 25283
atttgttcgatgtttatcgtttgttgttaagcgtttcgatattggtattggaggcgttgattatttgcgataattggtttatcgttttgatattgcgttttattatttgttgttcgttttcggttagttgtcgggtatcgttggtttggttggaggtttgtgcggcgttgcgggcgattttttgggcggcggtttttagttcgttgatggcggtcgttacgttgttggtgcggttggtttgttcgtcggaattaattatcgaggagttggaggcgttgattattcgtagggttattttattgacgtgttcggtggtcgaggatatttcgcgaatcgaggtgtgaattcgttttacgaagcgattgaacgcggtatcgagtacgtcgaattcgtcgtggttttggatggttaggcggcgggttaggtcgttttcgtcgtcggcgatgttttttatggcgcgggttatgatgtgtaatggttgtaggaggatgcggattagtatgtttagtagggcgatgatgatgattatcgcgatgatcgtggtaatgatcgtcgaggtgcggaatttattgagtatggcgaaggatttgtttttatttatcgatag

SEQ ID NO: 25284 - DNA, 607 bp, Artificial Sequence
  chemically treated genomic DNA (Homo sapiens) CpG-island No: 25284
ctatcgataaataaaaacaaatccttcgccatactcaataaattccgcacctcgacgatcattaccacgatcatcgcgataatcatcatcatcgccctactaaacatactaatccgcatcctcctacaaccattacacatcataacccgcgccataaaaaacatcgccgacgacgaaaacgacctaacccgccgcctaaccatccaaaaccacgacgaattcgacgtactcgataccgcgttcaatcgcttcgtaaaacgaattcacacctcgattcgcgaaatatcctcgaccaccgaacacgtcaataaaataaccctacgaataatcaacgcctccaactcctcgataattaattccgacgaacaaaccaaccgcaccaacaacgtaacgaccgccatcaacgaactaaaaaccgccgcccaaaaaatcgcccgcaacgccgcacaaacctccaaccaaaccaacgatacccgacaactaaccgaaaacgaacaacaaataataaaacgcaatatcaaaacgataaaccaattatcgcaaataatcaacgcctccaataccaatatcgaaacgcttaacaacaaacgataaacatcgaacaaat

SEQ ID NO: 25285 - DNA, 617 bp, Artificial Sequence
  chemically treated genomic DNA (Homo sapiens) CpG-island No: 25285
ttggattcggggcgcggtgtaggcggggtggagtgagggtgggtcggggattttagcgtcgtaggagggattgcgttatacggggtcgatttgtagtagtaggaggtcgtggtcgatggtgtcgggttggttgttcgggtggggtattgcgcggagtacgtcgtataggcgtttggagggtttcggttgcgatagggagtgcgcgtttaggagaatttgtattttttcgtcggttttggggatcggacggagttcgcggtcggtgttagtcgattttttttatcgtattcgggtttttttttcgcgcggcgcgggtatttacgcgttttttaggtagtgcgtcgcgtttagtatttattgtttcgttattaggacgtcgtcgtataggtgcgcgtcgtttagttgtatcgacgttatgtagggtcgcgcgtgcgtttcggtttttttgtcgtttaggattcgattacggggcggcgtcgttgtgggtgggcgggcgcgtgagggtcgcggggtggatttttttttcgggcgaggttgtttgacgggattttagtttttattttttaggtcgtttttcgtaagaattttatttttgggcgcggtggtttacgtttgta

SEQ ID NO: 25286 - DNA, 617 bp, Artificial Sequence
  chemically treated genomic DNA (Homo sapiens) CpG-island No: 25286
tacaaacgtaaaccaccgcgcccaaaaataaaattcttacgaaaaacgacctaaaaaataaaaactaaaatcccgtcaaacaacctcgcccgaaaaaaaaatccaccccgcgaccctcacgcgcccgcccacccacaacgacgccgccccgtaatcgaatcctaaacgacaaaaaaaccgaaacgcacgcgcgaccctacataacgtcgatacaactaaacgacgcgcacctatacgacgacgtcctaataacgaaacaataaatactaaacgcgacgcactacctaaaaaacgcgtaaatacccgcgccgcgcgaaaaaaaaacccgaatacgataaaaaaaatcgactaacaccgaccgcgaactccgtccgatccccaaaaccgacgaaaaaatacaaattctcctaaacgcgcactccctatcgcaaccgaaaccctccaaacgcctatacgacgtactccgcgcaataccccacccgaacaaccaacccgacaccatcgaccacgacctcctactactacaaatcgaccccgtataacgcaatccctcctacgacgctaaaatccccgacccaccctcactccaccccgcctacaccgcgccccgaatccaa

SEQ ID NO: 25287 - DNA, 617 bp, Artificial Sequence
  chemically treated genomic DNA (Homo sapiens) CpG-island No: 25287
tataggcgtgagttatcgcgtttagagatgggatttttgcggggagcggtttggggggtgagagttgggatttcgttaggtagtttcgttcgggggaggagtttatttcgcggtttttacgcgttcgtttatttatagcggcgtcgtttcgtggtcggattttgggcggtagagaggtcgaggcgtacgcgcggttttatatggcgtcggtgtagttgaacggcgcgtatttgtgcggcggcgttttggtggcggagtagtgggtgttgagcgcggcgtattgtttggaggacgcgtgagtgttcgcgtcgcgcgggggaagagttcgggtgcggtggggggagtcggttggtatcgatcgcggatttcgttcggtttttagggtcgacgggaaggtgtaggtttttttgggcgcgtattttttgtcgtagtcggagttttttaagcgtttgtacgacgtgtttcgcgtagtgttttattcggatagttagttcgatattatcgattacgattttttgttgttataggtcggtttcgtgtagcgtagttttttttgcggcgttgggattttcggtttatttttattttatttcgtttatatcgcgtttcgggtttag

SEQ ID NO: 25288 - DNA, 617 bp, Artificial Sequence
  chemically treated genomic DNA (Homo sapiens) CpG-island No: 25288
ctaaacccgaaacgcgatataaacgaaataaaataaaaataaaccgaaaatcccaacgccgcaaaaaaaactacgctacacgaaaccgacctataacaacaaaaaatcgtaatcgataatatcgaactaactatccgaataaaacactacgcgaaacacgtcgtacaaacgcttaaaaaactccgactacgacaaaaaatacgcgcccaaaaaaacctacaccttcccgtcgaccctaaaaaccgaacgaaatccgcgatcgataccaaccgactccccccaccgcacccgaactcttcccccgcgcgacgcgaacactcacgcgtcctccaaacaatacgccgcgctcaacacccactactccgccaccaaaacgccgccgcacaaatacgcgccgttcaactacaccgacgccatataaaaccgcgcgtacgcctcgacctctctaccgcccaaaatccgaccacgaaacgacgccgctataaataaacgaacgcgtaaaaaccgcgaaataaactcctcccccgaacgaaactacctaacgaaatcccaactctcaccccccaaaccgctccccgcaaaaatcccatctctaaacgcgataactcacgcctata

SEQ ID NO: 25289 - DNA, 1123 bp, Artificial Sequence
  chemically treated genomic DNA (Homo sapiens) CpG-island No: 25289
gtaggacgggttcgtcggttttatacgtcgtataagtgggtggagaatattttatacgtttagattaataggcggggtgaacgaggatcgtgtttattaatttagttcggttcgcggaatgttttttgttcgttttcgggtttgtagtggtttttcgtcgtaggttaggtcgcgttttattttcgtcggtagtttagatacgttttttcgggtttaattttcgttttttatatatttggtttcgtttcgtcgggagttcggcggttttttttgcgttaggtttttttagcgttcgacggggttacgtttattttcgacgttttgaggttatttatagggtcgattttcggtgggcggagggacggagggaagatggttgtagagatcggatattggcgttgttttttcgaatttcggatttgcgttgaggaggcggtttatttgtggttagcggtgtttcgggattcgcgttgggggaattttggcgacggggtttggttttgttatatgcgggggtttcggttggagtgagcggcgtggacgtttttttttttcggttttttttttgttgttgcgagagcgagagggtcgcgggcggcggaggtagcggggtcgggatggaggacgttaattttaacgtgaacgcggattaggaggtgcggaagttgtaggtgtcggtgaagaagttggggaagtagtacgaatagtcgaggagtcgttcgcgttgtgttgggtttcggttttatcgcggttcgtcggtttttttatttttttttacggcgcggggttttttcggggtttttttttgggttttagcgtaaagtcgggcggcggggtcggatggattcgaggcggacgaataacgaggagttgcgagacgttatttttttgttggcggcgggggagggcggtttgttagacgatttggagcgtttgttaggttaggaggagggggaggagagttggtgagcgtcgggcgtcgggcggggttgggcggggacgtttcggtggcggaggacgtttcggaggatttttttggtcgggcgtttggttttgtgtagttagttaggttcgttttcggcgggtattcgtggttttgttttggtagaggggaggttagttg

SEQ ID NO: 25290 - DNA, 1123 bp, Artificial Sequence
  chemically treated genomic DNA (Homo sapiens) CpG-island No: 25290
caactaacctcccctctaccaaaacaaaaccacgaatacccgccgaaaacgaacctaactaactacacaaaaccaaacgcccgaccaaaaaaatcctccgaaacgtcctccgccaccgaaacgtccccgcccaaccccgcccgacgcccgacgctcaccaactctcctccccctcctcctaacctaacaaacgctccaaatcgtctaacaaaccgccctcccccgccgccaacaaaaaaataacgtctcgcaactcctcgttattcgtccgcctcgaatccatccgaccccgccgcccgactttacgctaaaacccaaaaaaaaaccccgaaaaaaccccgcgccgtaaaaaaaaataaaaaaaccgacgaaccgcgataaaaccgaaacccaacacaacgcgaacgactcctcgactattcgtactacttccccaacttcttcaccgacacctacaacttccgcacctcctaatccgcgttcacgttaaaattaacgtcctccatcccgaccccgctacctccgccgcccgcgaccctctcgctctcgcaacaacaaaaaaaaaaccgaaaaaaaaaaacgtccacgccgctcactccaaccgaaacccccgcatataacaaaaccaaaccccgtcgccaaaattcccccaacgcgaatcccgaaacaccgctaaccacaaataaaccgcctcctcaacgcaaatccgaaattcgaaaaaacaacgccaatatccgatctctacaaccatcttccctccgtccctccgcccaccgaaaatcgaccctataaataacctcaaaacgtcgaaaataaacgtaaccccgtcgaacgctaaaaaaacctaacgcaaaaaaaaccgccgaactcccgacgaaacgaaaccaaatatataaaaaacgaaaattaaacccgaaaaaacgtatctaaactaccgacgaaaataaaacgcgacctaacctacgacgaaaaaccactacaaacccgaaaacgaacaaaaaacattccgcgaaccgaactaaattaataaacacgatcctcgttcaccccgcctattaatctaaacgtataaaatattctccacccacttatacgacgtataaaaccgacgaacccgtcctac

SEQ ID NO: 25291 - DNA, 1123 bp, Artificial Sequence
  chemically treated genomic DNA (Homo sapiens) CpG-island No: 25291
taattgattttttttttgttagagtaagattacgagtattcgtcgagagcggatttggttggttatataaagttaggcgttcgattagagggatttttcgggacgtttttcgttatcggggcgttttcgtttagtttcgttcggcgttcggcgtttattagtttttttttttttttttttagtttgatagacgttttaggtcgtttagtaagtcgttttttttcgtcgttagtaagaaggtggcgtttcgtagtttttcgttattcgttcgtttcgggtttattcggtttcgtcgttcgattttgcgttgagatttaaggggaagtttcgaggggatttcgcgtcgtaggagggagtggaggagtcggcgaatcgcgatggagtcggggtttagtatagcgcgagcggtttttcggttgttcgtgttgtttttttagtttttttatcggtatttgtagttttcgtattttttggttcgcgtttacgttagagttaacgttttttatttcggtttcgttgttttcgtcgttcgcggttttttcgttttcgtagtaataagggaagagtcggaggaaagaggcgtttacgtcgtttattttagtcgaggttttcgtatatagtagggttaggtttcgtcgttagggtttttttagcgcgggtttcgaagtatcgttggttatagatgaatcgtttttttagcgtaggttcgggattcggggaggtagcgttaatattcggtttttgtagttatttttttttcgttttttcgtttatcgagggtcggttttgtaggtgattttagagcgtcggggatgggcgtggtttcgtcgggcgttaagaagatttagcgtagagaggatcgtcgagttttcgacggggcggggttaggtgtgtgaggggcggggattggattcggaggggcgtgtttggattgtcggcggaagtggaacgcggtttgatttgcgacggaaagttattgtaagttcggaggcgaatagaaggtatttcgcgagtcgggttgagttggtgaatacggttttcgtttatttcgtttattggtttgggcgtgtggggtattttttatttatttatacggcgtgtgggatcgacgggttcgttttgt

SEQ ID NO: 25292 - DNA, 1123 bp, Artificial Sequence
  chemically treated genomic DNA (Homo sapiens) CpG-island No: 25292
acaaaacgaacccgtcgatcccacacgccgtataaataaataaaaaataccccacacgcccaaaccaataaacgaaataaacgaaaaccgtattcaccaactcaacccgactcgcgaaataccttctattcgcctccgaacttacaataactttccgtcgcaaatcaaaccgcgttccacttccgccgacaatccaaacacgcccctccgaatccaatccccgcccctcacacacctaaccccgccccgtcgaaaactcgacgatcctctctacgctaaatcttcttaacgcccgacgaaaccacgcccatccccgacgctctaaaatcacctacaaaaccgaccctcgataaacgaaaaaacgaaaaaaaaataactacaaaaaccgaatattaacgctacctccccgaatcccgaacctacgctaaaaaaacgattcatctataaccaacgatacttcgaaacccgcgctaaaaaaaccctaacgacgaaacctaaccctactatatacgaaaacctcgactaaaataaacgacgtaaacgcctctttcctccgactcttcccttattactacgaaaacgaaaaaaccgcgaacgacgaaaacaacgaaaccgaaataaaaaacgttaactctaacgtaaacgcgaaccaaaaaatacgaaaactacaaataccgataaaaaaactaaaaaaacaacacgaacaaccgaaaaaccgctcgcgctatactaaaccccgactccatcgcgattcgccgactcctccactccctcctacgacgcgaaatcccctcgaaacttccccttaaatctcaacgcaaaatcgaacgacgaaaccgaataaacccgaaacgaacgaataacgaaaaactacgaaacgccaccttcttactaacgacgaaaaaaaacgacttactaaacgacctaaaacgtctatcaaactaaaaaaaaaaaaaaaaaaactaataaacgccgaacgccgaacgaaactaaacgaaaacgccccgataacgaaaaacgtcccgaaaaatccctctaatcgaacgcctaactttatataaccaaccaaatccgctctcgacgaatactcgtaatcttactctaacaaaaaaaaaatcaatta

SEQ ID NO: 25293 - DNA, 726 bp, Artificial Sequence
  chemically treated genomic DNA (Homo sapiens) CpG-island No: 25293
ttttttcgttatagtgttaagagcgtttagattacgattaggggggcgtgcgcgcgtcgggaggggaaacgtgcgcgcgtcggggggtgggggggcgtttagtttagcgttagtacggattatgtatagattagtaatcgttggtcgttaggttttcggagggtttgttcgtcgcggttttcgttacgggcggtttcgtattttttggtttagtacgcgggattggcgtagtcgtttttcggtatttatcgttcgtagacgttgttttagtttttttcgtaggtttcgtttggcgttgtttatcgttgtcgtcgttattttacgtttaagtcgagtttagtttcgttttcggcgttttgggcgttttcgggttcggttttcgtttttggtcgtttttaggtggattcgcggtttaggggcgggtcggggttcggggaagcgtttttatttcgttttcgggacgcgggttcgcggcgcgtcgcgcgtttatttcgtttttggtttttgggatttagttttcgtgcggttttcgtggttcggttcgtttttttcggttaggggagcggtggcgaggcgtcgtcgttgttttgtcgtttgatttttttgagtttgggtttttatcgggatcgcggaggcggtagcgttattggcggggatggtaaagatggtcggtagtatttacggtgtttggtattttttgtattgtttagtagtgggattttaggg

SEQ ID NO: 25294 - DNA, 726 bp, Artificial Sequence
  chemically treated genomic DNA (Homo sapiens) CpG-island No: 25294
ccctaaaatcccactactaaacaatacaaaaaataccaaacaccgtaaatactaccgaccatctttaccatccccgccaataacgctaccgcctccgcgatcccgataaaaacccaaactcaaaaaaatcaaacgacaaaacaacgacgacgcctcgccaccgctcccctaaccgaaaaaaacgaaccgaaccacgaaaaccgcacgaaaactaaatcccaaaaaccaaaaacgaaataaacgcgcgacgcgccgcgaacccgcgtcccgaaaacgaaataaaaacgcttccccgaaccccgacccgcccctaaaccgcgaatccacctaaaaacgaccaaaaacgaaaaccgaacccgaaaacgcccaaaacgccgaaaacgaaactaaactcgacttaaacgtaaaataacgacgacaacgataaacaacgccaaacgaaacctacgaaaaaaactaaaacaacgtctacgaacgataaataccgaaaaacgactacgccaatcccgcgtactaaaccaaaaaatacgaaaccgcccgtaacgaaaaccgcgacgaacaaaccctccgaaaacctaacgaccaacgattactaatctatacataatccgtactaacgctaaactaaacgcccccccaccccccgacgcgcgcacgtttcccctcccgacgcgcgcacgcccccctaatcgtaatctaaacgctcttaacactataacgaaaaaa

SEQ ID NO: 25295 - DNA, 726 bp, Artificial Sequence
  chemically treated genomic DNA (Homo sapiens) CpG-island No: 25295
ttttgaagttttattattgaatagtataagagatgttaggtatcgtgggtattgtcggttatttttattattttcgttagtggcgttgtcgttttcgcggtttcggtgagggtttaggtttagggaggttaggcggtagggtagcgacggcgtttcgttatcgtttttttaatcggggagggcgagtcggattacggggatcgtacgagggttgggttttaagggttagaggcgaggtaagcgcgcggcgcgtcgcgggttcgcgtttcggaagcggggtgggggcgttttttcgagtttcgattcgtttttaggtcgcggatttatttgggagcggttaggggcggagatcgaattcgagggcgtttagggcgtcgagggcgggattggattcggtttgggcgtgagatggcggcggtagcggtgagtagcgttaagcggagtttgcggggagagttgaagtagcgtttgcgggcgatgagtgtcgaggagcggttacgttagtttcgcgtattgagttagaaggtgcgaggtcgttcgtagcggaagtcgcggcggatagatttttcgaaggtttggcggttagcgattgttgatttgtgtatggttcgtgttggcgttgggttaggcgtttttttatttttcggcgcgcgtacgttttttttttcggcgcgcgtacgtttttttagtcgtggtttggacgtttttggtattatggcggggaga

SEQ ID NO: 25296 - DNA, 726 bp, Artificial Sequence
  chemically treated genomic DNA (Homo sapiens) CpG-island No: 25296
tctccccgccataataccaaaaacgtccaaaccacgactaaaaaaacgtacgcgcgccgaaaaaaaaaacgtacgcgcgccgaaaaataaaaaaacgcctaacccaacgccaacacgaaccatacacaaatcaacaatcgctaaccgccaaaccttcgaaaaatctatccgccgcgacttccgctacgaacgacctcgcaccttctaactcaatacgcgaaactaacgtaaccgctcctcgacactcatcgcccgcaaacgctacttcaactctccccgcaaactccgcttaacgctactcaccgctaccgccgccatctcacgcccaaaccgaatccaatcccgccctcgacgccctaaacgccctcgaattcgatctccgcccctaaccgctcccaaataaatccgcgacctaaaaacgaatcgaaactcgaaaaaacgcccccaccccgcttccgaaacgcgaacccgcgacgcgccgcgcgcttacctcgcctctaacccttaaaacccaaccctcgtacgatccccgtaatccgactcgccctccccgattaaaaaaacgataacgaaacgccgtcgctaccctaccgcctaacctccctaaacctaaaccctcaccgaaaccgcgaaaacgacaacgccactaacgaaaataataaaaataaccgacaatacccacgatacctaacatctcttatactattcaataataaaacttcaaaa

SEQ ID NO: 25297 - DNA, 525 bp, Artificial Sequence
  chemically treated genomic DNA (Homo sapiens) CpG-island No: 25297
  unsure (36, 194, 212, 287, 340, 368)
tgcgtcgtagaagtatttgggacgtgtagtttcggngtcgcgcgggttcggcgcgcgttggggagaagttggtagaagtcgttcgttaatatttcgtgcggaattcggtattaggatttttttcgacgtcggtttttagttcgcggcgtcgtagtcgtcgtcgtcgtcgcgaagttaaatggggttgggacggnggttgtttcgtttttttngtttttttcgggcgcgtagagcgttgcgttggttttcgtttaaaggcggaggtcgcgcgtcgttatttgtatcgntcggtaagtgtacggcgcgtttaggcgttcgtaaggttgcgcgcgggaatcgngtttttggtttgagttggaggcgtcggnggcgttaaaagattttttgtgggggtagtttcgggtcgttcggattcgcgggggttcgggaatcgcgggatttggttggaacggtttttcgtttcgttttttggaattattttttgtttttgggcgggtttttaggcgtttttgtaaaaaaatcgga

SEQ ID NO: 25298 - DNA, 525 bp, Artificial Sequence
  chemically treated genomic DNA (Homo sapiens) CpG-island No: 25298
  unsure (158, 186, 239, 314, 332, 490)
tccgatttttttacaaaaacgcctaaaaacccgcccaaaaacaaaaaataattccaaaaaacgaaacgaaaaaccgttccaaccaaatcccgcgattcccgaacccccgcgaatccgaacgacccgaaactacccccacaaaaaatcttttaacgccnccgacgcctccaactcaaaccaaaaacncgattcccgcgcgcaaccttacgaacgcctaaacgcgccgtacacttaccgancgatacaaataacgacgcgcgacctccgcctttaaacgaaaaccaacgcaacgctctacgcgcccgaaaaaaacnaaaaaaacgaaacaaccnccgtcccaaccccatttaacttcgcgacgacgacgacgactacgacgccgcgaactaaaaaccgacgtcgaaaaaaatcctaataccgaattccgcacgaaatattaacgaacgacttctaccaacttctccccaacgcgcgccgaacccgcgcgacnccgaaactacacgtcccaaatacttctacgacgca

SEQ ID NO: 25299 - DNA, 525 bp, Artificial Sequence
  chemically treated genomic DNA (Homo sapiens) CpG-island No: 25299
  unsure (158, 186, 239, 314, 332, 490)
ttcggtttttttgtaaaaacgtttgggggttcgtttaagggtaagaaatggttttaagaaacggggcgaaggatcgttttaattaagtttcgcggttttcgggttttcgcgggttcgaacggttcggggttgtttttatagggggttttttggcgttntcggcgtttttagtttaaattaagggtncggttttcgcgcgtagttttacgggcgtttgggcgcgtcgtgtatttgtcggncggtgtaggtggcggcgcgcggttttcgtttttgggcgggggttagcgtagcgttttgcgcgttcgaagggggtnggaaaggcggggtagttntcgttttagttttatttaatttcgcggcggcggcggcgattgcggcgtcgcgggttggaggtcggcgtcggggaaggttttggtgtcggatttcgtacgaggtgttgacgggcggtttttgttaatttttttttagcgcgcgtcgagttcgcgcggtntcggggttgtacgttttagatatttttgcggcgta

SEQ ID NO: 25300 - DNA, 525 bp, Artificial Sequence
  chemically treated genomic DNA (Homo sapiens) CpG-island No: 25300
  unsure (36, 194, 212, 287, 340, 368)
tacgccgcaaaaatatctaaaacgtacaaccccganaccgcgcgaactcgacgcgcgctaaaaaaaaattaacaaaaaccgcccgtcaacacctcgtacgaaatccgacaccaaaaccttccccgacgccgacctccaacccgcgacgccgcaatcgccgccgccgccgcgaaattaaataaaactaaaacganaactaccccgcctttccnacccccttcgaacgcgcaaaacgctacgctaacccccgcccaaaaacgaaaaccgcgcgccgccacctacaccgnccgacaaatacacgacgcgcccaaacgcccgtaaaactacgcgcgaaaaccgnacccttaatttaaactaaaaacgccganaacgccaaaaaaccccctataaaaacaaccccgaaccgttcgaacccgcgaaaacccgaaaaccgcgaaacttaattaaaacgatccttcgccccgtttcttaaaaccatttcttacccttaaacgaacccccaaacgtttttacaaaaaaaccgaa

SEQ ID NO: 25301 - DNA, 758 bp, Artificial Sequence
  chemically treated genomic DNA (Homo sapiens) CpG-island No: 25301
gcgcgcgtttaggtgcggggttttggggtttaggcgtagtagtcgggttcgtagttgttggcgttatcgcggagggcggggtcgcggggcggtgttcggggtcggggacggttgttggagcggcgttcgtcgcggtttagcgtattttcgtttttcgttttttttttcgttgcgttttcgcgcgaagatggtaatcgaggggttgtacgagaacgagacgttggcgtcgttgaagagcgaggtcgagagttttaagggtaagttggaggaggagcgagttaagttgtacgatgtggagcgtgagtgcgggtcgggaggcgggcggggtaagtcggatcggttcgttatttttcgggcggggacggcgggggcggtgggggcggtcgtggtagcgacgggagttaggttcgcgttatcgttcgggagtagggttttggggttcgggcgcgtaggtgaggcgcgggtagcggtttcgattttcggaacgcgcggcggtggggttttcggagggttcgggtatttggtcgattttcgtcgttagttagcggaggatcgcgggattagttatttttattatttgtttggaagttgcgaacggatcgcgtttttgttttttttatgcggagggtagggggtggggtgtcggtggtgacgagcgagcgcggcgagttcgtgtaggcgcggtttaggagagatttttgttttgttttttaatgttcgtttggttttttttattattgttgtatttttttttagtt

SEQ ID NO: 25302 - DNA, 758 bp, Artificial Sequence
  chemically treated genomic DNA (Homo sapiens) CpG-island No: 25302
aactaaaaaaaaatacaacaataataaaaaaaaccaaacgaacattaaaaaacaaaacaaaaatctctcctaaaccgcgcctacacgaactcgccgcgctcgctcgtcaccaccgacaccccaccccctaccctccgcataaaaaaaacaaaaacgcgatccgttcgcaacttccaaacaaataataaaaataactaatcccgcgatcctccgctaactaacgacgaaaatcgaccaaatacccgaaccctccgaaaaccccaccgccgcgcgttccgaaaatcgaaaccgctacccgcgcctcacctacgcgcccgaaccccaaaaccctactcccgaacgataacgcgaacctaactcccgtcgctaccacgaccgcccccaccgcccccgccgtccccgcccgaaaaataacgaaccgatccgacttaccccgcccgcctcccgacccgcactcacgctccacatcgtacaacttaactcgctcctcctccaacttacccttaaaactctcgacctcgctcttcaacgacgccaacgtctcgttctcgtacaacccctcgattaccatcttcgcgcgaaaacgcaacgaaaaaaaaaacgaaaaacgaaaatacgctaaaccgcgacgaacgccgctccaacaaccgtccccgaccccgaacaccgccccgcgaccccgccctccgcgataacgccaacaactacgaacccgactactacgcctaaaccccaaaaccccgcacctaaacgcgcgc

SEQ ID NO: 25303 - DNA, 758 bp, Artificial Sequence
  chemically treated genomic DNA (Homo sapiens) CpG-island No: 25303
aattgagaaaagatataatagtgatggagaaagttagacgggtattaaaaaataaaataggagttttttttaggtcgcgtttatacgggttcgtcgcgttcgttcgttattatcgatattttattttttgtttttcgtatgggaggggtaagaacgcgattcgttcgtagtttttaggtaggtgatgaggatagttagtttcgcggtttttcgttagttggcggcgggggtcggttaggtgttcggatttttcgagggttttatcgtcgcgcgtttcggggatcgggatcgttattcgcgttttatttgcgcgttcgggttttagggttttgttttcgggcggtggcgcgggtttggttttcgtcgttgttacgatcgtttttatcgttttcgtcgttttcgttcgggaagtggcgagtcggttcggtttgtttcgttcgtttttcggttcgtatttacgttttatatcgtgtagtttggttcgttttttttttagtttgtttttgaggttttcggtttcgttttttagcgacgttagcgtttcgttttcgtgtagtttttcggttgttattttcgcgcggggacgtagcggagagggaagcggagagcgggaatgcgttgagtcgcggcgggcgtcgttttagtagtcgttttcggtttcgagtatcgtttcgcggtttcgtttttcgcgatgacgttagtagttgcgggttcggttgttgcgtttgagttttaagatttcgtatttgggcgcgcgt

SEQ ID NO: 25304 - DNA, 758 bp, Artificial Sequence
  chemically treated genomic DNA (Homo sapiens) CpG-island No: 25304
acgcgcgcccaaatacgaaatcttaaaactcaaacgcaacaaccgaacccgcaactactaacgtcatcgcgaaaaacgaaaccgcgaaacgatactcgaaaccgaaaacgactactaaaacgacgcccgccgcgactcaacgcattcccgctctccgcttccctctccgctacgtccccgcgcgaaaataacaaccgaaaaactacacgaaaacgaaacgctaacgtcgctaaaaaacgaaaccgaaaacctcaaaaacaaactaaaaaaaaaacgaaccaaactacacgatataaaacgtaaatacgaaccgaaaaacgaacgaaacaaaccgaaccgactcgccacttcccgaacgaaaacgacgaaaacgataaaaacgatcgtaacaacgacgaaaaccaaacccgcgccaccgcccgaaaacaaaaccctaaaacccgaacgcgcaaataaaacgcgaataacgatcccgatccccgaaacgcgcgacgataaaaccctcgaaaaatccgaacacctaaccgacccccgccgccaactaacgaaaaaccgcgaaactaactatcctcatcacctacctaaaaactacgaacgaatcgcgttcttacccctcccatacgaaaaacaaaaaataaaatatcgataataacgaacgaacgcgacgaacccgtataaacgcgacctaaaaaaaactcctattttattttttaatacccgtctaactttctccatcactattatatcttttctcaatt

SEQ ID NO: 25305 - DNA, 559 bp, Artificial Sequence
  chemically treated genomic DNA (Homo sapiens) CpG-island No: 25305
atcggcgttggtcgcgcgttaggttagtcgcgaggttatcgttcgattttttattttttttcgtagttttcggcgcggggttcggcgagaaggggaggggaggggagcggagaatcgggttttcgggacgcgtgtggtatttgaagtattattagcgagcgagagttagagagaaggaaagttatcgattttatcgttttcgagttgtttcgggtcgcgggtttgtagcgttttcggtttttcgcgtttatagtttaagttatattcgaaggggagggagtcgggagttgcgcgcggggtcgtcggggggaggggtggtatttttacgtcgggcggttacgaagggcggggtagcgggcgcgcgttcggcggggggaggggtcgcgcgtcgcgttcgttgggaattggggttttagggggagggcggaggcgtcgacgatcgcggtatttatcgttcgcggcgtggcgttcggtggtttttaaggggagggaagggggaggcggggcgaggatagtgatcggagtttttttagcggtggtttttttgtttggtagtttt

SEQ ID NO: 25306 - DNA, 559 bp, Artificial Sequence
  chemically treated genomic DNA (Homo sapiens) CpG-island No: 25306
aaaactaccaaacaaaaaaaccaccgctaaaaaaactccgatcactatcctcgccccgcctcccccttccctccccttaaaaaccaccgaacgccacgccgcgaacgataaataccgcgatcgtcgacgcctccgccctccccctaaaaccccaattcccaacgaacgcgacgcgcgacccctccccccgccgaacgcgcgcccgctaccccgcccttcgtaaccgcccgacgtaaaaataccacccctccccccgacgaccccgcgcgcaactcccgactccctccccttcgaatataacttaaactataaacgcgaaaaaccgaaaacgctacaaacccgcgacccgaaacaactcgaaaacgataaaatcgataactttccttctctctaactctcgctcgctaataatacttcaaataccacacgcgtcccgaaaacccgattctccgctcccctcccctccccttctcgccgaaccccgcgccgaaaactacgaaaaaaaataaaaaatcgaacgataacctcgcgactaacctaacgcgcgaccaacgccgat

SEQ ID NO: 25307 - DNA, 559 bp, Artificial Sequence
  chemically treated genomic DNA (Homo sapiens) CpG-island No: 25307
gaggttgttaagtagaaaagttatcgttgaggagatttcggttattgttttcgtttcgttttttttttttttttttttggggattatcgggcgttacgtcgcgaacggtaagtgtcgcggtcgtcggcgttttcgttttttttttagggttttaatttttagcgggcgcggcgcgcggttttttttttcgtcgggcgcgcgttcgttgtttcgtttttcgtggtcgttcggcgtgggggtgttattttttttttcggcggtttcgcgcgtagttttcggttttttttttttcggatgtggtttgagttgtaggcgcggagggtcggagacgttgtagattcgcgattcggagtagttcggaggcggtgaagtcggtggttttttttttttttagttttcgttcgttggtggtgttttagatgttatacgcgtttcgggggttcggtttttcgttttttttttttttttttttcgtcggatttcgcgtcgggagttgcgggaaggagtggagggtcgggcggtggtttcgcggttggtttggcgcgcggttagcgtcggt

SEQ ID NO: 25308 - DNA, 559 bp, Artificial Sequence
  chemically treated genomic DNA (Homo sapiens) CpG-island No: 25308
accgacgctaaccgcgcgccaaaccaaccgcgaaaccaccgcccgaccctccactccttcccgcaactcccgacgcgaaatccgacgaaaaaaaaaaaaaaaaaaaacgaaaaaccgaacccccgaaacgcgtataacatctaaaacaccaccaacgaacgaaaactaaaaaaaaaaaaaaccaccgacttcaccgcctccgaactactccgaatcgcgaatctacaacgtctccgaccctccgcgcctacaactcaaaccacatccgaaaaaaaaaaaaccgaaaactacgcgcgaaaccgccgaaaaaaaaaataacacccccacgccgaacgaccacgaaaaacgaaacaacgaacgcgcgcccgacgaaaaaaaaaaccgcgcgccgcgcccgctaaaaattaaaaccctaaaaaaaaaacgaaaacgccgacgaccgcgacacttaccgttcgcgacgtaacgcccgataatccccaaaaaaaaaaaaaaaaaaaacgaaacgaaaacaataaccgaaatctcctcaacgataacttttctacttaacaacctc

SEQ ID NO: 25309 - DNA, 673 bp, Artificial Sequence
  chemically treated genomic DNA (Homo sapiens) CpG-island No: 25309
tcgtcggcgttaattttaaattgcgcgatcgttttttatttgttttgcgttaaggtagggggcgggattttattttaagaggtagtaattagtaggattttagtttttcgtaatttattgagcgtatttacggaagtaacgtcgggtattgtttttggtcgtaagggtgggaggagtacgtatttggcgtaaggtggggcgtagagttttttcgttattggcggcggatagggcgtttacgcgacggtttgacgtagcggaagacgcgttagtgggggggaaggttttagaaaagcggcggtagcggttttagcggtagtagtagtagcgtcgggtttcgtgcggaggtgtttttcgtagagttgtttttcgagtagcggtagtttttattatagcgttaggacgagttcggttcgtgttcgttcgcggagattttttttatttcgttcggttgcgggaaatcgggttgaagcgattgagttcgcgatggaggtaacgggtttgaaattaatgagttattgaaaagggtatggcgaggtcgttggcgttttagtggaagtcggttagtcgttttcgtgggagagaggtaggaaatcggattaatttagtagtagtggggtttaaggtttatgaacggggttttgagcggaggtttgagcgtataaatagtttt

SEQ ID NO: 25310 - DNA, 673 bp, Artificial Sequence
  chemically treated genomic DNA (Homo sapiens) CpG-island No: 25310
aaaactatttatacgctcaaacctccgctcaaaaccccgttcataaaccttaaaccccactactactaaattaatccgatttcctacctctctcccacgaaaacgactaaccgacttccactaaaacgccaacgacctcgccatacccttttcaataactcattaatttcaaacccgttacctccatcgcgaactcaatcgcttcaacccgatttcccgcaaccgaacgaaataaaaaaaatctccgcgaacgaacacgaaccgaactcgtcctaacgctataataaaaactaccgctactcgaaaaacaactctacgaaaaacacctccgcacgaaacccgacgctactactactaccgctaaaaccgctaccgccgcttttctaaaaccttcccccccactaacgcgtcttccgctacgtcaaaccgtcgcgtaaacgccctatccgccgccaataacgaaaaaactctacgccccaccttacgccaaatacgtactcctcccacccttacgaccaaaaacaatacccgacgttacttccgtaaatacgctcaataaattacgaaaaactaaaatcctactaattactacctcttaaaataaaatcccgccccctaccttaacgcaaaacaaataaaaaacgatcgcgcaatttaaaattaacgccgacga

SEQ ID NO: 25311 - DNA, 673 bp, Artificial Sequence
  chemically treated genomic DNA (Homo sapiens) CpG-island No: 25311
gaagttgtttgtacgtttaggttttcgtttaagatttcgtttataaattttaagttttattgttattgaattggttcgattttttgttttttttttacggaggcggttggtcgatttttattgaggcgttaacggtttcgttatgttttttttaataatttattgattttaaattcgttatttttatcgcggatttagtcgttttagttcgatttttcgtagtcgagcgagatgagagagattttcgcggacgaatacgaatcggattcgttttggcgttgtagtgagaattgtcgttgttcgagaaataattttgcgaggagtattttcgtacgggattcggcgttgttgttattgtcgttagagtcgttgtcgtcgtttttttagaatttttttttttattaacgcgtttttcgttacgttaggtcgtcgcgtaaacgttttattcgtcgttaatggcgggaaggttttacgttttattttacgttaaatgcgtattttttttatttttgcggttagagatagtattcgacgttattttcgtaaatgcgtttaatgaattgcggaaggttagagttttgttagttattattttttggaatagggtttcgttttttgttttggcgtaaggtaggtgagaaacggtcgcgtagtttgaaattaacgtcgacgg

SEQ ID NO: 25312 - DNA, 673 bp, Artificial Sequence
  chemically treated genomic DNA (Homo sapiens) CpG-island No: 25312
ccgtcgacgttaatttcaaactacgcgaccgtttctcacctaccttacgccaaaacaaaaaacgaaaccctattccaaaaaataataactaacaaaactctaaccttccgcaattcattaaacgcatttacgaaaataacgtcgaatactatctctaaccgcaaaaataaaaaaaatacgcatttaacgtaaaataaaacgtaaaaccttcccgccattaacgacgaataaaacgtttacgcgacgacctaacgtaacgaaaaacgcgttaataaaaaaaaaaattctaaaaaaacgacgacaacgactctaacgacaataacaacaacgccgaatcccgtacgaaaatactcctcgcaaaattatttctcgaacaacgacaattctcactacaacgccaaaacgaatccgattcgtattcgtccgcgaaaatctctctcatctcgctcgactacgaaaaatcgaactaaaacgactaaatccgcgataaaaataacgaatttaaaatcaataaattattaaaaaaaacataacgaaaccgttaacgcctcaataaaaatcgaccaaccgcctccgtaaaaaaaaaacaaaaaatcgaaccaattcaataacaataaaacttaaaatttataaacgaaatcttaaacgaaaacctaaacgtacaaacaacttc

SEQ ID NO: 25313 - DNA, 514 bp, Artificial Sequence
  chemically treated genomic DNA (Homo sapiens) CpG-island No: 25313
gattttttcgatgtttcgttggtttttgtttttattgatttttgcgggtttgttttcgttgcggcgtcggtagttgtttggtagttgcggggggcgtgagggcggtggtttagattaatcggttggtagtttagtttcgtttcgttcgtttttgtttcggattttgcgtttgaggaagtatcgaggtaattttttgttattcgaagttcgtgggtcgtttttagagggcgcgttttggagtcgagcgtttttgggcggttatttggaggttaggtgcgggtcgcgaattcgcgaggagcgcgcggcgggcgcggcggcgacggtaggaggaggggtcgggagttcgggcgtcgtcgaaggacgtttcgttttttatatgttgttatttggttgagtcgggcgtcggcgagaaggcggcgtcgttgttttggtagttggattgtattttgttttcgttcggttttagttgtcgttcgtttagacgttagtaagttttttttttacgatagggttg

SEQ ID NO: 25314 - DNA, 514 bp, Artificial Sequence
  chemically treated genomic DNA (Homo sapiens) CpG-island No: 25314
caaccctatcgtaaaaaaaaaacttactaacgtctaaacgaacgacaactaaaaccgaacgaaaacaaaatacaatccaactaccaaaacaacgacgccgccttctcgccgacgcccgactcaaccaaataacaacatataaaaaacgaaacgtccttcgacgacgcccgaactcccgacccctcctcctaccgtcgccgccgcgcccgccgcgcgctcctcgcgaattcgcgacccgcacctaacctccaaataaccgcccaaaaacgctcgactccaaaacgcgccctctaaaaacgacccacgaacttcgaataacaaaaaattacctcgatacttcctcaaacgcaaaatccgaaacaaaaacgaacgaaacgaaactaaactaccaaccgattaatctaaaccaccgccctcacgccccccgcaactaccaaacaactaccgacgccgcaacgaaaacaaacccgcaaaaatcaataaaaacaaaaaccaacgaaacatcgaaaaaatc

SEQ ID NO: 25315 - DNA, 514 bp, Artificial Sequence
  chemically treated genomic DNA (Homo sapiens) CpG-island No: 25315
tagttttgtcgtgggaggggggtttgttggcgtttgggcgggcggtagttgaggtcgggcgggggtaaagtgtagtttagttgttagggtagcggcgtcgttttttcgtcggcgttcggtttagttaagtggtagtatgtggaggacggggcgtttttcggcggcgttcgggttttcggtttttttttttgtcgtcgtcgtcgcgttcgtcgcgcgtttttcgcgggttcgcggttcgtatttggtttttagatggtcgtttaagggcgttcggttttagggcgcgttttttgggagcgatttacgaatttcgggtggtagagggttgtttcgatatttttttaggcgtagggttcgaggtaggggcgggcggagcggagttgggttgttagtcggttggtttgggttatcgtttttacgtttttcgtaattattaagtagttgtcggcgtcgtagcgggaatagattcgtaaaggttaatgaaagtagaagttagcgaggtatcgagagggtt

SEQ ID NO: 25316 - DNA, 514 bp, Artificial Sequence
  chemically treated genomic DNA (Homo sapiens) CpG-island No: 25316
aaccctctcgatacctcgctaacttctactttcattaacctttacgaatctattcccgctacgacgccgacaactacttaataattacgaaaaacgtaaaaacgataacccaaaccaaccgactaacaacccaactccgctccgcccgcccctacctcgaaccctacgcctaaaaaaatatcgaaacaaccctctaccacccgaaattcgtaaatcgctcccaaaaaacgcgccctaaaaccgaacgcccttaaacgaccatctaaaaaccaaatacgaaccgcgaacccgcgaaaaacgcgcgacgaacgcgacgacgacgacaaaaaaaaaaaccgaaaacccgaacgccgccgaaaaacgccccgtcctccacatactaccacttaactaaaccgaacgccgacgaaaaaacgacgccgctaccctaacaactaaactacactttacccccgcccgacctcaactaccgcccgcccaaacgccaacaaacccccctcccacgacaaaacta

SEQ ID NO: 25317 - DNA, 579 bp, Artificial Sequence
  chemically treated genomic DNA (Homo sapiens) CpG-island No: 25317
atttgcgtacgtttagtgagttcgagttgtgatttacgttcgggatggttaattttaatcgtcgtcgcgggcgattcgttgtttttcgtcgagttaggtttgtttgggataggggtcgttattatcgggagcgttcggtcgcgttatttggattatatagttcgattgtagtagatacgcgtttaggtttttttttaggttcgcgtacgcgtcgttttgcggtttgtttttataatatttaggtatgacggcgtttttttttcgatgcggacgcgatttttttttatcgtaatatttgtaatcgggtcgggagcgagcgaggttttagttttaggggatcggaagttagcggtaataattttcggcgggtcgcggcggtagggtcgaggattacgggggtcgagaggtggcgcgttcgcggcggaagtcggttttcgtgacgcggcggttttaagggtcggtttcgttgagggaagggaagttcgttcggtggcggttggggtcggttgttgggaggaggtggtgggttggttcggacgtgggtcgaggttgtagtaggattttaggtgaggtttgagg

SEQ ID NO: 25318 - DNA, 579 bp, Artificial Sequence
  chemically treated genomic DNA (Homo sapiens) CpG-island No: 25318
cctcaaacctcacctaaaatcctactacaacctcgacccacgtccgaaccaacccaccacctcctcccaacaaccgaccccaaccgccaccgaacgaacttcccttccctcaacgaaaccgacccttaaaaccgccgcgtcacgaaaaccgacttccgccgcgaacgcgccacctctcgacccccgtaatcctcgaccctaccgccgcgacccgccgaaaattattaccgctaacttccgatcccctaaaactaaaacctcgctcgctcccgacccgattacaaatattacgataaaaaaaaatcgcgtccgcatcgaaaaaaaaacgccgtcatacctaaatattataaaaacaaaccgcaaaacgacgcgtacgcgaacctaaaaaaaaacctaaacgcgtatctactacaatcgaactatataatccaaataacgcgaccgaacgctcccgataataacgacccctatcccaaacaaacctaactcgacgaaaaacaacgaatcgcccgcgacgacgattaaaattaaccatcccgaacgtaaatcacaactcgaactcactaaacgtacgcaaat

SEQ ID NO: 25319 - DNA, 579 bp, Artificial Sequence
  chemically treated genomic DNA (Homo sapiens) CpG-island No: 25319
ttttaggttttatttggagttttgttatagtttcgatttacgttcgaattagtttattatttttttttagtagtcgattttagtcgttatcgggcgggtttttttttttttaacggagtcggtttttggggtcgtcgcgttacgggaatcgattttcgtcgcggacgcgttatttttcggttttcgtagttttcggttttatcgtcgcggttcgtcggaagttgttgtcgttggttttcggttttttgagattggggtttcgttcgttttcgattcggttgtaagtgttgcggtgggagaaagtcgcgttcgtatcggaggggaagcgtcgttatgtttaagtattatgaggataagtcgtagggcggcgcgtgcgcgggtttgaaggaggatttgggcgcgtgtttgttgtagtcggattgtgtggtttaggtagcgcggtcgggcgttttcggtggtgacgatttttgttttaggtaggtttggttcggcggagggtagcgggtcgttcgcggcggcggttggagttaattatttcgggcgtaggttatagttcgggtttattgaacgtgcgtagat

SEQ ID NO: 25320 - DNA, 579 bp, Artificial Sequence
  chemically treated genomic DNA (Homo sapiens) CpG-island No: 25320
atctacgcacgttcaataaacccgaactataacctacgcccgaaataattaactccaaccgccgccgcgaacgacccgctaccctccgccgaaccaaacctacctaaaacaaaaatcgtcaccaccgaaaacgcccgaccgcgctacctaaaccacacaatccgactacaacaaacacgcgcccaaatcctccttcaaacccgcgcacgcgccgccctacgacttatcctcataatacttaaacataacgacgcttcccctccgatacgaacgcgactttctcccaccgcaacacttacaaccgaatcgaaaacgaacgaaaccccaatctcaaaaaaccgaaaaccaacgacaacaacttccgacgaaccgcgacgataaaaccgaaaactacgaaaaccgaaaaataacgcgtccgcgacgaaaatcgattcccgtaacgcgacgaccccaaaaaccgactccgttaaaaaaaaaaaaacccgcccgataacgactaaaatcgactactaaaaaaaaataataaactaattcgaacgtaaatcgaaactataacaaaactccaaataaaacctaaaa

SEQ ID NO: 25321 - DNA, 708 bp, Artificial Sequence
  chemically treated genomic DNA (Homo sapiens) CpG-island No: 25321
gttcgggttggtagtggggcgggggtcgtagggcgcgggtcgggtttttagcgcgtatgcgcgataagggggcggggttagggcggggttgcgttcggcgtttagagcggcggcggttggttagggttgcggcgcgcgtggagggttcgttgttggtttgtcgtcgggtcgggtttcgtgggtcggggtaggaggattagtatttgaggtcgggttcgtagttcgcgattttatagttaggcggcggcgttgttgttgttgcggggttttggcgcgtagttcggcgggatagcggggcggttggcgtcgggggtcggggagcgttaggtaggtgggtcgggtcgggtaggaggcgacgcggtcgtcgcgggggtcggggtcggggacggatagcgggcgcgggggcgcgtttaggttttcgttggggcggatgtggacggcgttcgcggtttttatggaaattgtattgtttaacggtgttagtggtttatttgcggtggcgttttttgagaataattcgagttcggtcgatttttagtttcgtgaagacgcggtcgttttagtagggagtcgggtgtcgagcgggcgcgtggtcgcgggacgtagacgcggtgtttgttcgatgcggttttagggttgggtttacgggtttttgaagttggaggttttgtcgtgtttggggtggaaatataatcgggtgaaagtaaa

SEQ ID NO: 25322 - DNA, 708 bp, Artificial Sequence
  chemically treated genomic DNA (Homo sapiens) CpG-island No: 25322
tttactttcacccgattatatttccaccccaaacacgacaaaacctccaacttcaaaaacccgtaaacccaaccctaaaaccgcatcgaacaaacaccgcgtctacgtcccgcgaccacgcgcccgctcgacacccgactccctactaaaacgaccgcgtcttcacgaaactaaaaatcgaccgaactcgaattattctcaaaaaacgccaccgcaaataaaccactaacaccgttaaacaatacaatttccataaaaaccgcgaacgccgtccacatccgccccaacgaaaacctaaacgcgcccccgcgcccgctatccgtccccgaccccgacccccgcgacgaccgcgtcgcctcctacccgacccgacccacctacctaacgctccccgacccccgacgccaaccgccccgctatcccgccgaactacgcgccaaaaccccgcaacaacaacaacgccgccgcctaactataaaatcgcgaactacgaacccgacctcaaatactaatcctcctaccccgacccacgaaacccgacccgacgacaaaccaacaacgaaccctccacgcgcgccgcaaccctaaccaaccgccgccgctctaaacgccgaacgcaaccccgccctaaccccgcccccttatcgcgcatacgcgctaaaaacccgacccgcgccctacgacccccgccccactaccaacccgaac

SEQ ID NO: 25323 - DNA, 708 bp, Artificial Sequence
  chemically treated genomic DNA (Homo sapiens) CpG-island No: 25323
tttatttttattcggttatgtttttattttaaatacggtaaggtttttagttttaggagttcgtagatttagttttggagtcgtatcgggtaggtatcgcgtttgcgtttcgcggttacgcgttcgttcggtattcggttttttgttggggcggtcgcgtttttacggggttgggggtcggtcgggttcggattgtttttaaaagacgttatcgtaggtggattattggtatcgttaggtagtgtaatttttatgaaaatcgcgggcgtcgtttatattcgttttagcggggatttggacgcgttttcgcgttcgttgttcgttttcggtttcggttttcgcggcggtcgcgtcgttttttgttcggttcggtttatttatttggcgtttttcggttttcggcgttagtcgtttcgttgtttcgtcgggttgcgcgttagagtttcgtagtagtagtagcgtcgtcgtttggttgtgaagtcgcgggttgcgggttcggttttaggtgttggtttttttgtttcggtttacggagttcgattcggcggtaaattagtagcgaattttttacgcgcgtcgtagttttagttagtcgtcgtcgttttagacgtcgggcgtagtttcgttttggtttcgtttttttgtcgcgtatgcgcgttgagggttcggttcgcgttttgcgattttcgttttattattagttcgagt

SEQ ID NO: 25324 - DNA, 708 bp, Artificial Sequence
  chemically treated genomic DNA (Homo sapiens) CpG-island No: 25324
actcgaactaataataaaacgaaaatcgcaaaacgcgaaccgaaccctcaacgcgcatacgcgacaaaaaaacgaaaccaaaacgaaactacgcccgacgtctaaaacgacgacgactaactaaaactacgacgcgcgtaaaaaattcgctactaatttaccgccgaatcgaactccgtaaaccgaaacaaaaaaaccaacacctaaaaccgaacccgcaacccgcgacttcacaaccaaacgacgacgctactactactacgaaactctaacgcgcaacccgacgaaacaacgaaacgactaacgccgaaaaccgaaaaacgccaaataaataaaccgaaccgaacaaaaaacgacgcgaccgccgcgaaaaccgaaaccgaaaacgaacaacgaacgcgaaaacgcgtccaaatccccgctaaaacgaatataaacgacgcccgcgattttcataaaaattacactacctaacgataccaataatccacctacgataacgtcttttaaaaacaatccgaacccgaccgacccccaaccccgtaaaaacgcgaccgccccaacaaaaaaccgaataccgaacgaacgcgtaaccgcgaaacgcaaacgcgatacctacccgatacgactccaaaactaaatctacgaactcctaaaactaaaaaccttaccgtatttaaaataaaaacataaccgaataaaaataaa

SEQ ID NO: 25325 - DNA, 690 bp, Artificial Sequence
  chemically treated genomic DNA (Homo sapiens) CpG-island No: 25325
tttagcgcgatttttggagttattgcgtttgtaagtttagtttttttgcgtcgtacgtgcggggttagttggcgtcgataaatacggggcgggatacggggcgggatacgggtcggttcgggggagggtttgagtcgtatagttcgtttagggtggtgcgtgtaaacgggcgtttggattttcgaatggttgcgtgttttcgtgtgtgggttcgggggaggtttacgaacgttagcgaaatcgttgatattatcgtttaattatgaatttattaggcgtttgaagatcgatacgtcgaatatgcgtcgcgtagcgtcgcgacgagtgagattatcgcgtttcggtcgtgagtgcgtttatacgtagtttgagattcgacgggagggggttacgtggaagtatttgagagaggcgtatttggttattaggaaagtatttttttttttttaaaaatgtttcggaagtgttttcgtttttcgtaaagatggtcggggtagtcggtacgagggaggcggggatgcgttgcgtaataagttcggcggggaagatggcggatgataaggtgagtggtcgtgggggtgatttgtagtcgggcgtggtttttattttttttgatttttttagtttcggggagaagcgattttggagcggtttaggagtgaggatgttttttgttttttttgcggtttt

SEQ ID NO: 25326 - DNA, 690 bp, Artificial Sequence
  chemically treated genomic DNA (Homo sapiens) CpG-island No: 25326
aaaaccgcaaaaaaaacaaaaaacatcctcactcctaaaccgctccaaaatcgcttctccccgaaactaaaaaaatcaaaaaaaataaaaaccacgcccgactacaaatcacccccacgaccactcaccttatcatccgccatcttccccgccgaacttattacgcaacgcatccccgcctccctcgtaccgactaccccgaccatctttacgaaaaacgaaaacacttccgaaacatttttaaaaaaaaaaaaatactttcctaataaccaaatacgcctctctcaaatacttccacgtaaccccctcccgtcgaatctcaaactacgtataaacgcactcacgaccgaaacgcgataatctcactcgtcgcgacgctacgcgacgcatattcgacgtatcgatcttcaaacgcctaataaattcataattaaacgataatatcaacgatttcgctaacgttcgtaaacctcccccgaacccacacacgaaaacacgcaaccattcgaaaatccaaacgcccgtttacacgcaccaccctaaacgaactatacgactcaaaccctcccccgaaccgacccgtatcccgccccgtatcccgccccgtatttatcgacgccaactaaccccgcacgtacgacgcaaaaaaactaaacttacaaacgcaataactccaaaaatcgcgctaaa

SEQ ID NO: 25327 - DNA, 690 bp, Artificial Sequence
  chemically treated genomic DNA (Homo sapiens) CpG-island No: 25327
ggagtcgtagaagaaataagggatatttttatttttgagtcgttttagagtcgttttttttcggaattaaaaaggttaaggagagtgaagattacgttcggttgtagattatttttacggttatttattttgttattcgttatttttttcgtcgaatttgttgcgtagcgtattttcgtttttttcgtgtcgattgtttcggttatttttacggagggcgaaggtattttcggagtatttttggaaagggggaggtgtttttttagtggttaagtacgttttttttagatatttttacgtgattttttttcgtcgagttttaggttgcgtgtgagcgtatttacgatcggggcgcgatgattttattcgtcgcgacgttgcgcggcgtatgttcggcgtgtcggtttttaggcgtttgatgagtttatagttgggcggtggtgttagcggtttcgttggcgttcgtgggtttttttcggatttatatacggaaatacgtaattattcggggatttagacgttcgtttatacgtattattttgggcgggttgtgcggtttaggttttttttcggatcggttcgtgtttcgtttcgtgtttcgtttcgtatttgtcggcgttagttggtttcgtacgtgcggcgtagagaggttgggtttgtaggcgtagtagttttagaggtcgcgttggg

SEQ ID NO: 25328 - DNA, 690 bp, Artificial Sequence
  chemically treated genomic DNA (Homo sapiens) CpG-island No: 25328
cccaacgcgacctctaaaactactacgcctacaaacccaacctctctacgccgcacgtacgaaaccaactaacgccgacaaatacgaaacgaaacacgaaacgaaacacgaaccgatccgaaaaaaaacctaaaccgcacaacccgcccaaaataatacgtataaacgaacgtctaaatccccgaataattacgtatttccgtatataaatccgaaaaaaacccacgaacgccaacgaaaccgctaacaccaccgcccaactataaactcatcaaacgcctaaaaaccgacacgccgaacatacgccgcgcaacgtcgcgacgaataaaatcatcgcgccccgatcgtaaatacgctcacacgcaacctaaaactcgacgaaaaaaaatcacgtaaaaatatctaaaaaaaacgtacttaaccactaaaaaaacacctccccctttccaaaaatactccgaaaataccttcgccctccgtaaaaataaccgaaacaatcgacacgaaaaaaacgaaaatacgctacgcaacaaattcgacgaaaaaaataacgaataacaaaataaataaccgtaaaaataatctacaaccgaacgtaatcttcactctccttaacctttttaattccgaaaaaaaacgactctaaaacgactcaaaaataaaaatatcccttatttcttctacgactcc

SEQ ID NO: 25329 - DNA, 534 bp, Artificial Sequence
  chemically treated genomic DNA (Homo sapiens) CpG-island No: 25329
gttttagttcgtttttatacgaatacgttatcgtttacgttttttgtagttagtaggttacgcgtcggatagaacgttagcgtattagtcggagttttagtacgatgtttttcgagtgttcggattcgagttgggtttttatggagtttgcgtttttttcgtcgtttttattttagcggttttttttttataagtgcggtttatgttgagaaggattgcgagtcgcgtcgtcgtagggtagttagtttcgaattatttatattgcgggaggagtagtttggtatttcgtttcgtttcgggggcggggtcggaagtgttttcgggacgtttttttttttataggagaggtgggtgggtcgttgttggtgcgggtggagcggagcgaagagatcgtatttgggagatcggttatttttttgttttgttgtgatttcgtttgggttaggtagacggtgcgatcgttaattttttttttagttacgttacgtaaagttgagaattgcgtgtaaatttttttttttttattttatttag

SEQ ID NO: 25330 - DNA, 534 bp, Artificial Sequence
  chemically treated genomic DNA (Homo sapiens) CpG-island No: 25330
ctaaataaaataaaaaaaaaaaaatttacacgcaattctcaactttacgtaacgtaactaaaaaaaaaattaacgatcgcaccgtctacctaacccaaacgaaatcacaacaaaacaaaaaaataaccgatctcccaaatacgatctcttcgctccgctccacccgcaccaacaacgacccacccacctctcctataaaaaaaaaaacgtcccgaaaacacttccgaccccgcccccgaaacgaaacgaaataccaaactactcctcccgcaatataaataattcgaaactaactaccctacgacgacgcgactcgcaatccttctcaacataaaccgcacttataaaaaaaaaaccgctaaaataaaaacgacgaaaaaaacgcaaactccataaaaacccaactcgaatccgaacactcgaaaaacatcgtactaaaactccgactaatacgctaacgttctatccgacgcgtaacctactaactacaaaaaacgtaaacgataacgtattcgtataaaaacgaactaaaac

SEQ ID NO: 25331 - DNA, 534 bp, Artificial Sequence
  chemically treated genomic DNA (Homo sapiens) CpG-island No: 25331
ttggatgaagtaggagaggaaagatttatacgtagtttttaattttacgtgacgtgattagggagggaattgacggtcgtatcgtttatttagtttaaacggggttatagtaggataaggaagtagtcgattttttagatgcggttttttcgtttcgttttattcgtattagtagcggtttatttattttttttgtaagaggaagaacgtttcggagatattttcggtttcgttttcgaggcgaagcggagtgttaggttatttttttcgtagtgtgggtggttcgaggttgattattttgcggcggcgcggttcgtagttttttttagtatggatcgtatttgtgaggagaggatcgttgagatgggagcgacgaggaggacgtagattttatggaagtttaattcggattcggatattcggaagatatcgtgttggagtttcggttagtgcgttgacgttttattcggcgcgtgatttattagttgtaggagacgtggacggtgacgtgttcgtgtgagagcgggttagggt

SEQ ID NO: 25332 - DNA, 534 bp, Artificial Sequence
  chemically treated genomic DNA (Homo sapiens) CpG-island No: 25332
accctaacccgctctcacacgaacacgtcaccgtccacgtctcctacaactaataaatcacgcgccgaataaaacgtcaacgcactaaccgaaactccaacacgatatcttccgaatatccgaatccgaattaaacttccataaaatctacgtcctcctcgtcgctcccatctcaacgatcctctcctcacaaatacgatccatactaaaaaaaactacgaaccgcgccgccgcaaaataatcaacctcgaaccacccacactacgaaaaaaataacctaacactccgcttcgcctcgaaaacgaaaccgaaaatatctccgaaacgttcttcctcttacaaaaaaaataaataaaccgctactaatacgaataaaacgaaacgaaaaaaccgcatctaaaaaatcgactacttccttatcctactataaccccgtttaaactaaataaacgatacgaccgtcaattccctccctaatcacgtcacgtaaaattaaaaactacgtataaatctttcctctcctacttcatccaa

SEQ ID NO: 25333 - DNA, 682 bp, Artificial Sequence
  chemically treated genomic DNA (Homo sapiens) CpG-island No: 25333
cgtgttgtcggggttcgtcgggtcgaggaggagtcgacgcggttcggggaattttagtttttatacggttaacgtttttttaaggagagtggaggagggagggttttcgtttacgagaacgaagagaattttagggtcgaagtttcgttttagtcggttcggttttttttcgttagttcgttatttaattcgggtcgtattaggggtcgtatttgttcgcgcgtatacgtttttcgcgcgttaggtttcgtcgtcgtcgtcgttttcggtacgcgttcgttgcggttgttttttatcgttttgtttcggcgcgggttatagcgtacgagtcgtcgtcgtcgtcgtcgcgttttttttcgtcgcggacgtcgttttcgcgtaatcgtcgaggaagtcgaggcgagttcgggtcgggcgcgagggcgcgcgggtcgttgttgttatcgcgggtgttttttgcgttttcgttttagttaggattttttttgtcgttttttttttttttttcgattttagtttttattatttttttttcgttttttaaaagtattttcgagtttttatttttttacgtcgtattcgcgggaacgaggttttgggaatttaggggagtggttgtgggggcgcgtcgcggtttttagttcggttagttttttttttaagatatggtttgatttttatt

SEQ ID NO: 25334 - DNA, 682 bp, Artificial Sequence
  chemically treated genomic DNA (Homo sapiens) CpG-island No: 25334
aataaaaatcaaaccatatcttaaaaaaaaaactaaccgaactaaaaaccgcgacgcgcccccacaaccactcccctaaattcccaaaacctcgttcccgcgaatacgacgtaaaaaaataaaaactcgaaaatacttttaaaaaacgaaaaaaaaataataaaaactaaaatcgaaaaaaaaaaaaaaaacgacaaaaaaaatcctaactaaaacgaaaacgcaaaaaacacccgcgataacaacaacgacccgcgcgccctcgcgcccgacccgaactcgcctcgacttcctcgacgattacgcgaaaacgacgtccgcgacgaaaaaaaacgcgacgacgacgacgacgactcgtacgctataacccgcgccgaaacaaaacgataaaaaacaaccgcaacgaacgcgtaccgaaaacgacgacgacgacgaaacctaacgcgcgaaaaacgtatacgcgcgaacaaatacgacccctaatacgacccgaattaaataacgaactaacgaaaaaaaaccgaaccgactaaaacgaaacttcgaccctaaaattctcttcgttctcgtaaacgaaaaccctccctcctccactctccttaaaaaaacgttaaccgtataaaaactaaaattccccgaaccgcgtcgactcctcctcgacccgacgaaccccgacaacacg

SEQ ID NO: 25335 - DNA, 682 bp, Artificial Sequence
  chemically treated genomic DNA (Homo sapiens) CpG-island No: 25335
aatggggattagattatgttttgaaagaggggttggtcgagttgggagtcgcgacgcgtttttatagttatttttttgaatttttaaggtttcgttttcgcgggtgcggcgtgagggggtggggattcgggggtgtttttgaggagcgggaggagggtggtgaggattgaggtcggaggaggaggaggaggcggtagagagagttttagttggagcgggagcgtagggaatattcgcggtggtagtagcggttcgcgcgttttcgcgttcgattcgggttcgtttcggttttttcggcggttacgcgggggcggcgttcgcggcggggaggagcgcggcggcggcggcggcggttcgtgcgttgtggttcgcgtcgaggtagggcggtggggggtagtcgtagcgggcgcgtgtcgagggcggcggcggcggcgaggtttggcgcgcggggggcgtgtgcgcgcgggtaggtgcggtttttggtgcggttcgagttgggtggcgggttggcggggaggggtcgggtcggttgaggcggggtttcggttttgagatttttttcgttttcgtgggcggggatttttttttttttattttttttggaagagcgttaatcgtgtgaggattggagtttttcgggtcgcgtcggttttttttcggttcggcgggtttcggtaatacg

SEQ ID NO: 25336 - DNA, 682 bp, Artificial Sequence
  chemically treated genomic DNA (Homo sapiens) CpG-island No: 25336
cgtattaccgaaacccgccgaaccgaaaaaaaaccgacgcgacccgaaaaactccaatcctcacacgattaacgctcttccaaaaaaaataaaaaaaaaaaaatccccgcccacgaaaacgaaaaaaatctcaaaaccgaaaccccgcctcaaccgacccgacccctccccgccaacccgccacccaactcgaaccgcaccaaaaaccgcacctacccgcgcgcacacgccccccgcgcgccaaacctcgccgccgccgccgccctcgacacgcgcccgctacgactaccccccaccgccctacctcgacgcgaaccacaacgcacgaaccgccgccgccgccgccgcgctcctccccgccgcgaacgccgcccccgcgtaaccgccgaaaaaaccgaaacgaacccgaatcgaacgcgaaaacgcgcgaaccgctactaccaccgcgaatattccctacgctcccgctccaactaaaactctctctaccgcctcctcctcctcctccgacctcaatcctcaccaccctcctcccgctcctcaaaaacacccccgaatccccaccccctcacgccgcacccgcgaaaacgaaaccttaaaaattcaaaaaaataactataaaaacgcgtcgcgactcccaactcgaccaacccctctttcaaaacataatctaatccccatt

SEQ ID NO: 25337 - DNA, 700 bp, Artificial Sequence
  chemically treated genomic DNA (Homo sapiens) CpG-island No: 25337
atagcgttcggttcgagtgtcgcgggaagcggaataggtagtttggtagaggttggtgggtagaagggcggggcgggacgtcgagttaggtggttatttggagcgtttcgtttttttagcgtcgggtcgcgttttcgttttcgtttttacgcgttatcgtttatttcgttttcgtttttagtttcgcgcggtcgttttatttgtataaggaggcgtttttcgggttcgttcggggcgtacgtgatttcgggggaggcggagggaatttgttgatttgatacgagtcgttgtgcggttttttttggcgcggaatagcgagagtagtcgtgattttcgatttcgttcgtcggtagttaataagagcgtaggtcgtttttaaatttaaaatttttacgtcggtaaaagttaagatggaagggagcggagcggagcgcgaggggggagtcggttcgggaatgtttggcggtcggcgttggaggggtaggttggggagtttgcggcgggcgtacgaggggttattcgcgaaggtgtttcggtttagcgcgattatcgtttttaatttcgggagtttttgggcgtttcgtatttcgttagtcgttcgtgtatttcggttcgggggacgtaatttattgttttttcggttttgttttttaggggtggcgggggatggaacgggtggcgaggggttttggggggaaga

SEQ ID NO: 25338 - DNA, 700 bp, Artificial Sequence
  chemically treated genomic DNA (Homo sapiens) CpG-island No: 25338
tcttccccccaaaacccctcgccacccgttccatcccccgccacccctaaaaaacaaaaccgaaaaaacaataaattacgtcccccgaaccgaaatacacgaacgactaacgaaatacgaaacgcccaaaaactcccgaaattaaaaacgataatcgcgctaaaccgaaacaccttcgcgaataacccctcgtacgcccgccgcaaactccccaacctacccctccaacgccgaccgccaaacattcccgaaccgactcccccctcgcgctccgctccgctcccttccatcttaacttttaccgacgtaaaaattttaaatttaaaaacgacctacgctcttattaactaccgacgaacgaaatcgaaaatcacgactactctcgctattccgcgccaaaaaaaaccgcacaacgactcgtatcaaatcaacaaattccctccgcctcccccgaaatcacgtacgccccgaacgaacccgaaaaacgcctccttatacaaataaaacgaccgcgcgaaactaaaaacgaaaacgaaataaacgataacgcgtaaaaacgaaaacgaaaacgcgacccgacgctaaaaaaacgaaacgctccaaataaccacctaactcgacgtcccgccccgcccttctacccaccaacctctaccaaactacctattccgcttcccgcgacactcgaaccgaacgctat

SEQ ID NO: 25339 - DNA, 700 bp, Artificial Sequence
  chemically treated genomic DNA (Homo sapiens) CpG-island No: 25339
ttttttttttaaaatttttcgttattcgttttatttttcgttatttttaagagataaggtcggaggggtagtgggttgcgtttttcgggtcggggtgtacgggcggttggcggagtgcggggcgtttagaggttttcggggttgggggcggtggtcgcgttgggtcgggatattttcgcgagtggtttttcgtgcgttcgtcgtaggttttttagtttgtttttttagcgtcggtcgttaggtattttcgggtcggtttttttttcgcgtttcgtttcgtttttttttattttgatttttgtcgacgtggaaattttgggtttggagacgatttgcgtttttattggttgtcggcgggcggggtcggaggttacggttgttttcgttatttcgcgttaaggggagtcgtatagcggttcgtgttaagttagtaggtttttttcgtttttttcggggttacgtgcgtttcgggcgggttcgggagacgtttttttatgtaaatagagcggtcgcgcggggttgggggcgggggcggggtgggcggtggcgcgtgggggcgggggcgggggcgcggttcggcgttgggagggcggggcgttttaggtggttatttggttcgacgtttcgtttcgtttttttgtttattagtttttgttaggttgtttgtttcgtttttcgcgatattcgggtcgggcgttgt

SEQ ID NO: 25340 - DNA, 700 bp, Artificial Sequence
  chemically treated genomic DNA (Homo sapiens) CpG-island No: 25340
acaacgcccgacccgaatatcgcgaaaaacgaaacaaacaacctaacaaaaactaataaacaaaaaaacgaaacgaaacgtcgaaccaaataaccacctaaaacgccccgccctcccaacgccgaaccgcgcccccgcccccgcccccacgcgccaccgcccaccccgcccccgcccccaaccccgcgcgaccgctctatttacataaaaaaacgtctcccgaacccgcccgaaacgcacgtaaccccgaaaaaaacgaaaaaaacctactaacttaacacgaaccgctatacgactccccttaacgcgaaataacgaaaacaaccgtaacctccgaccccgcccgccgacaaccaataaaaacgcaaatcgtctccaaacccaaaatttccacgtcgacaaaaatcaaaataaaaaaaaacgaaacgaaacgcgaaaaaaaaaccgacccgaaaatacctaacgaccgacgctaaaaaaacaaactaaaaaacctacgacgaacgcacgaaaaaccactcgcgaaaatatcccgacccaacgcgaccaccgcccccaaccccgaaaacctctaaacgccccgcactccgccaaccgcccgtacaccccgacccgaaaaacgcaacccactacccctccgaccttatctcttaaaaataacgaaaaataaaacgaataacgaaaaattttaaaaaaaaaa

SEQ ID NO: 25341 - DNA, 706 bp, Artificial Sequence
  chemically treated genomic DNA (Homo sapiens) CpG-island No: 25341
tatttagcgtcgtcgtttatcgtacgggagttaggggtagggggcggagcggggagagtcgagtgttggtttagtcgagagaagtagttggcgggaggggaatttttcgcggttgacgtaggttcgacgtagtaatttttattcggaggcgtgggcggggcgatttcgcggtcgtcggcgcgcgatcgtttttagcgtttcgtttttgtttgttttcgcgtacgtttttcgtcggtttttacgtatacgttttcggtttgttgcggcggttggtttgggagggggtcgagggagcgggagtttggggtgggtttcgggagcgtagggaacggcgggagtcgggaggtgacggttagtagcgtgagaaggtcgttggtttttgagaaattttttttttttaggttgttttttcgagtgtggtttaaagtttaggagcgggcgggagggtgcggatgacgtagagagggtcggtcgttggggagtttttgggggcgcgcggggtcgattttttcggtttgggagggcgacggtcggggttttcgagaggtggtttttttttttttcgatttcgtatatgtaaatttttattttcgcgttagcggcgggacgttgcgttttgtagggggaagtggtgttgcggcgggggttttgtttttttttgtaatttttgtatttgtatacggggatttttttttcgattgatttt

SEQ ID NO: 25342 - DNA, 706 bp, Artificial Sequence
  chemically treated genomic DNA (Homo sapiens) CpG-island No: 25342
aaaatcaatcgaaaaaaaaatccccgtatacaaatacaaaaattacaaaaaaaaacaaaacccccgccgcaacaccacttccccctacaaaacgcaacgtcccgccgctaacgcgaaaataaaaatttacatatacgaaatcgaaaaaaaaaaaaaccacctctcgaaaaccccgaccgtcgccctcccaaaccgaaaaaatcgaccccgcgcgcccccaaaaactccccaacgaccgaccctctctacgtcatccgcaccctcccgcccgctcctaaactttaaaccacactcgaaaaaacaacctaaaaaaaaaaaatttctcaaaaaccaacgaccttctcacgctactaaccgtcacctcccgactcccgccgttccctacgctcccgaaacccaccccaaactcccgctccctcgaccccctcccaaaccaaccgccgcaacaaaccgaaaacgtatacgtaaaaaccgacgaaaaacgtacgcgaaaacaaacaaaaacgaaacgctaaaaacgatcgcgcgccgacgaccgcgaaatcgccccgcccacgcctccgaataaaaattactacgtcgaacctacgtcaaccgcgaaaaattcccctcccgccaactacttctctcgactaaaccaacactcgactctccccgctccgccccctacccctaactcccgtacgataaacgacgacgctaaata

SEQ ID NO: 25343 - DNA, 706 bp, Artificial Sequence
  chemically treated genomic DNA (Homo sapiens) CpG-island No: 25343
aaaattagtcggggggggggttttcgtatgtaaatataggaattatagaagaagataggattttcgtcgtagtattatttttttttatagggcgtaacgtttcgtcgttggcgcgggggtggagatttgtatgtgcgaagtcgggaagagggggaattatttttcgaaaatttcggtcgtcgtttttttaggtcgggagagtcggtttcgcgcgtttttaaaagttttttagcggtcggttttttttacgttattcgtattttttcgttcgtttttgaattttaaattatattcggaagaataatttggaggagggggattttttaggagttagcggtttttttacgttgttagtcgttatttttcggttttcgtcgttttttgcgttttcgaagtttattttaagttttcgttttttcgatttttttttaagttagtcgtcgtagtaagtcgggggcgtatgcgtgggggtcggcggggagcgtgcgcggggataggtaggggcggggcgttgggggcggtcgcgcgtcggcggtcgcgaggtcgtttcgtttacgttttcgggtgagggttgttgcgtcgggtttacgttagtcgcgggaaatttttttttcgttagttgtttttttcggttgggttagtattcggtttttttcgtttcgttttttgtttttggttttcgtacggtggacggcgacgttgggtg

SEQ ID NO: 25344 - DNA, 706 bp, Artificial Sequence
  chemically treated genomic DNA (Homo sapiens) CpG-island No: 25344
cacccaacgtcgccgtccaccgtacgaaaaccaaaaacaaaaaacgaaacgaaaaaaaccgaatactaacccaaccgaaaaaaacaactaacgaaaaaaaaatttcccgcgactaacgtaaacccgacgcaacaaccctcacccgaaaacgtaaacgaaacgacctcgcgaccgccgacgcgcgaccgcccccaacgccccgcccctacctatccccgcgcacgctccccgccgacccccacgcatacgcccccgacttactacgacgactaacttaaaaaaaaatcgaaaaaacgaaaacttaaaataaacttcgaaaacgcaaaaaacgacgaaaaccgaaaaataacgactaacaacgtaaaaaaaccgctaactcctaaaaaatccccctcctccaaattattcttccgaatataatttaaaattcaaaaacgaacgaaaaaatacgaataacgtaaaaaaaaccgaccgctaaaaaacttttaaaaacgcgcgaaaccgactctcccgacctaaaaaaacgacgaccgaaattttcgaaaaataattccccctcttcccgacttcgcacatacaaatctccacccccgcgccaacgacgaaacgttacgccctataaaaaaaaataatactacgacgaaaatcctatcttcttctataattcctatatttacatacgaaaaccccccccccgactaatttt

SEQ ID NO: 25345 - DNA, 712 bp, Artificial Sequence
  chemically treated genomic DNA (Homo sapiens) CpG-island No: 25345
attacgtaaattgcgcgagcgtacgggaaaagcgattggtcggttaggagagagaggtgtgttttggcgggttcgtagtttcgattggtcgataggttgacgggaacgtttacggttagcgtgtgttagcgacgtgtaattcggaagggaagaaggggcgtgttaggttgcgtaggcggttagtttattggttggaagagatcggagtcgggtttcgggttcgattagaggagggcggtgttgtagggttggttcgggaggtgacgatcggtttcggagagtttattatggtagttcggattggttatacggttttgagaagggtagtttcgggatgtcgttcgaagtcggcgatagcggtcggggcgtaggcgttcgtgcggaatggtaggtaattaatagcgggggcgttgagacgagagtagttttcgattttggttgtcgagttgggggatcggaaggatttgggggtgaggtagagtcggattcggtgtattttcgtgtttttagaggagaaggtttttttttgcgtttggtatttgagggatttaagagcggcgcgtattattttgggtttaaggttgtgttcgtggttcgtttgtttcgtgagaggcggtgaattatcggcgaagcgattttggaagtaatttggttattggtgtttttgggttttttcggtttttttttttatggtttgttgttattgttgttg

SEQ ID NO: 25346 - DNA, 712 bp, Artificial Sequence
  chemically treated genomic DNA (Homo sapiens) CpG-island No: 25346
caacaacaataacaacaaaccataaaaaaaaaaaccgaaaaaacccaaaaacaccaataaccaaattacttccaaaatcgcttcgccgataattcaccgcctctcacgaaacaaacgaaccacgaacacaaccttaaacccaaaataatacgcgccgctcttaaatccctcaaataccaaacgcaaaaaaaaaccttctcctctaaaaacacgaaaatacaccgaatccgactctacctcacccccaaatccttccgatcccccaactcgacaaccaaaatcgaaaactactctcgtctcaacgcccccgctattaattacctaccattccgcacgaacgcctacgccccgaccgctatcgccgacttcgaacgacatcccgaaactacccttctcaaaaccgtataaccaatccgaactaccataataaactctccgaaaccgatcgtcacctcccgaaccaaccctacaacaccgccctcctctaatcgaacccgaaacccgactccgatctcttccaaccaataaactaaccgcctacgcaacctaacacgccccttcttcccttccgaattacacgtcgctaacacacgctaaccgtaaacgttcccgtcaacctatcgaccaatcgaaactacgaacccgccaaaacacacctctctctcctaaccgaccaatcgcttttcccgtacgctcgcgcaatttacgtaat

SEQ ID NO: 25347 - DNA, 712 bp, Artificial Sequence
  chemically treated genomic DNA (Homo sapiens) CpG-island No: 25347
taatagtagtagtaataagttataggggaggagatcggaagagtttaaaggtattaatggttaaattgtttttaaagtcgtttcgtcgatgatttatcgttttttacgaggtaaacgagttacgaatatagttttgggtttaaggtgatgcgcgtcgtttttgagttttttagatgttaaacgtaaaaaaaagtttttttttttaaagatacggaaatgtatcgagttcggttttgttttatttttaaattttttcggttttttaattcggtagttaaaatcgaaaattattttcgttttagcgttttcgttgttgattatttgttatttcgtacgggcgtttgcgtttcggtcgttgtcgtcgatttcggacggtatttcgagattattttttttaaggtcgtatgattagttcgagttgttatgatagatttttcgaagtcggtcgttatttttcggattagttttgtagtatcgtttttttttggtcgggttcggagttcggtttcggttttttttagttaatggattggtcgtttgcgtagtttgatacgtttttttttttttttcgggttgtacgtcgttgatatacgttgatcgtaaacgttttcgttagtttgtcggttaatcggagttgcgggttcgttaggatatattttttttttttgatcgattaatcgtttttttcgtgcgttcgcgtaatttgcgtaat

SEQ ID NO: 25348 - DNA, 712 bp, Artificial Sequence
  chemically treated genomic DNA (Homo sapiens) CpG-island No: 25348
attacgcaaattacgcgaacgcacgaaaaaaacgattaatcgatcaaaaaaaaaaaatatatcctaacgaacccgcaactccgattaaccgacaaactaacgaaaacgtttacgatcaacgtatatcaacgacgtacaacccgaaaaaaaaaaaaaaacgtatcaaactacgcaaacgaccaatccattaactaaaaaaaaccgaaaccgaactccgaacccgaccaaaaaaaaacgatactacaaaactaatccgaaaaataacgaccgacttcgaaaaatctatcataacaactcgaactaatcatacgaccttaaaaaaaataatctcgaaataccgtccgaaatcgacgacaacgaccgaaacgcaaacgcccgtacgaaataacaaataatcaacaacgaaaacgctaaaacgaaaataattttcgattttaactaccgaattaaaaaaccgaaaaaatttaaaaataaaacaaaaccgaactcgatacatttccgtatctttaaaaaaaaaaacttttttttacgtttaacatctaaaaaactcaaaaacgacgcgcatcaccttaaacccaaaactatattcgtaactcgtttacctcgtaaaaaacgataaatcatcgacgaaacgactttaaaaacaatttaaccattaatacctttaaactcttccgatctcctcccctataacttattactactactatta

SEQ ID NO: 25349 - DNA, 904 bp, Artificial Sequence
  chemically treated genomic DNA (Homo sapiens) CpG-island No: 25349
cgcgattcgtttagggttcggggtcggttcggtcgggcgtcgcgtgtaggtgcggaaggtaggcggcggttcggtgcgggcgcgggggtagcgtcgggggtcgggttgcgcggttcggttgcgggcggtaggaggtagcgtcggtttaggcggcgggcggcgagcgagttagcgcgcggtgatgttagtggcggttcggttggtagtagtcggtattttttgtggaaaggcgggcgggttcggttgtaaattttattagttagtgttagtttttcggcgggaggaggcggcggcggaggaggagtagggggagggttgttaaattcgggagttagattttttttttttttttggtaatttttttcgttttttcggttttcggcgtgatatttgcgggtcggggatttgtatgtgtgtgcgcgcgaaggagcggaagaatggtagtgtttaaatttatcgattaggtagcgggcggcggttcggcgggcgggatcgggtcggggcggcgcggagttcggcggggggatgggggcgcggttggagcgcgtcgagattgtttattcgcggcgaaggggaggattgtgtgcggtcgtcggtgttttcgagagttcgcggcggtagttttttttcgtcgcgtcgttttcgttttgggtcgtcggaattgcgcgttcgagtttggggtagggattcgtgggcgttgggtagtcggcgtgcgggagtggggcggtcgcgggttcggcggggttggggagggggtcgggggttcgaggtgttttcgggattcgtatcgcgtcgcgttgcgtgggcgtcgtcggttcgggtttcggggaggaggacgttgtacgaagagggagaaaggatcgtagattgggatttttttttaaatttagtaggagttttgttt

SEQ ID NO: 25350 - DNA, 904 bp, Artificial Sequence
  chemically treated genomic DNA (Homo sapiens) CpG-island No: 25350
aaacaaaactcctactaaatttaaaaaaaaatcccaatctacgatcctttctccctcttcgtacaacgtcctcctccccgaaacccgaaccgacgacgcccacgcaacgcgacgcgatacgaatcccgaaaacacctcgaacccccgaccccctccccaaccccgccgaacccgcgaccgccccactcccgcacgccgactacccaacgcccacgaatccctaccccaaactcgaacgcgcaattccgacgacccaaaacgaaaacgacgcgacgaaaaaaaactaccgccgcgaactctcgaaaacaccgacgaccgcacacaatcctccccttcgccgcgaataaacaatctcgacgcgctccaaccgcgcccccatccccccgccgaactccgcgccgccccgacccgatcccgcccgccgaaccgccgcccgctacctaatcgataaatttaaacactaccattcttccgctccttcgcgcgcacacacatacaaatccccgacccgcaaatatcacgccgaaaaccgaaaaaacgaaaaaaattaccaaaaaaaaaaaaaaaatctaactcccgaatttaacaaccctccccctactcctcctccgccgccgcctcctcccgccgaaaaactaacactaactaataaaatttacaaccgaacccgcccgcctttccacaaaaaataccgactactaccaaccgaaccgccactaacatcaccgcgcgctaactcgctcgccgcccgccgcctaaaccgacgctacctcctaccgcccgcaaccgaaccgcgcaacccgacccccgacgctacccccgcgcccgcaccgaaccgccgcctaccttccgcacctacacgcgacgcccgaccgaaccgaccccgaaccctaaacgaatcgcg

SEQ ID NO: 25351 - DNA, 904 bp, Artificial Sequence
  chemically treated genomic DNA (Homo sapiens) CpG-island No: 25351
gggtaggatttttgttaggtttggggaggggttttagtttgcgatttttttttttttttcgtgtagcgttttttttttcggggttcgggtcggcggcgtttacgtaacgcggcgcggtgcgagtttcgagagtatttcgagttttcggttttttttttagtttcgtcgggttcgcggtcgttttattttcgtacgtcggttgtttagcgtttacgggtttttgttttagattcgggcgcgtagtttcgacggtttagggcggggacggcgcggcggaggggagttgtcgtcgcgggttttcggaggtatcggcggtcgtatatagttttttttttcgtcgcgagtaaatagtttcgacgcgttttagtcgcgtttttattttttcgtcgggtttcgcgtcgtttcggttcggtttcgttcgtcgggtcgtcgttcgttatttggtcggtgagtttgagtattgttattttttcgttttttcgcgcgtatatatatgtaggttttcggttcgtagatgttacgtcgggagtcggggaagcggaagggattgttaggagaagggaaaaaatttggttttcgaatttgatagttttttttttgtttttttttcgtcgtcgttttttttcgtcgagaggttgatattggttagtggggtttgtagtcgagttcgttcgtttttttataggaagtatcggttgttgttagtcgggtcgttattgatattatcgcgcgttggttcgttcgtcgttcgtcgtttgggtcgacgttgttttttgtcgttcgtagtcgagtcgcgtagttcggttttcggcgttgttttcgcgttcgtatcgggtcgtcgtttgtttttcgtatttgtacgcggcgttcggtcgggtcggtttcgggttttgggcggatcgcg

SEQ ID NO: 25352 - DNA, 904 bp, Artificial Sequence
  chemically treated genomic DNA (Homo sapiens) CpG-island No: 25352
cgcgatccgcccaaaacccgaaaccgacccgaccgaacgccgcgtacaaatacgaaaaacaaacgacgacccgatacgaacgcgaaaacaacgccgaaaaccgaactacgcgactcgactacgaacgacaaaaaacaacgtcgacccaaacgacgaacgacgaacgaaccaacgcgcgataatatcaataacgacccgactaacaacaaccgatacttcctataaaaaaacgaacgaactcgactacaaaccccactaaccaatatcaacctctcgacgaaaaaaaacgacgacgaaaaaaaaacaaaaaaaaaactatcaaattcgaaaaccaaattttttcccttctcctaacaatcccttccgcttccccgactcccgacgtaacatctacgaaccgaaaacctacatatatatacgcgcgaaaaaacgaaaaaataacaatactcaaactcaccgaccaaataacgaacgacgacccgacgaacgaaaccgaaccgaaacgacgcgaaacccgacgaaaaaataaaaacgcgactaaaacgcgtcgaaactatttactcgcgacgaaaaaaaaaactatatacgaccgccgatacctccgaaaacccgcgacgacaactcccctccgccgcgccgtccccgccctaaaccgtcgaaactacgcgcccgaatctaaaacaaaaacccgtaaacgctaaacaaccgacgtacgaaaataaaacgaccgcgaacccgacgaaactaaaaaaaaaaccgaaaactcgaaatactctcgaaactcgcaccgcgccgcgttacgtaaacgccgccgacccgaaccccgaaaaaaaaaacgctacacgaaaaaaaaaaaaaaatcgcaaactaaaacccctccccaaacctaacaaaaatcctaccc

SEQ ID NO: 25353 - DNA, 618 bp, Artificial Sequence
  chemically treated genomic DNA (Homo sapiens) CpG-island No: 25353
agaacgggggtaggcgtggcgtttttgggattgtcggaaaacgacgtgagggaaaaatttagaggttacgaaaaggcgaatagacggagggtttgttttaggggagttaagtagttcgtttgaagttttttatttggaaatgacgtgtttaattcggcgtttttgtagtttcggtcgtttttttttgtttaatttcgcgtttttttagtttcggtcgtttttttcgtcgtttttttttcgcggtcgtttatttttgagatttttggttttattgagacgtttagttttattcggtaattcgcggatattaagcgttataaatttaaatacgagatttagagacgttgggttttaaacgttttttagagtgaaagatagaggaattaatcgaggttcggttgattttagacgtttaaggcgataggcgttgttaagaaaagggggtgggacgatatttagttgttaagacgacggttttcgggtgggcggtttgaggtggttttcggtcgttaggcgagatttcgcgggaaaattttttgttagagagattaggagatttggggttgcggtcgtttttttcggagtatttacgggattgtgtgttggggtttttttatt

SEQ ID NO: 25354 - DNA, 618 bp, Artificial Sequence
  chemically treated genomic DNA (Homo sapiens) CpG-island No: 25354
aataaaaaaaccccaacacacaatcccgtaaatactccgaaaaaaacgaccgcaaccccaaatctcctaatctctctaacaaaaaattttcccgcgaaatctcgcctaacgaccgaaaaccacctcaaaccgcccacccgaaaaccgtcgtcttaacaactaaatatcgtcccacccccttttcttaacaacgcctatcgccttaaacgtctaaaatcaaccgaacctcgattaattcctctatctttcactctaaaaaacgtttaaaacccaacgtctctaaatctcgtatttaaatttataacgcttaatatccgcgaattaccgaataaaactaaacgtctcaataaaaccaaaaatctcaaaaataaacgaccgcgaaaaaaaaacgacgaaaaaaacgaccgaaactaaaaaaacgcgaaattaaacaaaaaaaaacgaccgaaactacaaaaacgccgaattaaacacgtcatttccaaataaaaaacttcaaacgaactacttaactcccctaaaacaaaccctccgtctattcgccttttcgtaacctctaaatttttccctcacgtcgttttccgacaatcccaaaaacgccacgcctacccccgttct

SEQ ID NO: 25355 - DNA, 618 bp, Artificial Sequence
  chemically treated genomic DNA (Homo sapiens) CpG-island No: 25355
ggtggagggattttagtatatagtttcgtgggtgtttcggaggaaacggtcgtagttttaaattttttagtttttttagtagggagttttttcgcggagtttcgtttggcggtcggaagttattttaagtcgtttattcggaagtcgtcgttttggtaattgggtatcgttttattttttttttttagtaacgtttatcgttttagacgtttgaggttagtcgagtttcgattggtttttttgttttttattttgggagacgtttgagatttagcgtttttagatttcgtatttgaatttgtggcgtttggtgttcgcgagttgtcgaatgaagttgagcgttttagtggaattagggattttaggggtgagcgatcgcgaggggagagcgacgaaaagggcggtcggagttggaggggcgcggagttaaataaaaaagggcggtcggagttgtaggggcgtcgagttaaatacgttatttttagatggggggttttaggcgagttgtttagtttttttgaggtaggtttttcgtttgttcgttttttcgtagtttttgagttttttttttacgtcgtttttcggtagttttagagacgttacgtttgttttcgtttt

SEQ ID NO: 25356 - DNA, 618 bp, Artificial Sequence
  chemically treated genomic DNA (Homo sapiens) CpG-island No: 25356
aaaacgaaaacaaacgtaacgtctctaaaactaccgaaaaacgacgtaaaaaaaaaactcaaaaactacgaaaaaacgaacaaacgaaaaacctacctcaaaaaaactaaacaactcgcctaaaaccccccatctaaaaataacgtatttaactcgacgcccctacaactccgaccgcccttttttatttaactccgcgcccctccaactccgaccgcccttttcgtcgctctcccctcgcgatcgctcacccctaaaatccctaattccactaaaacgctcaacttcattcgacaactcgcgaacaccaaacgccacaaattcaaatacgaaatctaaaaacgctaaatctcaaacgtctcccaaaataaaaaacaaaaaaaccaatcgaaactcgactaacctcaaacgtctaaaacgataaacgttactaaaaaaaaaaaataaaacgatacccaattaccaaaacgacgacttccgaataaacgacttaaaataacttccgaccgccaaacgaaactccgcgaaaaaactccctactaaaaaaactaaaaaatttaaaactacgaccgtttcctccgaaacacccacgaaactatatactaaaatccctccacc

SEQ ID NO: 25357 - DNA, 1000 bp, Artificial Sequence
  chemically treated genomic DNA (Homo sapiens) CpG-island No: 25357
  unsure (33, 200, 226, 445, 458, 463, 523, 528, 550, 939)
gcgggcgcgggttgcgtggggttttagttattncgtggagttttagttattcgtggataaagcgtcgcgcgttagtatagcggttcgggcggagttttttttttttttttttttttttttatattcgtacgttcgtttttttttcgcgttttgtttttttttcgatttttgggttcggttttttcgggggagggtggggncgttcgggttttcgggtttcgcgtgncgtgtgttcgagtagttttgggcggtgggcgaaggcgcggtttggggattcgggaggggtcggggcgcgggggttgtaggaagtggaggcggtcgtcgttcggggatcggtttggcggggtgagagatattcggaaacggatttcgtttcggggttcgcgcgagttgggtgtttcggagggcgcgagaggagcgggcgggtgttgttgagtaatttttngcggcggcggttnggatngtttattttttacgtcgcgtcgtagtcgggtcgcggttttttttttcgcggttttttttnttttntttttttttcgttttttttttnttttttttttttttttttcggtttcgtttggtttcgggtaggtagagtcgggtttcgggcgcgcgcggggtcgtagtagttgttttcgatttcgtttcggtttagcgtagggtttcgtacgtttatggtcggttcggagtagtagcggtcgcggcggcgggacgacggagattcggacgcggtagcggcggcggcggcgtttttgtaggacgcggagttggttttggtcggtattaatatgttgtttaataacggttttagggagtcggattagttttttaaataatataggtgatttacgcgttttcgattttttaattttgtagcgcgtatttcgtgttcggtttacgcgtttcgatttgcggttttcgggagtttttttttttttnttgtcggttatcgatttcggtttttaggttttttttttggtaagattagttagagggaatg

SEQ ID NO: 25358 - DNA, 1000 bp, Artificial Sequence
  chemically treated genomic DNA (Homo sapiens) CpG-island No: 25358
  unsure (62, 451, 473, 478, 538, 543, 556, 775, 801, 968)
cattccctctaactaatcttaccaaaaaaaaaacctaaaaaccgaaatcgataaccgacaanaaaaaaaaaaaaactcccgaaaaccgcaaatcgaaacgcgtaaaccgaacacgaaatacgcgctacaaaattaaaaaatcgaaaacgcgtaaatcacctatattatttaaaaaactaatccgactccctaaaaccgttattaaacaacatattaataccgaccaaaaccaactccgcgtcctacaaaaacgccgccgccgccgctaccgcgtccgaatctccgtcgtcccgccgccgcgaccgctactactccgaaccgaccataaacgtacgaaaccctacgctaaaccgaaacgaaatcgaaaacaactactacgaccccgcgcgcgcccgaaacccgactctacctacccgaaaccaaacgaaaccgaaaaaaaaaaaaaaaaaanaaaaaaaaaacgaaaaaaaaanaaaanaaaaaaaaccgcgaaaaaaaaaaccgcgacccgactacgacgcgacgtaaaaaataaacnatccnaaccgccgccgcnaaaaattactcaacaacacccgcccgctcctctcgcgccctccgaaacacccaactcgcgcgaaccccgaaacgaaatccgtttccgaatatctctcaccccgccaaaccgatccccgaacgacgaccgcctccacttcctacaacccccgcgccccgacccctcccgaatccccaaaccgcgccttcgcccaccgcccaaaactactcgaacacacgncacgcgaaacccgaaaacccgaacgnccccaccctcccccgaaaaaaccgaacccaaaaatcgaaaaaaaaacaaaacgcgaaaaaaaaacgaacgtacgaatataaaaaaaaaaaaaaaaaaaaaaaaaactccgcccgaaccgctatactaacgcgcgacgctttatccacgaataactaaaactccacgnaataactaaaaccccacgcaacccgcgcccgc

SEQ ID NO: 25359 - DNA, 1000 bp, Artificial Sequence
  chemically treated genomic DNA (Homo sapiens) CpG-island No: 25359
  unsure (62, 451, 473, 478, 538, 543, 556, 775, 801, 968)
tattttttttggttgattttgttagggaggagatttgaggatcggaatcggtgatcgatagngagggggagggggttttcgggggtcgtaggtcgaggcgcgtgagtcggatacgaggtgcgcgttgtagggttggggaatcggggacgcgtgggttatttgtattgtttgaaaagttggttcgattttttgaagtcgttgttgagtagtatgttgatgtcggttagggttagtttcgcgttttgtaggggcgtcgtcgtcgtcgttgtcgcgttcgagttttcgtcgtttcgtcgtcgcggtcgttgttgtttcgagtcggttatgggcgtgcgaggttttgcgttgggtcgaggcgagatcgggagtagttgttgcggtttcgcgcgcgttcggagttcggttttatttgttcggagttaagcggagtcgggaggggaggggagggganggggagaagacgggagggaagnaggangggaaggatcgcggagggaggagtcgcggttcggttgcggcgcggcgtgggaggtgggtngtttnggtcgtcgtcgtnggggattatttagtagtattcgttcgtttttttcgcgtttttcgaagtatttaattcgcgcgggtttcgaagcggaattcgttttcgggtgttttttatttcgttaagtcggttttcgagcggcggtcgtttttattttttgtagttttcgcgtttcggtttttttcgggtttttaagtcgcgttttcgtttatcgtttaggattgttcggatatacgntacgcgagattcggagattcgagcgnttttattttttttcgaaggggtcggatttaggagtcgggaggagggtaaggcgcggagggagaacgagcgtgcggatgtggaaggaaagggaaagggaaggggaatttcgttcgggtcgttatgttagcgcgcggcgttttgtttacgagtaattgaaattttacgnagtaattgaaattttacgtagttcgcgttcgt

SEQ ID NO: 25360 - DNA, 1000 bp, Artificial Sequence
  chemically treated genomic DNA (Homo sapiens) CpG-island No: 25360
  unsure (33, 200, 226, 445, 458, 463, 523, 528, 550, 939)
acgaacgcgaactacgtaaaatttcaattactncgtaaaatttcaattactcgtaaacaaaacgccgcgcgctaacataacgacccgaacgaaattccccttccctttccctttccttccacatccgcacgctcgttctccctccgcgccttaccctcctcccgactcctaaatccgaccccttcgaaaaaaaataaaancgctcgaatctccgaatctcgcgtancgtatatccgaacaatcctaaacgataaacgaaaacgcgacttaaaaacccgaaaaaaaccgaaacgcgaaaactacaaaaaataaaaacgaccgccgctcgaaaaccgacttaacgaaataaaaaacacccgaaaacgaattccgcttcgaaacccgcgcgaattaaatacttcgaaaaacgcgaaaaaaacgaacgaatactactaaataatccccnacgacgacgaccnaaacnacccacctcccacgccgcgccgcaaccgaaccgcgactcctccctccgcgatccttcccntcctncttccctcccgtcttctccccntcccctcccctcccctcccgactccgcttaactccgaacaaataaaaccgaactccgaacgcgcgcgaaaccgcaacaactactcccgatctcgcctcgacccaacgcaaaacctcgcacgcccataaccgactcgaaacaacaacgaccgcgacgacgaaacgacgaaaactcgaacgcgacaacgacgacgacgacgcccctacaaaacgcgaaactaaccctaaccgacatcaacatactactcaacaacgacttcaaaaaatcgaaccaacttttcaaacaatacaaataacccacgcgtccccgattccccaaccctacaacgcgcacctcgtatccgactcacgcgcctcgacctacgacccccgaaaaccccctccccctcnctatcgatcaccgattccgatcctcaaatctcctccctaacaaaatcaaccaaaaaaaata

SEQ ID NO: 25361 - DNA, 511 bp, Artificial Sequence
  chemically treated genomic DNA (Homo sapiens) CpG-island No: 25361
  unsure (427)
ttagggttcgggtttggggcggcgttggtcggggcgggcgggcggcgggtaagacgttatttgcgcgcgtgtcgggtattttagtcgtcgtcgcgtcgtcgcgattaggcgcgttatgggtttgatgtcggtcgcgcgggtttatttcgggtgtagcgtttgttcgcggtcgttttgtcgtttgttcgtatgttgcgcgttcgtcgttttaggtaggggcgggacggggtgcgggcgttttcgggttcgttagagaagttgcgttttcgggttatagaggcgttcgaagttgggataagaatagcgggcgagagcgtcgcgtatgcgtttcgcgggggtcggcggggagtttgggggagtttgggtgttatcgcggatttggtgttgcgggacggtttttagggggcgagggtcgtgcgtgtttaangggaagaaatagggatcggaggcgttttttaattttttgttggttgtgggcgtttcgtaggaagagataaggatttagagtttg

SEQ ID NO: 25362 - DNA, 511 bp, Artificial Sequence
  chemically treated genomic DNA (Homo sapiens) CpG-island No: 25362
  unsure (85)
caaactctaaatccttatctcttcctacgaaacgcccacaaccaacaaaaaattaaaaaacgcctccgatccctatttcttcccnttaaacacgcacgaccctcgccccctaaaaaccgtcccgcaacaccaaatccgcgataacacccaaactcccccaaactccccgccgacccccgcgaaacgcatacgcgacgctctcgcccgctattcttatcccaacttcgaacgcctctataacccgaaaacgcaacttctctaacgaacccgaaaacgcccgcaccccgtcccgcccctacctaaaacgacgaacgcgcaacatacgaacaaacgacaaaacgaccgcgaacaaacgctacacccgaaataaacccgcgcgaccgacatcaaacccataacgcgcctaatcgcgacgacgcgacgacgactaaaatacccgacacgcgcgcaaataacgtcttacccgccgcccgcccgccccgaccaacgccgccccaaacccgaaccctaa

SEQ ID NO: 25363 - DNA, 511 bp, Artificial Sequence
  chemically treated genomic DNA (Homo sapiens) CpG-island No: 25363
  unsure (85)
tagattttaagtttttgtttttttttgcgggacgtttatagttagtaggagattgaaggacgttttcggtttttgtttttttttnttggatacgtacgattttcgttttttgggaatcgtttcgtagtattagattcgcggtgatatttaaatttttttaggtttttcgtcgattttcgcgagacgtatgcgcggcgttttcgttcgttgtttttgttttagtttcgagcgtttttatggttcggagacgtagtttttttggcgggttcgggggcgttcgtatttcgtttcgtttttatttggggcggcgggcgcgtagtatgcgggtaggcggtagggcggtcgcgggtaggcgttgtattcggagtaggttcgcgcggtcggtattaggtttatggcgcgtttagtcgcggcggcgcggcggcggttggaatgttcggtacgcgcgtaggtagcgttttgttcgtcgttcgttcgtttcggttagcgtcgttttaggttcggattttga

SEQ ID NO: 25364 - DNA, 511 bp, Artificial Sequence
  chemically treated genomic DNA (Homo sapiens) CpG-island No: 25364
  unsure (427)
tcaaaatccgaacctaaaacgacgctaaccgaaacgaacgaacgacgaacaaaacgctacctacgcgcgtaccgaacattccaaccgccgccgcgccgccgcgactaaacgcgccataaacctaataccgaccgcgcgaacctactccgaatacaacgcctacccgcgaccgccctaccgcctacccgcatactacgcgcccgccgccccaaataaaaacgaaacgaaatacgaacgcccccgaacccgccaaaaaaactacgtctccgaaccataaaaacgctcgaaactaaaacaaaaacaacgaacgaaaacgccgcgcatacgtctcgcgaaaatcgacgaaaaacctaaaaaaatttaaatatcaccgcgaatctaatactacgaaacgattcccaaaaaacgaaaatcgtacgtatccaanaaaaaaaaacaaaaaccgaaaacgtccttcaatctcctactaactataaacgtcccgcaaaaaaaaacaaaaacttaaaatcta

SEQ ID NO: 25365 - DNA, 626 bp, Artificial Sequence
  chemically treated genomic DNA (Homo sapiens) CpG-island No: 25365
  unsure (28, 82, 414, 489, 503, 507, 521, 528, 536, 544, 557, 565)
tttcgggcggcggggacggtcgggttgnataggtcgttttagagggagaaagtggtatcgttattcgtgttcgggttggggngtcgtcggttatcgtcgagggcggtcgtacgtttcgtttagcgcggaggatagtagcgtgttcggtttgttaaggagcggcggtcgtagcggcggtcgtagcggcggaaggggtcggcgttcgacggtcgggggcggggtggggtggcggtttcggttcgttaggcggcggtcgggggaagtggttgtcgtttttggcggcggttagggttcgttaggttgtagggtcgggtttcggttcgggttcggattcggtttcggttgcgattttttcgggtttaggttggggttgtttcggttcgtaggtttcgttcggttcggttcgcggggggncgtttatttggcggcggcggcggcgattgtaggttaaagtttcggtcgcgcgcgtttttagcgtcggttgcgggnagttataatatggncgancggcgatggcgggncggggtntgcggttntcgggggncggagcgggggtngggagttnggtttggtcggcgggattttggttgggggttgttcgcggcggggggattgggggggggggg

SEQ ID NO: 25366 - DNA, 626 bp, Artificial Sequence
  chemically treated genomic DNA (Homo sapiens) CpG-island No: 25366
  unsure (62, 70, 83, 91, 99, 106, 120, 124, 138, 213, 545, 599)
ccccccccccccaatccccccgccgcgaacaacccccaaccaaaatcccgccgaccaaaccnaactcccnacccccgctccgncccccganaaccgcanaccccgncccgccatcgccgntcgnccatattataactncccgcaaccgacgctaaaaacgcgcgcgaccgaaactttaacctacaatcgccgccgccgccgccaaataaacgnccccccgcgaaccgaaccgaacgaaacctacgaaccgaaacaaccccaacctaaacccgaaaaaatcgcaaccgaaaccgaatccgaacccgaaccgaaacccgaccctacaacctaacgaaccctaaccgccgccaaaaacgacaaccacttcccccgaccgccgcctaacgaaccgaaaccgccaccccaccccgcccccgaccgtcgaacgccgaccccttccgccgctacgaccgccgctacgaccgccgctccttaacaaaccgaacacgctactatcctccgcgctaaacgaaacgtacgaccgccctcgacgataaccgacgacnccccaacccgaacacgaataacgataccactttctccctctaaaacgacctatncaacccgaccgtccccgccgcccgaaa

SEQ ID NO: 25367 - DNA, 626 bp, Artificial Sequence
  chemically treated genomic DNA (Homo sapiens) CpG-island No: 25367
  unsure (62, 70, 83, 91, 99, 106, 120, 124, 138, 213, 545, 599)
ttttttttttttaattttttcgtcgcgggtagtttttagttagggtttcgtcggttaggttnggtttttngttttcgtttcgnttttcggnagtcgtangtttcgnttcgttatcgtcgntcgnttatgttgtggttnttcgtagtcggcgttggggacgcgcgcggtcgagattttggtttgtagtcgtcgtcgtcgtcgttaggtaagcgntttttcgcgggtcgggtcgagcggggtttgcgggtcggggtagttttagtttgggttcgggaggatcgtagtcgggatcgagttcgagttcgagtcggggttcggttttgtagtttggcggattttggtcgtcgttagaggcggtagttatttttttcgatcgtcgtttggcgggtcggggtcgttattttatttcgttttcggtcgtcgggcgtcggtttttttcgtcgttgcgatcgtcgttgcgatcgtcgttttttggtaggtcgggtacgttgttgtttttcgcgttgggcgggacgtgcggtcgttttcggcgatagtcggcggtnttttagttcgggtacggataacggtgttattttttttttttgggacggtttgtntagttcgatcgttttcgtcgttcgaag

SEQ ID NO: 25368 - DNA, 626 bp, Artificial Sequence
  chemically treated genomic DNA (Homo sapiens) CpG-island No: 25368
  unsure (28, 82, 414, 489, 503, 507, 521, 528, 536, 544, 557, 565)
cttcgaacgacgaaaacgatcgaactanacaaaccgtcccaaaaaaaaaaaataacaccgttatccgtacccgaactaaaanaccgccgactatcgccgaaaacgaccgcacgtcccgcccaacgcgaaaaacaacaacgtacccgacctaccaaaaaacgacgatcgcaacgacgatcgcaacgacgaaaaaaaccgacgcccgacgaccgaaaacgaaataaaataacgaccccgacccgccaaacgacgatcgaaaaaaataactaccgcctctaacgacgaccaaaatccgccaaactacaaaaccgaaccccgactcgaactcgaactcgatcccgactacgatcctcccgaacccaaactaaaactaccccgacccgcaaaccccgctcgacccgacccgcgaaaaancgcttacctaacgacgacgacgacgactacaaaccaaaatctcgaccgcgcgcgtccccaacgccgactacgaanaaccacaacataancgancgacgataacgaancgaaacntacgactnccgaaaancgaaacgaaaacnaaaaaccnaacctaaccgacgaaaccctaactaaaaactacccgcgacgaaaaaattaaaaaaaaaaaa

SEQ ID NO: 25369 - DNA, 591 bp, Artificial Sequence
  chemically treated genomic DNA (Homo sapiens) CpG-island No: 25369
  unsure (351)
tttgtttattcgtcgtatatcgtttaaaaagtttagagatagtatggcggggacggcgagtaggatatcggtaggggaaagggcgcgatgattagcgggcggaattattggagttcgggtcgggtttatattggataggatttcgtagtgtttgtattttcgttttcggggcgggagttggtacggtcgggtacggttttcgtttttcgcgttttttcgttgcggagagttgatagagagatttacgattttgttagtttagttttagggtttggtttcgtcgtgggagggtttttacgttttggttttcgtttgttaaaaatcgattggacgttatttttcgcgttcggntttcgcggttttttatcgaggcggcgatttaagtttagttggggaggttgttttgttattttcggaaggcgggtttttgtgttcgttcggttaatcgcgagtaattttttcggtgtgggcgggtagaagcggtttcgcgtttcggtttgggtatgggtgtgttagtggatgtgtcgtttgatcgtaggttttttggtcgagtaagttttttgcgttatgggaagttgaggaggtgttttt

SEQ ID NO: 25370 - DNA, 591 bp, Artificial Sequence
  chemically treated genomic DNA (Homo sapiens) CpG-island No: 25370
  unsure (241)
aaaaacacctcctcaacttcccataacgcaaaaaacttactcgaccaaaaaacctacgatcaaacgacacatccactaacacacccatacccaaaccgaaacgcgaaaccgcttctacccgcccacaccgaaaaaattactcgcgattaaccgaacgaacacaaaaacccgccttccgaaaataacaaaacaacctccccaactaaacttaaatcgccgcctcgataaaaaaccgcgaaanccgaacgcgaaaaataacgtccaatcgatttttaacaaacgaaaaccaaaacgtaaaaaccctcccacgacgaaaccaaaccctaaaactaaactaacaaaatcgtaaatctctctatcaactctccgcaacgaaaaaacgcgaaaaacgaaaaccgtacccgaccgtaccaactcccgccccgaaaacgaaaatacaaacactacgaaatcctatccaatataaacccgacccgaactccaataattccgcccgctaatcatcgcgccctttcccctaccgatatcctactcgccgtccccgccatactatctctaaactttttaaacgatatacgacgaataaacaaa

SEQ ID NO: 25371 - DNA, 591 bp, Artificial Sequence
  chemically treated genomic DNA (Homo sapiens) CpG-island No: 25371
  unsure (241)
gaaagtatttttttagttttttatagcgtaggagatttgttcgattagagaatttacggttagacgatatatttattggtatatttatatttaagtcgggacgcggaatcgtttttattcgtttatatcggagaggttgttcgcgattggtcgggcgggtatagaggttcgtttttcgaaggtggtagaatagtttttttaattaagtttgggtcgtcgtttcggtgaagggtcgcggggntcgagcgcgggaagtggcgtttagtcggtttttggtaggcgagagttagagcgtgagaatttttttacggcgaggttaagttttgagattggattagtaaggtcgtgagtttttttgttagtttttcgtagcgaaggggcgcggggggcggggatcgtgttcgatcgtgttagttttcgtttcggaagcggaagtgtaagtattgcggggttttgtttagtgtgagttcgattcgagttttagtagtttcgttcgttggttatcgcgtttttttttttgtcggtgttttgttcgtcgttttcgttatgttgtttttagattttttggacgatgtgcggcggatgaataag

SEQ ID NO: 25372 - DNA, 591 bp, Artificial Sequence
  chemically treated genomic DNA (Homo sapiens) CpG-island No: 25372
  unsure (351)
cttattcatccgccgcacatcgtccaaaaaatctaaaaacaacataacgaaaacgacgaacaaaacaccgacaaaaaaaaaaacgcgataaccaacgaacgaaactactaaaactcgaatcgaactcacactaaacaaaaccccgcaatacttacacttccgcttccgaaacgaaaactaacacgatcgaacacgatccccgccccccgcgccccttcgctacgaaaaactaacaaaaaaactcacgaccttactaatccaatctcaaaacttaacctcgccgtaaaaaaattctcacgctctaactctcgcctaccaaaaaccgactaaacgccacttcccgcgctcganccccgcgacccttcaccgaaacgacgacccaaacttaattaaaaaaactattctaccaccttcgaaaaacgaacctctatacccgcccgaccaatcgcgaacaacctctccgatataaacgaataaaaacgattccgcgtcccgacttaaatataaatataccaataaatatatcgtctaaccgtaaattctctaatcgaacaaatctcctacgctataaaaaactaaaaaaatactttc

SEQ ID NO: 25373 - DNA, 876 bp, Artificial Sequence
  chemically treated genomic DNA (Homo sapiens) CpG-island No: 25373
  unsure (34, 103, 112, 215, 275, 446, 616, 650, 677)
gtcgtcgcggaggtaattgtgatgttacgggtgngaatttttagtttttttggtttatttttagggtcgatggaatcgttcgttttcgtttcggcgttcgggntgggcgttnggtttacgggttttagttaaggtcggcgttttaagggtagcggtttgcgttcggtgttatttagttcgatagtcgagcgttttagttttggttggaattagantttttcgtttatttcgcgggcgatttagtagggttttaggattttagtttttaattattnggttcgcggttcgacgcgagttcgttttcggttttagtttcgtttcggttttagtttcgtttcggtttagtattgggtttcgtttttttcgttggtttgttcgtttttttcgtcggtttgtcggtttttcgcgtgcgtcgttcggggtttgcgagtcgggtcgcgtttttntgtttagtttttgtttcgttttttttatcgcggtatttgtttttattttacgagcgggttttgggttcggttttttttttagtttattttttaattgtgagcgtcgttttgatttatatcgtttttcgtttaggttttcgtttttataggatttttgcgtgaagtttaanttttgagttttagttcggtcgagttttcggtttnagtcgtgaattttagtttcggtttcgnttttcgtttagtttttaatttcgttttatgttggcgtagttttcgtcggtttttttagttcggttttaggttgcgtagtttttttagttgggttttagcgttagtcgcgttttttattcggggttttcggcgttttttaggtttttttttattttagattttaattttataggtttagtttttattatttatttttggt

SEQ ID NO: 25374 - DNA, 876 bp, Artificial Sequence
  chemically treated genomic DNA (Homo sapiens) CpG-island No: 25374
  unsure (200, 227, 261, 431, 602, 662, 765, 774, 843)
accaaaaataaataataaaaactaaacctataaaattaaaatctaaaataaaaaaaaacctaaaaaacgccgaaaaccccgaataaaaaacgcgactaacgctaaaacccaactaaaaaaactacgcaacctaaaaccgaactaaaaaaaccgacgaaaactacgccaacataaaacgaaattaaaaactaaacgaaaancgaaaccgaaactaaaattcacgactnaaaccgaaaactcgaccgaactaaaactcaaaanttaaacttcacgcaaaaatcctataaaaacgaaaacctaaacgaaaaacgatataaatcaaaacgacgctcacaattaaaaaataaactaaaaaaaaaaccgaacccaaaacccgctcgtaaaataaaaacaaataccgcgataaaaaaaacgaaacaaaaactaaacanaaaaacgcgacccgactcgcaaaccccgaacgacgcacgcgaaaaaccgacaaaccgacgaaaaaaacgaacaaaccaacgaaaaaaacgaaacccaatactaaaccgaaacgaaactaaaaccgaaacgaaactaaaaccgaaaacgaactcgcgtcgaaccgcgaaccnaataattaaaaactaaaatcctaaaaccctactaaatcgcccgcgaaataaacgaaaaantctaattccaaccaaaactaaaacgctcgactatcgaactaaataacaccgaacgcaaaccgctacccttaaaacgccgaccttaactaaaacccgtaaaccnaacgcccancccgaacgccgaaacgaaaacgaacgattccatcgaccctaaaaataaaccaaaaaaactaaaaattcncacccgtaacatcacaattacctccgcgacgac

SEQ ID NO: 25375 - DNA, 876 bp, Artificial Sequence
  chemically treated genomic DNA (Homo sapiens) CpG-island No: 25375
  unsure (200, 227, 261, 431, 602, 662, 765, 774, 843)
attagagatgggtggtgagagttgggtttgtaaggttaaggtttgagataaagaggggtttgggaggcgtcggaggtttcggatgaagaacgcggttgacgttgagatttagttgggaagattacgtagtttggagtcgggttggggaggtcggcgggggttgcgttagtatgaggcggggttaggggttaggcgggggncgaagtcgagattggagtttacggttngggtcgagggttcggtcgggttgaggtttagggnttggattttacgtaagagttttgtagagacgaagatttgggcggagagcgatgtgggttaggacgacgtttataattgaaagatggattaaggaaaagatcgagtttaaggttcgttcgtgggatgagagtagatgtcgcggtaagaggggcggggtaggggttgggtangagggcgcggttcggttcgtagatttcgagcggcgtacgcgggaagtcggtaaatcgacgagggagacgggtaaattaacgagagaggcggggtttagtgttgggtcggggcggagttagggtcggggcggagttagggtcgggggcgggttcgcgtcgagtcgcgggttnaatgattgaggattggggttttgaggttttgttgggtcgttcgcgggatgggcgggaagntttggttttagttagagttggaacgttcggttatcggattgggtggtatcgggcgtaggtcgttgtttttgaagcgtcggttttggttggagttcgtggattnagcgtttanttcggacgtcggggcgggagcgggcggttttatcgattttgagggtggattaaggagattgagggtttntattcgtggtattataattattttcgcggcggt

SEQ ID NO: 25376 - DNA, 876 bp, Artificial Sequence
  chemically treated genomic DNA (Homo sapiens) CpG-island No: 25376
  unsure (34, 103, 112, 215, 275, 446, 616, 650, 677)
accgccgcgaaaataattataataccacgaatanaaaccctcaatctccttaatccaccctcaaaatcgataaaaccgcccgctcccgccccgacgtccgaantaaacgctnaatccacgaactccaaccaaaaccgacgcttcaaaaacaacgacctacgcccgataccacccaatccgataaccgaacgttccaactctaactaaaaccaaancttcccgcccatcccgcgaacgacccaacaaaacctcaaaaccccaatcctcaatcattnaacccgcgactcgacgcgaacccgcccccgaccctaactccgccccgaccctaactccgccccgacccaacactaaaccccgcctctctcgttaatttacccgtctccctcgtcgatttaccgacttcccgcgtacgccgctcgaaatctacgaaccgaaccgcgccctcntacccaacccctaccccgcccctcttaccgcgacatctactctcatcccacgaacgaaccttaaactcgatcttttccttaatccatctttcaattataaacgtcgtcctaacccacatcgctctccgcccaaatcttcgtctctacaaaactcttacgtaaaatccaanccctaaacctcaacccgaccgaaccctcgacccnaaccgtaaactccaatctcgacttcgncccccgcctaacccctaaccccgcctcatactaacgcaacccccgccgacctccccaacccgactccaaactacgtaatcttcccaactaaatctcaacgtcaaccgcgttcttcatccgaaacctccgacgcctcccaaacccctctttatctcaaaccttaaccttacaaacccaactctcaccacccatctctaat

SEQ ID NO: 25377 - DNA, 599 bp, Artificial Sequence
  chemically treated genomic DNA (Homo sapiens) CpG-island No: 25377
  unsure (138, 428, 517, 538, 540, 561, 569, 588)
gttaggacgcgattttttcgtacgggtgttagaatgtttattttgtttgcggttttgtagggcgttttgagaaggcgtcgaggtcggattcgcgttagcgattcgggcgcgtggagattcgacgattattcgcggttnggggtgtttcgattataattcggggttacggggattttacgggagttcgcggtttcggagacgttacgattatcgcgggttacggagatgaaataattattcggggtcgcggcgagtttaaaattattcgggttttgggcgtttcgaagatgattttggggcgaggagatttttcggtcgttaattgggggcggggagtttcgtttggtgggggtcgggttcgcgtagattttacgattacgcggggtcggatagtttttacgattacgcggggtcggatggtttttatnaataattcggggtcgcggagattcgacgttatttcggggttgaggttgttttattattatagagcggttcgggggcgcggagcggtttngttatacggggttagtgtggngntaggggcggcgttgttaaggnttcgtagngtcgttgaaggagggggtngaggggtttag

SEQ ID NO: 25378 - DNA, 599 bp, Artificial Sequence
  chemically treated genomic DNA (Homo sapiens) CpG-island No: 25378
  unsure (12, 31, 39, 60, 62, 83, 172, 462)
ctaaacccctcnaccccctccttcaacgacnctacgaanccttaacaacgccgcccctancnccacactaaccccgtataacnaaaccgctccgcgcccccgaaccgctctataataataaaacaacctcaaccccgaaataacgtcgaatctccgcgaccccgaattattnataaaaaccatccgaccccgcgtaatcgtaaaaactatccgaccccgcgtaatcgtaaaatctacgcgaacccgacccccaccaaacgaaactccccgcccccaattaacgaccgaaaaatctcctcgccccaaaatcatcttcgaaacgcccaaaacccgaataattttaaactcgccgcgaccccgaataattatttcatctccgtaacccgcgataatcgtaacgtctccgaaaccgcgaactcccgtaaaatccccgtaaccccgaattataatcgaaacaccccnaaccgcgaataatcgtcgaatctccacgcgcccgaatcgctaacgcgaatccgacctcgacgccttctcaaaacgccctacaaaaccgcaaacaaaataaacattctaacacccgtacgaaaaaatcgcgtcctaac

SEQ ID NO: 25379 - DNA, 599 bp, Artificial Sequence
  chemically treated genomic DNA (Homo sapiens) CpG-island No: 25379
  unsure (12, 31, 39, 60, 62, 83, 172, 462)
ttgggttttttngtttttttttttagcggtnttgcgggnttttggtagcgtcgtttttgntnttatattgatttcgtgtggtngggtcgtttcgcgttttcgggtcgttttgtaatggtagggtagttttagtttcgagatgacgtcgggttttcgcggtttcgggttattngtaggaattattcggtttcgcgtaatcgtaggaattattcggtttcgcgtaatcgtagggtttgcgcgggttcggtttttattagacgggatttttcgtttttaattggcggtcgaagagttttttcgttttagagttattttcgggacgtttagggttcgggtgattttgggttcgtcgcggtttcgggtgattgttttattttcgtggttcgcggtggtcgtagcgttttcgagatcgcggattttcgtagggttttcgtggtttcgagttgtagtcgggatattttnggtcgcgggtgatcgtcgggtttttacgcgttcgggtcgttgacgcggattcggtttcggcgtttttttagggcgttttgtaaggtcgtaggtaggatgaatattttggtattcgtgcggagggatcgcgttttggt

SEQ ID NO: 25380 - DNA, 599 bp, Artificial Sequence
  chemically treated genomic DNA (Homo sapiens) CpG-island No: 25380
  unsure (138, 428, 517, 538, 540, 561, 569, 588)
accaaaacgcgatccctccgcacgaataccaaaatattcatcctacctacgaccttacaaaacgccctaaaaaaacgccgaaaccgaatccgcgtcaacgacccgaacgcgtaaaaacccgacgatcacccgcgaccnaaaatatcccgactacaactcgaaaccacgaaaaccctacgaaaatccgcgatctcgaaaacgctacgaccaccgcgaaccacgaaaataaaacaatcacccgaaaccgcgacgaacccaaaatcacccgaaccctaaacgtcccgaaaataactctaaaacgaaaaaactcttcgaccgccaattaaaaacgaaaaatcccgtctaataaaaaccgaacccgcgcaaaccctacgattacgcgaaaccgaataattcctacgattacgcgaaaccgaataattcctacnaataacccgaaaccgcgaaaacccgacgtcatctcgaaactaaaactaccctaccattacaaaacgacccgaaaacgcgaaacgacccnaccacacgaaatcaatataanancaaaaacgacgctaccaaaancccgcaanaccgctaaaaaaaaaaacnaaaaaacccaa

SEQ ID NO: 25381 - DNA, 695 bp, Artificial Sequence
  chemically treated genomic DNA (Homo sapiens) CpG-island No: 25381
  unsure (381, 395, 540, 654)
ttcgcgggcgcgggagggataggtaaatacgggatttcggttagaagattgcgagtggtgcggtaggggtattgggtttgtacggagattattgtcggacgcggggtttcggagtttattttaggattaggatttagggggcgtgggcgtgtcgggtttcgtttagttttgcgtagaaagtagagggcggagagagttttcgcggtattcgtttagggcggggtagtcggtggttcggggaaaagtggggacgcgggttaatgaggttaggcgagcgagggtagcggggatttcgtcggtagtcgggaggcgttagcgaggggtgtttcggcgacgacgtttttagtatagtttttagttattcgaagttcgcgggagttnggtcggtggtcgangaggttacggggatattcggttcgcgcggtagtagcgtttgaggggcgggggtaggcggacggggcgggggtaggcgggcggggcgggggcgcgggcggttgggggcgggggtagaggtttcgtagggagggcgaggaggagttnaaggggtttagagggtttcgttaattgtgtggggttggcggtcggcgggagaggcggtcggtttggattggttcgagagggatttcggtttttagaatagatttaggaggcggntttcgagggcggacggtagggagggttagtatgtttcgatt

SEQ ID NO: 25382 - DNA, 695 bp, Artificial Sequence
  chemically treated genomic DNA (Homo sapiens) CpG-island No: 25382
  unsure (42, 156, 301, 315)
aatcgaaacatactaaccctccctaccgtccgccctcgaaanccgcctcctaaatctattctaaaaaccgaaatccctctcgaaccaatccaaaccgaccgcctctcccgccgaccgccaaccccacacaattaacgaaaccctctaaaccccttnaactcctcctcgccctccctacgaaacctctacccccgcccccaaccgcccgcgcccccgccccgcccgcctacccccgccccgtccgcctacccccgcccctcaaacgctactaccgcgcgaaccgaatatccccgtaacctcntcgaccaccgaccnaactcccgcgaacttcgaataactaaaaactatactaaaaacgtcgtcgccgaaacacccctcgctaacgcctcccgactaccgacgaaatccccgctaccctcgctcgcctaacctcattaacccgcgtccccacttttccccgaaccaccgactaccccgccctaaacgaataccgcgaaaactctctccgccctctactttctacgcaaaactaaacgaaacccgacacgcccacgccccctaaatcctaatcctaaaataaactccgaaaccccgcgtccgacaataatctccgtacaaacccaatacccctaccgcaccactcgcaatcttctaaccgaaatcccgtatttacctatccctcccgcgcccgcgaa

SEQ ID NO: 25383 - DNA, 695 bp, Artificial Sequence
  chemically treated genomic DNA (Homo sapiens) CpG-island No: 25383
  unsure (42, 156, 301, 315)
agtcggggtatgttggttttttttgtcgttcgttttcgaggntcgttttttaggtttgttttgggaatcgggatttttttcgggttagtttaggtcggtcgtttttttcgtcggtcgttagttttatatagttggcgaagttttttaggttttttnggttttttttcgttttttttgcgaggtttttgttttcgtttttagtcgttcgcgttttcgtttcgttcgtttgttttcgtttcgttcgtttgttttcgttttttaggcgttgttgtcgcgcgagtcgggtgttttcgtggttttntcggttatcggttnggttttcgcggatttcgggtaattaggagttgtgttgggggcgtcgtcgtcgagatatttttcgttggcgtttttcgattgtcgacggagttttcgttgttttcgttcgtttggttttattaattcgcgtttttattttttttcgggttatcggttatttcgttttgggcgggtatcgcgagagtttttttcgttttttattttttgcgtagagttggacgggattcgatacgtttacgttttttaagttttggttttggggtgggtttcggagtttcgcgttcgatagtggttttcgtgtagatttagtgtttttatcgtattattcgtagttttttggtcggagtttcgtgtttatttgtttttttcgcgttcgcgag

SEQ ID NO: 25384 - DNA, 695 bp, Artificial Sequence
  chemically treated genomic DNA (Homo sapiens) CpG-island No: 25384
  unsure (381, 395, 540, 654)
ctcgcgaacgcgaaaaaaacaaataaacacgaaactccgaccaaaaaactacgaataatacgataaaaacactaaatctacacgaaaaccactatcgaacgcgaaactccgaaacccaccccaaaaccaaaacttaaaaaacgtaaacgtatcgaatcccgtccaactctacgcaaaaaataaaaaacgaaaaaaactctcgcgatacccgcccaaaacgaaataaccgataacccgaaaaaaaataaaaacgcgaattaataaaaccaaacgaacgaaaacaacgaaaactccgtcgacaatcgaaaaacgccaacgaaaaatatctcgacgacgacgcccccaacacaactcctaattacccgaaatccgcgaaaaccnaaccgataaccganaaaaccacgaaaacacccgactcgcgcgacaacaacgcctaaaaaacgaaaacaaacgaacgaaacgaaaacaaacgaacgaaacgaaaacgcgaacgactaaaaacgaaaacaaaaacctcgcaaaaaaaacgaaaaaaaaccnaaaaaacctaaaaaacttcgccaactatataaaactaacgaccgacgaaaaaaacgaccgacctaaactaacccgaaaaaaatcccgattcccaaaacaaacctaaaaaacgancctcgaaaacgaacgacaaaaaaaaccaacataccccgact

SEQ ID NO: 25385 - DNA, 651 bp, Artificial Sequence
  chemically treated genomic DNA (Homo sapiens) CpG-island No: 25385
  unsure (457, 465, 478, 491, 505, 512, 524, 590, 621)
ggcgcgggggtttcggaaaagggttcgcgtattttggttttgttgagtaggagttttacgaaggtggagagtagtagggacggggagagaggggagcgcggtcgtagttttttggcgagggcgggaaagggggcggcgggggggttttcgggtagggttacggtgtacgaggtgcgtatgttggggggcgggcggcgggttttggttttcgtttaacgttggtagcgggggcgcggggggagttttcgcgcggtgttatagttcggacgtcgaggtcggcgagatcgttataggatagcgttcgcggcgttcgaacgcgcgttttttcgttttaattttttcggcgtgcgtcgttaatagttcgggtttcggttttcgcgtttcggtcgattggcggtttcgtcggcgtttcgggtttcgcgacgttagcgttggggcggggttaggttttaagttntcgttttnatttcgtttttantttcgttttcggncgtcggtacgcggnattcganacgaggcgatanagggcggttttttttcgtcgggtttttttcgcgtttttcggcgtttttagttcgttgattttcggnttaggtaggttcgcgggggaggtaggatcgngagttttgaggttttggtcggtttcggggt

SEQ ID NO: 25386 - DNA, 651 bp, Artificial Sequence
  chemically treated genomic DNA (Homo sapiens) CpG-island No: 25386
  unsure (31, 62, 128, 140, 147, 161, 174, 187, 195)
accccgaaaccgaccaaaacctcaaaactcncgatcctacctcccccgcgaacctacctaanccgaaaatcaacgaactaaaaacgccgaaaaacgcgaaaaaaacccgacgaaaaaaaaccgccctntatcgcctcgtntcgaatnccgcgtaccgacgnccgaaaacgaaantaaaaacgaaatnaaaacganaacttaaaacctaaccccgccccaacgctaacgtcgcgaaacccgaaacgccgacgaaaccgccaatcgaccgaaacgcgaaaaccgaaacccgaactattaacgacgcacgccgaaaaaattaaaacgaaaaaacgcgcgttcgaacgccgcgaacgctatcctataacgatctcgccgacctcgacgtccgaactataacaccgcgcgaaaactccccccgcgcccccgctaccaacgttaaacgaaaaccaaaacccgccgcccgccccccaacatacgcacctcgtacaccgtaaccctacccgaaaacccccccgccgccccctttcccgccctcgccaaaaaactacgaccgcgctcccctctctccccgtccctactactctccaccttcgtaaaactcctactcaacaaaaccaaaatacgcgaacccttttccgaaacccccgcgcc

SEQ ID NO: 25387 - DNA, 651 bp, Artificial Sequence
  chemically treated genomic DNA (Homo sapiens) CpG-island No: 25387
  unsure (31, 62, 128, 140, 147, 161, 174, 187, 195)
atttcgaggtcggttagggttttagggtttncggttttgtttttttcgcgggtttgtttggntcgggggttagcgggttgggggcgtcggggagcgcggggaaggttcggcgggggaggatcgttttntgtcgtttcgtntcgggtntcgcgtgtcggcgntcgggggcggggntagaggcgaggtnggggcggnggtttagggtttggtttcgttttagcgttgacgtcgcggggttcgaggcgtcggcggggtcgttagtcggtcggagcgcgagagtcgggattcgggttgttggcggcgtacgtcggggaggttgaggcggaggagcgcgcgttcgggcgtcgcggacgttgttttgtagcggtttcgtcggtttcggcgttcggattgtggtatcgcgcggggatttttttcgcgttttcgttgttaacgttaagcgagggttaaagttcgtcgttcgttttttagtatgcgtatttcgtatatcgtgattttgttcgaggattttttcgtcgttttttttttcgttttcgttaaggagttgcggtcgcgttttttttttttttcgtttttgttgttttttattttcgtggggtttttgtttaataaagttaaggtacgcgggttttttttcgggattttcgcgtt

SEQ ID NO: 25388 - DNA, 651 bp, Artificial Sequence
  chemically treated genomic DNA (Homo sapiens) CpG-island No: 25388
  unsure (457, 465, 478, 491, 505, 512, 524, 590, 621)
aacgcgaaaatcccgaaaaaaaacccgcgtaccttaactttattaaacaaaaaccccacgaaaataaaaaacaacaaaaacgaaaaaaaaaaaaaacgcgaccgcaactccttaacgaaaacgaaaaaaaaaacgacgaaaaaatcctcgaacaaaatcacgatatacgaaatacgcatactaaaaaacgaacgacgaactttaaccctcgcttaacgttaacaacgaaaacgcgaaaaaaatccccgcgcgataccacaatccgaacgccgaaaccgacgaaaccgctacaaaacaacgtccgcgacgcccgaacgcgcgctcctccgcctcaacctccccgacgtacgccgccaacaacccgaatcccgactctcgcgctccgaccgactaacgaccccgccgacgcctcgaaccccgcgacgtcaacgctaaaacgaaaccaaaccctaaaccnccgccccnacctcgcctctanccccgcccccgancgccgacacgcganacccganacgaaacgacanaaaacgatcctcccccgccgaaccttccccgcgctccccgacgcccccaacccgctaacccccganccaaacaaacccgcgaaaaaaacaaaaccgnaaaccctaaaaccctaaccgacctcgaaat

SEQ ID NO: 25389 - DNA, 811 bp, Artificial Sequence
  chemically treated genomic DNA (Homo sapiens) CpG-island No: 25389
ttggcgggcggcggcggttatcggcgttttcgttgttttttttcgttagtcgggtcgagagcgtttcggtataaagtttttagttcgcgttatcgtcggcggttcgggattttttaggcgttttttttttagttatattttttcggttttttttttggcgtcgtttcgttggggttgttaggggtacggtcggcggcggttttttttgcggttagggagatttttgcgcgggtgtttttcgtcgagtttaagtcgttttcggttcgttttttcggtttttgttttgcgtatcgtagtcgtcgtcgtcgcggaaatttgcgatttatgaagcgcgggcggcggggagaattcgggtggttagggcgcgtcggggtcgtgtttcgtttttttggttttcggttcgttggttttcggttggcggcgtcgcgttagtggtcgcggtttcgtagagagcgtaatttttcgtagtttagcgggttcggtttttttttgcgttttcgttttttttttcgtcgtcgtcgtttgattatttgtgttaattttttaattcgtttttttttttttgtttcgcgcgttttcggatcggtttttaggcgtttcgtagtttgttttttattaggagggaggagttttgaaatcgacgtagaattggaggtttagggatcgtcgtttaatcgcggtttcggtttttcggcgtaaagggagtcggtcgttttttcgttagagcgaaagttagcggtaggagggcggggtaggaggaggcgggaggaggaggaagtagtggtggtggtattatttaggtataaagagt

SEQ ID NO: 25390 - DNA, 811 bp, Artificial Sequence
  chemically treated genomic DNA (Homo sapiens) CpG-island No: 25390
actctttatacctaaataataccaccaccactacttcctcctcctcccgcctcctcctaccccgccctcctaccgctaactttcgctctaacgaaaaaacgaccgactccctttacgccgaaaaaccgaaaccgcgattaaacgacgatccctaaacctccaattctacgtcgatttcaaaactcctccctcctaataaaaaacaaactacgaaacgcctaaaaaccgatccgaaaacgcgcgaaacaaaaaaaaaaaaacgaattaaaaaattaacacaaataatcaaacgacgacgacgaaaaaaaaaacgaaaacgcaaaaaaaaaccgaacccgctaaactacgaaaaattacgctctctacgaaaccgcgaccactaacgcgacgccgccaaccgaaaaccaacgaaccgaaaaccaaaaaaacgaaacacgaccccgacgcgccctaaccacccgaattctccccgccgcccgcgcttcataaatcgcaaatttccgcgacgacgacgactacgatacgcaaaacaaaaaccgaaaaaacgaaccgaaaacgacttaaactcgacgaaaaacacccgcgcaaaaatctccctaaccgcaaaaaaaaccgccgccgaccgtacccctaacaaccccaacgaaacgacgccaaaaaaaaaaccgaaaaaatataactaaaaaaaaaacgcctaaaaaatcccgaaccgccgacgataacgcgaactaaaaactttataccgaaacgctctcgacccgactaacgaaaaaaaacaacgaaaacgccgataaccgccgccgcccgccaa

SEQ ID NO: 25391 - DNA, 811 bp, Artificial Sequence
  chemically treated genomic DNA (Homo sapiens) CpG-island No: 25391
attttttgtgtttgagtagtgttattattattattttttttttttttcgtttttttttatttcgtttttttgtcgttggttttcgttttggcgaggaggcggtcggttttttttgcgtcgggaagtcggagtcgcgattgggcgacggtttttgagtttttagttttgcgtcggttttaaggttttttttttttggtgaaagatagattacggggcgtttggaaatcggttcgagggcgcgcgaggtagaggagagggagcgagttgagggattgatataaatggttaggcggcggcggcggagaaggaggcggaggcgtaggggggagtcgagttcgttgggttgcggagagttgcgttttttacggggtcgcggttattagcgcggcgtcgttagtcgggagttagcgagtcgagggttaggaaggcgggatacgatttcggcgcgttttagttattcgggtttttttcgtcgttcgcgttttatgaatcgtaagttttcgcggcggcggcggttgcggtacgtagaataggagtcgggggagcgggtcgaaagcggtttgggttcgacggagggtattcgcgtagaggtttttttggtcgtagggggagtcgtcgtcggtcgtgtttttggtagttttagcggagcggcgttaagagaggagtcgagaaagtatggttgaggaggaggcgtttaagaagtttcgggtcgtcggcggtggcgcgagttgggaattttgtgtcggggcgttttcggttcggttggcggaggagggtagcggggacgtcggtggtcgtcgtcgttcgttag

SEQ ID NO: 25392 - DNA, 811 bp, Artificial Sequence
  chemically treated genomic DNA (Homo sapiens) CpG-island No: 25392
ctaacgaacgacgacgaccaccgacgtccccgctaccctcctccgccaaccgaaccgaaaacgccccgacacaaaattcccaactcgcgccaccgccgacgacccgaaacttcttaaacgcctcctcctcaaccatactttctcgactcctctcttaacgccgctccgctaaaactaccaaaaacacgaccgacgacgactccccctacgaccaaaaaaacctctacgcgaataccctccgtcgaacccaaaccgctttcgacccgctcccccgactcctattctacgtaccgcaaccgccgccgccgcgaaaacttacgattcataaaacgcgaacgacgaaaaaaacccgaataactaaaacgcgccgaaatcgtatcccgccttcctaaccctcgactcgctaactcccgactaacgacgccgcgctaataaccgcgaccccgtaaaaaacgcaactctccgcaacccaacgaactcgactcccccctacgcctccgcctccttctccgccgccgccgcctaaccatttatatcaatccctcaactcgctccctctcctctacctcgcgcgccctcgaaccgatttccaaacgccccgtaatctatctttcaccaaaaaaaaaaaaccttaaaaccgacgcaaaactaaaaactcaaaaaccgtcgcccaatcgcgactccgacttcccgacgcaaaaaaaaccgaccgcctcctcgccaaaacgaaaaccaacgacaaaaaaacgaaataaaaaaaaacgaaaaaaaaaaaaaataataataataacactactcaaacacaaaaaat

SEQ ID NO: 25393 - DNA, 539 bp, Artificial Sequence
  chemically treated genomic DNA (Homo sapiens) CpG-island No: 25393
gggtagcgcgcgttggggaatttttggcgcgtggggatcgttaggtttttcgtttcggcgttttgggtaggggttggtttttaaacgcgtacgcggggtagatttcggttatagggacgagttacgcgagggttacgacgaagcgaattagttttaggagaaaggaagcggggtttacgagttgtgttagttagtgtggtattcggggggaggtaggaacgcggggcgaagggtatttttgacgcgatttacggatggtagggcgtaaaggttgatattcgggagcggagggaagtgtcgtttaggatagttgagtattttttttattttcggagaagtgagggcgtgcggatcgttgtgggagtgggcgtcggggaggatcgttcgtatttcgcgagtcgggcgcgtattaagtaggagttcgtttttcgttggggtttgtagcgtttatttgtcgtcgtttttcggtttttttttgtaggtttacgtgtgttttaacgttaggagtagtagtagcggatttaggtttttgtttagtt

SEQ ID NO: 25394 - DNA, 539 bp, Artificial Sequence
  chemically treated genomic DNA (Homo sapiens) CpG-island No: 25394
aactaaacaaaaacctaaatccgctactactactcctaacgttaaaacacacgtaaacctacaaaaaaaaaccgaaaaacgacgacaaataaacgctacaaaccccaacgaaaaacgaactcctacttaatacgcgcccgactcgcgaaatacgaacgatcctccccgacgcccactcccacaacgatccgcacgccctcacttctccgaaaataaaaaaaatactcaactatcctaaacgacacttccctccgctcccgaatatcaacctttacgccctaccatccgtaaatcgcgtcaaaaatacccttcgccccgcgttcctacctccccccgaataccacactaactaacacaactcgtaaaccccgcttcctttctcctaaaactaattcgcttcgtcgtaaccctcgcgtaactcgtccctataaccgaaatctaccccgcgtacgcgtttaaaaaccaacccctacccaaaacgccgaaacgaaaaacctaacgatccccacgcgccaaaaattccccaacgcgcgctaccc

SEQ ID NO: 25395 - DNA, 539 bp, Artificial Sequence
  chemically treated genomic DNA (Homo sapiens) CpG-island No: 25395
agttgggtaggagtttgggttcgttgttgttgtttttggcgttgggatatacgtggatttatagagaggagtcggaggacggcgataggtaagcgttgtaagttttagcggagggcgagtttttgtttgatgcgcgttcggttcgcggggtgcgggcggtttttttcggcgtttatttttatagcgattcgtacgtttttattttttcggggataaggagagtgtttagttgttttgggcgatattttttttcgttttcgggtattagtttttgcgttttgttattcgtgggtcgcgttagggatatttttcgtttcgcgtttttgttttttttcgggtgttatattggttggtatagttcgtgaatttcgtttttttttttttggagttggttcgtttcgtcgtgattttcgcgtggttcgtttttgtggtcggagtttgtttcgcgtacgcgtttggggattagtttttgtttagagcgtcgggacggggagtttggcgatttttacgcgttagggattttttagcgcgcgttgttt

SEQ ID NO: 25396 - DNA, 539 bp, Artificial Sequence
  chemically treated genomic DNA (Homo sapiens) CpG-island No: 25396
aaacaacgcgcgctaaaaaatccctaacgcgtaaaaatcgccaaactccccgtcccgacgctctaaacaaaaactaatccccaaacgcgtacgcgaaacaaactccgaccacaaaaacgaaccacgcgaaaatcacgacgaaacgaaccaactccaaaaaaaaaaaaacgaaattcacgaactataccaaccaatataacacccgaaaaaaaacaaaaacgcgaaacgaaaaatatccctaacgcgacccacgaataacaaaacgcaaaaactaatacccgaaaacgaaaaaaaatatcgcccaaaacaactaaacactctccttatccccgaaaaaataaaaacgtacgaatcgctataaaaataaacgccgaaaaaaaccgcccgcaccccgcgaaccgaacgcgcatcaaacaaaaactcgccctccgctaaaacttacaacgcttacctatcgccgtcctccgactcctctctataaatccacgtatatcccaacgccaaaaacaacaacaacgaacccaaactcctacccaact

SEQ ID NO: 25397 - DNA, 745 bp, Artificial Sequence
  chemically treated genomic DNA (Homo sapiens) CpG-island No: 25397
  unsure (116, 569, 586, 610, 641)
ttcggttcgcgtcgttttatgtgattcggttcgatatggtgtcgttttttttcggggcggcggcggtggcggttcgggttgggtttcgcgtcgggtcggtttcgcggtcgtttatngggtagttagggtcgttcggggtttttcgggaacggcgggttcggcgagggcgagggcggagaggcgaggaagttgtaggaagggagggtggcgagggggaagcgaaggaaggggaaggggaagggaaaagcgagagcggggtaaggcggaagaggaagcggggcggaagggaagttcgggtcgtagacggcgaaggaggtagtcgggtcgggggttgacgcgggagcgagggtatgtttaagggaggaagtagagggaggtagaagcgtggaggaaggggcgagaggtatcgttaagggagtcgaggggagcgtaggggtcgggaaggaggtataaggaagagagtatgggaagaaggaggaatggagggttagggttaggcggcgggagggcgttaggtcgggaagagtatagggacgagggggttaggtttgggtcgatatcgcggggantaggggtggttatggtngtcgtcggtcggggaggaggaggnagaagaagaaggcggttcgggagtcgattgnttcgttcggtcgcggggtttgcgttttggcgtttgtcggaggagttgttgttgtttatttgtttttatttggatatgcgggttttcggtcgtttggtttaagtg

SEQ ID NO: 25398 - DNA, 745 bp, Artificial Sequence
  chemically treated genomic DNA (Homo sapiens) CpG-island No: 25398
  unsure (105, 136, 160, 177, 630)
cacttaaaccaaacgaccgaaaacccgcatatccaaataaaaacaaataaacaacaacaactcctccgacaaacgccaaaacgcaaaccccgcgaccgaacgaancaatcgactcccgaaccgccttcttcttctncctcctcctccccgaccgacgacnaccataaccacccctantccccgcgatatcgacccaaacctaaccccctcgtccctatactcttcccgacctaacgccctcccgccgcctaaccctaaccctccattcctccttcttcccatactctcttccttatacctccttcccgacccctacgctcccctcgactcccttaacgatacctctcgccccttcctccacgcttctacctccctctacttcctcccttaaacataccctcgctcccgcgtcaacccccgacccgactacctccttcgccgtctacgacccgaacttcccttccgccccgcttcctcttccgccttaccccgctctcgcttttcccttccccttccccttccttcgcttccccctcgccaccctcccttcctacaacttcctcgcctctccgccctcgccctcgccgaacccgccgttcccgaaaaaccccgaacgaccctaactacccnataaacgaccgcgaaaccgacccgacgcgaaacccaacccgaaccgccaccgccgccgccccgaaaaaaaacgacaccatatcgaaccgaatcacataaaacgacgcgaaccgaa

SEQ ID NO: 25399 - DNA, 745 bp, Artificial Sequence
  chemically treated genomic DNA (Homo sapiens) CpG-island No: 25399
  unsure (105, 136, 160, 177, 630)
tatttgggttaggcggtcgagggttcgtatgtttaggtaggagtagatgagtagtagtagttttttcggtaggcgttagagcgtaggtttcgcggtcgggcgggntagtcgattttcgagtcgttttttttttttnttttttttttttcggtcggcggtngttatggttatttttgnttttcgcgatgtcggtttaagtttgattttttcgtttttgtgtttttttcggtttggcgttttttcgtcgtttagttttgattttttatttttttttttttttatatttttttttttgtgtttttttttcggtttttgcgtttttttcgatttttttgacgatgtttttcgtttttttttttacgtttttgtttttttttgtttttttttttgggtatgttttcgttttcgcgttagttttcggttcggttgtttttttcgtcgtttgcggttcgggtttttttttcgtttcgttttttttttcgttttgtttcgttttcgttttttttttttttttttttttttttcgtttttttttcgttattttttttttttgtagttttttcgttttttcgttttcgttttcgtcgggttcgtcgttttcggggggtttcgagcggttttggttgtttnatgagcggtcgcggggtcggttcgacgcggagtttagttcgagtcgttatcgtcgtcgtttcgggaggaggcgatattatgtcggatcgggttatatggggcggcgcgggtcgag

SEQ ID NO: 25400 - DNA, 745 bp, Artificial Sequence
  chemically treated genomic DNA (Homo sapiens) CpG-island No: 25400
  unsure (116, 569, 586, 610, 641)
ctcgacccgcgccgccccatataacccgatccgacataatatcgcctcctcccgaaacgacgacgataacgactcgaactaaactccgcgtcgaaccgaccccgcgaccgctcatnaaacaaccaaaaccgctcgaaaccccccgaaaacgacgaacccgacgaaaacgaaaacgaaaaaacgaaaaaactacaaaaaaaaaaaataacgaaaaaaaaacgaaaaaaaaaaaaaaaaaaaaaaaaaacgaaaacgaaacaaaacgaaaaaaaaaacgaaacgaaaaaaaaacccgaaccgcaaacgacgaaaaaaacaaccgaaccgaaaactaacgcgaaaacgaaaacatacccaaaaaaaaaaacaaaaaaaaacaaaaacgtaaaaaaaaaaacgaaaaacatcgtcaaaaaaatcgaaaaaaacgcaaaaaccgaaaaaaaaacacaaaaaaaaaaatataaaaaaaaaaaaaaataaaaaatcaaaactaaacgacgaaaaaacgccaaaccgaaaaaaacacaaaaacgaaaaaatcaaacttaaaccgacatcgcgaaaancaaaaataaccataacnaccgccgaccgaaaaaaaaaaaanaaaaaaaaaaaacgactcgaaaatcgactancccgcccgaccgcgaaacctacgctctaacgcctaccgaaaaaactactactactcatctactcctacctaaacatacgaaccctcgaccgcctaacccaaata

SEQ ID NO: 25401 - DNA, 924 bp, Artificial Sequence
  chemically treated genomic DNA (Homo sapiens) CpG-island No: 25401
  unsure (193, 348, 750)
cgcgtcgtcgcggttttttgttttttcgtcgtcgcggttttttgttcgattcggttttttgtttatttattttcgcggtttttttatttttattgtcgtggttttatgtcgtcgcggttttttgttcgttgcggttgtttgtttttttcgatcgtcgcggtttttttattttcgtcgcggtggttttttgttngcggcggttttttgttttttaatttcgtggtttttttttcgtcgtttcgggtttatgttcgtcgcggttttttgtttttttgtcgtcgcggtttttcgttttttaatcgttttcgcggttttttgttcgtttcggtttttcgttttttcgtcgancgcggttttttgatttttgttttcggtgtcgcggttatttgttcgtcgcggttttttgttttttttcgtcgacgcggttttttgtttttcgcgattttttggcgttttcggtgtcgcggttatttgtttatcgcggttttttgtattttcgtcgtcgcggttttttttttttgtcgtcgcggttttttgtcggtttcggttttttgtttcgtcgtcgcgtttttttgttcgttgcggtttttatttttcgttgttgcggttttttgttcgatttggttttttgttttcgttttttttttcgttgtcgcggttttttttttttcgtcgcggttttttgtcgttgcggttttttgtttttttatttatcgtcgcggttttattaaattcgtcgttttggtaggntggtatatcgttttcgcggttttttgtttgtcgcggttttttatttttcgtcgtcgtcgcggttttttgttcgattcggttttttgtttttttatcgtcgcggttttttgttttatggttatttttagaagtgtgagtggaatagagtgaagggaaagttgtttttttcgaaag

SEQ ID NO: 25402 - DNA, 924 bp, Artificial Sequence
  chemically treated genomic DNA (Homo sapiens) CpG-island No: 25402
  unsure (175, 577, 732)
ctttcgaaaaaaacaactttcccttcactctattccactcacacttctaaaaataaccataaaacaaaaaaccgcgacgataaaaaaacaaaaaaccgaatcgaacaaaaaaccgcgacgacgacgaaaaataaaaaaccgcgacaaacaaaaaaccgcgaaaacgatataccancctaccaaaacgacgaatttaataaaaccgcgacgataaataaaaaaacaaaaaaccgcaacgacaaaaaaccgcgacgaaaaaaaaaaaaccgcgacaacgaaaaaaaaaacgaaaacaaaaaaccaaatcgaacaaaaaaccgcaacaacgaaaaataaaaaccgcaacgaacaaaaaaacgcgacgacgaaacaaaaaaccgaaaccgacaaaaaaccgcgacgacaaaaaaaaaaaaccgcgacgacgaaaatacaaaaaaccgcgataaacaaataaccgcgacaccgaaaacgccaaaaaatcgcgaaaaacaaaaaaccgcgtcgacgaaaaaaaacaaaaaaccgcgacgaacaaataaccgcgacaccgaaaacaaaaatcaaaaaaccgcgntcgacgaaaaaacgaaaaaccgaaacgaacaaaaaaccgcgaaaacgattaaaaaacgaaaaaccgcgacgacaaaaaaacaaaaaaccgcgacgaacataaacccgaaacgacgaaaaaaaaaccacgaaattaaaaaacaaaaaaccgccgcnaacaaaaaaccaccgcgacgaaaataaaaaaaccgcgacgatcgaaaaaaacaaacaaccgcaacgaacaaaaaaccgcgacgacataaaaccacgacaataaaaataaaaaaaccgcgaaaataaataaacaaaaaaccgaatcgaacaaaaaaccgcgacgacgaaaaaacaaaaaaccgcgacgacgcg

SEQ ID NO: 25403 - DNA, 924 bp, Artificial Sequence
  chemically treated genomic DNA (Homo sapiens) CpG-island No: 25403
  unsure (175, 577, 732)
ttttcgaagaaaatagttttttttttattttgttttatttatatttttgaggatggttatggggtaaaaagtcgcggcggtggggggataaaaagtcgggtcgagtaaaaagtcgcggcggcggcggggggtaaaaagtcgcggtaggtagaaagtcgcggaggcggtgtgttantttgttagggcggcgggtttgataaagtcgcggcggtgggtgggggggtaaaaagtcgtagcgataaaaagtcgcggcgggggggaaaaagtcgcggtagcgggggggggggcggggataaaaagttaggtcgggtaaaaagtcgtagtagcggggggtaaaagtcgtagcgggtagaaaggcgcggcggcggggtaaaaagtcgaggtcggtaaaaagtcgcggcggtagggggaaaaagtcgcggcggcgggggtgtaaaaagtcgcggtgggtaaataatcgcggtatcgggggcgttaaaaagtcgcggagggtaaaaagtcgcgtcggcgggggggggtaaaaagtcgcggcgggtaaataatcgcggtatcggaggtaggggttaaaaagtcgcgntcggcggaggagcgaaaagtcggggcgggtaaaaagtcgcgagggcggttgaggggcggggaatcgcggcggtaggggggtaaaaagtcgcggcgggtataaattcgaggcggcggggaaaaggttacggggttagggggtaaaaagtcgtcgtnggtaaaaagttatcgcggcgggggtaaaaaagtcgcggcggtcggggggggtaaatagtcgtagcgggtaaaaagtcgcggcggtataaagttacggtagtgggggtgaaaaagtcgcgggggtgggtgggtaaaaagtcgggtcgagtaaaaagtcgcggcggcgagggggtaaaaagtcgcggcgacgcg

SEQ ID NO: 25404 - DNA, 924 bp, Artificial Sequence
  chemically treated genomic DNA (Homo sapiens) CpG-island No: 25404
  unsure (193, 348, 750)
cgcgtcgccgcgactttttaccccctcgccgccgcgactttttactcgacccgactttttacccacccacccccgcgactttttcacccccactaccgtaactttataccgccgcgactttttacccgctacgactatttaccccccccgaccgccgcgacttttttacccccgccgcgataactttttaccnacgacgactttttaccccctaaccccgtaaccttttccccgccgcctcgaatttatacccgccgcgactttttacccccctaccgccgcgattccccgcccctcaaccgccctcgcgactttttacccgccccgacttttcgctcctccgccgancgcgactttttaacccctacctccgataccgcgattatttacccgccgcgactttttacccccccccgccgacgcgactttttaccctccgcgactttttaacgcccccgataccgcgattatttacccaccgcgactttttacacccccgccgccgcgactttttccccctaccgccgcgactttttaccgacctcgactttttaccccgccgccgcgcctttctacccgctacgacttttaccccccgctactacgactttttacccgacctaactttttatccccgcccccccccccgctaccgcgactttttcccccccgccgcgactttttatcgctacgactttttacccccccacccaccgccgcgactttatcaaacccgccgccctaacaaantaacacaccgcctccgcgactttctacctaccgcgactttttaccccccgccgccgccgcgactttttactcgacccgactttttatccccccaccgccgcgactttttaccccataaccatcctcaaaaatataaataaaacaaaataaaaaaaaaactattttcttcgaaaa

SEQ ID NO: 25405 - DNA, 1399 bp, Artificial Sequence
  chemically treated genomic DNA (Homo sapiens) CpG-island No: 25405
  unsure (240, 618, 693, 701, 743, 819, 843, 855, 883, 1325)
gtcgttatggatttttgttttcgttattgcgggtttttgcgattttttgttttcgtcgtcgttgttttttgttttcgttatcgcggttttttgtttttgttatcgcggttttttgttttcggtttcgcggaatttagtttttgtcgtcgtggttttttggggttttttgttttcgtcgtcgcggttttttgttgtcgcggttttttgcgttttttttttttcgtcgcggcggtttttttnttttttgttgtcgtagttttttgttttcgttatcgcgatttttttcgtcgcggttttttatggtttttggttttcggcgtcgcggttttttgcggttttttgtcgtcgcgggttttttttgtcgcggttttttgtttttatcgttcgggttttttgcgtcgcggttttttgttgttatttgtttttgttatcgcggcgttttgttttcgtagtcgcggttttttgttttttacgcggttttttgttttcgttatcgtggttttttattattttagtcgttttttgaatttttcgtcgcgggtttttgtcgtcgcggttttttgtttttttcgtcgcggttttttatttttatagcggcggttttttgtttttgttttntgagggtttttgcggttttatgttttcgttgtcgtggttttttgtcgtcgcggtttttggtttttttcgtcgcgngttttttngcggtttttggtatttaacgtcgcggttttttggggtttttnggttttcgttatcggggttttttttttttatcgtcgtaggtttttttcgtttttgttttttgttttcgttatcgtnggttttttattttcgttatcgcgnattttttgtttntcgtcgtcgcggttttttgttttcgatngttgcggttttttacggttttttgttttcgtcgtcgcggtttgttgttttcgttatcgcggtttgttgtttttattatcgcggttttttgtttttatcgtcgcgggtttgagggcgggatcggtagattcggttgttagttttatcggcgttttggttaaggtagcgtcgaggggcgttttttgtttagtttttttggttcgggcgttttttgtttagacgttggcgtttcgggttttgtttttgggtcgttgtagtttgtatagagtagcgttgcgttcggtcgcgttgggagagaagaagaagggcggtggcgggggtgacgcggttatcgcggagggaggtgtaggggtcgcggttagtcggatattgtagtagtgcgggtagttttagaagtttatcggtattttcgttggtagtttgcgcgggttgcgtattaagtngcgttgtgtttaaggattttatttagtaggagatacggatcgtggaggtaagggggtcggggattagggttggg

SEQ ID NO: 25406 - DNA, 1399 bp, Artificial Sequence
  chemically treated genomic DNA (Homo sapiens) CpG-island No: 25406
  unsure (75, 517, 545, 557, 581, 657, 699, 707, 782, 1160)
cccaaccctaatccccgacccccttacctccacgatccgtatctcctactaaataaaatccttaaacacaacgcnacttaatacgcaacccgcgcaaactaccaacgaaaataccgataaacttctaaaactacccgcactactacaatatccgactaaccgcgacccctacacctccctccgcgataaccgcgtcacccccgccaccgcccttcttcttctctcccaacgcgaccgaacgcaacgctactctatacaaactacaacgacccaaaaacaaaacccgaaacgccaacgtctaaacaaaaaacgcccgaaccaaaaaaactaaacaaaaaacgcccctcgacgctaccttaaccaaaacgccgataaaactaacaaccgaatctaccgatcccgccctcaaacccgcgacgataaaaacaaaaaaccgcgataataaaaacaacaaaccgcgataacgaaaacaacaaaccgcgacgacgaaaacaaaaaaccgtaaaaaaccgcaacnatcgaaaacaaaaaaccgcgacgacganaaacaaaaaatncgcgataacgaaaataaaaaaccnacgataacgaaaacaaaaaacaaaaacgaaaaaaacctacgacgataaaaaaaaaaaaccccgataacgaaaaccnaaaaaccccaaaaaaccgcgacgttaaataccaaaaaccgcnaaaaaacncgcgacgaaaaaaaccaaaaaccgcgacgacaaaaaaccacgacaacgaaaacataaaaccgcaaaaaccctcanaaaacaaaaacaaaaaaccgccgctataaaaataaaaaaccgcgacgaaaaaaacaaaaaaccgcgacgacaaaaacccgcgacgaaaaattcaaaaaacgactaaaataataaaaaaccacgataacgaaaacaaaaaaccgcgtaaaaaacaaaaaaccgcgactacgaaaacaaaacgccgcgataacaaaaacaaataacaacaaaaaaccgcgacgcaaaaaacccgaacgataaaaacaaaaaaccgcgacaaaaaaaacccgcgacgacaaaaaaccgcaaaaaaccgcgacgccgaaaaccaaaaaccataaaaaaccgcgacgaaaaaaatcgcgataacgaaaacaaaaaactacgacaacaaaaaanaaaaaaaccgccgcgacgaaaaaaaaaaaacgcaaaaaaccgcgacaacaaaaaaccgcgacgacgaaaacaaaaaaccccaaaaaaccacgacgacaaaaactaaattccgcgaaaccgaaaacaaaaaaccgcgataacaaaaacaaaaaaccgcgataacgaaaacaaaaaacaacgacgacgaaaacaaaaaatcgcaaaaacccgcaataacgaaaacaaaaatccataacgac

SEQ ID NO: 25407 - DNA, 1399 bp, Artificial Sequence
  chemically treated genomic DNA (Homo sapiens) CpG-island No: 25407
  unsure (75, 517, 545, 557, 581, 657, 699, 707, 782, 1160)
tttagttttggttttcgatttttttatttttacggttcgtattttttgttgggtgaggtttttggatatagcgtnatttggtgcgtagttcgcgtaggttgttaacggagatgtcgatgagtttttggagttgttcgtattgttgtagtgttcggttggtcgcggtttttgtattttttttcgcgatagtcgcgttattttcgttatcgttttttttttttttttttaacgcggtcgagcgtagcgttgttttatgtaggttgtagcggtttaggagtagagttcggggcgttagcgtttaggtaaggaacgttcgaattaggagagttggataaggagcgtttttcggcgttgttttagttaggacgtcggtagagttggtagtcgagtttgtcgatttcgtttttagattcgcggcggtgggggtaaaaagtcgcggtgatgggggtaataagtcgcggtggcgggggtaataagtcgcggcggcggaggtaaaaagtcgtaaaaagtcgtagtngtcgggggtaaaaagtcgcgacggcggngggtaaaaagtncgcggtggcgggggtaagaagttngcggtggcgggggtaaaaagtaggggcgggaaaaatttgcggcggtgggggaaaaaagtttcggtggcggggattnaaaagttttaaaaagtcgcggcgttgggtgttaaaagtcgtnaaaaagtncgcggcggagggggttaaaagtcgcggcggtaaaaagttacgatagcggggatataaagtcgtaaaaatttttangaggtaggggtagaaagtcgtcgttgtgggggtaaaaagtcgcggcgaggggggtaagaagtcgcggcggtaaaaattcgcggcggggggtttaaaaagcggttggggtgataaaaagttacggtggcggaggtaggaagtcgcgtagggggtaaggagtcgcggttgcgggggtaaaacgtcgcggtggtagggataaatagtagtaaaaagtcgcggcgtaaaaagttcgggcggtgggggtaagaagtcgcggtaggaaaaattcgcggcggtaaaaagtcgtaaaaagtcgcggcgtcgggggttaaaagttataaaaagtcgcggcggaaaaagtcgcggtggcgggggtaaaaagttgcggtagtagggggnaaaaaagtcgtcgcggcggggggagaaagacgtaaaaagtcgcggtagtaaaaagtcgcggcggcgagggtaaagagttttaaaaagttacggcggtaggggttaaatttcgcgaggtcgggggtagaaagtcgcggtggtaggggtagaaagtcgcggtggcgggggtagaaagtaacggcggcgggggtaaaaagtcgtaaaaattcgtagtggcgggggtaaaaatttatggcggt

SEQ ID NO: 25408 - DNA, 1399 bp, Artificial Sequence
  chemically treated genomic DNA (Homo sapiens) CpG-island No: 25408
  unsure (240, 618, 693, 701, 743, 819, 843, 855, 883, 1325)
accgccataaatttttacccccgccactacgaatttttacgactttttacccccgccgccgttactttctacccccgccaccgcgactttctacccctaccaccgcgactttctacccccgacctcgcgaaatttaacccctaccgccgtaactttttaaaactctttaccctcgccgccgcgactttttactaccgcgactttttacgtctttctccccccgccgcgacgacttttttnccccctactaccgcaactttttacccccgccaccgcgactttttccgccgcgactttttataacttttaacccccgacgccgcgactttttacgactttttaccgccgcgaatttttcctaccgcgacttcttacccccaccgcccgaactttttacgccgcgactttttactactatttatccctaccaccgcgacgttttacccccgcaaccgcgactccttaccccctacgcgacttcctacctccgccaccgtaactttttatcaccccaaccgctttttaaaccccccgccgcgaatttttaccgccgcgacttcttacccccctcgccgcgactttttacccccacaacgacgactttctacccctacctcntaaaaatttttacgactttatatccccgctatcgtaactttttaccgccgcgacttttaaccccctccgccgcgnactttttnacgacttttaacacccaacgccgcgactttttaaaacttttnaatccccgccaccgaaacttttttcccccaccgccgcaaatttttcccgcccctactttttacccccgccaccgcnaacttcttacccccgccaccgcgnactttttacccnccgccgtcgcgactttttacccccgacnactacgactttttacgactttttacctccgccgccgcgacttattacccccgccaccgcgacttattacccccatcaccgcgactttttacccccaccgccgcgaatctaaaaacgaaatcgacaaactcgactaccaactctaccgacgtcctaactaaaacaacgccgaaaaacgctccttatccaactctcctaattcgaacgttccttacctaaacgctaacgccccgaactctactcctaaaccgctacaacctacataaaacaacgctacgctcgaccgcgttaaaaaaaaaaaaaaaaaacgataacgaaaataacgcgactatcgcgaaaaaaaatacaaaaaccgcgaccaaccgaacactacaacaatacgaacaactccaaaaactcatcgacatctccgttaacaacctacgcgaactacgcaccaaatnacgctatatccaaaaacctcacccaacaaaaaatacgaaccgtaaaaataaaaaaatcgaaaaccaaaactaaa

SEQ ID NO: 25409 - DNA, 585 bp, Artificial Sequence
  chemically treated genomic DNA (Homo sapiens) CpG-island No: 25409
  unsure (58, 200..201, 370, 539)
agaaagcgcgtgcgttacggaacgcgcgtgcgcgttgcggttagcgtcgcggtttganggcgtagcgggagggggatcgcgaaagggtagcgtcgagaggaacgagtcgggagacgtcggacggtcgagcggtagggcgttcgcgcgcgtttattagtggtcggaggagaaggttttcgcggaggtcgcgttgttcgttnntttttttttggggaggttcgcgttttcgttgttcgcgtttgcgtcgttcgtcggttttaggaacgcgtttttttcgtcggcgcgcgttttcgtagttatcgttatttattagtttcggtattaatagtagcgtcgttgttatcgtttattttttgtcgtcgttattatnagttatttttttttttttcgttgttttttttcgttttcgtttttgtcgattattaggtaagcgtcgcggtttcgaaatttgtttcgtcgttcgtttttgtgtatttttgcgtcgtcgtttttcgtttttttttttcgtagattggggtttcgtgcgtcgggtatcggtncggggttatcgtagggtttttttttgttttttttgttcgggggttg

SEQ ID NO: 25410 - DNA, 585 bp, Artificial Sequence
  chemically treated genomic DNA (Homo sapiens) CpG-island No: 25410
  unsure (47, 216, 385..386, 528)
caacccccgaacaaaaaaaacaaaaaaaaaccctacgataaccccgnaccgatacccgacgcacgaaaccccaatctacgaaaaaaaaaaacgaaaaacgacgacgcaaaaatacacaaaaacgaacgacgaaacaaatttcgaaaccgcgacgcttacctaataatcgacaaaaacgaaaacgaaaaaaaacaacgaaaaaaaaaaaaataactnataataacgacgacaaaaaataaacgataacaacgacgctactattaataccgaaactaataaataacgataactacgaaaacgcgcgccgacgaaaaaaacgcgttcctaaaaccgacgaacgacgcaaacgcgaacaacgaaaacgcgaacctccccaaaaaaaaannaacgaacaacgcgacctccgcgaaaaccttctcctccgaccactaataaacgcgcgcgaacgccctaccgctcgaccgtccgacgtctcccgactcgttcctctcgacgctaccctttcgcgatccccctcccgctacgccntcaaaccgcgacgctaaccgcaacgcgcacgcgcgttccgtaacgcacgcgctttct

SEQ ID NO: 25411 - DNA, 585 bp, Artificial Sequence
  chemically treated genomic DNA (Homo sapiens) CpG-island No: 25411
  unsure (47, 216, 385..386, 528)
tagttttcgagtaggggaggtagggaggggttttgcggtggtttcgnatcgatgttcggcgtacgaagttttagtttgcggagagggagggcgaggggcggcggcgtaggggtgtatagaggcggacggcgaggtagatttcggagtcgcggcgtttatttgatagtcgatagaggcgaggacgggagaggatagcggaggaggagaaggtggttngtggtggcggcggtagaaggtgggcggtggtagcggcgttgttgttggtgtcggagttggtgggtggcggtgattgcgagggcgcgcgtcggcgaagagggcgcgtttttgaggtcggcgggcggcgtaggcgcgagtagcgggaacgcgagtttttttaggggagggnnggcgggtagcgcggttttcgcgggagttttttttttcggttattagtgggcgcgcgcgagcgttttgtcgttcggtcgttcggcgtttttcggttcgtttttttcggcgttgttttttcgcggtttttttttcgttacgttnttaggtcgcggcgttgatcgtagcgcgtacgcgcgtttcgtggcgtacgcgtttttt

SEQ ID NO: 25412 - DNA, 585 bp, Artificial Sequence
  chemically treated genomic DNA (Homo sapiens) CpG-island No: 25412
  unsure (58, 200..201, 370, 539)
aaaaaacgcgtacgccacgaaacgcgcgtacgcgctacgatcaacgccgcgacctaanaacgtaacgaaaaaaaaaccgcgaaaaaacaacgccgaaaaaaacgaaccgaaaaacgccgaacgaccgaacgacaaaacgctcgcgcgcgcccactaataaccgaaaaaaaaaactcccgcgaaaaccgcgctacccgccnnccctcccctaaaaaaactcgcgttcccgctactcgcgcctacgccgcccgccgacctcaaaaacgcgccctcttcgccgacgcgcgccctcgcaatcaccgccacccaccaactccgacaccaacaacaacgccgctaccaccgcccaccttctaccgccgccaccacnaaccaccttctcctcctccgctatcctctcccgtcctcgcctctatcgactatcaaataaacgccgcgactccgaaatctacctcgccgtccgcctctatacacccctacgccgccgcccctcgccctccctctccgcaaactaaaacttcgtacgccgaacatcgatncgaaaccaccgcaaaacccctccctacctcccctactcgaaaacta

SEQ ID NO: 25413 - DNA, 646 bp, Artificial Sequence
  chemically treated genomic DNA (Homo sapiens) CpG-island No: 25413
  unsure (522, 537)
ggttcgtcgcgaggggttgtagagcggtttagggatcgatttaagtatcgttttttttttttcgtttttagatagagttgggcgcggggttttttttttagatggagcgagggtttcggggtggtttcggaaaaggggagttcgcggttacggttacgtattgttatttcgcgagtagagatgttattttttgtttttggaggaaagggagttcggtggggatgagcgtatttagtttaatgttgggaataaagcgtatttcgcgtttttgcgatttcgttttattttgaaatgtgttggcgttttggtggggtcgttgcggtgggtaaggtcgggggcgttgttaatggaggaattttagggggacggtttttcgtaggaaattttattttggttttgcgcgcgttttaaggaaatggtttttttttaggatttcgagggatgtagtttttgcgcggatgacggtggggtgttgaattagtcggtgcgtttttggaaatgtttgggtacggattttggggnttatcgacgattttntttttatttttagtaggcgggagtttttatatttcgagcgagtgattttttttattttttggcgtttatatatttgtaattttaaattttcgttttagaatggtttagg

SEQ ID NO: 25414 - DNA, 646 bp, Artificial Sequence
  chemically treated genomic DNA (Homo sapiens) CpG-island No: 25414
  unsure (110, 125)
cctaaaccattctaaaacgaaaatttaaaattacaaatatataaacgccaaaaaataaaaaaaatcactcgctcgaaatataaaaactcccgcctactaaaaataaaaanaaaatcgtcgataanccccaaaatccgtacccaaacatttccaaaaacgcaccgactaattcaacaccccaccgtcatccgcgcaaaaactacatccctcgaaatcctaaaaaaaaaccatttccttaaaacgcgcgcaaaaccaaaataaaatttcctacgaaaaaccgtccccctaaaattcctccattaacaacgcccccgaccttacccaccgcaacgaccccaccaaaacgccaacacatttcaaaataaaacgaaatcgcaaaaacgcgaaatacgctttattcccaacattaaactaaatacgctcatccccaccgaactccctttcctccaaaaacaaaaaataacatctctactcgcgaaataacaatacgtaaccgtaaccgcgaactccccttttccgaaaccaccccgaaaccctcgctccatctaaaaaaaaaaccccgcgcccaactctatctaaaaacgaaaaaaaaaaaacgatacttaaatcgatccctaaaccgctctacaacccctcgcgacgaacc

SEQ ID NO: 25415 - DNA, 646 bp, Artificial Sequence
  chemically treated genomic DNA (Homo sapiens) CpG-island No: 25415
  unsure (110, 125)
tttggattattttgagacggaggtttggagttataggtgtgtgagcgttagagggtgagaggggttattcgttcggaatgtaagagttttcgtttgttgggaatgggganggagtcgtcgatggnttttaggattcgtgtttagatatttttagaggcgtatcggttggtttagtattttatcgttattcgcgtaaaagttgtatttttcgaggttttggagggaagttatttttttaaagcgcgcgtagagttaggatagagttttttacgaaggatcgtttttttgaggtttttttattaatagcgttttcggttttgtttatcgtagcggttttattaaagcgttaatatattttaaaatggagcgaaatcgtagaagcgcggagtgcgttttgtttttagtattgggttaaatgcgtttatttttatcgggtttttttttttttaaaggtaggaggtgatatttttgttcgcgagatggtaatacgtagtcgtggtcgcgggtttttttttttcggggttatttcgagattttcgttttatttggaaggggaatttcgcgtttagttttgtttgggggcgagggaggagagacgatgtttgaatcgatttttgagtcgttttgtaatttttcgcggcgggtt

SEQ ID NO: 25416 - DNA, 646 bp, Artificial Sequence
  chemically treated genomic DNA (Homo sapiens) CpG-island No: 25416
  unsure (522, 537)
aacccgccgcgaaaaattacaaaacgactcaaaaatcgattcaaacatcgtctctcctccctcgcccccaaacaaaactaaacgcgaaattccccttccaaataaaacgaaaatctcgaaataaccccgaaaaaaaaaaacccgcgaccacgactacgtattaccatctcgcgaacaaaaatatcacctcctacctttaaaaaaaaaaaaacccgataaaaataaacgcatttaacccaatactaaaaacaaaacgcactccgcgcttctacgatttcgctccattttaaaatatattaacgctttaataaaaccgctacgataaacaaaaccgaaaacgctattaataaaaaaacctcaaaaaaacgatccttcgtaaaaaactctatcctaactctacgcgcgctttaaaaaaataacttccctccaaaacctcgaaaaatacaacttttacgcgaataacgataaaatactaaaccaaccgatacgcctctaaaaatatctaaacacgaatcctaaaanccatcgacgactccntccccattcccaacaaacgaaaactcttacattccgaacgaataacccctctcaccctctaacgctcacacacctataactccaaacctccgtctcaaaataatccaaa

SEQ ID NO: 25417 - DNA, 592 bp, Artificial Sequence
  chemically treated genomic DNA (Homo sapiens) CpG-island No: 25417
ttcgcgtcgttaattagtcgtttttagagcgtgggtggtaggcgtggttttgttcggggtcggtcgttttttttacgttttcggaggtttcggcggaaggcgtgtaggcggtttttgggcggcggttgtaggggagatagtggaggggttcggcgtttttgttcgttcgtacgtgttcggggcggggcggttggggttcgacgggcggggtcgggggcggtggcggcgggggcgtggtcgggcggttacgtgacgggcggcgcggttattaagtcgcgcggtagttgttcgtagtcggagttggtgtttcgttcgagatttagcgtttaggcgtgtcgtttcgagaggagtcgcgcgaaggttatttcgcgttcgtcgttcgtcgttcgtcgttttcgtgggttcgtttgttagttagttcgtgcgttcgagtttttcgcgtttcgtcgtagtttcggttaatcgagcgttatgaattagatagagttcggcgtgtagtataattacgtgtacgacgaggatgagtatatgatttaggaggaggagtgggatcgcgatttgtttttggatttagtttgggagaagtagtaga

SEQ ID NO: 25418 - DNA, 592 bp, Artificial Sequence
  chemically treated genomic DNA (Homo sapiens) CpG-island No: 25418
tctactacttctcccaaactaaatccaaaaacaaatcgcgatcccactcctcctcctaaatcatatactcatcctcgtcgtacacgtaattatactacacgccgaactctatctaattcataacgctcgattaaccgaaactacgacgaaacgcgaaaaactcgaacgcacgaactaactaacaaacgaacccacgaaaacgacgaacgacgaacgacgaacgcgaaataaccttcgcgcgactcctctcgaaacgacacgcctaaacgctaaatctcgaacgaaacaccaactccgactacgaacaactaccgcgcgacttaataaccgcgccgcccgtcacgtaaccgcccgaccacgcccccgccgccaccgcccccgaccccgcccgtcgaaccccaaccgccccgccccgaacacgtacgaacgaacaaaaacgccgaacccctccactatctcccctacaaccgccgcccaaaaaccgcctacacgccttccgccgaaacctccgaaaacgtaaaaaaaacgaccgaccccgaacaaaaccacgcctaccacccacgctctaaaaacgactaattaacgacgcgaa

SEQ ID NO: 25419 - DNA, 592 bp, Artificial Sequence
  chemically treated genomic DNA (Homo sapiens) CpG-island No: 25419
tttgttgttttttttaggttgggtttaggagtaggtcgcggttttatttttttttttggattatgtatttattttcgtcgtatacgtagttgtattgtacgtcgggttttatttggtttatggcgttcggttggtcggggttgcggcggggcgcgaggggttcggacgtacgggttgattggtaaacggatttacggaggcggcgggcggcgggcggcgggcgcggggtgattttcgcgcggtttttttcggggcgatacgtttgggcgttgggtttcgggcgaagtattagtttcggttgcgagtagttgtcgcgcggtttaatagtcgcgtcgttcgttacgtggtcgttcggttacgttttcgtcgttatcgttttcggtttcgttcgtcgggttttagtcgtttcgtttcgagtacgtgcgggcggataagggcgtcgggtttttttattgttttttttgtagtcgtcgtttagaggtcgtttgtacgtttttcgtcgaggttttcgggaacgtgaggggagcggtcggtttcgagtagagttacgtttgttatttacgttttgagagcggttggttagcggcgcggg

SEQ ID NO: 25420 - DNA, 592 bp, Artificial Sequence
  chemically treated genomic DNA (Homo sapiens) CpG-island No: 25420
cccgcgccgctaaccaaccgctctcaaaacgtaaataacaaacgtaactctactcgaaaccgaccgctcccctcacgttcccgaaaacctcgacgaaaaacgtacaaacgacctctaaacgacgactacaaaaaaaacaataaaaaaacccgacgcccttatccgcccgcacgtactcgaaacgaaacgactaaaacccgacgaacgaaaccgaaaacgataacgacgaaaacgtaaccgaacgaccacgtaacgaacgacgcgactattaaaccgcgcgacaactactcgcaaccgaaactaatacttcgcccgaaacccaacgcccaaacgtatcgccccgaaaaaaaccgcgcgaaaatcaccccgcgcccgccgcccgccgcccgccgcctccgtaaatccgtttaccaatcaacccgtacgtccgaacccctcgcgccccgccgcaaccccgaccaaccgaacgccataaaccaaataaaacccgacgtacaatacaactacgtatacgacgaaaataaatacataatccaaaaaaaaaaataaaaccgcgacctactcctaaacccaacctaaaaaaaacaacaaa

SEQ ID NO: 25421 - DNA, 950 bp, Artificial Sequence
  chemically treated genomic DNA (Homo sapiens) CpG-island No: 25421
taggcgcgtttttgtagtcggtcggtcggcgcgcgggatcgcggggtcgcgcgcgggcgtcgcgtttttttcgtttcgttttcgtttttaacgtgtcgtcgtcgtcgttcgttggcgttttagttcgcgcgttcgtcggcgttcggcggtttttcgttggtaaagttgcgcggtcgtttcgaaggggacgtcgtacggtttttcgtttcggcgtcgtcgtcgtttttttaggtcgtcgcgcgggaaggtttagtcggtggtttcgtttttttatttgttcggagttttcgcgcgcgcgttcgttcgatcgttcgtttttttttttttcgcgttcgtttttttttttttttttcgttttttcgttttttcgcgcggaagtttttttttttcgtgttgttcgcgttcgttcgttcgcgtttttttttttgttgggttcggcggagcggggcggtcggtagtttttttcgtttttttttattcgcgtttcggcggaggcggcggcggcgtttcgcgtttcgatttattttaatatggtacggacgtagggcgtatgcgttcgcgtttttttatttttagtttcgcggttttttaggtagtttgcgtttttcgcgtcgcgttcgtggagttttcgggttcggttgtttcgttttcgttttagcgttattttttttggttggggtcgcgcgggaggtaaggatttcgcgggttggtgtgtcgggggttcggcgtcgcgggttatttacgtttttagttagtaattcggcgcggacggtttcgaggtcgtggcgtaggatacgcggcggcgtttcgggttttcgacggcgttgtggtttcgagcggaacggttcggaagaggagacgcgttttcgggaatttagtgttcgttttggtttagtttcgatttagtttgcgttttatttcgggttgtagatagagcggggggggatttt

SEQ ID NO: 25422 - DNA, 950 bp, Artificial Sequence
  chemically treated genomic DNA (Homo sapiens) CpG-island No: 25422
aaaatccccccccgctctatctacaacccgaaataaaacgcaaactaaatcgaaactaaaccaaaacgaacactaaattcccgaaaacgcgtctcctcttccgaaccgttccgctcgaaaccacaacgccgtcgaaaacccgaaacgccgccgcgtatcctacgccacgacctcgaaaccgtccgcgccgaattactaactaaaaacgtaaataacccgcgacgccgaacccccgacacaccaacccgcgaaatccttacctcccgcgcgaccccaaccaaaaaaaataacgctaaaacgaaaacgaaacaaccgaacccgaaaactccacgaacgcgacgcgaaaaacgcaaactacctaaaaaaccgcgaaactaaaaataaaaaaacgcgaacgcatacgccctacgtccgtaccatattaaaataaatcgaaacgcgaaacgccgccgccgcctccgccgaaacgcgaataaaaaaaaacgaaaaaaactaccgaccgccccgctccgccgaacccaacaaaaaaaaaaacgcgaacgaacgaacgcgaacaacacgaaaaaaaaaaacttccgcgcgaaaaaacgaaaaaacgaaaaaaaaaaaaaaaaacgaacgcgaaaaaaaaaaaaacgaacgatcgaacgaacgcgcgcgcgaaaactccgaacaaataaaaaaacgaaaccaccgactaaaccttcccgcgcgacgacctaaaaaaacgacgacgacgccgaaacgaaaaaccgtacgacgtccccttcgaaacgaccgcgcaactttaccaacgaaaaaccgccgaacgccgacgaacgcgcgaactaaaacgccaacgaacgacgacgacgacacgttaaaaacgaaaacgaaacgaaaaaaacgcgacgcccgcgcgcgaccccgcgatcccgcgcgccgaccgaccgactacaaaaacgcgccta

SEQ ID NO: 25423 - DNA, 950 bp, Artificial Sequence
  chemically treated genomic DNA (Homo sapiens) CpG-island No: 25423
gggattttttttcgttttgtttataattcgaggtgaggcgtaggttggatcggggttgggttagggcgggtattgggttttcggggacgcgttttttttttcgggtcgtttcgttcggggttatagcgtcgtcgggggttcgaggcgtcgtcgcgtgttttgcgttacggtttcggggtcgttcgcgtcgagttgttggttgggggcgtgggtggttcgcggcgtcggattttcggtatattagttcgcggagtttttgtttttcgcgcggttttagttaggagggatggcgttggggcgggagcggggtagtcgggttcgggagttttacgggcgcggcgcgaggggcgtaggttgtttggaggatcgcggagttgggggtgggggggcgcgggcgtatgcgttttgcgttcgtgttatattggaatgagtcggagcgcggagcgtcgtcgtcgttttcgtcggagcgcgggtggaggggggcggggagagttgtcggtcgtttcgtttcgtcgaatttagtaggaaggagggcgcgagcgggcgagcgcgggtagtacgggaggaaaaagttttcgcgcgggggagcgaaaagacggaaagaaagaaagaaaacgagcgcgagagggggaaaagcgagcgatcgagcgagcgcgcgcgcgaaaatttcgggtaggtaaaaaagcggggttatcggttgggttttttcgcgcggcggtttggaggggcggcggcggcgtcggggcgggggatcgtacggcgtttttttcgaagcggtcgcgtaattttgttaacgggaaatcgtcgggcgtcggcgggcgcgcgggttgaggcgttaacgggcggcggcggcggtacgttgggggcgggggcggggcggggggagcgcggcgttcgcgcgcggtttcgcggtttcgcgcgtcggtcggtcggttgtaggggcgcgtttg

SEQ ID NO: 25424 - DNA, 950 bp, Artificial Sequence
  chemically treated genomic DNA (Homo sapiens) CpG-island No: 25424
caaacgcgcccctacaaccgaccgaccgacgcgcgaaaccgcgaaaccgcgcgcgaacgccgcgctccccccgccccgcccccgcccccaacgtaccgccgccgccgcccgttaacgcctcaacccgcgcgcccgccgacgcccgacgatttcccgttaacaaaattacgcgaccgcttcgaaaaaaacgccgtacgatcccccgccccgacgccgccgccgcccctccaaaccgccgcgcgaaaaaacccaaccgataaccccgcttttttacctacccgaaattttcgcgcgcgcgctcgctcgatcgctcgcttttccccctctcgcgctcgttttctttctttctttccgtcttttcgctcccccgcgcgaaaactttttcctcccgtactacccgcgctcgcccgctcgcgccctccttcctactaaattcgacgaaacgaaacgaccgacaactctccccgcccccctccacccgcgctccgacgaaaacgacgacgacgctccgcgctccgactcattccaatataacacgaacgcaaaacgcatacgcccgcgcccccccacccccaactccgcgatcctccaaacaacctacgcccctcgcgccgcgcccgtaaaactcccgaacccgactaccccgctcccgccccaacgccatccctcctaactaaaaccgcgcgaaaaacaaaaactccgcgaactaatataccgaaaatccgacgccgcgaaccacccacgcccccaaccaacaactcgacgcgaacgaccccgaaaccgtaacgcaaaacacgcgacgacgcctcgaacccccgacgacgctataaccccgaacgaaacgacccgaaaaaaaaaacgcgtccccgaaaacccaatacccgccctaacccaaccccgatccaacctacgcctcacctcgaattataaacaaaacgaaaaaaaatccc

SEQ ID NO: 25425 - DNA, 627 bp, Artificial Sequence
  chemically treated genomic DNA (Homo sapiens) CpG-island No: 25425
tgttggcgcggcgatttgttcgtcgtgcggtcggcgttttcggtcgaggatatgttggcgcggcgagcgttgggcgcggcgtgggggtttggttttttggtcgggaggcggcggatacggcgggggagcggggagttgtaggttcggggtagagtaggcgagcggggtcggagcgcgagcggtcgtcggtgggtcggagtttagtttggttggttggttggttgggacgcgggggcgttgttgttcgtgtttttagaggttgcggtcgtcgcggtgtttcgtcggtagtagaaagttttcgattcggatttaaatttttgttaaattcgtagcgaatttggtcgtcgggttacgtggcgtgcgttttcgaatttttttttcgttttttttgtttttttttttcgttcgtcgggtattttaaagggattagaggttttcgtggttagtttcgtcgcggggcgggggggatttcgggtttttttcgtcgaagttttcgggatcggtttttatcgagatatcgcggtcgtcggaaattttagttaggcgtatttggacgtataggttttaggtttatttttttttatttttttggattgtaaattgtttagcgtcggttttttttttttt

SEQ ID NO: 25426 - DNA, 627 bp, Artificial Sequence
  chemically treated genomic DNA (Homo sapiens) CpG-island No: 25426
aaaaaaaaaaaaaccgacgctaaacaatttacaatccaaaaaaataaaaaaaaataaacctaaaacctatacgtccaaatacgcctaactaaaatttccgacgaccgcgatatctcgataaaaaccgatcccgaaaacttcgacgaaaaaaacccgaaatcccccccgccccgcgacgaaactaaccacgaaaacctctaatccctttaaaatacccgacgaacgaaaaaaaaaaacaaaaaaaacgaaaaaaaaattcgaaaacgcacgccacgtaacccgacgaccaaattcgctacgaatttaacaaaaatttaaatccgaatcgaaaactttctactaccgacgaaacaccgcgacgaccgcaacctctaaaaacacgaacaacaacgcccccgcgtcccaaccaaccaaccaaccaaactaaactccgacccaccgacgaccgctcgcgctccgaccccgctcgcctactctaccccgaacctacaactccccgctcccccgccgtatccgccgcctcccgaccaaaaaaccaaacccccacgccgcgcccaacgctcgccgcgccaacatatcctcgaccgaaaacgccgaccgcacgacgaacaaatcgccgcgccaaca

SEQ ID NO: 25427 - DNA, 627 bp, Artificial Sequence
  chemically treated genomic DNA (Homo sapiens) CpG-island No: 25427
aagaggagaaaaatcggcgttgggtagtttgtaatttaggaaaatagggaaggataaatttgaagtttgtgcgtttaggtgcgtttggttagggttttcgacggtcgcggtgtttcggtggggatcggtttcggaggtttcggcgaggaggattcggagtttttttcgtttcgcggcggaattaattacggaggtttttggtttttttaaggtgttcggcgagcggagaaagggagtagagggggcgggaggagggttcgggagcgtacgttacgtgattcggcggttaagttcgttgcgagtttgatagaagtttgaattcgagtcgggggttttttgttgtcggcggggtatcgcggcggtcgtagtttttgagagtacgaatagtagcgttttcgcgttttagttagttagttagttagattggatttcggtttatcgacggtcgttcgcgtttcggtttcgttcgtttgttttgtttcggatttgtagtttttcgttttttcgtcgtgttcgtcgtttttcggttagagagttaagtttttacgtcgcgtttagcgttcgtcgcgttagtatgttttcgatcgagagcgtcggtcgtacggcggataagtcgtcgcgttagta

SEQ ID NO: 25428 - DNA, 627 bp, Artificial Sequence
  chemically treated genomic DNA (Homo sapiens) CpG-island No: 25428
tactaacgcgacgacttatccgccgtacgaccgacgctctcgatcgaaaacatactaacgcgacgaacgctaaacgcgacgtaaaaacttaactctctaaccgaaaaacgacgaacacgacgaaaaaacgaaaaactacaaatccgaaacaaaacaaacgaacgaaaccgaaacgcgaacgaccgtcgataaaccgaaatccaatctaactaactaactaactaaaacgcgaaaacgctactattcgtactctcaaaaactacgaccgccgcgataccccgccgacaacaaaaaacccccgactcgaattcaaacttctatcaaactcgcaacgaacttaaccgccgaatcacgtaacgtacgctcccgaaccctcctcccgccccctctactccctttctccgctcgccgaacaccttaaaaaaaccaaaaacctccgtaattaattccgccgcgaaacgaaaaaaactccgaatcctcctcgccgaaacctccgaaaccgatccccaccgaaacaccgcgaccgtcgaaaaccctaaccaaacgcacctaaacgcacaaacttcaaatttatccttccctattttcctaaattacaaactacccaacgccgatttttctcctctt

SEQ ID NO: 25429 - DNA, 572 bp, Artificial Sequence
  chemically treated genomic DNA (Homo sapiens) CpG-island No: 25429
  unsure (298)
gtgcgtataaaaataaaaaagatttcgcgcgttggtggggcgggggttacgcggggggcgggggtggcggggagcgggttggttcgcgcgtttttcgttttcgcgattcgcgcgtaacggttttttttttcgtatttaggataattttgtttttttttttttgtttttattaagttgtttattacgtacggtaaagttttaataataattttacggcgtagtcgttttattatattacgattttttatttttattattatttttattcgacgtcgtacggattcgaaggttcgcgggnattacgttcggttcgtatttatatttttttttttttatttatttttaattatcgtatattattagggttacggttttttatcgttttttattttttcgtattttattatattttttatatttattatttttttatagataaatttaataaaagattcgtcggcgttcgttttttattaacggtttatatttatatatttttttattttatttttcgtttttttaagaataaattttatcgtaataatagttttcgagtatatataattatagtt

SEQ ID NO: 25430 - DNA, 572 bp, Artificial Sequence
  chemically treated genomic DNA (Homo sapiens) CpG-island No: 25430
  unsure (275)
aactataattatatatactcgaaaactattattacgataaaatttattcttaaaaaaacgaaaaataaaataaaaaaatatataaatataaaccgttaataaaaaacgaacgccgacgaatcttttattaaatttatctataaaaaaataataaatataaaaaatataataaaatacgaaaaaataaaaaacgataaaaaaccgtaaccctaataatatacgataattaaaaataaataaaaaaaaaaaaatataaatacgaaccgaacgtaatncccgcgaaccttcgaatccgtacgacgtcgaataaaaataataataaaaataaaaaatcgtaatataataaaacgactacgccgtaaaattattattaaaactttaccgtacgtaataaacaacttaataaaaacaaaaaaaaaaaaacaaaattatcctaaatacgaaaaaaaaaaccgttacgcgcgaatcgcgaaaacgaaaaacgcgcgaaccaacccgctccccgccacccccgccccccgcgtaacccccgccccaccaacgcgcgaaatcttttttatttttatacgcac

SEQ ID NO: 25431 - DNA, 572 bp, Artificial Sequence
  chemically treated genomic DNA (Homo sapiens) CpG-island No: 25431
  unsure (275)
ggttgtggttgtgtgtgttcgggggttgttgttgcggtggggtttgtttttgggggggcggggggtggggtgggggggtgtgtgggtgtgggtcgttggtggggggcgggcgtcggcgggttttttgttgggtttgtttgtgggggggtggtgggtgtggggggtgtggtggggtgcgggggggtggggggcggtggggggtcgtggttttggtggtgtgcggtgattgggggtgggtgggggggggggggtgtgggtgcgggtcgggcgtggtnttcgcgggttttcgggttcgtgcggcgtcgggtggaggtggtggtgggggtggggggtcgtgatatggtggggcggttgcgtcgtggggttgttgttggggttttgtcgtgcgtggtggatagtttaatagaaataaaaaaaaaaaaataaggttgttttgggtgcgggggggggggtcgttgcgcgcgggtcgcgggggcggggggcgcgcgggttaattcgtttttcgttattttcgtttttcgcgtggttttcgttttattagcgcgcggggttttttttgtttttgtgcgtat

SEQ ID NO: 25432 - DNA, 572 bp, Artificial Sequence
  chemically treated genomic DNA (Homo sapiens) CpG-island No: 25432
  unsure (298)
atacgcacaaaaacaaaaaaaaccccgcgcgctaataaaacgaaaaccacgcgaaaaacgaaaataacgaaaaacgaattaacccgcgcgccccccgcccccgcgacccgcgcgcaacgacccccccccccgcacccaaaacaaccttatttttttttttttatttctattaaactatccaccacgcacgacaaaaccccaacaacaaccccacgacgcaaccgccccaccatatcacgaccccccacccccaccaccacctccacccgacgccgcacgaacccgaaaacccgcgaanaccacgcccgacccgcacccacacccccccccccccacccacccccaatcaccgcacaccaccaaaaccacgaccccccaccgccccccacccccccgcaccccaccacaccccccacacccaccacccccccacaaacaaacccaacaaaaaacccgccgacgcccgccccccaccaacgacccacacccacacacccccccaccccaccccccgcccccccaaaaacaaaccccaccgcaacaacaacccccgaacacacacaaccacaacc

SEQ ID NO: 25433 - DNA, 920 bp, Artificial Sequence
  chemically treated genomic DNA (Homo sapiens) CpG-island No: 25433
gtcgcgacgttaggagttcggggttcggcgggaaggtatgagaagtttttacgtgaattttataagtcgggttcgggagacgtcgggcgaggcggggttgattttagtagtttttgtttcgttttagttaattagtttcgtattttagtattcgaatttaggattttcgaagtcggaggcgacgcgagttaatgaggagtgggtcggggaagagggataggcggttagtttatggggcggagaggttcggtcgcgcgtatttaaggagcgtcgcgttcggttcgggggtgtggcgcgcgtcggcgggggtgggcgggcgcgtcgggcggtaggtgtcggcgtcggcggtattcggcggcgatggagcggttttggggagttgcggacggtttttcgcgttggttttatggtttcggtttttttttttttttgtagttgttgtcgtcgtcgatttttagttaggatcggttggacgcgtcgtcgtcgttcgttgcgtcgttgtcgcgttggtttggttttatcggggtgagttgggggttgcgggcggtcgtagtcgggggcgcgttttttcgcggcggtcgttggcgtcgtagcgcgtcgggcgaggacgaggagtgcggtcgggttcgggatttcgtcgttaagttggttaataatacgtattaggtgagcgggcgtcgggttcgggagtcgttcgggtgcgaggtgtcgttcgcgtgtttttttcggttcgtgcgtttcgcgattttcggaggagattttagttttgtcgcgttcgcgtttttcgggtcgtagtttcgaaattgcggcgggcgggcgggcggagtcgggttcgggcggtcggcggggttgtgttttgttataggggaggtaattttagatttttatcgtatttttttttttttttttaagttgttaaa

SEQ ID NO: 25434 - DNA, 920 bp, Artificial Sequence
  chemically treated genomic DNA (Homo sapiens) CpG-island No: 25434
tttaacaacttaaaaaaaaaaaaaaaaatacgataaaaatctaaaattacctcccctataacaaaacacaaccccgccgaccgcccgaacccgactccgcccgcccgcccgccgcaatttcgaaactacgacccgaaaaacgcgaacgcgacaaaactaaaatctcctccgaaaatcgcgaaacgcacgaaccgaaaaaaacacgcgaacgacacctcgcacccgaacgactcccgaacccgacgcccgctcacctaatacgtattattaaccaacttaacgacgaaatcccgaacccgaccgcactcctcgtcctcgcccgacgcgctacgacgccaacgaccgccgcgaaaaaacgcgcccccgactacgaccgcccgcaacccccaactcaccccgataaaaccaaaccaacgcgacaacgacgcaacgaacgacgacgacgcgtccaaccgatcctaactaaaaatcgacgacgacaacaactacaaaaaaaaaaaaaaaccgaaaccataaaaccaacgcgaaaaaccgtccgcaactccccaaaaccgctccatcgccgccgaataccgccgacgccgacacctaccgcccgacgcgcccgcccacccccgccgacgcgcgccacacccccgaaccgaacgcgacgctccttaaatacgcgcgaccgaacctctccgccccataaactaaccgcctatccctcttccccgacccactcctcattaactcgcgtcgcctccgacttcgaaaatcctaaattcgaatactaaaatacgaaactaattaactaaaacgaaacaaaaactactaaaatcaaccccgcctcgcccgacgtctcccgaacccgacttataaaattcacgtaaaaacttctcataccttcccgccgaaccccgaactcctaacgtcgcgac

SEQ ID NO: 25435 - DNA, 920 bp, Artificial Sequence
  chemically treated genomic DNA (Homo sapiens) CpG-island No: 25435
tttgataatttaaaaaaaaaaaaaagaatgcggtggaagtttaagattgttttttttatgataaaatatagtttcgtcggtcgttcgggttcgatttcgttcgttcgttcgtcgtagtttcggggttgcggttcgggggacgcgggcgcggtagggttggggtttttttcgggagtcgcggggcgtacgggtcgggaggggtacgcgggcggtatttcgtattcgagcggttttcgggttcggcgttcgtttatttggtgcgtgttgttggttagtttggcgacgaagtttcggattcggtcgtatttttcgttttcgttcggcgcgttgcgacgttaacggtcgtcgcggggaaacgcgttttcggttgcggtcgttcgtagtttttagtttatttcgatggggttagattagcgcggtagcggcgtagcgggcggcggcggcgcgtttagtcggttttggttgagggtcgacggcggtagtagttgtaggaggaggaggaggtcgaggttatggggttagcgcgagaggtcgttcgtagttttttagggtcgttttatcgtcgtcgaatgtcgtcgacgtcgatatttgtcgttcggcgcgttcgtttattttcgtcggcgcgcgttatattttcgagtcgagcgcggcgttttttggatacgcgcggtcgggttttttcgttttataggttggtcgtttgtttttttttttcggtttattttttattggttcgcgtcgttttcggtttcgggggttttggattcggatgttaagatgcgggattgattggttggaacggggtagagattgttgaggttaatttcgtttcgttcggcgtttttcgggttcggtttgtggagtttacgtaggagttttttatattttttcgtcgagtttcgggtttttggcgtcgcgat

SEQ ID NO: 25436 - DNA, 920 bp, Artificial Sequence
  chemically treated genomic DNA (Homo sapiens) CpG-island No: 25436
atcgcgacgccaaaaacccgaaactcgacgaaaaaatataaaaaactcctacgtaaactccacaaaccgaacccgaaaaacgccgaacgaaacgaaattaacctcaacaatctctaccccgttccaaccaatcaatcccgcatcttaacatccgaatccaaaacccccgaaaccgaaaacgacgcgaaccaataaaaaataaaccgaaaaaaaaaaacaaacgaccaacctataaaacgaaaaaacccgaccgcgcgtatccaaaaaacgccgcgctcgactcgaaaatataacgcgcgccgacgaaaataaacgaacgcgccgaacgacaaatatcgacgtcgacgacattcgacgacgataaaacgaccctaaaaaactacgaacgacctctcgcgctaaccccataacctcgacctcctcctcctcctacaactactaccgccgtcgaccctcaaccaaaaccgactaaacgcgccgccgccgcccgctacgccgctaccgcgctaatctaaccccatcgaaataaactaaaaactacgaacgaccgcaaccgaaaacgcgtttccccgcgacgaccgttaacgtcgcaacgcgccgaacgaaaacgaaaaatacgaccgaatccgaaacttcgtcgccaaactaaccaacaacacgcaccaaataaacgaacgccgaacccgaaaaccgctcgaatacgaaataccgcccgcgtacccctcccgacccgtacgccccgcgactcccgaaaaaaaccccaaccctaccgcgcccgcgtcccccgaaccgcaaccccgaaactacgacgaacgaacgaacgaaatcgaacccgaacgaccgacgaaactatattttatcataaaaaaaacaatcttaaacttccaccgcattcttttttttttttttaaattatcaaa

SEQ ID NO: 25437 - DNA, 629 bp, Artificial Sequence
  chemically treated genomic DNA (Homo sapiens) CpG-island No: 25437
cgttttttcgtcgaattttgggattagcgtcggggttttttggggaattttaataatttgaattgatttcggacgttaattcggtaggagtcgggacggtttcgttttttttcgcgtagtttaggcgtttcgttgagggcggtttcggcgtttattattagattttttttagttattttatgcgcggagagtttggacgcggtatttcgcggggattcgttatttagcggttttttttcggagttttagtttgtttatcgtaggtttttttcggggttgtttcgttcggcgtagggtcgttgtagtcgtcgttttatagcgcgattgaatattggggtatcgaatttggggttgcgttcggtttcgtcgtcggttcgcgtagcggtgcggtttatttcgtcggcgggaattagaatttttattttaggcgttttacgagttcggtcgtcgcggatgattttagttaaaatcgaaagcgtcgaggtaggggtatttttttgttttagttaattagtgtttttttttgttacggtagttcgttggggtcgaaaaagtttgttagtattaaagcgcgtaaatttaagatttttggtttgtttagtagtaaaattggtgtagtggagtttttt

SEQ ID NO: 25438 - DNA, 629 bp, Artificial Sequence
  chemically treated genomic DNA (Homo sapiens) CpG-island No: 25438
aaaaaactccactacaccaattttactactaaacaaaccaaaaatcttaaatttacgcgctttaatactaacaaactttttcgaccccaacgaactaccgtaacaaaaaaaaacactaattaactaaaacaaaaaaatacccctacctcgacgctttcgattttaactaaaatcatccgcgacgaccgaactcgtaaaacgcctaaaataaaaattctaattcccgccgacgaaataaaccgcaccgctacgcgaaccgacgacgaaaccgaacgcaaccccaaattcgataccccaatattcaatcgcgctataaaacgacgactacaacgaccctacgccgaacgaaacaaccccgaaaaaaacctacgataaacaaactaaaactccgaaaaaaaaccgctaaataacgaatccccgcgaaataccgcgtccaaactctccgcgcataaaataactaaaaaaaatctaataataaacgccgaaaccgccctcaacgaaacgcctaaactacgcgaaaaaaaacgaaaccgtcccgactcctaccgaattaacgtccgaaatcaattcaaattattaaaattccccaaaaaaccccgacgctaatcccaaaattcgacgaaaaaacg

SEQ ID NO: 25439 - DNA, 629 bp, Artificial Sequence
  chemically treated genomic DNA (Homo sapiens) CpG-island No: 25439
gaggaattttattgtattaattttgttattagataaattaggaattttggatttgcgcgttttggtgttgataggttttttcggttttagcgggttgtcgtagtagagaagagtattgattggttgaggtagaaaagtgtttttgtttcggcgttttcggttttggttgggattattcgcggcggtcgggttcgtggggcgtttggagtgagggttttggttttcgtcggcgaggtgagtcgtatcgttgcgcgggtcgacgacggggtcgggcgtagttttaggttcggtgttttagtgtttagtcgcgttgtggagcggcggttgtagcggttttacgtcgggcgaggtagtttcggaaagggtttgcggtgaataggttggggtttcgggaagggatcgttgggtggcgggttttcgcgaaatgtcgcgtttaagtttttcgcgtatggaatggttgggagaggtttgatggtgggcgtcgggatcgtttttagcgaggcgtttagattgcgcggagaggagcgggatcgtttcggtttttatcgagttggcgttcgagattaatttaggttgttgaagttttttagggagtttcgacgttaattttaagattcggcgggaaagcg

SEQ ID NO: 25440 - DNA, 629 bp, Artificial Sequence
  chemically treated genomic DNA (Homo sapiens) CpG-island No: 25440
cgctttcccgccgaatcttaaaattaacgtcgaaactccctaaaaaacttcaacaacctaaattaatctcgaacgccaactcgataaaaaccgaaacgatcccgctcctctccgcgcaatctaaacgcctcgctaaaaacgatcccgacgcccaccatcaaacctctcccaaccattccatacgcgaaaaacttaaacgcgacatttcgcgaaaacccgccacccaacgatcccttcccgaaaccccaacctattcaccgcaaaccctttccgaaactacctcgcccgacgtaaaaccgctacaaccgccgctccacaacgcgactaaacactaaaacaccgaacctaaaactacgcccgaccccgtcgtcgacccgcgcaacgatacgactcacctcgccgacgaaaaccaaaaccctcactccaaacgccccacgaacccgaccgccgcgaataatcccaaccaaaaccgaaaacgccgaaacaaaaacacttttctacctcaaccaatcaatactcttctctactacgacaacccgctaaaaccgaaaaaacctatcaacaccaaaacgcgcaaatccaaaattcctaatttatctaataacaaaattaatacaataaaattcctc

SEQ ID NO: 25441 - DNA, 509 bp, Artificial Sequence
  chemically treated genomic DNA (Homo sapiens) CpG-island No: 25441
gaggtatgtatcgtagtggtgaatatacgtcgattaggttttagtttaacgatatttggaggttagtacggtgtttacgtgtcgacggaatttgtttagggaggtatgtatcgtagtggtgaatataaggttttagtttaacgatatttggaggttagtacggtgtttacgtgtcgacggaatttgtatagggaggtatgtatcgtagtggtgaatatacgtcgattaggttttagtttaacgatatttggaggttagtacggtgtttacgtgtcgacggaatttgtttagggaggtatgtatcgtagtggtgaatataaggttttagtttaacgatatttggaggttagtacggtgtttacgtgtcgacggaatttgtatagggaggtatgtatcgtagtggtgaatatacgtcgatttaggtttttatttaaacgatattttggaggtttatatagtgtttattttgtcgacggaatttgttttagggaggtatgttttttttttat

SEQ ID NO: 25442 - DNA, 509 bp, Artificial Sequence
  chemically treated genomic DNA (Homo sapiens) CpG-island No: 25442
ataaaaaaaaaacatacctccctaaaacaaattccgtcgacaaaataaacactatataaacctccaaaatatcgtttaaataaaaacctaaatcgacgtatattcaccactacgatacatacctccctatacaaattccgtcgacacgtaaacaccgtactaacctccaaatatcgttaaactaaaaccttatattcaccactacgatacatacctccctaaacaaattccgtcgacacgtaaacaccgtactaacctccaaatatcgttaaactaaaacctaatcgacgtatattcaccactacgatacatacctccctatacaaattccgtcgacacgtaaacaccgtactaacctccaaatatcgttaaactaaaaccttatattcaccactacgatacatacctccctaaacaaattccgtcgacacgtaaacaccgtactaacctccaaatatcgttaaactaaaacctaatcgacgtatattcaccactacgatacatacctc

SEQ ID NO: 25443 - DNA, 509 bp, Artificial Sequence
  chemically treated genomic DNA (Homo sapiens) CpG-island No: 25443
gtagaaagagggtatgtttttttggaataagtttcgtcgataaggtgagtattgtgtggatttttaaaatatcgtttaagtgggagtttgggtcgacgtgtatttattattgcggtgtatgtttttttgtataagtttcgtcgatacgtgagtatcgtgttgatttttaaatatcgttaagttggagttttgtatttattattgcggtgtatgtttttttggataagtttcgtcgatacgtgagtatcgtgttgatttttaaatatcgttaagttggagtttggtcgacgtgtatttattattgcggtgtatgtttttttgtataagtttcgtcgatacgtgagtatcgtgttgatttttaaatatcgttaagttggagttttgtatttattattgcggtgtatgtttttttggataagtttcgtcgatacgtgagtatcgtgttgatttttaaatatcgttaagttggagtttggtcgacgtgtatttattattgcggtgtatgtttt

SEQ ID NO: 25444 - DNA, 509 bp, Artificial Sequence
  chemically treated genomic DNA (Homo sapiens) CpG-island No: 25444
aaaacatacaccgcaataataaatacacgtcgaccaaactccaacttaacgatatttaaaaatcaacacgatactcacgtatcgacgaaacttatccaaaaaaacatacaccgcaataataaatacaaaactccaacttaacgatatttaaaaatcaacacgatactcacgtatcgacgaaacttatacaaaaaaacatacaccgcaataataaatacacgtcgaccaaactccaacttaacgatatttaaaaatcaacacgatactcacgtatcgacgaaacttatccaaaaaaacatacaccgcaataataaatacaaaactccaacttaacgatatttaaaaatcaacacgatactcacgtatcgacgaaacttatacaaaaaaacatacaccgcaataataaatacacgtcgacccaaactcccacttaaacgatattttaaaaatccacacaatactcaccttatcgacgaaacttattccaaaaaaacataccctctttctac

SEQ ID NO: 25445 - DNA, 501 bp, Artificial Sequence
  chemically treated genomic DNA (Homo sapiens) CpG-island No: 25445
ggtcggcgatttggaacgtattttggtacgtttggttttacgaattgttcgtttacgcgatttggttcgtatgcgttacgttttttagtaattgtcggagttgcgtgcgtagttagaaattgtcgatagtgtatcggtataggcgttacgtgagaagatgggcgagtttgtcgagttgcgcgatttgttggagcgagtaattatcgatatatcgtcggtgttggtacgcgacggtggtgttatcgtatcgggttataacgaagagttggatgagtggcgcgcgttggttgacggcgcgatcgattatttggagcgtttggaagttcgcgagcgtgaacgtatcggtttggatacgttgaaagttggttttaatgcggtgtacggttattatatttaaattagtcgtgggtaaagttatttggtatttattaattatatgcgtcgttagatagtgaaaaacgtcgagcgttatattattttagagttaaaagagtacgaaga

SEQ ID NO: 25446 - DNA, 501 bp, Artificial Sequence
  chemically treated genomic DNA (Homo sapiens) CpG-island No: 25446
tcttcgtactcttttaactctaaaataatataacgctcgacgtttttcactatctaacgacgcatataattaataaataccaaataactttacccacgactaatttaaatataataaccgtacaccgcattaaaaccaactttcaacgtatccaaaccgatacgttcacgctcgcgaacttccaaacgctccaaataatcgatcgcgccgtcaaccaacgcgcgccactcatccaactcttcgttataacccgatacgataacaccaccgtcgcgtaccaacaccgacgatatatcgataattactcgctccaacaaatcgcgcaactcgacaaactcgcccatcttctcacgtaacgcctataccgatacactatcgacaatttctaactacgcacgcaactccgacaattactaaaaaacgtaacgcatacgaaccaaatcgcgtaaacgaacaattcgtaaaaccaaacgtaccaaaatacgttccaaatcgccgacc

SEQ ID NO: 25447 - DNA, 501 bp, Artificial Sequence
  chemically treated genomic DNA (Homo sapiens) CpG-island No: 25447
ttttcgtatttttttagttttggaatgatgtagcgttcggcgttttttattgtttggcgacgtatgtagttgatgggtgttagatggttttgtttacggttgatttgaatgtagtagtcgtgtatcgtattaaagttaatttttagcgtgtttaggtcggtacgtttacgttcgcggatttttagacgttttagataatcggtcgcgtcgttagttagcgcgcgttatttatttagtttttcgttatagttcgatgcgataatattatcgtcgcgtattagtatcggcggtgtgtcgatgattgttcgttttagtagatcgcgtagttcggtaaattcgtttatttttttacgtagcgtttgtatcggtgtattatcgatagtttttaattgcgtacgtagtttcggtagttgttggaaagcgtggcgtatacgggttagatcgcgtgggcgagtagttcgtaaagttagacgtgttagaatacgttttaggtcgtcgatt

SEQ ID NO: 25448 - DNA, 501 bp, Artificial Sequence
  chemically treated genomic DNA (Homo sapiens) CpG-island No: 25448
aatcgacgacctaaaacgtattctaacacgtctaactttacgaactactcgcccacgcgatctaacccgtatacgccacgctttccaacaactaccgaaactacgtacgcaattaaaaactatcgataatacaccgatacaaacgctacgtaaaaaaataaacgaatttaccgaactacgcgatctactaaaacgaacaatcatcgacacaccgccgatactaatacgcgacgataatattatcgcatcgaactataacgaaaaactaaataaataacgcgcgctaactaacgacgcgaccgattatctaaaacgtctaaaaatccgcgaacgtaaacgtaccgacctaaacacgctaaaaattaactttaatacgatacacgactactacattcaaatcaaccgtaaacaaaaccatctaacacccatcaactacatacgtcgccaaacaataaaaaacgccgaacgctacatcattccaaaactaaaaaaatacgaaaa

SEQ ID NO: 25449 - DNA, 752 bp, Artificial Sequence
  chemically treated genomic DNA (Homo sapiens) CpG-island No: 25449
  unsure (1, 206, 316, 420, 592)
nagcgcgcgtcgtttttcgcgttgggacgggacgggataggataggaggggacgttcgggtttggtcgcgcgggatcggttttggtacgtttacgatttcggtagggtcgcgcgggggaggaagcgcgggcgcgtcggatttgtttgttggttttatcgaagaagacgtagttgatagggttcgttttttcgaattgtatcggttngttcgtatagttttagatagtagtttttttcgtttatggcgggcgtcgcgttcgcggcgggggtttcgggggcggtcgttagagtggagtaggatgcgcggtggagtttnggttcggattgtagcggcggttgcggttgcggttttgggttcggcgcggacgtcgttttttggtgttacgtttttatttcgtttattacgtgattcgcggtttntttgcgtttaaacgggtagcgtttggttgcggtggggtttatcggttttaattacgtttcgttcggcgttggaggtttttttttttttttcgagggcggtcggaacgcggcggcgtgattcggaagttcgcgtggtttttcgcggatcgagggcggcgtagtcgttaatttntattttgttgcgagtttttgtgttcggttcggtcgtttttgttttaatttgtattttcgcgtgggatcgttttcggtttaggaaaggtttttttttgttttcgggaggattttttaagtgtttttcgcgttagagttttagtttttgggagtttcgttag

SEQ ID NO: 25450 - DNA, 752 bp, Artificial Sequence
  chemically treated genomic DNA (Homo sapiens) CpG-island No: 25450
  unsure (161, 333, 437, 547, 752)
ctaacgaaactcccaaaaactaaaactctaacgcgaaaaacacttaaaaaatcctcccgaaaacaaaaaaaaacctttcctaaaccgaaaacgatcccacgcgaaaatacaaattaaaacaaaaacgaccgaaccgaacacaaaaactcgcaacaaaatanaaattaacgactacgccgccctcgatccgcgaaaaaccacgcgaacttccgaatcacgccgccgcgttccgaccgccctcgaaaaaaaaaaaaaaacctccaacgccgaacgaaacgtaattaaaaccgataaaccccaccgcaaccaaacgctacccgtttaaacgcaaanaaaccgcgaatcacgtaataaacgaaataaaaacgtaacaccaaaaaacgacgtccgcgccgaacccaaaaccgcaaccgcaaccgccgctacaatccgaaccnaaactccaccgcgcatcctactccactctaacgaccgcccccgaaacccccgccgcgaacgcgacgcccgccataaacgaaaaaaactactatctaaaactatacgaacnaaccgatacaattcgaaaaaacgaaccctatcaactacgtcttcttcgataaaaccaacaaacaaatccgacgcgcccgcgcttcctcccccgcgcgaccctaccgaaatcgtaaacgtaccaaaaccgatcccgcgcgaccaaacccgaacgtcccctcctatcctatcccgtcccgtcccaacgcgaaaaacgacgcgcgctn

SEQ ID NO: 25451 - DNA, 752 bp, Artificial Sequence
  chemically treated genomic DNA (Homo sapiens) CpG-island No: 25451
  unsure (161, 333, 437, 547, 752)
ttgacgaagtttttagaggttggaattttggcgcgggaggtatttgggaaattttttcgaaagtaaggaggagttttttttagatcgggagcggttttacgcgggggtataggttggggtaggggcgatcgagtcgggtataggaattcgtagtagggtangggttggcggttacgtcgttttcggttcgcggggaattacgcgggttttcgggttacgtcgtcgcgtttcgatcgttttcggggagaggggaggagtttttagcgtcgggcggggcgtggttaaggtcggtgggttttatcgtagttagacgttgttcgtttaagcgtagangggtcgcgggttacgtggtgggcggggtgggggcgtggtattaggaagcggcgttcgcgtcgggtttagagtcgtagtcgtagtcgtcgttatagttcgggttngggttttatcgcgtattttgttttattttggcgatcgttttcggggttttcgtcgcgggcgcggcgttcgttatgggcgaggaggattattatttggagttgtgcgagtnggtcggtgtagttcgagaaggcgaattttgttaattgcgtttttttcgatgaggttaataagtaggttcggcgcgttcgcgttttttttttcgcgcggttttgtcggggtcgtgggcgtgttaaggtcggtttcgcgcgattaggttcgagcgtttttttttgttttgtttcgtttcgttttagcgcgggaggcggcgcgcgttn

SEQ ID NO: 25452 - DNA, 752 bp, Artificial Sequence
  chemically treated genomic DNA (Homo sapiens) CpG-island No: 25452
  unsure (1, 206, 316, 420, 592)
naacgcgcgccgcctcccgcgctaaaacgaaacgaaacaaaacaaaaaaaaacgctcgaacctaatcgcgcgaaaccgaccttaacacgcccacgaccccgacaaaaccgcgcgaaaaaaaaaacgcgaacgcgccgaacctacttattaacctcatcgaaaaaaacgcaattaacaaaattcgccttctcgaactacaccgaccnactcgcacaactccaaataataatcctcctcgcccataacgaacgccgcgcccgcgacgaaaaccccgaaaacgatcgccaaaataaaacaaaatacgcgataaaacccnaacccgaactataacgacgactacgactacgactctaaacccgacgcgaacgccgcttcctaataccacgcccccaccccgcccaccacgtaacccgcgacccntctacgcttaaacgaacaacgtctaactacgataaaacccaccgaccttaaccacgccccgcccgacgctaaaaactcctcccctctccccgaaaacgatcgaaacgcgacgacgtaacccgaaaacccgcgtaattccccgcgaaccgaaaacgacgtaaccgccaacccntaccctactacgaattcctatacccgactcgatcgcccctaccccaacctatacccccgcgtaaaaccgctcccgatctaaaaaaaactcctccttactttcgaaaaaatttcccaaatacctcccgcgccaaaattccaacctctaaaaacttcgtcaa

SEQ ID NO: 25453 - DNA, 734 bp, Artificial Sequence
  chemically treated genomic DNA (Homo sapiens) CpG-island No: 25453
  unsure (312, 318, 333, 338, 353, 358, 367, 379, 396, 403, 532, 558)
ttgcgtttttcgttggttgttttttcgggcgggcgtttttttatttagtttaggtgttttttttcggtttcgcgttttgtttgtttttttcgggttttaagttcgtttttgtttcgcggagttttgttttttttacgtttagtttcgtagtttcgtagtttcgtcgcgtttcgtggagagtattttcgtttgcggttagttaggttttttcgttttggtagtttcgtatttgagtcggagtcgagttgggagggtcgcgggggtcgggtcggcggagttggtagataaaagagtagtcgggtagcggttttngttttnaagtcgggggagggncgggncggtttcgggcgttnttggnttatagttngttttcgcgggntttaggcgacgtcgagncgttttngtatttcgttcgtcgagtataagtagttttgtttcgttaggtttacgtgttgtacgcgcgggagaggggtcggtcgcgtagaggtggcgttttaggattttttgtggcgttatatagatgggaagattngaggttcgggagtggattttcggggntttttcggcgtagagttgtagtcgcgtttttcgtatttcgggacgacgggaagcgtaggtttcggtttttgggttcggttgattttgggagggtcggggagggcggtcgtaggagagtggttgcgttttttagttagagttcggtcggtttttacgtttatttagtttatttcgtt

SEQ ID NO: 25454 - DNA, 734 bp, Artificial Sequence
  chemically treated genomic DNA (Homo sapiens) CpG-island No: 25454
  unsure (177, 203, 332, 339, 356, 368, 377, 382, 397, 402, 417, 423)
aacgaaataaactaaataaacgtaaaaaccgaccgaactctaactaaaaaacgcaaccactctcctacgaccgccctccccgaccctcccaaaatcaaccgaacccaaaaaccgaaacctacgcttcccgtcgtcccgaaatacgaaaaacgcgactacaactctacgccgaaaaanccccgaaaatccactcccgaacctcnaatcttcccatctatataacgccacaaaaaatcctaaaacgccacctctacgcgaccgacccctctcccgcgcgtacaacacgtaaacctaacgaaacaaaactacttatactcgacgaacgaaatacnaaaacgnctcgacgtcgcctaaancccgcgaaaacnaactataanccaanaacgcccgaaaccgncccgnccctcccccgacttnaaaacnaaaaccgctacccgactactcttttatctaccaactccgccgacccgacccccgcgaccctcccaactcgactccgactcaaatacgaaactaccaaaacgaaaaaacctaactaaccgcaaacgaaaatactctccacgaaacgcgacgaaactacgaaactacgaaactaaacgtaaaaaaaacaaaactccgcgaaacaaaaacgaacttaaaacccgaaaaaaacaaacaaaacgcgaaaccgaaaaaaaacacctaaactaaataaaaaaacgcccgcccgaaaaaacaaccaacgaaaaacgcaa

SEQ ID NO: 25455 - DNA, 734 bp, Artificial Sequence
  chemically treated genomic DNA (Homo sapiens) CpG-island No: 25455
  unsure (177, 203, 332, 339, 356, 368, 377, 382, 397, 402, 417, 423)
ggcggggtgggttgagtaagcgtaggggtcggtcgagttttagttgggaaacgtagttatttttttgcggtcgtttttttcgatttttttagggttagtcgggtttagaagtcggagtttgcgtttttcgtcgtttcgaagtgcgagaagcgcggttgtagttttgcgtcgaggagntttcgggagtttattttcgggttttnggtttttttatttgtgtgacgttataggaagttttgagacgttatttttgcgcggtcgatttttttttcgcgcgtgtaatacgtgggtttggcggggtagagttgtttgtgttcggcgggcggggtgtnggggcgnttcggcgtcgtttgggnttcgcggaggtnggttgtagnttagnagcgttcgaggtcgnttcgnttttttttcggtttnggggtnggggtcgttgttcggttgtttttttatttgttagtttcgtcgattcggttttcgcggtttttttagttcggtttcggtttaggtacggggttgttaagacggggaggtttggttggtcgtagacgagggtgttttttacggggcgcggcggggttgcggggttgcggggttggacgtggaaagagtaaggtttcgcggggtaggggcggatttgggattcggggaagataggtaggacgcggagtcggaggggagtatttgggttaagtgagaggacgttcgttcggggaagtagttagcggagggcgtag

SEQ ID NO: 25456 - DNA, 734 bp, Artificial Sequence
  chemically treated genomic DNA (Homo sapiens) CpG-island No: 25456
  unsure (312, 318, 333, 338, 353, 358, 367, 379, 396, 403, 532, 558)
ctacgccctccgctaactacttccccgaacgaacgtcctctcacttaacccaaatactcccctccgactccgcgtcctacctatcttccccgaatcccaaatccgcccctaccccgcgaaaccttactctttccacgtccaaccccgcaaccccgcaaccccgccgcgccccgtaaaaaacaccctcgtctacgaccaaccaaacctccccgtcttaacaaccccgtacctaaaccgaaaccgaactaaaaaaaccgcgaaaaccgaatcgacgaaactaacaaataaaaaaacaaccgaacaacgaccccnaccccnaaaccgaaaaaaaancgaancgacctcgaacgctnctaanctacaaccnacctccgcgaancccaaacgacgccgaancgccccnacaccccgcccgccgaacacaaacaactctaccccgccaaacccacgtattacacgcgcgaaaaaaaaatcgaccgcgcaaaaataacgtctcaaaacttcctataacgtcacacaaataaaaaaaccnaaaacccgaaaataaactcccgaaanctcctcgacgcaaaactacaaccgcgcttctcgcacttcgaaacgacgaaaaacgcaaactccgacttctaaacccgactaaccctaaaaaaatcgaaaaaaacgaccgcaaaaaaataactacgtttcccaactaaaactcgaccgacccctacgcttactcaacccaccccgcc

SEQ ID NO: 25457 - DNA, 679 bp, Artificial Sequence
  chemically treated genomic DNA (Homo sapiens) CpG-island No: 25457
  unsure (52, 269, 331, 455, 506)
aattttcgtcgtttttttttgcgtatcgtttttttagattttttaatagtancgtttttttttttcgttttttttattttttttaagtttcgttttttaattttttttagattataatttttttcgtttgtgaatttttaacgttgtttttttttttgttttcgatttcgtttttattatttttaggtgttttttaaatttttttcgttttacgtttttaggttttatttggtttttaacgtttttttattttttagcgttttatttgntatttttcgtttttttagcgtcgtcgcgtttagttatacgtcgtaggtttttttttcggggntttgttcgttttatggtcgttgaggagacgaagtcggtaggacgtcggcgtaggttttcggcgttttagggaacgttagaatcgcggtcgtcgacgttcggatttcgcgttaacgttggggggnggggttacgtcgcgatcgtttcgggcgttagtttcgtttcggtaaggtttntggtttttttcgttgtgtttcgtttacgtattaattttcgcggtcggttttttgagtgcgtgcggtatatttttttgcgcggaggagtgcgtgttttttttgattcgtttttttaagagcggattcggaagttgttgtgtgaacggttttcgatagttttagaaatgtatatt

SEQ ID NO: 25458 - DNA, 679 bp, Artificial Sequence
  chemically treated genomic DNA (Homo sapiens) CpG-island No: 25458
  unsure (174, 225, 349, 411, 628)
aatatacatttctaaaactatcgaaaaccgttcacacaacaacttccgaatccgctcttaaaaaaacgaatcaaaaaaaacacgcactcctccgcgcaaaaaaatataccgcacgcactcaaaaaaccgaccgcgaaaattaatacgtaaacgaaacacaacgaaaaaaaccanaaaccttaccgaaacgaaactaacgcccgaaacgatcgcgacgtaaccccnccccccaacgttaacgcgaaatccgaacgtcgacgaccgcgattctaacgttccctaaaacgccgaaaacctacgccgacgtcctaccgacttcgtctcctcaacgaccataaaacgaacaaanccccgaaaaaaaaacctacgacgtataactaaacgcgacgacgctaaaaaaacgaaaaatancaaataaaacgctaaaaaataaaaaaacgttaaaaaccaaataaaacctaaaaacgtaaaacgaaaaaaatttaaaaaacacctaaaaataataaaaacgaaatcgaaaacaaaaaaaaaaacaacgttaaaaattcacaaacgaaaaaaattataatctaaaaaaaattaaaaaacgaaacttaaaaaaaataaaaaaaacgaaaaaaaaaaacgntactattaaaaaatctaaaaaaacgatacgcaaaaaaaaacgacgaaaatt

SEQ ID NO: 25459 - DNA, 679 bp, Artificial Sequence
  chemically treated genomic DNA (Homo sapiens) CpG-island No: 25459
  unsure (174, 225, 349, 411, 628)
aatgtatatttttgaggttgtcgagaatcgtttatatagtagttttcgaattcgtttttgaaagagcggattagaaagaatacgtattttttcgcgtagggaaatatgtcgtacgtatttaagggatcggtcgcgaaagttagtgcgtgggcggggtatagcgaagggggttangggttttgtcggggcggggttggcgttcggggcggtcgcgacgtaattttnttttttagcgttggcgcgagattcgaacgtcggcggtcgcggttttggcgttttttgaggcgtcgggagtttgcgtcggcgttttgtcggtttcgtttttttagcggttatgaggcggataggntttcgaggaggaggtttgcggcgtgtggttggacgcggcggcgttgaagaggcggaaagtgntaggtgggacgttgggggatgagagggcgttgggaattaggtagggtttggaggcgtaagacgggaggagtttgggggatatttggagatgatgaaagcgaagtcggggatagagaagggaatagcgttggggatttataggcgagagggattgtggtttgaagaaggttgaaaaacggggtttggggaggatgggagggacggaaggaaagagcgntgttgttggggggtttggaggagcggtgcgtagggaggggcggcgaaggtt

SEQ ID NO: 25460 - DNA, 679 bp, Artificial Sequence
  chemically treated genomic DNA (Homo sapiens) CpG-island No: 25460
  unsure (52, 269, 331, 455, 506)
aaccttcgccgcccctccctacgcaccgctcctccaaaccccccaacaacancgctctttccttccgtccctcccatcctccccaaaccccgtttttcaaccttcttcaaaccacaatccctctcgcctataaatccccaacgctattcccttctctatccccgacttcgctttcatcatctccaaatatcccccaaactcctcccgtcttacgcctccaaaccctacctaattcccaacgccctctcatcccccaacgtcccacctancactttccgcctcttcaacgccgccgcgtccaaccacacgccgcaaacctcctcctcgaaancctatccgcctcataaccgctaaaaaaacgaaaccgacaaaacgccgacgcaaactcccgacgcctcaaaaaacgccaaaaccgcgaccgccgacgttcgaatctcgcgccaacgctaaaaaanaaaattacgtcgcgaccgccccgaacgccaaccccgccccgacaaaacccntaacccccttcgctataccccgcccacgcactaactttcgcgaccgatcccttaaatacgtacgacatatttccctacgcgaaaaaatacgtattctttctaatccgctctttcaaaaacgaattcgaaaactactatataaacgattctcgacaacctcaaaaatatacatt

SEQ ID NO: 25461 - DNA, 532 bp, Artificial Sequence
  chemically treated genomic DNA (Homo sapiens) CpG-island No: 25461
  unsure (69, 80, 105, 445, 456, 466, 528)
ggcgttttacgcgggttgtggggggcgggggcggtacgtgtcgtcgttttcggttaatgcggagttttngcgcggaggtntacgtgtttttgtttggcgtttttngtgcgcgttcgggtttgttggtgtttagagtgtggttaggcggttcggattgagtaggtgggtgcggggttcggaggaggcggcggttggttgaggttagtaagagggacgcggtcggcgggaggggttgggtcgtggtagcgattttttgttgtagggcggcgggcggggttgcgggtttcggaggggttggtgggcgggggtcgtttcgttttgtgtgtggttcgggcggagtttcgtttttgttttcgtttttcgggggcgcggttgttcgtgggtagggggttgggcgattatcgggcgttcgtttcggggtgtcgtcgaggagataatagggggncgtgggttttncgtttatttntttttttttttttttttttttgcgggtttcgtcgggttttttattgtttgaagggacggggncggt

SEQ ID NO: 25462 - DNA, 532 bp, Artificial Sequence
  chemically treated genomic DNA (Homo sapiens) CpG-island No: 25462
  unsure (5, 67, 77, 88, 428, 453, 464)
accgnccccgtcccttcaaacaataaaaaacccgacgaaacccgcaaaaaaaaaaaaaaaaaaaaanaaataaacgnaaaacccacgnccccctattatctcctcgacgacaccccgaaacgaacgcccgataatcgcccaaccccctacccacgaacaaccgcgcccccgaaaaacgaaaacaaaaacgaaactccgcccgaaccacacacaaaacgaaacgacccccgcccaccaacccctccgaaacccgcaaccccgcccgccgccctacaacaaaaaatcgctaccacgacccaacccctcccgccgaccgcgtccctcttactaacctcaaccaaccgccgcctcctccgaaccccgcacccacctactcaatccgaaccgcctaaccacactctaaacaccaacaaacccgaacgcgcacnaaaaacgccaaacaaaaacacgtanacctccgcgcnaaaactccgcattaaccgaaaacgacgacacgtaccgcccccgccccccacaacccgcgtaaaacgcc

SEQ ID NO: 25463 - DNA, 532 bp, Artificial Sequence
  chemically treated genomic DNA (Homo sapiens) CpG-island No: 25463
  unsure (5, 67, 77, 88, 428, 453, 464)
atcgntttcgtttttttagataatggggaattcggcggggttcgtagggaagggagggagggagggnaggtaaacgnagggtttacgnttttttattgttttttcgacggtatttcggagcggacgttcggtgatcgtttagttttttgtttacgaatagtcgcgttttcggagagcggggataaaggcgaggtttcgttcgagttatatataaagcggagcgattttcgtttattaattttttcgaggttcgtagtttcgttcgtcgttttgtagtagggggtcgttgttacggtttagtttttttcgtcgatcgcgttttttttgttggttttagttagtcgtcgtttttttcgagtttcgtatttatttgtttagttcgagtcgtttgattatattttgagtattaatagattcgggcgcgtatnaaaagcgttaaatagaggtacgtgnattttcgcgtnggggtttcgtattggtcgagagcggcggtacgtgtcgttttcgttttttataattcgcgtggagcgtt

SEQ ID NO: 25464 - DNA, 532 bp, Artificial Sequence
  chemically treated genomic DNA (Homo sapiens) CpG-island No: 25464
  unsure (69, 80, 105, 445, 456, 466, 528)
aacgctccacgcgaattataaaaaacgaaaacgacacgtaccgccgctctcgaccaatacgaaaccccnacgcgaaaatncacgtacctctatttaacgcttttnatacgcgcccgaatctattaatactcaaaatataatcaaacgactcgaactaaacaaataaatacgaaactcgaaaaaaacgacgactaactaaaaccaacaaaaaaaacgcgatcgacgaaaaaaactaaaccgtaacaacgaccccctactacaaaacgacgaacgaaactacgaacctcgaaaaaattaataaacgaaaatcgctccgctttatatataactcgaacgaaacctcgcctttatccccgctctccgaaaacgcgactattcgtaaacaaaaaactaaacgatcaccgaacgtccgctccgaaataccgtcgaaaaaacaataaaaaancgtaaaccctncgtttacctnccctccctccctcccttccctacgaaccccgccgaattccccattatctaaaaaaacgaaancgat

SEQ ID NO: 25465 - DNA, 683 bp, Artificial Sequence
  chemically treated genomic DNA (Homo sapiens) CpG-island No: 25465
gacgtcgtggggcgtgttcggtatgacgatttgttacgatttgcgttttttttatttttatcgcgatttcgcgtacgtcggcgcgacgatgtttgcgattttttcgttttttatcgtgtcgacgggttaggtttattggtatacgttgttgcgtgcgcgggcgatcgagatcggttgtttcgtgttcgcgtcggtttaggtcggtatttataagggttttaatcgtaagatttacgggtattcgatcgtcgtggtttcgtggggcgaggtgttggtcgacgtcggggttgagaaggtaggtttcgttatcgtcgaggtcgatttcgttaaggtcgcggaggttcgtaagatggtgtcgtttttgacgtacgatcggaaatacgtcgcgtcggtgttgtataagtcggcggtcgcgaaggcggcggagtaattcgttagagttttcgcgcggcgatgcgttggattatcgttattttcggttcgttgattaggcgtgtttcgtaggcgacgacggagaatcgatcgcgtacgagttcgagtagttcgtcgttttttagtaggaatttcggattgttcggacggtcgaagcgtttattgttttttatgaaagtttcgtagaggagtacgtcgtcgcgtttgagggaatcgattagcgtcggtatttgtaacgtttgttttagttt

SEQ ID NO: 25466 - DNA, 683 bp, Artificial Sequence
  chemically treated genomic DNA (Homo sapiens) CpG-island No: 25466
aaactaaaacaaacgttacaaataccgacgctaatcgattccctcaaacgcgacgacgtactcctctacgaaactttcataaaaaacaataaacgcttcgaccgtccgaacaatccgaaattcctactaaaaaacgacgaactactcgaactcgtacgcgatcgattctccgtcgtcgcctacgaaacacgcctaatcaacgaaccgaaaataacgataatccaacgcatcgccgcgcgaaaactctaacgaattactccgccgccttcgcgaccgccgacttatacaacaccgacgcgacgtatttccgatcgtacgtcaaaaacgacaccatcttacgaacctccgcgaccttaacgaaatcgacctcgacgataacgaaacctaccttctcaaccccgacgtcgaccaacacctcgccccacgaaaccacgacgatcgaatacccgtaaatcttacgattaaaacccttataaataccgacctaaaccgacgcgaacacgaaacaaccgatctcgatcgcccgcgcacgcaacaacgtataccaataaacctaacccgtcgacacgataaaaaacgaaaaaatcgcaaacatcgtcgcgccgacgtacgcgaaatcgcgataaaaataaaaaaaacgcaaatcgtaacaaatcgtcataccgaacacgccccacgacgtc

SEQ ID NO: 25467 - DNA, 683 bp, Artificial Sequence
  chemically treated genomic DNA (Homo sapiens) CpG-island No: 25467
aggttgaggtaggcgttgtaagtgtcgacgttggtcgatttttttaagcgcggcggcgtgtttttttacgagatttttatggaaggtaatgagcgtttcggtcgttcgagtaattcggagtttttgttgaaggacggcgagttgttcgagttcgtgcgcggtcggtttttcgtcgtcgtttacgaagtacgtttgattagcgaatcgaagatggcgatggtttagcgtatcgtcgcgcgaaagttttagcgagttatttcgtcgttttcgcgatcgtcggtttgtgtagtatcggcgcggcgtattttcgatcgtgcgttagggacggtattattttgcgggttttcgcgattttggcgaggtcgatttcggcgatgacgaagtttgtttttttagtttcggcgtcggttagtatttcgttttacggggttacggcgatcgagtgttcgtaggttttgcggttggagtttttgtgggtgtcgatttgggtcggcgcgaatacgaagtagtcggtttcgatcgttcgcgtacgtagtagcgtgtgttagtgagtttggttcgtcggtacggtgaaggacgaggggatcgtaagtatcgtcgcgtcggcgtgcgcgagatcgcgatagagataggggaagcgtaggtcgtagtagatcgttatgtcgagtacgttttacggcgtt

SEQ ID NO: 25468 - DNA, 683 bp, Artificial Sequence
  chemically treated genomic DNA (Homo sapiens) CpG-island No: 25468
aacgccgtaaaacgtactcgacataacgatctactacgacctacgcttcccctatctctatcgcgatctcgcgcacgccgacgcgacgatacttacgatcccctcgtccttcaccgtaccgacgaaccaaactcactaacacacgctactacgtacgcgaacgatcgaaaccgactacttcgtattcgcgccgacccaaatcgacacccacaaaaactccaaccgcaaaacctacgaacactcgatcgccgtaaccccgtaaaacgaaatactaaccgacgccgaaactaaaaaaacaaacttcgtcatcgccgaaatcgacctcgccaaaatcgcgaaaacccgcaaaataataccgtccctaacgcacgatcgaaaatacgccgcgccgatactacacaaaccgacgatcgcgaaaacgacgaaataactcgctaaaactttcgcgcgacgatacgctaaaccatcgccatcttcgattcgctaatcaaacgtacttcgtaaacgacgacgaaaaaccgaccgcgcacgaactcgaacaactcgccgtccttcaacaaaaactccgaattactcgaacgaccgaaacgctcattaccttccataaaaatctcgtaaaaaaacacgccgccgcgcttaaaaaaatcgaccaacgtcgacacttacaacgcctacctcaacct

SEQ ID NO: 25469 - DNA, 757 bp, Artificial Sequence
  chemically treated genomic DNA (Homo sapiens) CpG-island No: 25469
ggttcgcgtttgtatgttagcggtcgtttttagtggtggttatcgttagtgttaattttttgcgtcgtcgtgtagtttcgttttttgtcgttgtagtcgtcgcgttcgttttagtgtttttaattcgcgttcgggagtgaggagtcgttaatattttagtttcgttgttgtcgttatcgtagtgttttttagtcgttattggttatttaaattttttagtattcgcgattttttcgggatttcgcggcggcggggtagaggcggtttaggggcggtacgcggttgtttcggtgcgtcgggtttttttcggtcgtcgtacggtcgggttttataggttgtttttttgagagaggtttagaatacggttaggtacgcgtcgtcgttatagttgcgttgttagcgacgaggtgagtgttaggtgtttggtgggtcgggcgcggggttcgtaaatttttgcgtacggcgttgattttttgcggttttgtcggcggtttcggtcgtttagacgtttcgttcgttacgaatttttggagacgtagggttttagttgttatcgtagtatttggattagggtgcggagcgttttttggatttaataatatcgggaggttttcgtttttttaaagtgcgtgcgcgtcgtgtggggagtgtacggaggttggcgggagacgtttttttggggaagggggaggcggttgttaagtttaggaaagtattcggtttttttttggtgtttttttgtttgtcgtttttggga

SEQ ID NO: 25470 - DNA, 757 bp, Artificial Sequence
  chemically treated genomic DNA (Homo sapiens) CpG-island No: 25470
tcccaaaaacgacaaacaaaaaaacaccaaaaaaaaaccgaatactttcctaaacttaacaaccgcctcccccttccccaaaaaaacgtctcccgccaacctccgtacactccccacacgacgcgcacgcactttaaaaaaacgaaaacctcccgatattattaaatccaaaaaacgctccgcaccctaatccaaatactacgataacaactaaaaccctacgtctccaaaaattcgtaacgaacgaaacgtctaaacgaccgaaaccgccgacaaaaccgcaaaaaatcaacgccgtacgcaaaaatttacgaaccccgcgcccgacccaccaaacacctaacactcacctcgtcgctaacaacgcaactataacgacgacgcgtacctaaccgtattctaaacctctctcaaaaaaacaacctataaaacccgaccgtacgacgaccgaaaaaaacccgacgcaccgaaacaaccgcgtaccgcccctaaaccgcctctaccccgccgccgcgaaatcccgaaaaaatcgcgaatactaaaaaatttaaataaccaataacgactaaaaaacactacgataacgacaacaacgaaactaaaatattaacgactcctcactcccgaacgcgaattaaaaacactaaaacgaacgcgacgactacaacgacaaaaaacgaaactacacgacgacgcaaaaaattaacactaacgataaccaccactaaaaacgaccgctaacatacaaacgcgaacc

SEQ ID NO: 25471 - DNA, 757 bp, Artificial Sequence
  chemically treated genomic DNA (Homo sapiens) CpG-island No: 25471
ttttaagagcggtaaataaaggggtattaggaagaaatcgagtatttttttaaatttagtagtcgttttttttttttttaaaggagcgtttttcgttaattttcgtatattttttatacggcgcgtacgtattttgggggagcggaaatttttcggtattgttgagtttagggagcgtttcgtattttagtttaagtgttgcggtaatagttggggttttgcgtttttaggagttcgtggcgagcggagcgtttggacggtcggagtcgtcggtaggatcgtagggagttagcgtcgtacgtaaaagtttgcggatttcgcgttcggtttattaaatatttagtatttatttcgtcgttagtagcgtaattgtggcggcggcgcgtatttggtcgtgttttgagttttttttaggagggtagtttgtgaggttcggtcgtgcggcggtcgaaaagagttcggcgtatcggagtagtcgcgtgtcgtttttgggtcgtttttgtttcgtcgtcgcggagtttcggaaaggtcgcgggtattggaaagtttaggtaattaatggcgattagagagtattgcggtggcggtagtagcggagttggggtgttggcggttttttattttcgagcgcgaattgggggtattggagcgggcgcggcggttgtagcgatagagggcgggattgtacggcggcgtaagggattggtattggcggtgattattattgggagcggtcgttagtatgtaaacgcggatt

SEQ ID NO: 25472 - DNA, 757 bp, Artificial Sequence
  chemically treated genomic DNA (Homo sapiens) CpG-island No: 25472
aatccgcgtttacatactaacgaccgctcccaataataatcaccgccaataccaatcccttacgccgccgtacaatcccgccctctatcgctacaaccgccgcgcccgctccaatacccccaattcgcgctcgaaaataaaaaaccgccaacaccccaactccgctactaccgccaccgcaatactctctaatcgccattaattacctaaactttccaatacccgcgacctttccgaaactccgcgacgacgaaacaaaaacgacccaaaaacgacacgcgactactccgatacgccgaactcttttcgaccgccgcacgaccgaacctcacaaactaccctcctaaaaaaaactcaaaacacgaccaaatacgcgccgccgccacaattacgctactaacgacgaaataaatactaaatatttaataaaccgaacgcgaaatccgcaaacttttacgtacgacgctaactccctacgatcctaccgacgactccgaccgtccaaacgctccgctcgccacgaactcctaaaaacgcaaaaccccaactattaccgcaacacttaaactaaaatacgaaacgctccctaaactcaacaataccgaaaaatttccgctcccccaaaatacgtacgcgccgtataaaaaatatacgaaaattaacgaaaaacgctcctttaaaaaaaaaaaaaacgactactaaatttaaaaaaatactcgatttcttcctaatacccctttatttaccgctcttaaaa

SEQ ID NO: 25473 - DNA, 638 bp, Artificial Sequence
  chemically treated genomic DNA (Homo sapiens) CpG-island No: 25473
acggtgatgtggcgaaattggcgggattttcgcgtcgcgcgtaggtgggcggtgtgttaaagcgtttttttgaaggtagtattttattttggtatcgggtggttaatcgttacggtataatttcgttaatcggatcggatttatagcgttcgtttaggtattattggtagaaggtgtgatggtatcgggaagcgggtaaatcgatttgtagcgttatcgttggaattattaatttttttcgggcggagagggttaacgtcgtttaatattgcgtaggagttggaattgtcgaagacggatttatttgagttggtgaagtttaaggtatcgtagtcgttgcgttatcgttggtttgaatcggtacgcgcgtttgttgtatcggtattaatgttaggtcggttttagtttcgttttggttgagttatcggttgaacggtatcggtgataaatattagtttgttatttatcgtaatcgtcgtatttatagaatatttcggttcggtttgatattttgttcggttagatgcggattaagttcgatggtggacgtttatttttttatatcgaacgtttttttcgttatttttgaatgtaggtcgatgaggagttttagtaacgcgttttttcggtttaggtga

SEQ ID NO: 25474 - DNA, 638 bp, Artificial Sequence
  chemically treated genomic DNA (Homo sapiens) CpG-island No: 25474
tcacctaaaccgaaaaaacgcgttactaaaactcctcatcgacctacattcaaaaataacgaaaaaaacgttcgatataaaaaaataaacgtccaccatcgaacttaatccgcatctaaccgaacaaaatatcaaaccgaaccgaaatattctataaatacgacgattacgataaataacaaactaatatttatcaccgataccgttcaaccgataactcaaccaaaacgaaactaaaaccgacctaacattaataccgatacaacaaacgcgcgtaccgattcaaaccaacgataacgcaacgactacgataccttaaacttcaccaactcaaataaatccgtcttcgacaattccaactcctacgcaatattaaacgacgttaaccctctccgcccgaaaaaaattaataattccaacgataacgctacaaatcgatttacccgcttcccgataccatcacaccttctaccaataatacctaaacgaacgctataaatccgatccgattaacgaaattataccgtaacgattaaccacccgataccaaaataaaatactaccttcaaaaaaacgctttaacacaccgcccacctacgcgcgacgcgaaaatcccgccaatttcgccacatcaccgt

SEQ ID NO: 25475 - DNA, 638 bp, Artificial Sequence
  chemically treated genomic DNA (Homo sapiens) CpG-island No: 25475
ttatttgggtcggaagggcgcgttgttaaaattttttatcggtttatatttaaaagtggcggagaaagcgttcgatatggaggggtaaacgtttattatcgggtttggttcgtatttaatcgggtagaatgttaagtcgaatcggggtattttgtgagtgcggcgattacggtgaatgataaattggtatttattatcgatatcgtttagtcggtgatttaattagggcgaaattaaagtcgatttgatattggtgtcggtatagtaaacgcgcgtgtcggtttaggttagcggtggcgtaacgattacggtattttggattttattaatttaggtgaattcgttttcggtagttttagtttttacgtaatattaagcgacgttaatttttttcgttcggagagggttagtagttttagcgataacgttgtaagtcgatttgttcgtttttcgatattattatattttttgttagtaatgtttgggcggacgttgtaaattcggttcggttagcgaaattgtgtcgtggcgattaattattcggtgttagggtaaggtgttgtttttagggagacgttttaatatatcgtttatttgcgcgcggcgcggggatttcgttagtttcgttatattatcgt

SEQ ID NO: 25476 - DNA, 638 bp, Artificial Sequence
  chemically treated genomic DNA (Homo sapiens) CpG-island No: 25476
acgataatataacgaaactaacgaaatccccgcgccgcgcgcaaataaacgatatattaaaacgtctccctaaaaacaacaccttaccctaacaccgaataattaatcgccacgacacaatttcgctaaccgaaccgaatttacaacgtccgcccaaacattactaacaaaaaatataataatatcgaaaaacgaacaaatcgacttacaacgttatcgctaaaactactaaccctctccgaacgaaaaaaattaacgtcgcttaatattacgtaaaaactaaaactaccgaaaacgaattcacctaaattaataaaatccaaaataccgtaatcgttacgccaccgctaacctaaaccgacacgcgcgtttactataccgacaccaatatcaaatcgactttaatttcgccctaattaaatcaccgactaaacgatatcgataataaataccaatttatcattcaccgtaatcgccgcactcacaaaataccccgattcgacttaacattctacccgattaaatacgaaccaaacccgataataaacgtttacccctccatatcgaacgctttctccgccacttttaaatataaaccgataaaaaattttaacaacgcgcccttccgacccaaataa

SEQ ID NO: 25477 - DNA, 649 bp, Artificial Sequence
  chemically treated genomic DNA (Homo sapiens) CpG-island No: 25477
  unsure (118, 633, 639, 641, 644)
gttaagttcgcgatcgcgtttggcggcgttaagtcgatgtgtagttcggggtttagtttttaaaggttttcgagattggttatcggaggggtttaaggagtgcgagtgtattggtcgntttttgttttaggttacgcgagattttgtttttagttgttgcgtttgggaaacggttcgtttggggcgtcgggttttatggaggttttgcgatttgatgtcgggttgggtttattttaagttttgggtttgtaatgggttgtggggtttgatggtaatggttcggttgtttcggttttcgtggtcgggtaggttattaatttttcgggtatgtggagggtggtttttcggggtcggttgtatgtgcggttgtttcgtagttttcgttatttcgttgttacggtgtagttgtgaacgtttttcgggtcggtgtattagcgtcgtgtggtgtggtttcgttcgggttgttgtgggagcgcgttcgtgttagtcggcgttttatgaggtcggcgtggcgggaggcgtgggcgcggcgtgacgtgggttgtttttatcggcggtggtgtgttttggtgtaggtgaagggggggtggttatgcgtcgggacgtagtcgcgcgtgtttttttttgttggtnatttgngnggngtttt

SEQ ID NO: 25478 - DNA, 649 bp, Artificial Sequence
  chemically treated genomic DNA (Homo sapiens) CpG-island No: 25478
  unsure (6, 9, 11, 17, 532)
aaaacnccncncaaatnaccaacaaaaaaaaacacgcgcgactacgtcccgacgcataaccacccccccttcacctacaccaaaacacaccaccgccgataaaaacaacccacgtcacgccgcgcccacgcctcccgccacgccgacctcataaaacgccgactaacacgaacgcgctcccacaacaacccgaacgaaaccacaccacacgacgctaatacaccgacccgaaaaacgttcacaactacaccgtaacaacgaaataacgaaaactacgaaacaaccgcacatacaaccgaccccgaaaaaccaccctccacatacccgaaaaattaataacctacccgaccacgaaaaccgaaacaaccgaaccattaccatcaaaccccacaacccattacaaacccaaaacttaaaataaacccaacccgacatcaaatcgcaaaacctccataaaacccgacgccccaaacgaaccgtttcccaaacgcaacaactaaaaacaaaatctcgcgtaacctaaaacaaaaancgaccaatacactcgcactccttaaacccctccgataaccaatctcgaaaacctttaaaaactaaaccccgaactacacatcgacttaacgccgccaaacgcgatcgcgaacttaac

SEQ ID NO: 25479 - DNA, 649 bp, Artificial Sequence
  chemically treated genomic DNA (Homo sapiens) CpG-island No: 25479
  unsure (6, 9, 11, 17, 532)
ggggtnttntntaggtngttagtaagggggggtacgcgcggttgcgtttcgacgtatagttattttttttttatttgtattaaaatatattatcgtcgatgaagataatttacgttacgtcgcgtttacgtttttcgttacgtcgattttatggggcgtcggttaatacgggcgcgtttttataatagttcgagcggagttatattatacggcgttggtatatcgattcgaagagcgtttatagttgtatcgtggtaacgaggtgacggagattgcggaataatcgtatatataatcggtttcggggggttattttttatatattcggaaggttggtaatttgttcgattacgaaggtcggaataatcgaattattgttattagattttataatttattgtaaatttagagtttaaaataagtttaattcgatattaaatcgtagaatttttatagggttcgacgttttaaacgagtcgttttttaagcgtagtagttggaggtagaatttcgcgtggtttggagtaaaagncggttagtatattcgtattttttgagttttttcgatggttagtttcgggaatttttaggggttggatttcgagttatatatcggtttggcgtcgttaaacgcggtcgcggatttgat

SEQ ID NO: 25480 - DNA, 649 bp, Artificial Sequence
  chemically treated genomic DNA (Homo sapiens) CpG-island No: 25480
  unsure (118, 633, 639, 641, 644)
atcaaatccgcgaccgcgtttaacgacgccaaaccgatatataactcgaaatccaacccctaaaaattcccgaaactaaccatcgaaaaaactcaaaaaatacgaatatactaaccgncttttactccaaaccacgcgaaattctacctccaactactacgcttaaaaaacgactcgtttaaaacgtcgaaccctataaaaattctacgatttaatatcgaattaaacttattttaaactctaaatttacaataaattataaaatctaataacaataattcgattattccgaccttcgtaatcgaacaaattaccaaccttccgaatatataaaaaataaccccccgaaaccgattatatatacgattattccgcaatctccgtcacctcgttaccacgatacaactataaacgctcttcgaatcgatataccaacgccgtataatataactccgctcgaactattataaaaacgcgcccgtattaaccgacgccccataaaatcgacgtaacgaaaaacgtaaacgcgacgtaacgtaaattatcttcatcgacgataatatattttaatacaaataaaaaaaaaataactatacgtcgaaacgcaaccgcgcgtacccccccttactaacnacctananaanacccc

SEQ ID NO: 25481 - DNA, 598 bp, Artificial Sequence
  chemically treated genomic DNA (Homo sapiens) CpG-island No: 25481
tggttagtgttatcggattcgttttgttgtttttttagaagcgcgggaagtatttgtgattattgtgatttgattcgcgtagcggggattttgaaaatacgggtaaaggttttagtcgcgaggttgtcgtttcgggttgggatgtgcgtttttaatgtcgggggatgagttttttttcgagtgttttttttgtttcgtcggtagggcgtttgtcgtggttgggcgagagagttgttggaggtcggaggtcggtgtttttcgggtgtgtagcggtttcgtgagagttgtcgggaggttgcggttgcgagatttggaagtgtgtgttgcgttcgtttgtgtaagttgtaaagtgtttcgagagtgttgtcggcgatggttgtgtgttttgtaggtgtaggatgttcgtgtgtttgtagaacgcgggagtgtgtcgtcgtcgtgtggtgtgttcgcgggtgtttcggagagagtgcgttggggttttttcggtgttgagtgtcgtttggtttagtggaggtatgtgtggggtgttcggtggtgtgtggttcgttgtggggtgcggtgggttatgtgttttgttgggtggttggtggtttgt

SEQ ID NO: 25482 - DNA, 598 bp, Artificial Sequence
  chemically treated genomic DNA (Homo sapiens) CpG-island No: 25482
acaaaccaccaaccacccaacaaaacacataacccaccgcaccccacaacgaaccacacaccaccgaacaccccacacatacctccactaaaccaaacgacactcaacaccgaaaaaaccccaacgcactctctccgaaacacccgcgaacacaccacacgacgacgacacactcccgcgttctacaaacacacgaacatcctacacctacaaaacacacaaccatcgccgacaacactctcgaaacactttacaacttacacaaacgaacgcaacacacacttccaaatctcgcaaccgcaacctcccgacaactctcacgaaaccgctacacacccgaaaaacaccgacctccgacctccaacaactctctcgcccaaccacgacaaacgccctaccgacgaaacaaaaaaaacactcgaaaaaaaactcatcccccgacattaaaaacgcacatcccaacccgaaacgacaacctcgcgactaaaacctttacccgtattttcaaaatccccgctacgcgaatcaaatcacaataatcacaaatacttcccgcgcttctaaaaaaacaacaaaacgaatccgataacactaacca

SEQ ID NO: 25483 - DNA, 598 bp, Artificial Sequence
  chemically treated genomic DNA (Homo sapiens) CpG-island No: 25483
atagattattaattatttaataaaatatatgatttatcgtattttataacgggttatatattatcggatattttatatatgtttttattgaattaaacgatatttaatatcgggaagattttaacgtatttttttcgggatattcgcgaatatattatacggcgacgatatattttcgcgttttataggtatacgagtattttgtatttgtagaatatataattatcgtcgataatattttcgaaatattttgtaatttatataaacgagcgtaatatatatttttaagtttcgtaatcgtaatttttcgatagtttttacgaaatcgttatatattcggaaagtatcgattttcggtttttaataattttttcgtttaattacgataaacgttttgtcggcggaataaaggaaatattcgagggaaagtttatttttcggtattgaaagcgtatattttaattcgaaacggtaatttcgcgattaaggtttttattcgtgtttttagaattttcgttacgcgaattaggttataatggttatagatgtttttcgcgtttttaaaaggatagtagagcgaattcggtaatattggtta

SEQ ID NO: 25484 - DNA, 598 bp, Artificial Sequence
  chemically treated genomic DNA (Homo sapiens) CpG-island No: 25484
taaccaatattaccgaattcgctctactatccttttaaaaacgcgaaaaacatctataaccattataacctaattcgcgtaacgaaaattctaaaaacacgaataaaaaccttaatcgcgaaattaccgtttcgaattaaaatatacgctttcaataccgaaaaataaactttccctcgaatatttcctttattccgccgacaaaacgtttatcgtaattaaacgaaaaaattattaaaaaccgaaaatcgatactttccgaatatataacgatttcgtaaaaactatcgaaaaattacgattacgaaacttaaaaatatatattacgctcgtttatataaattacaaaatatttcgaaaatattatcgacgataattatatattctacaaatacaaaatactcgtatacctataaaacgcgaaaatatatcgtcgccgtataatatattcgcgaatatcccgaaaaaaatacgttaaaatcttcccgatattaaatatcgtttaattcaataaaaacatatataaaatatccgataatatataacccgttataaaatacgataaatcatatattttattaaataattaataatctat

SEQ ID NO: 25485 - DNA, 593 bp, Artificial Sequence
  chemically treated genomic DNA (Homo sapiens) CpG-island No: 25485
taggcgcgtttttgcgtttttgttacggtatgatttagcgcggtgacgatagtacgcgttcgtcgttggttattatttgttcgttattcgttagttttgtgttcgcgtggaatattttgtcgtttgttattttttttagcggtaggtcgtggattacgttatcggtgcggtaattattcggatatttattcgtagttattattacgtcgagagaagcgcgtttattttattcggacgttttttcgtttagtttgtttttataggtcgttagaggagtttaattagatcggattttatgcgtagtaagtcggttgggttttcggatcgttaaagcggtagttaaatttaataattttcggattgttttgtttgtcgattattaggttcgcgtagagaaaatcggtgtaggtgttgtttttcggcgttatgttttttacggttggttagataatacgttttatggtgcgttgatgaacgttatcggttattatcggcgcgggggagtaagggttatttcgtcggtgtttggttcgggttttatgtttgtaggtttagtagaaaattgaatttataaatgtaagaatgaaaatttt

SEQ ID NO: 25486 - DNA, 593 bp, Artificial Sequence
  chemically treated genomic DNA (Homo sapiens) CpG-island No: 25486
aaaattttcattcttacatttataaattcaattttctactaaacctacaaacataaaacccgaaccaaacaccgacgaaataacccttactcccccgcgccgataataaccgataacgttcatcaacgcaccataaaacgtattatctaaccaaccgtaaaaaacataacgccgaaaaacaacacctacaccgattttctctacgcgaacctaataatcgacaaacaaaacaatccgaaaattattaaatttaactaccgctttaacgatccgaaaacccaaccgacttactacgcataaaatccgatctaattaaactcctctaacgacctataaaaacaaactaaacgaaaaaacgtccgaataaaataaacgcgcttctctcgacgtaataataactacgaataaatatccgaataattaccgcaccgataacgtaatccacgacctaccgctaaaaaaaataacaaacgacaaaatattccacgcgaacacaaaactaacgaataacgaacaaataataaccaacgacgaacgcgtactatcgtcaccgcgctaaatcataccgtaacaaaaacgcaaaaacgcgccta

SEQ ID NO: 25487 - DNA, 593 bp, Artificial Sequence
  chemically treated genomic DNA (Homo sapiens) CpG-island No: 25487
aagatttttatttttgtatttgtgaatttagttttttgttggatttgtaggtatgaaattcggattaaatatcggcgggatggtttttattttttcgcgtcggtagtaatcgatgacgtttattagcgtattatggaacgtattatttggttaatcgtgaaaggtatggcgtcggaaggtaatatttatatcggttttttttacgcgggtttgatgatcgataaatagggtaattcgaaggttattgaatttaattgtcgttttggcgattcggaaatttagtcgatttattgcgtatgaagttcgatttggttgagtttttttggcggtttgtgaaagtaaattggacgagaaaacgttcgagtgggatgaacgcgtttttttcggcgtggtgatggttgcgggtggatattcgggtgattatcgtatcggtgacgtgatttacggtttgtcgttggaagaagtggtaggcggtaaagtgttttacgcgggtataaaattggcggatgacgagtaggtagtgattaacggcgggcgcgtattgtcgttatcgcgttgggttatatcgtggtagaagcgtagaaacgcgttta

SEQ ID NO: 25488 - DNA, 593 bp, Artificial Sequence
  chemically treated genomic DNA (Homo sapiens) CpG-island No: 25488
taaacgcgtttctacgcttctaccacgatataacccaacgcgataacgacaatacgcgcccgccgttaatcactacctactcgtcatccgccaattttatacccgcgtaaaacactttaccgcctaccacttcttccaacgacaaaccgtaaatcacgtcaccgatacgataatcacccgaatatccacccgcaaccatcaccacgccgaaaaaaacgcgttcatcccactcgaacgttttctcgtccaatttactttcacaaaccgccaaaaaaactcaaccaaatcgaacttcatacgcaataaatcgactaaatttccgaatcgccaaaacgacaattaaattcaataaccttcgaattaccctatttatcgatcatcaaacccgcgtaaaaaaaaccgatataaatattaccttccgacgccatacctttcacgattaaccaaataatacgttccataatacgctaataaacgtcatcgattactaccgacgcgaaaaaataaaaaccatcccgccgatatttaatccgaatttcatacctacaaatccaacaaaaaactaaattcacaaatacaaaaataaaaatctt

SEQ ID NO: 25489 - DNA, 601 bp, Artificial Sequence
  chemically treated genomic DNA (Homo sapiens) CpG-island No: 25489
ggtggttaggataaagagtcgatgcgcgttattttgaatgcgttaggtcgttataacgcgttgaacgtcgtagttgcgttgcggttgttacggaagagggtattgacgacgaggttattttgcgggcgtttgaaagtttttaggggattggtcgtcgttttgattttttcggtgaattttcgttggagttagtgaatggtaaaagcggtacggtaatgttggtcgatgattacggttattattcgacggaagtggacgttattattaaagcggcgtcgtaggttggtcggataaaaatttggtaatgttgttttagtcgtatcgttttattcgtacgcgcgatttgtatgatgatttcgttaatgtgttgacgtaggttgatattttgttgatgttggaagtgtattcggttggcgaagttaatttcgggagcggatagtcgttcgttgtgtcgtataattcgtggacgtggggaaattgattttattttggtgtcggatcgggcgggtagttagatgttggtatcgggattaatcggtaacgatttgattttcgtttagggggttggaaatttggaaaaattgtcggttttttagttgaa

SEQ ID NO: 25490 - DNA, 601 bp, Artificial Sequence
  chemically treated genomic DNA (Homo sapiens) CpG-island No: 25490
ttcaactaaaaaaccgacaatttttccaaatttccaaccccctaaacgaaaatcaaatcgttaccgattaatcccgataccaacatctaactacccgcccgatccgacaccaaaataaaatcaatttccccacgtccacgaattatacgacacaacgaacgactatccgctcccgaaattaacttcgccaaccgaatacacttccaacatcaacaaaatatcaacctacgtcaacacattaacgaaatcatcatacaaatcgcgcgtacgaataaaacgatacgactaaaacaacattaccaaatttttatccgaccaacctacgacgccgctttaataataacgtccacttccgtcgaataataaccgtaatcatcgaccaacattaccgtaccgcttttaccattcactaactccaacgaaaattcaccgaaaaaatcaaaacgacgaccaatcccctaaaaactttcaaacgcccgcaaaataacctcgtcgtcaataccctcttccgtaacaaccgcaacgcaactacgacgttcaacgcgttataacgacctaacgcattcaaaataacgcgcatcgactctttatcctaaccacc

SEQ ID NO: 25491 - DNA, 601 bp, Artificial Sequence
  chemically treated genomic DNA (Homo sapiens) CpG-island No: 25491
tttagttaaagaatcggtaatttttttaaatttttagttttttgaacgagaattaggtcgttatcggttaatttcggtgttagtatttggttattcgttcgattcggtattagaatgggattaatttttttacgtttacgaattgtgcgatatagcgaacggttgttcgttttcggaattggtttcgttagtcggatatatttttagtattaatagggtattaatttgcgttagtatattggcgaaattattatataggtcgcgcgtacgggtaaaacggtgcggttgaaatagtattattaggtttttattcggttagtttgcggcgtcgttttaatggtggcgtttattttcgtcgggtggtggtcgtagttatcgattagtattgtcgtatcgtttttattatttattggttttagcgggaatttatcgaggaaattaaaacggcgattagttttttggaagtttttaagcgttcgtaaaatagtttcgtcgttaatgttttttttcgtagtaatcgtaacgtagttgcggcgtttagcgcgttatgacgatttggcgtatttagggtgacgcgtatcggttttttgttttggttatt

SEQ ID NO: 25492 - DNA, 601 bp, Artificial Sequence
  chemically treated genomic DNA (Homo sapiens) CpG-island No: 25492
aataaccaaaacaaaaaaccgatacgcgtcaccctaaatacgccaaatcgtcataacgcgctaaacgccgcaactacgttacgattactacgaaaaaaaacattaacgacgaaactattttacgaacgcttaaaaacttccaaaaaactaatcgccgttttaatttcctcgataaattcccgctaaaaccaataaataataaaaacgatacgacaatactaatcgataactacgaccaccacccgacgaaaataaacgccaccattaaaacgacgccgcaaactaaccgaataaaaacctaataatactatttcaaccgcaccgttttacccgtacgcgcgacctatataataatttcgccaatatactaacgcaaattaataccctattaatactaaaaatatatccgactaacgaaaccaattccgaaaacgaacaaccgttcgctatatcgcacaattcgtaaacgtaaaaaaattaatcccattctaataccgaatcgaacgaataaccaaatactaacaccgaaattaaccgataacgacctaattctcgttcaaaaaactaaaaatttaaaaaaattaccgattctttaactaaa

SEQ ID NO: 25493 - DNA, 737 bp, Artificial Sequence
  chemically treated genomic DNA (Homo sapiens) CpG-island No: 25493
  unsure (658)
tcgaggtggaatttacgtagtattacgtggtttatcgttagcgttattgtcgtatcggtgttttgtttcggtgttagttatagatcgtatagtttggcgattttagcgtagtttggtgtgacggtaatagttttggtttttttgtaacgtattttagtaaagaagtgagtattcggggtacgcgtttgcggtacgtttgatttttaggcgatgatgtagttggagttgtattagttagtagatttcggtacgttagtttgttcgttttaggtttgcggagacgtaggaggtaagtcgtagtattagtcgtagaagtttaagtaagtatcgttaattagcgagagatagcgtgtattcgatgcgtaagaaattatcgatattgtcggaattggcgagaaattagtaatacggttcgggtcgtagtttttgatggtgtaaacgttagatgcggcgattagttcgtttattttttgttaggaagaacgaataaatttatcgcgtttacgcgtttgtttagagtttttcgttttatcggcgtttttaatgatagaagtttatggtttaaacggatcgttatgtagcgttttcgttttacgttatagttttattagcgtttgcgtattatcgggtattaagcggttggtattgtaaaattcgnatattgtattttcggttatttagtattggtggttattcgacggtacggaagtaattttggtttttcggttaatttttta

SEQ ID NO: 25494 - DNA, 737 bp, Artificial Sequence
  chemically treated genomic DNA (Homo sapiens) CpG-island No: 25494
  unsure (80)
taaaaaattaaccgaaaaaccaaaattacttccgtaccgtcgaataaccaccaatactaaataaccgaaaatacaatatncgaattttacaataccaaccgcttaatacccgataatacgcaaacgctaataaaactataacgtaaaacgaaaacgctacataacgatccgtttaaaccataaacttctatcattaaaaacgccgataaaacgaaaaactctaaacaaacgcgtaaacgcgataaatttattcgttcttcctaacaaaaaataaacgaactaatcgccgcatctaacgtttacaccatcaaaaactacgacccgaaccgtattactaatttctcgccaattccgacaatatcgataatttcttacgcatcgaatacacgctatctctcgctaattaacgatacttacttaaacttctacgactaatactacgacttacctcctacgtctccgcaaacctaaaacgaacaaactaacgtaccgaaatctactaactaatacaactccaactacatcatcgcctaaaaatcaaacgtaccgcaaacgcgtaccccgaatactcacttctttactaaaatacgttacaaaaaaaccaaaactattaccgtcacaccaaactacgctaaaatcgccaaactatacgatctataactaacaccgaaacaaaacaccgatacgacaataacgctaacgataaaccacgtaatactacgtaaattccacctcga

SEQ ID NO: 25495 - DNA, 737 bp, Artificial Sequence
  chemically treated genomic DNA (Homo sapiens) CpG-island No: 25495
  unsure (80)
taaaaggttggtcgagaaattaggattgttttcgtatcgtcgaatggttattaatattgggtggtcgagggtgtagtatncgaattttatagtgttaatcgtttaatattcgatgatgcgtaaacgttgatgaaattgtggcgtgaagcgaaggcgttgtatagcgattcgtttgagttatgggtttttattattgaagacgtcgataaagcgaaaagttttaagtaggcgcgtggacgcggtggatttgttcgttttttttggtaggaggtgaacgaattgatcgtcgtatttaacgtttatattattaaaaattacggttcggatcgtgttgttggtttttcgttaatttcggtaatgtcgatggttttttacgtatcgggtgtacgttatttttcgttgattggcggtatttgtttaagtttttacgattggtattgcgatttgttttttgcgttttcgtaaatttggggcgagtaaattgacgtatcggaatttgttgattggtataattttagttatattatcgtttgggggttaaacgtgtcgtagacgcgtatttcggatgtttatttttttattgaagtgcgttataaagggattaaaattgttgtcgttatattagattacgttgaaatcgttaaattgtgcgatttgtggttggtatcgaaatagggtatcgatgcggtaatggcgttggcgatgggttacgtaatgttgcgtgaattttatttcga

SEQ ID NO: 25496 - DNA, 737 bp, Artificial Sequence
  chemically treated genomic DNA (Homo sapiens) CpG-island No: 25496
  unsure (658)
tcgaaataaaattcacgcaacattacgtaacccatcgccaacgccattaccgcatcgataccctatttcgataccaaccacaaatcgcacaatttaacgatttcaacgtaatctaatataacgacaacaattttaatccctttataacgcacttcaataaaaaaataaacatccgaaatacgcgtctacgacacgtttaacccccaaacgataatataactaaaattataccaatcaacaaattccgatacgtcaatttactcgccccaaatttacgaaaacgcaaaaaacaaatcgcaataccaatcgtaaaaacttaaacaaataccgccaatcaacgaaaaataacgtacacccgatacgtaaaaaaccatcgacattaccgaaattaacgaaaaaccaacaacacgatccgaaccgtaatttttaataatataaacgttaaatacgacgatcaattcgttcacctcctaccaaaaaaaacgaacaaatccaccgcgtccacgcgcctacttaaaacttttcgctttatcgacgtcttcaataataaaaacccataactcaaacgaatcgctatacaacgccttcgcttcacgccacaatttcatcaacgtttacgcatcatcgaatattaaacgattaacactataaaattcgnatactacaccctcgaccacccaatattaataaccattcgacgatacgaaaacaatcctaatttctcgaccaacctttta

SEQ ID NO: 25497 - DNA, 677 bp, Artificial Sequence
  chemically treated genomic DNA (Homo sapiens) CpG-island No: 25497
gtgcggcggttgttttttattggttcgtcggagtcgttcgttacgtcggcggcgggaggggcgatttttttttttttcgtcgtttttttagcggttgggtttttagagtgtttcgcggtcgtgtggagcgaggttttgttttcgcgttgagtcgtcgtcgtcgtcgtcgtttttttagttttagttttcgcgttaggttcggtttcgtcgcgttatgtcggattatagtacgggaggattttcgttcggtcgtcgtcgtcgttcgtcggcgggggcgggggaatcggaggcgtcgggggaggtttttcgtcgggttcgttagcgcgggggatcggggcggcggcggtttcggcggcggcggttcgggcggggggtcggtcgggggttttttttagttattcggcggaggcggttcgggaattcgtaaggacgttttcgtcgacgtcgtgtagcgggttcgttaggtgaggaggtcgagggtttgaggggcgcgttcgcgcgcgcgcgtaggcgggggagggggcgggggttacgtgcgcgcgcgcgcgtagggtcgcggaggggggtcggggtcgtcgcggggttacgtgggcggtaggcgggggtttggttttttcgttgcgtttcgagtgggattttaacgggtgatttttttgtagggagtaggggcgtattgg

SEQ ID NO: 25498 - DNA, 677 bp, Artificial Sequence
  chemically treated genomic DNA (Homo sapiens) CpG-island No: 25498
ccaatacgcccctactccctacaaaaaaatcacccgttaaaatcccactcgaaacgcaacgaaaaaaccaaacccccgcctaccgcccacgtaaccccgcgacgaccccgacccccctccgcgaccctacgcgcgcgcgcgcacgtaacccccgccccctcccccgcctacgcgcgcgcgcgaacgcgcccctcaaaccctcgacctcctcacctaacgaacccgctacacgacgtcgacgaaaacgtccttacgaattcccgaaccgcctccgccgaataactaaaaaaaacccccgaccgaccccccgcccgaaccgccgccgccgaaaccgccgccgccccgatcccccgcgctaacgaacccgacgaaaaacctcccccgacgcctccgattcccccgcccccgccgacgaacgacgacgacgaccgaacgaaaatcctcccgtactataatccgacataacgcgacgaaaccgaacctaacgcgaaaactaaaactaaaaaaacgacgacgacgacgacgactcaacgcgaaaacaaaacctcgctccacacgaccgcgaaacactctaaaaacccaaccgctaaaaaaacgacgaaaaaaaaaaaaatcgcccctcccgccgccgacgtaacgaacgactccgacgaaccaataaaaaacaaccgccgcac

SEQ ID NO: 25499 - DNA, 677 bp, Artificial Sequence
  chemically treated genomic DNA (Homo sapiens) CpG-island No: 25499
ttagtgcgtttttattttttgtaggggggttattcgttgggattttattcgaggcgtagcgggagggttaggttttcgtttatcgtttacgtgatttcgcgacggtttcggttttttttcgcgattttgcgcgcgcgcgcgtacgtgattttcgttttttttttcgtttgcgcgcgcgcgcgagcgcgttttttaggttttcggtttttttatttggcgggttcgttgtacggcgtcggcgaaagcgtttttgcggattttcgggtcgttttcgtcgggtggttgagaggggttttcggtcgatttttcgttcgggtcgtcgtcgtcgggatcgtcgtcgtttcggtttttcgcgttggcgggttcggcggagggtttttttcggcgttttcggttttttcgttttcgtcggcgggcggcggcggcggtcgggcgggggttttttcgtgttgtagttcgatatggcgcggcggggtcgggtttggcgcggaggttgaagttgaggaggcggcggcggcggcggcggtttaacgcgggaataaggtttcgttttatacggtcgcggagtattttgggaatttagtcgttgggaggacgacgaggggggagagagtcgtttttttcgtcgtcgacgtgacggacgatttcggcgggttaatgggaggtagtcgtcgtat

SEQ ID NO: 25500 - DNA, 677 bp, Artificial Sequence
  chemically treated genomic DNA (Homo sapiens) CpG-island No: 25500
atacgacgactacctcccattaacccgccgaaatcgtccgtcacgtcgacgacgaaaaaaacgactctctcccccctcgtcgtcctcccaacgactaaattcccaaaatactccgcgaccgtataaaacgaaaccttattcccgcgttaaaccgccgccgccgccgccgcctcctcaacttcaacctccgcgccaaacccgaccccgccgcgccatatcgaactacaacacgaaaaaacccccgcccgaccgccgccgccgcccgccgacgaaaacgaaaaaaccgaaaacgccgaaaaaaaccctccgccgaacccgccaacgcgaaaaaccgaaacgacgacgatcccgacgacgacgacccgaacgaaaaatcgaccgaaaacccctctcaaccacccgacgaaaacgacccgaaaatccgcaaaaacgctttcgccgacgccgtacaacgaacccgccaaataaaaaaaccgaaaacctaaaaaacgcgctcgcgcgcgcgcgcaaacgaaaaaaaaaacgaaaatcacgtacgcgcgcgcgcgcaaaatcgcgaaaaaaaaccgaaaccgtcgcgaaatcacgtaaacgataaacgaaaacctaaccctcccgctacgcctcgaataaaatcccaacgaataacccccctacaaaaaataaaaacgcactaa

SEQ ID NO: 25501 - DNA, 876 bp, Artificial Sequence
  chemically treated genomic DNA (Homo sapiens) CpG-island No: 25501
  unsure (217)
tttttcgatatagtagtatattcgtaagttgacgatcgttgggtatatcgttaaataatttcgttacggtgcgaaaatttgtcggtcgttacgcgttggttgattgtgagttggttcgttgttgtgggtagaaagcgagcggggaatttgcgcgatattgttcggcgatgatgacgcgatattaattagcgagttgtagtagatgtttttcgttgtngataacgcgtttgtcgatttgatgttttagtaatatgtgcgtgaagtgatcgttagttttaattaacgcgatacgtcgttgacgttatcgttggatattcgcggtattgttttttagtaataagtttggtaggtattgcgtacgatattttgcggtgaaatcgttagttattagtaattggttaacgttatcggtaaatcgaaagcggtacgggtcgttgttagcgtttgtgtcgttaataagttggttattataatattttgttatcgggtggttcgtggtgatggtatatttttcggttatcgttggggcgtgtcgcgtaaagcgtaattgttgcgtcgcgaagttgaaaatgaggagaggtaatgttggatttgtttgtcgatgttgaatcgtggtaagagttattggcggttggtgcggtaattttacggcgttttgtttttaacgttgcggagtaattgattcgcgatattaatgacgttgttagttagtcgtcgtttcgttagatggttattttcgggggatatattatgtcggtggcgatgattaattgtgggtatttgggttggacgatttatcggtaaggttatttttattcgtttattgattcgtaaataaataaatcgtggttcgttatgttatagagtttttataat

SEQ ID NO: 25502 - DNA, 876 bp, Artificial Sequence
  chemically treated genomic DNA (Homo sapiens) CpG-island No: 25502
  unsure (660)
attataaaaactctataacataacgaaccacgatttatttatttacgaatcaataaacgaataaaaataaccttaccgataaatcgtccaacccaaatacccacaattaatcatcgccaccgacataatatatcccccgaaaataaccatctaacgaaacgacgactaactaacaacgtcattaatatcgcgaatcaattactccgcaacgttaaaaacaaaacgccgtaaaattaccgcaccaaccgccaataactcttaccacgattcaacatcgacaaacaaatccaacattacctctcctcattttcaacttcgcgacgcaacaattacgctttacgcgacacgccccaacgataaccgaaaaatataccatcaccacgaaccacccgataacaaaatattataataaccaacttattaacgacacaaacgctaacaacgacccgtaccgctttcgatttaccgataacgttaaccaattactaataactaacgatttcaccgcaaaatatcgtacgcaatacctaccaaacttattactaaaaaacaataccgcgaatatccaacgataacgtcaacgacgtatcgcgttaattaaaactaacgatcacttcacgcacatattactaaaacatcaaatcgacaaacgcgttatcnacaacgaaaaacatctactacaactcgctaattaatatcgcgtcatcatcgccgaacaatatcgcgcaaattccccgctcgctttctacccacaacaacgaaccaactcacaatcaaccaacgcgtaacgaccgacaaattttcgcaccgtaacgaaattatttaacgatatacccaacgatcgtcaacttacgaatatactactatatcgaaaaa

SEQ ID NO: 25503 - DNA, 876 bp, Artificial Sequence
  chemically treated genomic DNA (Homo sapiens) CpG-island No: 25503
  unsure (660)
attatgaagattttgtggtatggcgggttacggtttatttgtttgcggattaatgggcgaatagagataattttgtcgatgggtcgtttagtttagatgtttatagttggttatcgttatcgatatggtatatttttcgggggtgattatttggcgaaacggcgattggttggtaacgttattaatatcgcggattagttgtttcgtagcgttaaaagtaaaacgtcgtaaaattatcgtattagtcgttagtggtttttgttacggtttagtatcggtaaatagatttaatattatttttttttatttttagtttcgcggcgtagtagttgcgttttacgcgatacgttttagcggtaatcggaaagtgtgttattattacggattattcgatgatagggtattatgatagttagtttgttggcggtataggcgttggtaacggttcgtatcgttttcggtttgtcgatggcgttagttagttgttgataattgacggttttatcgtaaggtatcgtgcgtagtgtttgttagatttgttgttgaaaagtagtgtcgcgaatgtttagcggtaacgttagcggcgtatcgcgttgattgaggttggcgattattttacgtatatgttgttgaaatattaaatcggtaggcgcgttgttngtagcgggaaatatttgttgtaattcgttgattagtgtcgcgttattatcgtcgaataatatcgcgtaaatttttcgttcgttttttgtttatagtaacgaattagtttataattagttagcgcgtaacgatcggtagattttcgtatcgtgacgggattgtttagcggtatgtttaacggtcgttagtttgcgaatatattgttgtgtcggggaa

SEQ ID NO: 25504 - DNA, 876 bp, Artificial Sequence
  chemically treated genomic DNA (Homo sapiens) CpG-island No: 25504
  unsure (217)
ttccccgacacaacaatatattcgcaaactaacgaccgttaaacataccgctaaacaatcccgtcacgatacgaaaatctaccgatcgttacgcgctaactaattataaactaattcgttactataaacaaaaaacgaacgaaaaatttacgcgatattattcgacgataataacgcgacactaatcaacgaattacaacaaatatttcccgctacnaacaacgcgcctaccgatttaatatttcaacaacatatacgtaaaataatcgccaacctcaatcaacgcgatacgccgctaacgttaccgctaaacattcgcgacactacttttcaacaacaaatctaacaaacactacgcacgataccttacgataaaaccgtcaattatcaacaactaactaacgccatcgacaaaccgaaaacgatacgaaccgttaccaacgcctataccgccaacaaactaactatcataataccctatcatcgaataatccgtaataataacacactttccgattaccgctaaaacgtatcgcgtaaaacgcaactactacgccgcgaaactaaaaataaaaaaaaataatattaaatctatttaccgatactaaaccgtaacaaaaaccactaacgactaatacgataattttacgacgttttacttttaacgctacgaaacaactaatccgcgatattaataacgttaccaaccaatcgccgtttcgccaaataatcacccccgaaaaatataccatatcgataacgataaccaactataaacatctaaactaaacgacccatcgacaaaattatctctattcgcccattaatccgcaaacaaataaaccgtaacccgccataccacaaaatcttcataat

SEQ ID NO: 25505 - DNA, 548 bp, Artificial Sequence
  chemically treated genomic DNA (Homo sapiens) CpG-island No: 25505
tagatcgagggagatttttaggcgatcggatttttcggcgttaatgttgatattaatatcgtattgacgcgttatagggtgagtgattttagacgcgggtaaagtttttttattattcggttatattgggcgcggttataacgcggatgtagcgtcgatagtttgattgaaatgttcggttttttatagatgttacgatcgttagacgttttatcgatggcgtgaatcgttgttgataggaaattatatacgtttgtgtatttgcggcggttagcgcggtttcgttagtatatcgtaagagtaacggaaattttttttttttagtttgcgggtattggttaacgttttcgcgatggtttcgttagtgacgaattgtttatttattaggcgtatcgtatatttatatttttgcggattagcggtttatcgttttatcgataatgcggtttagcgagcgggagaggttggtttcgttatgggtggaaatagttttgtagtaaatagtagttttaggtgggggtattataaatagtgacgggttacgatta

SEQ ID NO: 25506 - DNA, 548 bp, Artificial Sequence
  chemically treated genomic DNA (Homo sapiens) CpG-island No: 25506
taatcgtaacccgtcactatttataatacccccacctaaaactactatttactacaaaactatttccacccataacgaaaccaacctctcccgctcgctaaaccgcattatcgataaaacgataaaccgctaatccgcaaaaatataaatatacgatacgcctaataaataaacaattcgtcactaacgaaaccatcgcgaaaacgttaaccaatacccgcaaactaaaaaaaaaaaatttccgttactcttacgatatactaacgaaaccgcgctaaccgccgcaaatacacaaacgtatataatttcctatcaacaacgattcacgccatcgataaaacgtctaacgatcgtaacatctataaaaaaccgaacatttcaatcaaactatcgacgctacatccgcgttataaccgcgcccaatataaccgaataataaaaaaactttacccgcgtctaaaatcactcaccctataacgcgtcaatacgatattaatatcaacattaacgccgaaaaatccgatcgcctaaaaatctccctcgatcta

SEQ ID NO: 25507 - DNA, 548 bp, Artificial Sequence
  chemically treated genomic DNA (Homo sapiens) CpG-island No: 25507
tggtcgtagttcgttattgtttgtaatgtttttatttggggttgttgtttattgtaaaattgtttttatttataacgaagttagtttttttcgttcgttgaatcgtattatcggtaaaacggtgaatcgttgattcgtaaaggtgtggatatgcgatgcgtttgatgggtgagtagttcgttattggcgaaattatcgcggaagcgttagttaatgttcgtaagttggaagagaaaggttttcgttatttttacgatatgttggcgaagtcgcgttgatcgtcgtagatgtataggcgtatatggttttttattagtagcgatttacgttatcggtaaagcgtttaacggtcgtggtatttatgaagggtcgggtattttaattaaattgtcggcgttgtattcgcgttatagtcgcgtttagtatgatcgggtaatggaagagttttattcgcgtttgaaattatttattttgtggcgcgttagtacgatattggtattaatattgacgtcgaagagttcgatcgtttggagatttttttcgatttg

SEQ ID NO: 25508 - DNA, 548 bp, Artificial Sequence
  chemically treated genomic DNA (Homo sapiens) CpG-island No: 25508
caaatcgaaaaaaatctccaaacgatcgaactcttcgacgtcaatattaataccaatatcgtactaacgcgccacaaaataaataatttcaaacgcgaataaaactcttccattacccgatcatactaaacgcgactataacgcgaatacaacgccgacaatttaattaaaatacccgacccttcataaataccacgaccgttaaacgctttaccgataacgtaaatcgctactaataaaaaaccatatacgcctatacatctacgacgatcaacgcgacttcgccaacatatcgtaaaaataacgaaaacctttctcttccaacttacgaacattaactaacgcttccgcgataatttcgccaataacgaactactcacccatcaaacgcatcgcatatccacacctttacgaatcaacgattcaccgttttaccgataatacgattcaacgaacgaaaaaaactaacttcgttataaataaaaacaattttacaataaacaacaaccccaaataaaaacattacaaacaataacgaactacgacca

SEQ ID NO: 25509 - DNA, 521 bp, Artificial Sequence
  chemically treated genomic DNA (Homo sapiens) CpG-island No: 25509
cggcgtgttgtatttcggatgtatatggtcgaagtatttaaagaataggttgtttttcgttatcgcgtattttagtcgcggttggtatattacgtagttggaaagcgaattaagaatgacgattatcgtcgtgatggtaataaagattttagcggtgttgtcgagtgcggggatttaggttagggcgtcggaaatcggcgttttagaattggcgagtttgtcgaagggtattaggtcggaaattattagcgttagtagggtgtagagtattagaattagtagataggaattaattagcgttcgtggtatggttttttcggggtttttaatttcgtcggttatataatagatagaggttatgtcggtatacgattaattggtggtagagattttcgtagtagcgttataaagttgttcgttgcgtaaatcgtagtggtgtaggggcggtaaaatttttcgttttaaatttagagattttagggttatgacgatagtgaacgggataattttggcgatgtaat

SEQ ID NO: 25510 - DNA, 521 bp, Artificial Sequence
  chemically treated genomic DNA (Homo sapiens) CpG-island No: 25510
attacatcgccaaaattatcccgttcactatcgtcataaccctaaaatctctaaatttaaaacgaaaaattttaccgcccctacaccactacgatttacgcaacgaacaactttataacgctactacgaaaatctctaccaccaattaatcgtataccgacataacctctatctattatataaccgacgaaattaaaaaccccgaaaaaaccataccacgaacgctaattaattcctatctactaattctaatactctacaccctactaacgctaataatttccgacctaatacccttcgacaaactcgccaattctaaaacgccgatttccgacgccctaacctaaatccccgcactcgacaacaccgctaaaatctttattaccatcacgacgataatcgtcattcttaattcgctttccaactacgtaatataccaaccgcgactaaaatacgcgataacgaaaaacaacctattctttaaatacttcgaccatatacatccgaaatacaacacgccg

SEQ ID NO: 25511 - DNA, 521 bp, Artificial Sequence
  chemically treated genomic DNA (Homo sapiens) CpG-island No: 25511
attatatcgttaaaattatttcgtttattatcgttatggttttgggatttttgggtttaaagcggagaattttgtcgtttttatattattgcgatttgcgtaacgggtagttttatggcgttgttgcggggatttttgttattagttggtcgtatatcggtatggtttttatttgttatatgatcggcgaaattaaaaatttcggaaaaattatgttacgagcgttgattggtttttgtttgttggttttggtgttttatattttgttggcgttggtgattttcggtttgatgtttttcgataaattcgttaattttgaaacgtcgattttcgacgttttgatttggattttcgtattcggtagtatcgttgggatttttgttgttattacggcgatgatcgttatttttggttcgttttttagttgcgtgatgtattagtcgcggttggaatacgcgatggcgaaagataatttgttttttaaatgtttcggttatgtgtattcgaaatataatacgtcg

SEQ ID NO: 25512 - DNA, 521 bp, Artificial Sequence
  chemically treated genomic DNA (Homo sapiens) CpG-island No: 25512
cgacgtattatatttcgaatacacataaccgaaacatttaaaaaacaaattatctttcgccatcgcgtattccaaccgcgactaatacatcacgcaactaaaaaacgaaccaaaaataacgatcatcgccgtaataacaacaaaaatcccaacgatactaccgaatacgaaaatccaaatcaaaacgtcgaaaatcgacgtttcaaaattaacgaatttatcgaaaaacatcaaaccgaaaatcaccaacgccaacaaaatataaaacaccaaaaccaacaaacaaaaaccaatcaacgctcgtaacataatttttccgaaatttttaatttcgccgatcatataacaaataaaaaccataccgatatacgaccaactaataacaaaaatccccgcaacaacgccataaaactacccgttacgcaaatcgcaataatataaaaacgacaaaattctccgctttaaacccaaaaatcccaaaaccataacgataataaacgaaataattttaacgatataat

SEQ ID NO: 25513 - DNA, 570 bp, Artificial Sequence
  chemically treated genomic DNA (Homo sapiens) CpG-island No: 25513
gggatcgcgtaggcgattatgtagtagtttgaagaggcgttaaaataattggcgtaggggttaggtagtagttaggcgttgacgtaggtgcgtcgttgggatagtgtttgttagaaattattcgatgttaatttggcgttgattttagtggttggcgagtatgcggcggagttggtaaattaggcgttggatcgtaattttaacgtgatgatgtttttcgataacgttacgttggaagatgaaatttaatttaaaatcgcgcgcgggaaaaaggtttgttggtgatggggtcggattgcggtacgtcgatgattgtcggtatatcgttggtttttgttaacgtgatgtcggaaggtaatattggcgttattggcgttttcggtatcgggatttaggagttgtgttcgtagattgcgttggtagatttgttaggcgggggggggaatagtacggatttaaattcggtattcggttaatttgaatagtttataggttacggtataatgttgttttttacgatcgtttttttaaatttgcgtggatttgttcgtttttaattacgttgtgggt

SEQ ID NO: 25514 - DNA, 570 bp, Artificial Sequence
  chemically treated genomic DNA (Homo sapiens) CpG-island No: 25514
acccacaacgtaattaaaaacgaacaaatccacgcaaatttaaaaaaacgatcgtaaaaaacaacattataccgtaacctataaactattcaaattaaccgaataccgaatttaaatccgtactattcccccccccgcctaacaaatctaccaacgcaatctacgaacacaactcctaaatcccgataccgaaaacgccaataacgccaatattaccttccgacatcacgttaacaaaaaccaacgatataccgacaatcatcgacgtaccgcaatccgaccccatcaccaacaaacctttttcccgcgcgcgattttaaattaaatttcatcttccaacgtaacgttatcgaaaaacatcatcacgttaaaattacgatccaacgcctaatttaccaactccgccgcatactcgccaaccactaaaatcaacgccaaattaacatcgaataatttctaacaaacactatcccaacgacgcacctacgtcaacgcctaactactacctaacccctacgccaattattttaacgcctcttcaaactactacataatcgcctacgcgatccc

SEQ ID NO: 25515 - DNA, 570 bp, Artificial Sequence
  chemically treated genomic DNA (Homo sapiens) CpG-island No: 25515
gtttataacgtagttgaaaacggataaatttacgtaggtttaggaaggcgatcgtaggaggtagtattatgtcgtgatttatagattgtttaggttggtcgggtatcgagtttgaattcgtattgttttttttttcgtttggtaggtttgttagcgtaatttgcgaatatagtttttgaatttcggtatcggaagcgttaatgacgttaatattgtttttcggtattacgttagtaaaagttagcggtgtgtcggtaattatcgacgtatcgtagttcggttttattattagtaagtttttttttcgcgcgcggttttaagttggattttattttttagcgtgacgttatcggagaatattattacgttgaggttgcgatttagcgtttggtttgttagtttcgtcgtatattcgttagttattgaaattagcgttagattggtatcgggtaatttttgataggtattgttttagcgacgtatttgcgttaacgtttggttgttgtttgatttttgcgttagttgttttagcgtttttttaagttgttgtataatcgtttgcgcgatttt

SEQ ID NO: 25516 - DNA, 570 bp, Artificial Sequence
  chemically treated genomic DNA (Homo sapiens) CpG-island No: 25516
aaaatcgcgcaaacgattatacaacaacttaaaaaaacgctaaaacaactaacgcaaaaatcaaacaacaaccaaacgttaacgcaaatacgtcgctaaaacaatacctatcaaaaattacccgataccaatctaacgctaatttcaataactaacgaatatacgacgaaactaacaaaccaaacgctaaatcgcaacctcaacgtaataatattctccgataacgtcacgctaaaaaataaaatccaacttaaaaccgcgcgcgaaaaaaaaacttactaataataaaaccgaactacgatacgtcgataattaccgacacaccgctaacttttactaacgtaataccgaaaaacaatattaacgtcattaacgcttccgataccgaaattcaaaaactatattcgcaaattacgctaacaaacctaccaaacgaaaaaaaaaacaatacgaattcaaactcgatacccgaccaacctaaacaatctataaatcacgacataatactacctcctacgatcgccttcctaaacctacgtaaatttatccgttttcaactacgttataaac

SEQ ID NO: 25517 - DNA, 588 bp, Artificial Sequence
  chemically treated genomic DNA (Homo sapiens) CpG-island No: 25517
taattttattaatttcggtgattcgaggttaaagcgttattcgtatagatattaggttttttcgttatatttattatcgtttttagtttttcgcgtagattttgcgtatgcgcgtatcggatattaagcgttgttttacgtttttattaatttgggcgttcgttggttcgtagtttaggttgggtttgttatcgttttagtgtttagtacggttttgcggtaggacgaattcgggttaggtaattttttgtttcgattttgtaatacggtcgattcgggttaagttagttcggtttttttttttagttagtattcgtaaggtcgttgggggttaagtttgaagggtcgagttgttcggcgatagtaagcgttcgcgcgcgggataatggttgtttttgtggtcgaattcggaagtgtatttgggttcggagagttagaattataatttttagaagttttcgcggcgcggacggttagtaggcggggtttcggtttttttaaggaagtggggcgggggatcgggttagaagttaagagggcgttttcgttcggggttcgggggggcgttatatttgtgtatgtgtaggt

SEQ ID NO: 25518 - DNA, 588 bp, Artificial Sequence
  chemically treated genomic DNA (Homo sapiens) CpG-island No: 25518
acctacacatacacaaatataacgcccccccgaaccccgaacgaaaacgccctcttaacttctaacccgatcccccgccccacttccttaaaaaaaccgaaaccccgcctactaaccgtccgcgccgcgaaaacttctaaaaattataattctaactctccgaacccaaatacacttccgaattcgaccacaaaaacaaccattatcccgcgcgcgaacgcttactatcgccgaacaactcgacccttcaaacttaacccccaacgaccttacgaatactaactaaaaaaaaaaaccgaactaacttaacccgaatcgaccgtattacaaaatcgaaacaaaaaattacctaacccgaattcgtcctaccgcaaaaccgtactaaacactaaaacgataacaaacccaacctaaactacgaaccaacgaacgcccaaattaataaaaacgtaaaacaacgcttaatatccgatacgcgcatacgcaaaatctacgcgaaaaactaaaaacgataataaatataacgaaaaaacctaatatctatacgaataacgctttaacctcgaatcaccgaaattaataaaatta

SEQ ID NO: 25519 - DNA, 588 bp, Artificial Sequence
  chemically treated genomic DNA (Homo sapiens) CpG-island No: 25519
atttgtatatgtataggtgtggcgttttttcgggtttcggacgaggacgtttttttagtttttggttcggtttttcgttttatttttttggagaagtcggaatttcgtttattgatcgttcgcgtcgcggaggtttttgggaattgtagttttggtttttcgagtttaagtgtattttcgggttcggttataagagtagttattgtttcgcgcgcggacgtttgttgtcgtcgagtagttcggttttttagatttaatttttagcggttttgcggatgttgattaggagaggggatcgaattagtttaattcgagtcggtcgtgttgtagaatcggggtagggggttgtttaattcgagttcgttttgtcgtagagtcgtgttaggtattgaggcggtgataggtttagtttgggttgcgggttagcggacgtttaggttggtaggggcgtggggtagcgtttggtgttcgatgcgcgtatgcgtagggtttacgcgggaagttggaagcggtggtgagtgtagcggggagatttggtatttgtgcgggtggcgttttagtttcgggttatcggggttgatggagtta

SEQ ID NO: 25520 - DNA, 588 bp, Artificial Sequence
  chemically treated genomic DNA (Homo sapiens) CpG-island No: 25520
taactccatcaaccccgataacccgaaactaaaacgccacccgcacaaataccaaatctccccgctacactcaccaccgcttccaacttcccgcgtaaaccctacgcatacgcgcatcgaacaccaaacgctaccccacgcccctaccaacctaaacgtccgctaacccgcaacccaaactaaacctatcaccgcctcaatacctaacacgactctacgacaaaacgaactcgaattaaacaaccccctaccccgattctacaacacgaccgactcgaattaaactaattcgatcccctctcctaatcaacatccgcaaaaccgctaaaaattaaatctaaaaaaccgaactactcgacgacaacaaacgtccgcgcgcgaaacaataactactcttataaccgaacccgaaaatacacttaaactcgaaaaaccaaaactacaattcccaaaaacctccgcgacgcgaacgatcaataaacgaaattccgacttctccaaaaaaataaaacgaaaaaccgaaccaaaaactaaaaaaacgtcctcgtccgaaacccgaaaaaacgccacacctatacatatacaaat

SEQ ID NO: 25521 - DNA, 1222 bp, Artificial Sequence
  chemically treated genomic DNA (Homo sapiens) CpG-island No: 25521
gcgtagagggagtttcgcgtttgttaaattatatagtggggattcggttttaggagggcggatgcgggtcggggacgacgtggcgtttagaggggtaggtcgagcgcgtggagaggaaagcgtttttaaggggggcgttagggagtcgcgggggggtttcgatttcgtaaggcgtttcggtgtcgtttttattttggaggtagtaggtttggtagtcgtcgtcgcgtagtttttgtaggagtaggtcgagtacggaggcgggagcgtcgggttcgggttgttattcggtcgtggtttcgtcgtagagtagtacggtggtcgttttgtagcgcgtggcgaagcgttttttgtcggcgtggttggggatgatggagcggatgggtaggttgtttttgcgtaggcggcgtaatatgaggttcgggatggttaggttgatggtcgtttcgatgtgcgacgattcgaagagttcgtgtcggttcggtagtcgagtagtagtaaggacgcgtcgtcgcgcgtttttagttttttttgtagttattcggcgtttttgtagggtatggtttttgttttcgtcgtcgcgttcgtttcggtgtttgcgtcggatttcgatttcgtatcgggttcggatttcgttcgggtgtttttagtcgtcgtcgttttcgaagtcgatatgtgcgttcgcgttggggggtcgcggagttggttttttatggggagcgcgggcggttcggggtcggggtcgggtagttttgttttgggacggcgtttcggtcgcgcgggttttagtcgcgttttcgggcgttcgtttttcgtcgagttgcgcgttcgtcgtttcggtttttcggtttttcggttttcgtttcgttcgttcgttcggtttttcgcgcgtatcgcggtttgatagttttaattaaacggcggtttcggcggtcgcgcgtcgaggcgtttttcggggggcggggtcgcgggggtcggcgttcgggtttaaaggcgtagcgtttttatcgtttttttttacggggtatgcgggcgcgttcgcgattcgagttcgggagattagcggcggggtttttttttatcgttttcgtatcgttgttttttggattagttcggagttgattacgattcgtttagggatttcggtttagacgtttttatgggtttattttgcgcgtgtttttaagtttttttggatattgcgggaagagaggttttgggggcg

SEQ ID NO: 25522 - DNA, 1222 bp, Artificial Sequence
  chemically treated genomic DNA (Homo sapiens) CpG-island No: 25522
cgcccccaaaacctctcttcccgcaatatccaaaaaaacttaaaaacacgcgcaaaataaacccataaaaacgtctaaaccgaaatccctaaacgaatcgtaatcaactccgaactaatccaaaaaacaacgatacgaaaacgataaaaaaaaaccccgccgctaatctcccgaactcgaatcgcgaacgcgcccgcataccccgtaaaaaaaaacgataaaaacgctacgcctttaaacccgaacgccgacccccgcgaccccgccccccgaaaaacgcctcgacgcgcgaccgccgaaaccgccgtttaattaaaactatcaaaccgcgatacgcgcgaaaaaccgaacgaacgaacgaaacgaaaaccgaaaaaccgaaaaaccgaaacgacgaacgcgcaactcgacgaaaaacgaacgcccgaaaacgcgactaaaacccgcgcgaccgaaacgccgtcccaaaacaaaactacccgaccccgaccccgaaccgcccgcgctccccataaaaaaccaactccgcgaccccccaacgcgaacgcacatatcgacttcgaaaacgacgacgactaaaaacacccgaacgaaatccgaacccgatacgaaatcgaaatccgacgcaaacaccgaaacgaacgcgacgacgaaaacaaaaaccataccctacaaaaacgccgaataactacaaaaaaaactaaaaacgcgcgacgacgcgtccttactactactcgactaccgaaccgacacgaactcttcgaatcgtcgcacatcgaaacgaccatcaacctaaccatcccgaacctcatattacgccgcctacgcaaaaacaacctacccatccgctccatcatccccaaccacgccgacaaaaaacgcttcgccacgcgctacaaaacgaccaccgtactactctacgacgaaaccacgaccgaataacaacccgaacccgacgctcccgcctccgtactcgacctactcctacaaaaactacgcgacgacgactaccaaacctactacctccaaaataaaaacgacaccgaaacgccttacgaaatcgaaacccccccgcgactccctaacgccccccttaaaaacgctttcctctccacgcgctcgacctacccctctaaacgccacgtcgtccccgacccgcatccgccctcctaaaaccgaatccccactatataatttaacaaacgcgaaactccctctacgc

SEQ ID NO: 25523 - DNA, 1222 bp, Artificial Sequence
  chemically treated genomic DNA (Homo sapiens) CpG-island No: 25523
cgtttttagggttttttttttcgtagtgtttagaagagtttgggagtacgcgtagagtgaatttatgagggcgtttaggtcggggtttttaggcggatcgtagttagtttcgagttagtttagggggtaacggtgcggaggcggtgggggagggtttcgtcgttggtttttcgggttcgggtcgcgagcgcgttcgtatatttcgtggggaggggcggtggaggcgttgcgtttttaagttcgggcgtcggttttcgcggtttcgtttttcggagaacgtttcggcgcgcggtcgtcggagtcgtcgtttaattggggttgttaggtcgcggtgcgcgcggagggtcgggcgggcgggcgggacggaggtcgggaggtcgggaggtcggggcggcgggcgcgtagttcggcgggaggcgggcgttcggagacgcggttggggttcgcgcggtcggggcgtcgttttagggtagggttgttcggtttcggtttcgggtcgttcgcgttttttatgaaaaattagtttcgcggttttttagcgcgggcgtatatgtcgatttcgggggcggcggcggttgggggtattcgggcggggttcgagttcggtgcggggtcggggttcggcgtaggtatcggggcgggcgcggcgacgggggtaggggttatgttttgtaagagcgtcgagtggttgtaggaggagttggaggcgcgcggcggcgcgtttttgttgttgttcgattgtcgggtcggtacgagtttttcgagtcgtcgtatatcgagacggttattaatttggttatttcgggttttatgttgcgtcgtttgcgtaagggtaatttgtttattcgttttattatttttaattacgtcgataaggagcgtttcgttacgcgttgtaaggcggttatcgtgttgttttacgacgaggttacggtcgagtggtagttcgagttcggcgttttcgttttcgtgttcggtttgtttttatagaagttgcgcgacgacggttgttaggtttattatttttaaggtgagggcggtatcgagacgttttacgggatcggggttttttcgcgattttttgacgttttttttggaggcgtttttttttttacgcgttcggtttgtttttttgggcgttacgtcgttttcggttcgtattcgtttttttggagtcgggtttttattgtgtggtttggtaggcgcggggttttttttgcgt

SEQ ID NO: 25524 - DNA, 1222 bp, Artificial Sequence
  chemically treated genomic DNA (Homo sapiens) CpG-island No: 25524
acgcaaaaaaaaccccgcgcctaccaaaccacacaataaaaacccgactccaaaaaaacgaatacgaaccgaaaacgacgtaacgcccaaaaaaacaaaccgaacgcgtaaaaaaaaaaacgcctccaaaaaaaacgtcaaaaaatcgcgaaaaaaccccgatcccgtaaaacgtctcgataccgccctcaccttaaaaataataaacctaacaaccgtcgtcgcgcaacttctataaaaacaaaccgaacacgaaaacgaaaacgccgaactcgaactaccactcgaccgtaacctcgtcgtaaaacaacacgataaccgccttacaacgcgtaacgaaacgctccttatcgacgtaattaaaaataataaaacgaataaacaaattacccttacgcaaacgacgcaacataaaacccgaaataaccaaattaataaccgtctcgatatacgacgactcgaaaaactcgtaccgacccgacaatcgaacaacaacaaaaacgcgccgccgcgcgcctccaactcctcctacaaccactcgacgctcttacaaaacataacccctacccccgtcgccgcgcccgccccgatacctacgccgaaccccgaccccgcaccgaactcgaaccccgcccgaatacccccaaccgccgccgcccccgaaatcgacatatacgcccgcgctaaaaaaccgcgaaactaatttttcataaaaaacgcgaacgacccgaaaccgaaaccgaacaaccctaccctaaaacgacgccccgaccgcgcgaaccccaaccgcgtctccgaacgcccgcctcccgccgaactacgcgcccgccgccccgacctcccgacctcccgacctccgtcccgcccgcccgcccgaccctccgcgcgcaccgcgacctaacaaccccaattaaacgacgactccgacgaccgcgcgccgaaacgttctccgaaaaacgaaaccgcgaaaaccgacgcccgaacttaaaaacgcaacgcctccaccgcccctccccacgaaatatacgaacgcgctcgcgacccgaacccgaaaaaccaacgacgaaaccctcccccaccgcctccgcaccgttaccccctaaactaactcgaaactaactacgatccgcctaaaaaccccgacctaaacgccctcataaattcactctacgcgtactcccaaactcttctaaacactacgaaaaaaaaaaccctaaaaacg

SEQ ID NO: 25525 - DNA, 509 bp, Artificial Sequence
  chemically treated genomic DNA (Homo sapiens) CpG-island No: 25525
agcgttgtcgggaagcgttttttttagggttttgcgggttaggttcggtgtttcggtttacgagtattagttttttttatcgggtcgttaagtttttggtaaagtcgtttacgtgttggtgttttcgtaggcgttttatcgtttttttgattttagttttcgttaggatgtttgcggttatgggtaaggcggagagtttttgtaaatatttttttagttttttcggtttcgttttagtggttagacgtatttgtagtttttttattgcgcgtagcgtagtggattttgtcgttatttcgttagagttgtgtaggcgtcgttgttttcgcggtcgcggttttgttcgagttcggggcggcggtataggtagtttggggtggtcggttttcgttgttcggtcgttaggcggcgatttcgggatgtggagttatagtttggagcgagttgggttttcggagtagcgggttatttggtttggaacgtcggtttttgtagatagttgagtaggt

SEQ ID NO: 25526 - DNA, 509 bp, Artificial Sequence
  chemically treated genomic DNA (Homo sapiens) CpG-island No: 25526
acctactcaactatctacaaaaaccgacgttccaaaccaaataacccgctactccgaaaacccaactcgctccaaactataactccacatcccgaaatcgccgcctaacgaccgaacaacgaaaaccgaccaccccaaactacctataccgccgccccgaactcgaacaaaaccgcgaccgcgaaaacaacgacgcctacacaactctaacgaaataacgacaaaatccactacgctacgcgcaataaaaaaactacaaatacgtctaaccactaaaacgaaaccgaaaaaactaaaaaaatatttacaaaaactctccgccttacccataaccgcaaacatcctaacgaaaactaaaatcaaaaaaacgataaaacgcctacgaaaacaccaacacgtaaacgactttaccaaaaacttaacgacccgataaaaaaaactaatactcgtaaaccgaaacaccgaacctaacccgcaaaaccctaaaaaaaacgcttcccgacaacgct

SEQ ID NO: 25527 - DNA, 509 bp, Artificial Sequence
  chemically treated genomic DNA (Homo sapiens) CpG-island No: 25527
gtttgtttagttgtttgtaaggatcggcgttttagattaagtggttcgttgtttcgaggatttagttcgttttaggttgtgattttatatttcgaggtcgtcgtttggcgatcgggtagcgaggatcggttattttagattgtttgtgtcgtcgtttcgagttcggatagagtcgcgatcgcgaggatagcgacgtttgtatagttttggcgagatggcggtagggtttattacgttgcgcgtagtggggaagttgtaggtgcgtttggttattaagacggagtcgaaaaagttagagaaatatttgtagaaatttttcgttttgtttatgatcgtagatattttggcggagattggaattagaaagacggtgaagcgtttgcggaagtattagtacgtgggcgattttgttagagatttagcggttcggtggaagaagttggtgttcgtggatcgaaatatcgggtttgattcgtaggattttgaggagagcgtttttcgatagcgtt

SEQ ID NO: 25528 - DNA, 509 bp, Artificial Sequence
  chemically treated genomic DNA (Homo sapiens) CpG-island No: 25528
aacgctatcgaaaaacgctctcctcaaaatcctacgaatcaaacccgatatttcgatccacgaacaccaacttcttccaccgaaccgctaaatctctaacaaaatcgcccacgtactaatacttccgcaaacgcttcaccgtctttctaattccaatctccgccaaaatatctacgatcataaacaaaacgaaaaatttctacaaatatttctctaactttttcgactccgtcttaataaccaaacgcacctacaacttccccactacgcgcaacgtaataaaccctaccgccatctcgccaaaactatacaaacgtcgctatcctcgcgatcgcgactctatccgaactcgaaacgacgacacaaacaatctaaaataaccgatcctcgctacccgatcgccaaacgacgacctcgaaatataaaatcacaacctaaaacgaactaaatcctcgaaacaacgaaccacttaatctaaaacgccgatccttacaaacaactaaacaaac

SEQ ID NO: 25529 - DNA, 510 bp, Artificial Sequence
  chemically treated genomic DNA (Homo sapiens) CpG-island No: 25529
ttcgaggtcgtcgtttggcgatcgggtagcgaggatcggttattttagattgtttgtgtcgtcgtttcgagttcggatagagtcgcgatcgcgaggatagcgacgtttgtatagttttggcgagatggcggtagggtttattacgttgcgcgtagtggggaagttgtaggtgcgtttggttattaagacggagtcgaaaaagttagagaaatatttgtagaaatttttcgttttgtttatgatcgtagatattttggcggagattggaattagaaagacggtgaagcgtttgcggaagtattagtacgtgggcgattttgttagagatttagcggttcggtggaagaagttggtgttcgtggatcgaaatatcgggtttgattcgtaggattttgaggagagcgtttttcgatagcgtttcggggaggttttttaggagcgggaaaaggtttggggttttttagaaaacgcgacggtttttaggagtttattttatagttttgagtatag

SEQ ID NO: 25530 - DNA, 510 bp, Artificial Sequence
  chemically treated genomic DNA (Homo sapiens) CpG-island No: 25530
ctatactcaaaactataaaataaactcctaaaaaccgtcgcgttttctaaaaaaccccaaaccttttcccgctcctaaaaaacctccccgaaacgctatcgaaaaacgctctcctcaaaatcctacgaatcaaacccgatatttcgatccacgaacaccaacttcttccaccgaaccgctaaatctctaacaaaatcgcccacgtactaatacttccgcaaacgcttcaccgtctttctaattccaatctccgccaaaatatctacgatcataaacaaaacgaaaaatttctacaaatatttctctaactttttcgactccgtcttaataaccaaacgcacctacaacttccccactacgcgcaacgtaataaaccctaccgccatctcgccaaaactatacaaacgtcgctatcctcgcgatcgcgactctatccgaactcgaaacgacgacacaaacaatctaaaataaccgatcctcgctacccgatcgccaaacgacgacctcgaa

SEQ ID NO: 25531 - DNA, 510 bp, Artificial Sequence
  chemically treated genomic DNA (Homo sapiens) CpG-island No: 25531
ttgtgtttagggttgtgagatgggtttttgggggtcgtcgcgttttttgggaagttttaggttttttttcgtttttgaagagttttttcgaagcgttgtcgggaagcgttttttttagggttttgcgggttaggttcggtgtttcggtttacgagtattagttttttttatcgggtcgttaagtttttggtaaagtcgtttacgtgttggtgttttcgtaggcgttttatcgtttttttgattttagttttcgttaggatgtttgcggttatgggtaaggcggagagtttttgtaaatatttttttagttttttcggtttcgttttagtggttagacgtatttgtagtttttttattgcgcgtagcgtagtggattttgtcgttatttcgttagagttgtgtaggcgtcgttgttttcgcggtcgcggttttgttcgagttcggggcggcggtataggtagtttggggtggtcggttttcgttgttcggtcgttaggcggcgatttcggg

SEQ ID NO: 25532 - DNA, 510 bp, Artificial Sequence
  chemically treated genomic DNA (Homo sapiens) CpG-island No: 25532
cccgaaatcgccgcctaacgaccgaacaacgaaaaccgaccaccccaaactacctataccgccgccccgaactcgaacaaaaccgcgaccgcgaaaacaacgacgcctacacaactctaacgaaataacgacaaaatccactacgctacgcgcaataaaaaaactacaaatacgtctaaccactaaaacgaaaccgaaaaaactaaaaaaatatttacaaaaactctccgccttacccataaccgcaaacatcctaacgaaaactaaaatcaaaaaaacgataaaacgcctacgaaaacaccaacacgtaaacgactttaccaaaaacttaacgacccgataaaaaaaactaatactcgtaaaccgaaacaccgaacctaacccgcaaaaccctaaaaaaaacgcttcccgacaacgcttcgaaaaaactcttcaaaaacgaaaaaaaacctaaaacttcccaaaaaacgcgacgacccccaaaaacccatctcacaaccctaaacacaa

SEQ ID NO: 25533 - DNA, 1416 bp, Artificial Sequence
  chemically treated genomic DNA (Homo sapiens) CpG-island No: 25533
  unsure (1074, 1234)
acggtcgtcgtatagttcgtagtagtttagggttcgttttcgggatagttttacggcggcggtagtagcggtatttagggcgaaggttgcggcggcgtgacgggtacggggttttcgtaggggcggggtagcgacgggggatagcgagcgttgtttgtattggtagttttcgtgtagcgggaggtagtcgagcgggtcggcgggcgcgggcggttttgggggaggcgtggaagcggcggcgttgttgttgttatttcgtcgattgttttcgtcgtcgttacgtaggtatacgggttttattttgagcgggcggtcgtagagtagtagttgtcgggttagggcgtgttggcgggtttcgcgtgcgttttgtgggtgtcggaaatttacgtaggttatacggtttagtttaggcgtgtgcgataggcggaggttgatttcgtcgaagcgtttgaattggtggaagagtcggttttcgaggtgttcggcgggtagcgcggggtttaagttgttgatgagtaacgttttgtatttaggcgcggtcgcggatgagtcgggatacgcgggttcggttttaggcggtggcggaggcggcggtagaggagacgcgcggggcgatatgtcggaggcgttcgggtttttcgaggttttgtcgtcgcgtttttcgtcgttagcgtcggagttcgaggagcgttcgttattcgcgcggtgattcgcgttttcggtgtcgcggtcgtcgcgatgttcgttttcgtcgttttcgttgtcgcggggtttgtcgcgggttcgcgttggaatcgggtgtttggcgtcgttagaggttttgtgcgtcgttcgtcgttcgttcgttttcgtttttcgttcgcgttttcgcggacgtttggcggacgatgacgagtcgcgttcgttcgggttagagtttcgttcgttttgtcgttttatggcgttggcgcggcgggcgggcggttcgtaggttttttatagcggcggcggcggaggcggcggtcgaggaggtagcgttttcggcgtcgttattttggataaaaggattcggcgcggcggtggcggcggggcggngcgggagcggcgtcgaggggtcgggtattgcgttattaaggtgcgtcgttttgttacgtgattttgcggcgggcggagtaagattcgcgtcgggtttgttttatcgcgttgcgtcgtttagtgttaggtgattttgtgagtgttgggtgagtgggatcgntcgcgcgttttggcgttatcgcgcggttcgtatgggtcgatgtttgaggttacgcggagtgtagtgaattttgagaggtcggcgagacgatttaacgttttgtgtttttagtcgtgttttgtcgttttgggtttagttatttttttttgtaggtattggagttcgcgttgattggagtagga

SEQ ID NO: 25534 - DNA, 1416 bp, Artificial Sequence
  chemically treated genomic DNA (Homo sapiens) CpG-island No: 25534
  unsure (183, 343)
tcctactccaatcaacgcgaactccaatacctacaaaaaaaaataactaaacccaaaacgacaaaacacgactaaaaacacaaaacgttaaatcgtctcgccgacctctcaaaattcactacactccgcgtaacctcaaacatcgacccatacgaaccgcgcgataacgccaaaacgcgcgancgatcccactcacccaacactcacaaaatcacctaacactaaacgacgcaacgcgataaaacaaacccgacgcgaatcttactccgcccgccgcaaaatcacgtaacaaaacgacgcaccttaataacgcaatacccgacccctcgacgccgctcccgcnccgccccgccgccaccgccgcgccgaatccttttatccaaaataacgacgccgaaaacgctacctcctcgaccgccgcctccgccgccgccgctataaaaaacctacgaaccgcccgcccgccgcgccaacgccataaaacgacaaaacgaacgaaactctaacccgaacgaacgcgactcgtcatcgtccgccaaacgtccgcgaaaacgcgaacgaaaaacgaaaacgaacgaacgacgaacgacgcacaaaacctctaacgacgccaaacacccgattccaacgcgaacccgcgacaaaccccgcgacaacgaaaacgacgaaaacgaacatcgcgacgaccgcgacaccgaaaacgcgaatcaccgcgcgaataacgaacgctcctcgaactccgacgctaacgacgaaaaacgcgacgacaaaacctcgaaaaacccgaacgcctccgacatatcgccccgcgcgtctcctctaccgccgcctccgccaccgcctaaaaccgaacccgcgtatcccgactcatccgcgaccgcgcctaaatacaaaacgttactcatcaacaacttaaaccccgcgctacccgccgaacacctcgaaaaccgactcttccaccaattcaaacgcttcgacgaaatcaacctccgcctatcgcacacgcctaaactaaaccgtataacctacgtaaatttccgacacccacaaaacgcacgcgaaacccgccaacacgccctaacccgacaactactactctacgaccgcccgctcaaaataaaacccgtatacctacgtaacgacgacgaaaacaatcgacgaaataacaacaacaacgccgccgcttccacgcctcccccaaaaccgcccgcgcccgccgacccgctcgactacctcccgctacacgaaaactaccaatacaaacaacgctcgctatcccccgtcgctaccccgcccctacgaaaaccccgtacccgtcacgccgccgcaaccttcgccctaaataccgctactaccgccgccgtaaaactatcccgaaaacgaaccctaaactactacgaactatacgacgaccgt

SEQ ID NO: 25535 - DNA, 1416 bp, Artificial Sequence
  chemically treated genomic DNA (Homo sapiens) CpG-island No: 25535
  unsure (183, 343)
ttttgttttaattagcgcgggttttagtgtttgtaagaggagatagttggatttagagcggtaaagtacggttgggagtataaagcgttaggtcgtttcgtcggttttttagggtttattatatttcgcgtagttttaagtatcggtttatgcgggtcgcgcggtggcgttagagcgcgcggncggttttatttatttagtatttatagggttatttggtattgggcgacgtagcgcgatgaggtaggttcggcgcgggttttgtttcgttcgtcgtagagttacgtggtaggacggcgtattttgataacgtaatgttcggtttttcggcgtcgttttcgtntcgtttcgtcgttatcgtcgcgtcgagtttttttgtttaagatggcggcgtcgggggcgttgttttttcggtcgtcgttttcgtcgtcgtcgttgtgagaaatttacgggtcgttcgttcgtcgcgttagcgttatgaagcggtagagcgagcgagattttagttcgagcgggcgcggttcgttatcgttcgttaagcgttcgcgggagcgcgaacgggaggcggaggcgggcgggcggcgggcggcgtataaggtttttggcggcgttaagtattcggttttagcgcgggttcgcgataaatttcgcggtagcggaagcggcgggggcgggtatcgcgacggtcgcggtatcggggacgcgaattatcgcgcgagtagcgggcgtttttcgggtttcggcgttggcggcgggggacgcggcggtaaggtttcgggggattcgggcgttttcggtatgtcgtttcgcgcgttttttttgtcgtcgttttcgttatcgtttggggtcgagttcgcgtgtttcggtttattcgcggtcgcgtttgagtataagacgttgtttattagtagtttgagtttcgcgttgttcgtcgagtatttcgaggatcggtttttttattagtttaagcgtttcggcgagattagttttcgtttgtcgtatacgtttgagttgggtcgtgtggtttacgtgaattttcggtatttataggacgtacgcgaggttcgttagtacgttttggttcggtagttgttgttttacgatcgttcgtttaaggtagagttcgtgtatttgcgtggcggcggcgggagtagtcggcgaagtagtagtagtagcgtcgtcgtttttacgttttttttagggtcgttcgcgttcgtcgattcgttcggttatttttcgttatacggaggttattagtataagtagcgttcgttgtttttcgtcgttgtttcgtttttgcgggagtttcgtgttcgttacgtcgtcgtagttttcgttttggatgtcgttgttgtcgtcgtcgtgggattgtttcgggagcgggttttggattattacgggttgtacgacgatcgt

SEQ ID NO: 25536 - DNA, 1416 bp, Artificial Sequence
  chemically treated genomic DNA (Homo sapiens) CpG-island No: 25536
  unsure (1074, 1234)
acgatcgtcgtacaacccgtaataatccaaaacccgctcccgaaacaatcccacgacgacgacaacaacgacatccaaaacgaaaactacgacgacgtaacgaacacgaaactcccgcaaaaacgaaacaacgacgaaaaacaacgaacgctacttatactaataacctccgtataacgaaaaataaccgaacgaatcgacgaacgcgaacgaccctaaaaaaaacgtaaaaacgacgacgctactactactacttcgccgactactcccgccgccgccacgcaaatacacgaactctaccttaaacgaacgatcgtaaaacaacaactaccgaaccaaaacgtactaacgaacctcgcgtacgtcctataaataccgaaaattcacgtaaaccacacgacccaactcaaacgtatacgacaaacgaaaactaatctcgccgaaacgcttaaactaataaaaaaaccgatcctcgaaatactcgacgaacaacgcgaaactcaaactactaataaacaacgtcttatactcaaacgcgaccgcgaataaaccgaaacacgcgaactcgaccccaaacgataacgaaaacgacgacaaaaaaaacgcgcgaaacgacataccgaaaacgcccgaatcccccgaaaccttaccgccgcgtcccccgccgccaacgccgaaacccgaaaaacgcccgctactcgcgcgataattcgcgtccccgataccgcgaccgtcgcgatacccgcccccgccgcttccgctaccgcgaaatttatcgcgaacccgcgctaaaaccgaatacttaacgccgccaaaaaccttatacgccgcccgccgcccgcccgcctccgcctcccgttcgcgctcccgcgaacgcttaacgaacgataacgaaccgcgcccgctcgaactaaaatctcgctcgctctaccgcttcataacgctaacgcgacgaacgaacgacccgtaaatttctcacaacgacgacgacgaaaacgacgaccgaaaaaacaacgcccccgacgccgccatcttaaacaaaaaaactcgacgcgacgataacgacgaaacganacgaaaacgacgccgaaaaaccgaacattacgttatcaaaatacgccgtcctaccacgtaactctacgacgaacgaaacaaaacccgcgccgaacctacctcatcgcgctacgtcgcccaataccaaataaccctataaatactaaataaataaaaccgnccgcgcgctctaacgccaccgcgcgacccgcataaaccgatacttaaaactacgcgaaatataataaaccctaaaaaaccgacgaaacgacctaacgctttatactcccaaccgtactttaccgctctaaatccaactatctcctcttacaaacactaaaacccgcgctaattaaaacaaaa

SEQ ID NO: 25537 - DNA, 514 bp, Artificial Sequence
  chemically treated genomic DNA (Homo sapiens) CpG-island No: 25537
agggagaattcgggtcgggtaatttttaggtttggttaggcggacgtaggggtatttcgggcgaggcgcgttttgcgttacgtgggtatcgtttttgtagtgatcggagaacggcgtgtttttagggttttgttgtcgtcgtggaagtaggattttcgcggttgtgtaacggtttgtcgtaggcgtgtagggatttggatttcgtttcgttttcggggttcgggtagtcgagttatggcggggaattgtggggttcgcggcgcgttgtcggcgtatacgttgttgttcgatttgtcgttcgcgttgttcggagagttttgcgttgttttggatagttgggatagcgttttgggttggcgcggtttgggtgagttcggggggatcgggtcggggtcggcgggggaagtttaacgtcgtcgcgggggtttcgttcgggcgtcgtttttgtatgggatggggggttttttttcggggttggaggcgggttttcggggaaaattatttttttaaggga

SEQ ID NO: 25538 - DNA, 514 bp, Artificial Sequence
  chemically treated genomic DNA (Homo sapiens) CpG-island No: 25538
tcccttaaaaaaataattttccccgaaaacccgcctccaaccccgaaaaaaaaccccccatcccatacaaaaacgacgcccgaacgaaacccccgcgacgacgttaaacttcccccgccgaccccgacccgatccccccgaactcacccaaaccgcgccaacccaaaacgctatcccaactatccaaaacaacgcaaaactctccgaacaacgcgaacgacaaatcgaacaacaacgtatacgccgacaacgcgccgcgaaccccacaattccccgccataactcgactacccgaaccccgaaaacgaaacgaaatccaaatccctacacgcctacgacaaaccgttacacaaccgcgaaaatcctacttccacgacgacaacaaaaccctaaaaacacgccgttctccgatcactacaaaaacgatacccacgtaacgcaaaacgcgcctcgcccgaaatacccctacgtccgcctaaccaaacctaaaaattacccgacccgaattctccct

SEQ ID NO: 25539 - DNA, 514 bp, Artificial Sequence
  chemically treated genomic DNA (Homo sapiens) CpG-island No: 25539
ttttttgggggagtaatttttttcgagggttcgtttttagtttcggggaagggttttttattttatgtaggggcgacgttcgagcggggttttcgcggcggcgttgggtttttttcgtcggtttcggttcggttttttcggatttatttaggtcgcgttagtttagggcgttgttttagttgtttagaatagcgtagagtttttcgagtagcgcgggcggtaggtcgaatagtagcgtgtgcgtcgatagcgcgtcgcgggttttatagtttttcgttatggttcggttgttcgagtttcggggacgaggcggagtttaggtttttgtacgtttgcgataggtcgttatataatcgcggaaattttgtttttacgacggtagtagagttttaggaatacgtcgtttttcggttattgtaggggcggtgtttacgtgacgtaaggcgcgtttcgttcgagatgtttttgcgttcgtttggttaggtttgggggttattcgattcgggtttttttt

SEQ ID NO: 25540 - DNA, 514 bp, Artificial Sequence
  chemically treated genomic DNA (Homo sapiens) CpG-island No: 25540
aaaaaaaacccgaatcgaataacccccaaacctaaccaaacgaacgcaaaaacatctcgaacgaaacgcgccttacgtcacgtaaacaccgcccctacaataaccgaaaaacgacgtattcctaaaactctactaccgtcgtaaaaacaaaatttccgcgattatataacgacctatcgcaaacgtacaaaaacctaaactccgcctcgtccccgaaactcgaacaaccgaaccataacgaaaaactataaaacccgcgacgcgctatcgacgcacacgctactattcgacctaccgcccgcgctactcgaaaaactctacgctattctaaacaactaaaacaacgccctaaactaacgcgacctaaataaatccgaaaaaaccgaaccgaaaccgacgaaaaaaacccaacgccgccgcgaaaaccccgctcgaacgtcgcccctacataaaataaaaaacccttccccgaaactaaaaacgaaccctcgaaaaaaattactcccccaaaaaa

SEQ ID NO: 25541 - DNA, 559 bp, Artificial Sequence
  chemically treated genomic DNA (Homo sapiens) CpG-island No: 25541
  unsure (80, 91, 439, 475, 500)
tgcggtcgagtttcgcggtcgggttttttcgtcgttatttcggcgtttgtttagtcgcgagcgagaattaagtcgggttngggcgcggggnttcgggcgaggtcgttaagatggtcgacgcgttcggtagcgcgcggattacgcgggaaggttgtttttggtttttcgggaaatagttaaggtttcgtcgttttttttggcgttttgtttcggtcggtttgtcgggatttttttttcggcgcggtttgcggttttcggggtttcgtaaattttttaggttcgaggttatttagacgtgtatattaggttcggttcgcgaggggagatataggggtcggggttgcggcggttgagttttttgggcggttcggaacgtaaggggtcggcgagtcgacgttgttgtaggaggttgcggcgtggggcgaggttttcgttacgngtttcgttttcgttttttcgcggtcgtttttttttnggaagttttcggaggtagtacgatnggacgtggttatattgttttttagtggttagttcgtcgaataatacgtttgggtttttt

SEQ ID NO: 25542 - DNA, 559 bp, Artificial Sequence
  chemically treated genomic DNA (Homo sapiens) CpG-island No: 25542
  unsure (60, 85, 121, 469, 480)
aaaaaacccaaacgtattattcgacgaactaaccactaaaaaacaatataaccacgtccnatcgtactacctccgaaaacttccnaaaaaaaaacgaccgcgaaaaaacgaaaacgaaacncgtaacgaaaacctcgccccacgccgcaacctcctacaacaacgtcgactcgccgaccccttacgttccgaaccgcccaaaaaactcaaccgccgcaaccccgacccctatatctcccctcgcgaaccgaacctaatatacacgtctaaataacctcgaacctaaaaaatttacgaaaccccgaaaaccgcaaaccgcgccgaaaaaaaaatcccgacaaaccgaccgaaacaaaacgccaaaaaaaacgacgaaaccttaactatttcccgaaaaaccaaaaacaaccttcccgcgtaatccgcgcgctaccgaacgcgtcgaccatcttaacgacctcgcccgaanccccgcgcccnaacccgacttaattctcgctcgcgactaaacaaacgccgaaataacgacgaaaaaacccgaccgcgaaactcgaccgca

SEQ ID NO: 25543 - DNA, 559 bp, Artificial Sequence
  chemically treated genomic DNA (Homo sapiens) CpG-island No: 25543
  unsure (60, 85, 121, 469, 480)
aaggggtttagacgtgttgttcggcgagttggttattggagggtagtgtggttacgtttnatcgtgttgttttcgagggtttttngggggagagcggtcgcgggaggacgggaacgaagtncgtagcgagaatttcgttttacgtcgtagttttttgtagtagcgtcggttcgtcggttttttgcgtttcgagtcgtttagggagtttagtcgtcgtagtttcggtttttgtgttttttttcgcgggtcgggtttggtgtgtacgtttggatggtttcgggtttggaaggtttgcgaggtttcgggagtcgtagatcgcgtcggggaggagatttcggtaggtcggtcggggtagagcgttaaggagggcggcggaattttggttgtttttcgggaggttaagggtagttttttcgcgtgattcgcgcgttgtcgagcgcgtcggttattttggcggtttcgttcgggntttcgcgtttnggttcggtttggttttcgttcgcggttgagtagacgtcggggtggcgacgggagagttcgatcgcgaagttcggtcgta

SEQ ID NO: 25544 - DNA, 559 bp, Artificial Sequence
  chemically treated genomic DNA (Homo sapiens) CpG-island No: 25544
  unsure (80, 91, 439, 475, 500)
tacgaccgaacttcgcgatcgaactctcccgtcgccaccccgacgtctactcaaccgcgaacgaaaaccaaaccgaaccnaaacgcgaaancccgaacgaaaccgccaaaataaccgacgcgctcgacaacgcgcgaatcacgcgaaaaaactacccttaacctcccgaaaaacaaccaaaattccgccgccctccttaacgctctaccccgaccgacctaccgaaatctcctccccgacgcgatctacgactcccgaaacctcgcaaaccttccaaacccgaaaccatccaaacgtacacaccaaacccgacccgcgaaaaaaaacacaaaaaccgaaactacgacgactaaactccctaaacgactcgaaacgcaaaaaaccgacgaaccgacgctactacaaaaaactacgacgtaaaacgaaattctcgctacgnacttcgttcccgtcctcccgcgaccgctctcccccnaaaaaccctcgaaaacaacacgatnaaacgtaaccacactaccctccaataaccaactcgccgaacaacacgtctaaacccctt

SEQ ID NO: 25545 - DNA, 726 bp, Artificial Sequence
  chemically treated genomic DNA (Homo sapiens) CpG-island No: 25545
tcgtttcgcgttttttcggttttcgtttcggcgtaaggtaggtcgagaatcgttagttgcgttttcgggttcggttttgattgacgggcgtttcggattattataaataacgggttttcgaagcgtgggttcggtttagcggacgtagacggttcgtatttatcgcgtcgtagttcgttttatagtttatagattatagttcggggcggggtaaggggtttcgggtacgagtgtgggttgtgaaaatacgggtataagtttgggtcgagtatcgatttgggagtttcgtatttttttcgcgtaatatcggtttttgggtagcgtaattgtaaggataggaatcgtcgcggttcgtttttagttttttttttattttttttcgttcgatttgtcgcgcgttcgcgttttttttttaattttaaaggattttttcggggttggaaaacgtttttttttcgttttttttttgtgcgcgtgaattaggtagttgttagatttcgcgagaggttcgttttttagtcgtttttttttttagttagtgagtgcgcgaacgagaaaggaggagggcgttttaggcgatagtattgtagacgttattattttttgtttttttgttgtatcgatttcgacgttttgtttgtgttttatttgttcgcggtttataggtaattggagttattggagtttgggtattgttgattcgggtaagggttggggttttttgaa

SEQ ID NO: 25546 - DNA, 726 bp, Artificial Sequence
  chemically treated genomic DNA (Homo sapiens) CpG-island No: 25546
ttcaaaaaaccccaacccttacccgaatcaacaatacccaaactccaataactccaattacctataaaccgcgaacaaataaaacacaaacaaaacgtcgaaatcgatacaacaaaaaaacaaaaaataataacgtctacaatactatcgcctaaaacgccctcctcctttctcgttcgcgcactcactaactaaaaaaaaaaacgactaaaaaacgaacctctcgcgaaatctaacaactacctaattcacgcgcacaaaaaaaaaacgaaaaaaaaacgttttccaaccccgaaaaaatcctttaaaattaaaaaaaaaacgcgaacgcgcgacaaatcgaacgaaaaaaaataaaaaaaaaactaaaaacgaaccgcgacgattcctatccttacaattacgctacccaaaaaccgatattacgcgaaaaaaatacgaaactcccaaatcgatactcgacccaaacttatacccgtattttcacaacccacactcgtacccgaaaccccttaccccgccccgaactataatctataaactataaaacgaactacgacgcgataaatacgaaccgtctacgtccgctaaaccgaacccacgcttcgaaaacccgttatttataataatccgaaacgcccgtcaatcaaaaccgaacccgaaaacgcaactaacgattctcgacctaccttacgccgaaacgaaaaccgaaaaaacgcgaaacga

SEQ ID NO: 25547 - DNA, 726 bp, Artificial Sequence
  chemically treated genomic DNA (Homo sapiens) CpG-island No: 25547
tttagggagttttaatttttattcgaattagtaatatttaagttttaataattttaattatttataggtcgcgaataagtgggatataggtaagacgtcgaggtcggtgtagtagagaaatagaggataatggcgtttgtaatgttgtcgtttggagcgttttttttttttttcgttcgcgtatttattagttggggggaggggcggttaggggacgaatttttcgcgagatttaataattgtttagtttacgcgtatagggagggggcggggaaggggcgttttttagtttcgaaggagttttttggggttggaggaggggcgcgagcgcgcggtaaatcgggcgggaagaggtaaaaaaggaattgggagcgagtcgcggcggtttttgtttttatagttgcgttgtttagggatcgatgttgcgcgaggaaaatgcgggatttttaggtcggtgttcggtttagatttatgttcgtgtttttatagtttatattcgtgttcgaagttttttatttcgtttcgggttgtggtttgtgggttgtgggacgagttgcggcgcggtaagtgcgggtcgtttgcgttcgttgggtcgggtttacgtttcggaaattcgttgtttgtaatggttcggggcgttcgttagttaaggtcgggttcgggggcgtagttggcggttttcggtttgttttgcgtcggggcgggagtcggggaaacgcggggcga

SEQ ID NO: 25548 - DNA, 726 bp, Artificial Sequence
  chemically treated genomic DNA (Homo sapiens) CpG-island No: 25548
tcgccccgcgtttccccgactcccgccccgacgcaaaacaaaccgaaaaccgccaactacgcccccgaacccgaccttaactaacgaacgccccgaaccattacaaacaacgaatttccgaaacgtaaacccgacccaacgaacgcaaacgacccgcacttaccgcgccgcaactcgtcccacaacccacaaaccacaacccgaaacgaaataaaaaacttcgaacacgaatataaactataaaaacacgaacataaatctaaaccgaacaccgacctaaaaatcccgcattttcctcgcgcaacatcgatccctaaacaacgcaactataaaaacaaaaaccgccgcgactcgctcccaattccttttttacctcttcccgcccgatttaccgcgcgctcgcgcccctcctccaaccccaaaaaactccttcgaaactaaaaaacgccccttccccgccccctccctatacgcgtaaactaaacaattattaaatctcgcgaaaaattcgtcccctaaccgcccctccccccaactaataaatacgcgaacgaaaaaaaaaaaaaacgctccaaacgacaacattacaaacgccattatcctctatttctctactacaccgacctcgacgtcttacctatatcccacttattcgcgacctataaataattaaaattattaaaacttaaatattactaattcgaataaaaattaaaactccctaaa

SEQ ID NO: 25549 - DNA, 526 bp, Artificial Sequence
  chemically treated genomic DNA (Homo sapiens) CpG-island No: 25549
cgcgcggcggtgttcggaggttggacgttcgttttcggggcggtagtcgagcgtttagttaggaatttgttaataggtttcgaataaagagtcgttaattcggcgggcggtcgcgggcgggttggcgggcggaggtatttcgttttttttcggtttggtcgtcggagtttgtagcgcgttaattatttcgcgttcggttgtttcgcggtatttattttcggtttggacgttttcgggcgcgagtttttcgtagtttcgttcgacgggcgtcgcggcgaatggcgaagtttttttgtttcggttgtcgtgggttcgggtattcgcgttttacggtagtttacgtgtttcgtagattcgtcggtttaagggttttcgcgtattaagttatttagatagcggggcggggattggcgaagttagagatacgcgttgaggaggggttgttattcgttagtgacgggtatatttgtttgggcgggggtggggaggggcggggtggggggcggtgttggaaagatgtagagtt

SEQ ID NO: 25550 - DNA, 526 bp, Artificial Sequence
  chemically treated genomic DNA (Homo sapiens) CpG-island No: 25550
aactctacatctttccaacaccgccccccaccccgcccctccccacccccgcccaaacaaatatacccgtcactaacgaataacaacccctcctcaacgcgtatctctaacttcgccaatccccgccccgctatctaaataacttaatacgcgaaaacccttaaaccgacgaatctacgaaacacgtaaactaccgtaaaacgcgaatacccgaacccacgacaaccgaaacaaaaaaacttcgccattcgccgcgacgcccgtcgaacgaaactacgaaaaactcgcgcccgaaaacgtccaaaccgaaaataaataccgcgaaacaaccgaacgcgaaataattaacgcgctacaaactccgacgaccaaaccgaaaaaaaacgaaatacctccgcccgccaacccgcccgcgaccgcccgccgaattaacgactctttattcgaaacctattaacaaattcctaactaaacgctcgactaccgccccgaaaacgaacgtccaacctccgaacaccgccgcgcg

SEQ ID NO: 25551 - DNA, 526 bp, Artificial Sequence
  chemically treated genomic DNA (Homo sapiens) CpG-island No: 25551
agttttgtatttttttagtatcgttttttatttcgtttttttttattttcgtttaaataaatgtgttcgttattggcgggtagtagtttttttttagcgcgtgtttttggtttcgttagttttcgtttcgttgtttaggtagtttggtacgcgagggtttttaggtcggcggatttgcggggtacgtgagttgtcgtggagcgcgggtgttcgagtttacggtagtcggggtagaggggtttcgttattcgtcgcggcgttcgtcgggcggggttgcgggaggttcgcgttcggggacgtttaggtcgggggtgggtgtcgcggggtagtcgggcgcggggtaattaacgcgttgtaaatttcggcggttaagtcgggaaggggcgggatgttttcgttcgttagttcgttcgcggtcgttcgtcggattagcggttttttgttcggggtttgttaataagtttttggttgagcgttcggttgtcgtttcgggagcgggcgtttagttttcgggtatcgtcgcgcg

SEQ ID NO: 25552 - DNA, 526 bp, Artificial Sequence
  chemically treated genomic DNA (Homo sapiens) CpG-island No: 25552
cgcgcgacgatacccgaaaactaaacgcccgctcccgaaacgacaaccgaacgctcaaccaaaaacttattaacaaaccccgaacaaaaaaccgctaatccgacgaacgaccgcgaacgaactaacgaacgaaaacatcccgccccttcccgacttaaccgccgaaatttacaacgcgttaattaccccgcgcccgactaccccgcgacacccacccccgacctaaacgtccccgaacgcgaacctcccgcaaccccgcccgacgaacgccgcgacgaataacgaaacccctctaccccgactaccgtaaactcgaacacccgcgctccacgacaactcacgtaccccgcaaatccgccgacctaaaaaccctcgcgtaccaaactacctaaacaacgaaacgaaaactaacgaaaccaaaaacacgcgctaaaaaaaaactactacccgccaataacgaacacatttatttaaacgaaaataaaaaaaaacgaaataaaaaacgatactaaaaaaatacaaaact

SEQ ID NO: 25553 - DNA, 702 bp, Artificial Sequence
  chemically treated genomic DNA (Homo sapiens) CpG-island No: 25553
agagcgcgcggggaagttgcgtagtagtaagaagagtttttcgcgtttcgtttcgtaaagtttggtttcggggggtttttagtcgggtttggtagcgttggttagggatttttagagtagcgagcgttcgcgcgtacggtttttcgtaagtttttttagagcgcgcgcggcgtgatttattcgagtcgcggagttaagcggcgaggattatgtttaggagcgttggttataggtcgggtcggacggttatggtcgcgggcgggtaggcgggcgggtcgggcgcggggtttcgcgggcgggagggcggttttagcgttttagttcggagttttagttcggggcgttttcggggtttatgttagcggattgcgttgttttcgggcggtcggttgtcgggcgtacgcggcgcgtggtttttttgggtacgggagcgtagtaatgtagtcggggcggagcgtagcgttagtcgcgtcgcgtatcgagttagtcgcgtcgcggagttcgtagtcggagagcgggtcggtgggcgtcgtaaaattcggattggagcgacggagcggggcggcggttgggaggggcgggggaaggaaggaggggtcgggtcgtttcgcgtagcgcgcgcgggttatttttagtatcgggaatttttttgggcgatgtttgaggtttttttagggaggggtttggggtggtgggcgtgga

SEQ ID NO: 25554 - DNA, 702 bp, Artificial Sequence
  chemically treated genomic DNA (Homo sapiens) CpG-island No: 25554
tccacgcccaccaccccaaacccctccctaaaaaaacctcaaacatcgcccaaaaaaattcccgatactaaaaataacccgcgcgcgctacgcgaaacgacccgacccctccttccttcccccgcccctcccaaccgccgccccgctccgtcgctccaatccgaattttacgacgcccaccgacccgctctccgactacgaactccgcgacgcgactaactcgatacgcgacgcgactaacgctacgctccgccccgactacattactacgctcccgtacccaaaaaaaccacgcgccgcgtacgcccgacaaccgaccgcccgaaaacaacgcaatccgctaacataaaccccgaaaacgccccgaactaaaactccgaactaaaacgctaaaaccgccctcccgcccgcgaaaccccgcgcccgacccgcccgcctacccgcccgcgaccataaccgtccgacccgacctataaccaacgctcctaaacataatcctcgccgcttaactccgcgactcgaataaatcacgccgcgcgcgctctaaaaaaacttacgaaaaaccgtacgcgcgaacgctcgctactctaaaaatccctaaccaacgctaccaaacccgactaaaaaccccccgaaaccaaactttacgaaacgaaacgcgaaaaactcttcttactactacgcaacttccccgcgcgctct

SEQ ID NO: 25555 - DNA, 702 bp, Artificial Sequence
  chemically treated genomic DNA (Homo sapiens) CpG-island No: 25555
tttacgtttattattttaagtttttttttgggggagttttaggtatcgtttagagggattttcggtgttgggggtggttcgcgcgcgttgcgcggggcggttcggtttttttttttttttttcgttttttttagtcgtcgtttcgtttcgtcgttttagttcgggttttgcggcgtttatcggttcgtttttcggttgcgggtttcgcggcgcggttggttcggtgcgcggcgcggttggcgttgcgtttcgtttcggttgtattgttgcgttttcgtgtttaagggagttacgcgtcgcgtgcgttcggtagtcggtcgttcggaggtagcgtagttcgttggtatgggtttcgggggcgtttcgagttggggtttcgggttgaggcgttaaagtcgttttttcgttcgcggggtttcgcgttcggttcgttcgtttgttcgttcgcggttatggtcgttcggttcggtttgtggttagcgtttttgggtatagttttcgtcgtttggtttcgcggttcgggtgagttacgtcgcgcgcgttttggggaggtttgcgggggatcgtgcgcgcgaacgttcgttgttttgggggtttttgattagcgttgttagattcggttgggagtttttcgaggttaaattttgcgaggcgggacgcggggggttttttttgttgttgcgtagttttttcgcgcgtttt

SEQ ID NO: 25556 - DNA, 702 bp, Artificial Sequence
  chemically treated genomic DNA (Homo sapiens) CpG-island No: 25556
aaaacgcgcgaaaaaactacgcaacaacaaaaaaaaccccccgcgtcccgcctcgcaaaatttaacctcgaaaaactcccaaccgaatctaacaacgctaatcaaaaacccccaaaacaacgaacgttcgcgcgcacgatcccccgcaaacctccccaaaacgcgcgcgacgtaactcacccgaaccgcgaaaccaaacgacgaaaactatacccaaaaacgctaaccacaaaccgaaccgaacgaccataaccgcgaacgaacaaacgaacgaaccgaacgcgaaaccccgcgaacgaaaaaacgactttaacgcctcaacccgaaaccccaactcgaaacgcccccgaaacccataccaacgaactacgctacctccgaacgaccgactaccgaacgcacgcgacgcgtaactcccttaaacacgaaaacgcaacaatacaaccgaaacgaaacgcaacgccaaccgcgccgcgcaccgaaccaaccgcgccgcgaaacccgcaaccgaaaaacgaaccgataaacgccgcaaaacccgaactaaaacgacgaaacgaaacgacgactaaaaaaaacgaaaaaaaaaaaaaaaaaccgaaccgccccgcgcaacgcgcgcgaaccacccccaacaccgaaaatccctctaaacgatacctaaaactcccccaaaaaaaaacttaaaataataaacgtaaa

SEQ ID NO: 25557 - DNA, 1045 bp, Artificial Sequence
  chemically treated genomic DNA (Homo sapiens) CpG-island No: 25557
ttcgaacggttaggcggcgtatttcgtttttcgagaggtcgtcgaagtagaagttttggttaaaggaggttttgcggttgcgttttattatagtgttgtattgtcgaagcgcggtgttcggcggtcgtaggacgaggttgaggcgatagttgacggttcggggttcgggggcgttttcggtcgggttttcggcgcggagtagtcggaggcggagtcgttcggttttcggatagtattcggcggttaggcgtagggcgtcgtcggcgcggtttagagttacggtgttttcggtttttaggcgttcgggaaacgggattcgggacgacggcgggttcgtggagggggttcgggtcggggattgggagttcgcgcggcgttttttgttttcgttttcgttggagacggagcggacgcgggttaggcggcgattttttttagttcgtagcgcgcgatttagtagttcgtcggggacgcgtaggaggcggtagtcgcggggtcgtcgggcgagcgcgttttggggcgggcggggatagtcgggggtcgcgggggtcgtcgggttcggagttcgcgggacgcgtagggtttttaggagggcgttcgggtcgtcgtcgtcgtcgtaggtgtgggttcggggtcggggcgcgggcgggttttcgagtaggagcgattttttgcggcgcgtgtgcgggttttcgagtagcgcgtagaagtcgtaggcggtgcgtatacggggtaggtgcggtagtgatagcgcggtttgcgagcgcgggttttagtttgtgcggtcggcgttttcgtttatttttgttttttcgatttaagaatttcggagcgtagttaaggttaggcggggtatgagtcgtggcgggatgtagaatttagggatgcggttcggagtgagtatatttgcgtacgcggcggtggtgcgagatttggtttcgcgggttcgattcgggagaagttagttttcgtttcgtcgaaggtatttaggatttaagcggagtcgttttaggtattatatttggttattttttgttggagtttg

SEQ ID NO: 25558 - DNA, 1045 bp, Artificial Sequence
  chemically treated genomic DNA (Homo sapiens) CpG-island No: 25558
caaactccaacaaaaaataaccaaatataatacctaaaacgactccgcttaaatcctaaataccttcgacgaaacgaaaactaacttctcccgaatcgaacccgcgaaaccaaatctcgcaccaccgccgcgtacgcaaatatactcactccgaaccgcatccctaaattctacatcccgccacgactcataccccgcctaaccttaactacgctccgaaattcttaaatcgaaaaaacaaaaataaacgaaaacgccgaccgcacaaactaaaacccgcgctcgcaaaccgcgctatcactaccgcacctaccccgtatacgcaccgcctacgacttctacgcgctactcgaaaacccgcacacgcgccgcaaaaaatcgctcctactcgaaaacccgcccgcgccccgaccccgaacccacacctacgacgacgacgacgacccgaacgccctcctaaaaaccctacgcgtcccgcgaactccgaacccgacgacccccgcgacccccgactatccccgcccgccccaaaacgcgctcgcccgacgaccccgcgactaccgcctcctacgcgtccccgacgaactactaaatcgcgcgctacgaactaaaaaaaatcgccgcctaacccgcgtccgctccgtctccaacgaaaacgaaaacaaaaaacgccgcgcgaactcccaatccccgacccgaaccccctccacgaacccgccgtcgtcccgaatcccgtttcccgaacgcctaaaaaccgaaaacaccgtaactctaaaccgcgccgacgacgccctacgcctaaccgccgaatactatccgaaaaccgaacgactccgcctccgactactccgcgccgaaaacccgaccgaaaacgcccccgaaccccgaaccgtcaactatcgcctcaacctcgtcctacgaccgccgaacaccgcgcttcgacaatacaacactataataaaacgcaaccgcaaaacctcctttaaccaaaacttctacttcgacgacctctcgaaaaacgaaatacgccgcctaaccgttcgaa

SEQ ID NO: 25559 - DNA, 1045 bp, Artificial Sequence
  chemically treated genomic DNA (Homo sapiens) CpG-island No: 25559
taagttttagtagagagtggttagatgtggtgtttggagcgatttcgtttgggttttgagtgttttcggcggagcggagattggtttttttcgggtcgggttcgcggagttaagtttcgtattatcgtcgcgtgcgtaaatgtgtttatttcggatcgtatttttgagttttgtatttcgttacggtttatgtttcgtttggttttggttgcgtttcggaatttttgggtcgaagaagtagggatggacgagggcgtcggtcgtatagattgggattcgcgttcgtaggtcgcgttgttattgtcgtatttgtttcgtgtgcgtatcgtttacggtttttgcgcgttgttcgagagttcgtatacgcgtcgtaaggagtcgtttttgttcgggggttcgttcgcgtttcggtttcgggtttatatttacggcggcggcggcggttcggacgtttttttggggattttgcgcgtttcgcgagtttcgggttcggcgattttcgcggttttcggttgttttcgttcgttttaggacgcgttcgttcggcggtttcgcggttgtcgttttttgcgcgttttcgacgggttgttgagtcgcgcgttgcgggttgggaggagtcgtcgtttgattcgcgttcgtttcgtttttagcgggaacgaggataaggagcgtcgcgcgggtttttagttttcggttcgggttttttttacgagttcgtcgtcgtttcgggtttcgtttttcgagcgtttggaggtcgagggtatcgtggttttgggtcgcgtcggcgacgttttgcgtttggtcgtcgagtattgttcgggaatcgggcggtttcgttttcggttgtttcgcgtcgagagttcggtcggaggcgttttcgggtttcgagtcgttagttgtcgttttagtttcgttttgcggtcgtcgggtatcgcgtttcggtaatgtagtattgtggtggggcgtagtcgtaaggttttttttgattaggatttttgtttcgacggtttttcggaggacgaagtgcgtcgtttggtcgttcgag

SEQ ID NO: 25560 - DNA, 1045 bp, Artificial Sequence
  chemically treated genomic DNA (Homo sapiens) CpG-island No: 25560
ctcgaacgaccaaacgacgcacttcgtcctccgaaaaaccgtcgaaacaaaaatcctaatcaaaaaaaaccttacgactacgccccaccacaatactacattaccgaaacgcgatacccgacgaccgcaaaacgaaactaaaacgacaactaacgactcgaaacccgaaaacgcctccgaccgaactctcgacgcgaaacaaccgaaaacgaaaccgcccgattcccgaacaatactcgacgaccaaacgcaaaacgtcgccgacgcgacccaaaaccacgataccctcgacctccaaacgctcgaaaaacgaaacccgaaacgacgacgaactcgtaaaaaaaacccgaaccgaaaactaaaaacccgcgcgacgctccttatcctcgttcccgctaaaaacgaaacgaacgcgaatcaaacgacgactcctcccaacccgcaacgcgcgactcaacaacccgtcgaaaacgcgcaaaaaacgacaaccgcgaaaccgccgaacgaacgcgtcctaaaacgaacgaaaacaaccgaaaaccgcgaaaatcgccgaacccgaaactcgcgaaacgcgcaaaatccccaaaaaaacgtccgaaccgccgccgccgccgtaaatataaacccgaaaccgaaacgcgaacgaacccccgaacaaaaacgactccttacgacgcgtatacgaactctcgaacaacgcgcaaaaaccgtaaacgatacgcacacgaaacaaatacgacaataacaacgcgacctacgaacgcgaatcccaatctatacgaccgacgccctcgtccatccctacttcttcgacccaaaaattccgaaacgcaaccaaaaccaaacgaaacataaaccgtaacgaaatacaaaactcaaaaatacgatccgaaataaacacatttacgcacgcgacgataatacgaaacttaactccgcgaacccgacccgaaaaaaaccaatctccgctccgccgaaaacactcaaaacccaaacgaaatcgctccaaacaccacatctaaccactctctactaaaactta

SEQ ID NO: 25561 - DNA, 1618 bp, Artificial Sequence
  chemically treated genomic DNA (Homo sapiens) CpG-island No: 25561
  unsure (609, 707, 946, 1276, 1583, 1599)
cgatttaaatttttggtcggaaaggaaaaatcgttttttttttagttttattagtacggagatcggaagcgttttacggcgtggtcggaacggtagtacggcgttttttttagttttattagtacggggatcgaaagtattttttcggcgtggtcggaacgatagtacggcgttttttttagttttattagtacggagatcggaagcgttttacggcgtggtcggaacggtagtacggcgtttttattagttttattagtacggagatcggaagtatttttttggtgtggtcggaacggtagtacggcgttttttttagttttattagtacggagatcggaagcgttttacggcgtggttagaacggtagtacggcgttttttttagttttattagtacggggatcggaagtattttatcggcgtggtcggaacggtagtacggcgttttttttagttttattagtacggagatcggaagcgttttacggcgtggtcggaacggtagtacggcgttttttttagttttattagtagggagatcggaagcgttttatcggcgtggtcggaacggtagtacggcgttttttttagttttattagtacggangatcggaagcgttttacggcgtggtcggaacggtagtattgcgttttttttagttttattagtacggagatcggaagtatttttttggtgtggtcggnaacggtagtacggcgttttttttagttttattagtacggagatcggaagcgttttacggcgtggttagaacggtagtacggcgttttttttagttttattagtacggggatcggaagcgttttatcggcgtggtcggaacggtagtacggcgttttttttagttttattagtacggagatcggaagcgttttacggcgtggtcggaacggtagtacggcgttttttttagttttattangtacggagatcggaagcgttttacggcgtggtcggaacggtagtatggcgttttttttagttttattagtacggagatcggaagcgttttacggcgtggtcggaacggtagtacggcgttttttttagttttattagtacggggatcggaagtattttatcggcgtggtcggaacggtagtacggcgttttttttagttttattagtacggagatcggaagcgttttacggcgtggtcggaacggtagtacggcgttttttttagttttattagtacggagatcggaagtatttttttggtgtggtcggaacggtagtacggcgtttttntttagttttattagtacggagatcggaagcgttttacggcgtggttagaacggtagtacggcgttttttttagttttattagtacggggatcggaagtattttatcggcgtggtcggaacggtagtacggcgttttttttagttttattagtacgggagatcggaagcgttttacggcgtggtcggaacggtagtacggcgttttttttagttttattagtacgggggatcggaagcgttttatcggcgtggtcggaacggtagtataggtttttagtttcgcgttgttttcggattatcgagggtngtagtttatagggttnttgaaggttgggggttgtt

SEQ ID NO: 25562 - DNA, 1618 bp, Artificial Sequence
  chemically treated genomic DNA (Homo sapiens) CpG-island No: 25562
  unsure (20, 36, 343, 673, 912, 1010)
aacaacccccaaccttcaanaaccctataaactacnaccctcgataatccgaaaacaacgcgaaactaaaaacctatactaccgttccgaccacgccgataaaacgcttccgatcccccgtactaataaaactaaaaaaaacgccgtactaccgttccgaccacgccgtaaaacgcttccgatctcccgtactaataaaactaaaaaaaacgccgtactaccgttccgaccacgccgataaaatacttccgatccccgtactaataaaactaaaaaaaacgccgtactaccgttctaaccacgccgtaaaacgcttccgatctccgtactaataaaactaaanaaaaacgccgtactaccgttccgaccacaccaaaaaaatacttccgatctccgtactaataaaactaaaaaaaacgccgtactaccgttccgaccacgccgtaaaacgcttccgatctccgtactaataaaactaaaaaaaacgccgtactaccgttccgaccacgccgataaaatacttccgatccccgtactaataaaactaaaaaaaacgccgtactaccgttccgaccacgccgtaaaacgcttccgatctccgtactaataaaactaaaaaaaacgccatactaccgttccgaccacgccgtaaaacgcttccgatctccgtacntaataaaactaaaaaaaacgccgtactaccgttccgaccacgccgtaaaacgcttccgatctccgtactaataaaactaaaaaaaacgccgtactaccgttccgaccacgccgataaaacgcttccgatccccgtactaataaaactaaaaaaaacgccgtactaccgttctaaccacgccgtaaaacgcttccgatctccgtactaataaaactaaaaaaaacgccgtactaccgttnccgaccacaccaaaaaaatacttccgatctccgtactaataaaactaaaaaaaacgcaatactaccgttccgaccacgccgtaaaacgcttccgatcntccgtactaataaaactaaaaaaaacgccgtactaccgttccgaccacgccgataaaacgcttccgatctccctactaataaaactaaaaaaaacgccgtactaccgttccgaccacgccgtaaaacgcttccgatctccgtactaataaaactaaaaaaaacgccgtactaccgttccgaccacgccgataaaatacttccgatccccgtactaataaaactaaaaaaaacgccgtactaccgttctaaccacgccgtaaaacgcttccgatctccgtactaataaaactaaaaaaaacgccgtactaccgttccgaccacaccaaaaaaatacttccgatctccgtactaataaaactaataaaaacgccgtactaccgttccgaccacgccgtaaaacgcttccgatctccgtactaataaaactaaaaaaaacgccgtactatcgttccgaccacgccgaaaaaatactttcgatccccgtactaataaaactaaaaaaaacgccgtactaccgttccgaccacgccgtaaaacgcttccgatctccgtactaataaaactaaaaaaaaaacgatttttcctttccgaccaaaaatttaaatcg

SEQ ID NO: 25563 - DNA, 1618 bp, Artificial Sequence
  chemically treated genomic DNA (Homo sapiens) CpG-island No: 25563
  unsure (20, 36, 343, 673, 912, 1010)
agtagtttttagtttttaanggttttgtggattatnattttcggtagttcgagagtagcgcggggttgggagtttgtgttgtcgtttcggttacgtcggtgaagcgttttcggtttttcgtgttggtgggattgaggagagcgtcgtgttgtcgtttcggttacgtcgtgaagcgttttcgatttttcgtgttggtgggattgagaagaacgtcgtgttgtcgtttcggttacgtcggtgaagtgttttcggttttcgtgttggtgggattgagaagaacgtcgtgttgtcgttttggttacgtcgtgaagcgttttcggttttcgtgttggtgggattgagnaagaacgtcgtgttgtcgtttcggttatattagagaagtgttttcggttttcgtgttggtgggattgaggagaacgtcgtgttgtcgtttcggttacgtcgtgaagcgttttcggttttcgtgttggtgggattgagaagaacgtcgtgttgtcgtttcggttacgtcggtgaagtgttttcggttttcgtgttggtgggattgaggagaacgtcgtgttgtcgtttcggttacgtcgtgaagcgttttcggttttcgtgttggtgggattgagaagaacgttatgttgtcgtttcggttacgtcgtgaagcgttttcggttttcgtgtntggtgggattgaggagaacgtcgtgttgtcgtttcggttacgtcgtgaagcgttttcggttttcgtgttggtgggattgaggagaacgtcgtgttgtcgtttcggttacgtcggtgaagcgttttcggttttcgtgttggtgggattgaggagaacgtcgtgttgtcgttttggttacgtcgtgaagcgttttcggttttcgtgttggtgggattgagaagaacgtcgtgttgtcgttntcggttatattagagaagtgttttcggttttcgtgttggtgggattgaggagaacgtagtgttgtcgtttcggttacgtcgtgaagcgttttcggttnttcgtgttggtgggattgagaagaacgtcgtgttgtcgtttcggttacgtcggtgaagcgttttcggtttttttgttggtgggattgaggagagcgtcgtgttgtcgtttcggttacgtcgtgaagcgttttcggttttcgtgttggtgggattgagaagaacgtcgtgttgtcgtttcggttacgtcggtgaagtgttttcggttttcgtgttggtgggattgagaagaacgtcgtgttgtcgttttggttacgtcgtgaagcgttttcggttttcgtgttggtgggattgagaagaacgtcgtgttgtcgtttcggttatattagagaagtgttttcggttttcgtgttggtgggattgatgagaacgtcgtgttgtcgtttcggttacgtcgtgaagcgttttcggttttcgtgttggtgggattgagaagaacgtcgtgttgtcgtttcggttacgtcggggaagtgttttcggttttcgtgttggtgggattgaggagaacgtcgtgttgtcgtttcggttacgtcgtgaagcgttttcggttttcgtgttggtgggattgagaagggggcggtttttttttttcggttaggggtttgaatcg

SEQ ID NO: 25564 - DNA, 1618 bp, Artificial Sequence
  chemically treated genomic DNA (Homo sapiens) CpG-island No: 25564
  unsure (609, 707, 946, 1276, 1583, 1599)
cgattcaaacccctaaccgaaaaaaaaaaaccgcccccttctcaatcccaccaacacgaaaaccgaaaacgcttcacgacgtaaccgaaacgacaacacgacgttctcctcaatcccaccaacacgaaaaccgaaaacacttccccgacgtaaccgaaacgacaacacgacgttcttctcaatcccaccaacacgaaaaccgaaaacgcttcacgacgtaaccgaaacgacaacacgacgttctcatcaatcccaccaacacgaaaaccgaaaacacttctctaatataaccgaaacgacaacacgacgttcttctcaatcccaccaacacgaaaaccgaaaacgcttcacgacgtaaccaaaacgacaacacgacgttcttctcaatcccaccaacacgaaaaccgaaaacacttcaccgacgtaaccgaaacgacaacacgacgttcttctcaatcccaccaacacgaaaaccgaaaacgcttcacgacgtaaccgaaacgacaacacgacgctctcctcaatcccaccaacaaaaaaaccgaaaacgcttcaccgacgtaaccgaaacgacaacacgacgttcttctcaatcccaccaacacgaanaaccgaaaacgcttcacgacgtaaccgaaacgacaacactacgttctcctcaatcccaccaacacgaaaaccgaaaacacttctctaatataaccganaacgacaacacgacgttcttctcaatcccaccaacacgaaaaccgaaaacgcttcacgacgtaaccaaaacgacaacacgacgttctcctcaatcccaccaacacgaaaaccgaaaacgcttcaccgacgtaaccgaaacgacaacacgacgttctcctcaatcccaccaacacgaaaaccgaaaacgcttcacgacgtaaccgaaacgacaacacgacgttctcctcaatcccaccanacacgaaaaccgaaaacgcttcacgacgtaaccgaaacgacaacataacgttcttctcaatcccaccaacacgaaaaccgaaaacgcttcacgacgtaaccgaaacgacaacacgacgttctcctcaatcccaccaacacgaaaaccgaaaacacttcaccgacgtaaccgaaacgacaacacgacgttcttctcaatcccaccaacacgaaaaccgaaaacgcttcacgacgtaaccgaaacgacaacacgacgttctcctcaatcccaccaacacgaaaaccgaaaacacttctctaatataaccgaaacgacaacacgacgttcttnctcaatcccaccaacacgaaaaccgaaaacgcttcacgacgtaaccaaaacgacaacacgacgttcttctcaatcccaccaacacgaaaaccgaaaacacttcaccgacgtaaccgaaacgacaacacgacgttcttctcaatcccaccaacacgaaaaatcgaaaacgcttcacgacgtaaccgaaacgacaacacgacgctctcctcaatcccaccaacacgaaaaaccgaaaacgcttcaccgacgtaaccgaaacgacaacacaaactcccaaccccgcgctactctcgaactaccgaaaatnataatccacaaaaccnttaaaaactaaaaactact

SEQ ID NO: 25565 - DNA, 821 bp, Artificial Sequence
  chemically treated genomic DNA (Homo sapiens) CpG-island No: 25565
tcgcgtttgtattttttttttagttttagcggtttaagatagttgaacggtttttggagggtcggattgttacggtatttttcgcggtcgcgtagtgtggtttagttcggatttcgcggggcgagttgttttttttttttcgattttcgcgtaagtggtgtattggcgcgcggcgtcgaggggcggggttcgagtcgggcgcgcgcgggcgttgttttataaatatcgggtcgtatcgttcgttgtttcgttcgtttcgcgtcgttcgtttgttacgagtagaacgttgttcgtagtttgcgtatttcgtagtcgttgtcgtttcgtcgttgttttttcgtaaggttattttcgtatatcgatattaatatgaacggatagtttaacggtttttacgaggcgtttatcgaggagggtatatttttttttattttagagtcggtcggggaaggttatttaggtgaggggacggtttgaagcgaagcgtggggcggggtagaaggtagcgttaaggttcggttggttgcggtcggtcggtggtggggttcgcgcgggtcgttttcgttcgtcgggtgatggaagagcggcgatcgcgcgtttttttcgtggcgtcgttagggtttggcgcgtggtcgtcgtttttttttttttttttttttttatttttttttttttttttttttttttattcggtcgcgcgtttaggtatgcggaaggttttagaaaacgtgaagggcgggggttgtggtcgttagtgagttttggtcgggaagggagggtattgttaatttttttcggttttgtcgtttgataaatttgga

SEQ ID NO: 25566 - DNA, 821 bp, Artificial Sequence
  chemically treated genomic DNA (Homo sapiens) CpG-island No: 25566
tccaaatttatcaaacgacaaaaccgaaaaaaattaacaataccctcccttcccgaccaaaactcactaacgaccacaacccccgcccttcacgttttctaaaaccttccgcatacctaaacgcgcgaccgaataaaaaaaaaaaaaaaaaaaaaaaaataaaaaaaaaaaaaaaaaaaaaaacgacgaccacgcgccaaaccctaacgacgccacgaaaaaaacgcgcgatcgccgctcttccatcacccgacgaacgaaaacgacccgcgcgaaccccaccaccgaccgaccgcaaccaaccgaaccttaacgctaccttctaccccgccccacgcttcgcttcaaaccgtcccctcacctaaataaccttccccgaccgactctaaaataaaaaaaaatataccctcctcgataaacgcctcgtaaaaaccgttaaactatccgttcatattaatatcgatatacgaaaataaccttacgaaaaaacaacgacgaaacgacaacgactacgaaatacgcaaactacgaacaacgttctactcgtaacaaacgaacgacgcgaaacgaacgaaacaacgaacgatacgacccgatatttataaaacaacgcccgcgcgcgcccgactcgaaccccgcccctcgacgccgcgcgccaatacaccacttacgcgaaaatcgaaaaaaaaaaaacaactcgccccgcgaaatccgaactaaaccacactacgcgaccgcgaaaaataccgtaacaatccgaccctccaaaaaccgttcaactatcttaaaccgctaaaactaaaaaaaaaatacaaacgcga

SEQ ID NO: 25567 - DNA, 821 bp, Artificial Sequence
  chemically treated genomic DNA (Homo sapiens) CpG-island No: 25567
tttaggtttgttagacggtagggtcgggaggggttaatagtgtttttttttttcggttagaatttattagcgattatagttttcgttttttacgttttttggaatttttcgtatgtttaggcgcgcgatcgaatgaaaagggaggggggaagggaagggtggagaggggagggggaagaggagcggcggttacgcgttaggttttggcggcgttacgaggaaagcgcgcggtcgtcgtttttttattattcggcggacgaggacgattcgcgcgggttttattatcggtcggtcgtagttagtcggattttggcgttgttttttgtttcgttttacgtttcgttttaggtcgtttttttatttgggtggtttttttcgatcgattttgaggtgaaaaggaatgtgtttttttcgatgaacgtttcgtggaagtcgttgagttgttcgtttatgttggtgtcggtgtgcggaagtggttttacgaaggagtagcggcgaggcggtagcggttgcgaaatgcgtaagttgcggatagcgttttattcgtagtaggcgggcggcgcggagcgaacgaagtagcgggcggtgcggttcggtatttatagagtagcgttcgcgcgcgttcggttcgggtttcgtttttcggcgtcgcgcgttaatgtattatttgcgcgggggtcgggggaggaagggtagttcgtttcgcggagttcgggttgaattatattgcgcggtcgcgggaggtgtcgtggtaattcggttttttagagatcgtttagttattttgagtcgttagagttaggagaaaaatgtagacgcga

SEQ ID NO: 25568 - DNA, 821 bp, Artificial Sequence
  chemically treated genomic DNA (Homo sapiens) CpG-island No: 25568
tcgcgtctacatttttctcctaactctaacgactcaaaataactaaacgatctctaaaaaaccgaattaccacgacacctcccgcgaccgcgcaatataattcaacccgaactccgcgaaacgaactacccttcctcccccgacccccgcgcaaataatacattaacgcgcgacgccgaaaaacgaaacccgaaccgaacgcgcgcgaacgctactctataaataccgaaccgcaccgcccgctacttcgttcgctccgcgccgcccgcctactacgaataaaacgctatccgcaacttacgcatttcgcaaccgctaccgcctcgccgctactccttcgtaaaaccacttccgcacaccgacaccaacataaacgaacaactcaacgacttccacgaaacgttcatcgaaaaaaacacattccttttcacctcaaaatcgatcgaaaaaaaccacccaaataaaaaaacgacctaaaacgaaacgtaaaacgaaacaaaaaacaacgccaaaatccgactaactacgaccgaccgataataaaacccgcgcgaatcgtcctcgtccgccgaataataaaaaaacgacgaccgcgcgctttcctcgtaacgccgccaaaacctaacgcgtaaccgccgctcctcttccccctcccctctccacccttcccttcccccctcccttttcattcgatcgcgcgcctaaacatacgaaaaattccaaaaaacgtaaaaaacgaaaactataatcgctaataaattctaaccgaaaaaaaaaaacactattaacccctcccgaccctaccgtctaacaaacctaaa

SEQ ID NO: 25569 - DNA, 551 bp, Artificial Sequence
  chemically treated genomic DNA (Homo sapiens) CpG-island No: 25569
gagttcggggttcgttattagttttttttttgattggttttgtgtcgcgcgttcgagcgtgtttggcgtttgcgttggacgattcggtcggtagtggagatgttcggtcggtttaagcgggagtttcgcggttttattcgcgggaagcgagagtttgagtcgcggggtagtttcggtcgcgttaagcgggagcgagatcgggagcgggagtttgaggcggcgagttttcggggtagttttgtgcgcgtgaagcgggagttcgagtcggcgagcgcgcgcgaggtttcggtttttgttgtttcgtttgtgcgggtgaagcgggagcgcgaggtcgatgaggattcggagtttgagcgggaggtgcgaggtgcgcggggtcgggtcgggttaggcgcgagagtttgtttttttcgcgttttttttttttgtttttaatttttcgttaggttattgcgtcggagttgggggaggggtggggttggggtggagaagaggagggatttagattcgacgattttgttgttcgatttgttttgatgaagatagtattt

SEQ ID NO: 25570 - DNA, 551 bp, Artificial Sequence
  chemically treated genomic DNA (Homo sapiens) CpG-island No: 25570
aaatactatcttcatcaaaacaaatcgaacaacaaaatcgtcgaatctaaatccctcctcttctccaccccaaccccacccctcccccaactccgacgcaataacctaacgaaaaattaaaaacaaaaaaaaaaaacgcgaaaaaaacaaactctcgcgcctaacccgacccgaccccgcgcacctcgcacctcccgctcaaactccgaatcctcatcgacctcgcgctcccgcttcacccgcacaaacgaaacaacaaaaaccgaaacctcgcgcgcgctcgccgactcgaactcccgcttcacgcgcacaaaactaccccgaaaactcgccgcctcaaactcccgctcccgatctcgctcccgcttaacgcgaccgaaactaccccgcgactcaaactctcgcttcccgcgaataaaaccgcgaaactcccgcttaaaccgaccgaacatctccactaccgaccgaatcgtccaacgcaaacgccaaacacgctcgaacgcgcgacacaaaaccaatcaaaaaaaaaactaataacgaaccccgaactc

SEQ ID NO: 25571 - DNA, 551 bp, Artificial Sequence
  chemically treated genomic DNA (Homo sapiens) CpG-island No: 25571
gggtattgtttttattagaataagtcgaatagtagaatcgtcgagtttggatttttttttttttttattttaattttattttttttttaatttcggcgtagtgatttagcggaagattagagataagaaaaaaggacgcgaaaaaaataggttttcgcgtttagttcggttcggtttcgcgtatttcgtatttttcgtttaggtttcgagtttttatcgatttcgcgttttcgttttattcgtataaacgggataatagaagtcggggtttcgcgcgcgttcgtcggttcgaattttcgttttacgcgtatagggttgtttcgggagttcgtcgttttaggttttcgttttcgatttcgttttcgtttgacgcgatcggagttgtttcgcgatttagattttcgtttttcgcgagtggaatcgcgagattttcgtttagatcggtcggatatttttattatcggtcgagtcgtttagcgtaggcgttaagtacgttcgagcgcgcggtataaggttaattaggagaggggttggtagcgagtttcgaattt

SEQ ID NO: 25572 - DNA, 551 bp, Artificial Sequence
  chemically treated genomic DNA (Homo sapiens) CpG-island No: 25572
aaattcgaaactcgctaccaacccctctcctaattaaccttataccgcgcgctcgaacgtacttaacgcctacgctaaacgactcgaccgataataaaaatatccgaccgatctaaacgaaaatctcgcgattccactcgcgaaaaacgaaaatctaaatcgcgaaacaactccgatcgcgtcaaacgaaaacgaaatcgaaaacgaaaacctaaaacgacgaactcccgaaacaaccctatacgcgtaaaacgaaaattcgaaccgacgaacgcgcgcgaaaccccgacttctattatcccgtttatacgaataaaacgaaaacgcgaaatcgataaaaactcgaaacctaaacgaaaaatacgaaatacgcgaaaccgaaccgaactaaacgcgaaaacctatttttttcgcgtccttttttcttatctctaatcttccgctaaatcactacgccgaaattaaaaaaaaaataaaattaaaataaaaaaaaaaaaaaatccaaactcgacgattctactattcgacttattctaataaaaacaataccc

SEQ ID NO: 25573 - DNA, 745 bp, Artificial Sequence
  chemically treated genomic DNA (Homo sapiens) CpG-island No: 25573
cggcggcgcgtaggtaattatttgattatcggcgttttgggcgaggggcgggtttacgcggaaagtttagttcggttcggttttcgttcgtttgggcgcggggatttcggttggggtcggattttgcggtcggcgattttttaggattcgggacgcgagagtttttaggtgatttttggaagttcggaggaagggaaggagtttagtacgtattttttcggagcgtttcgtcgtcgtcgtattttgttcggttttttcgtggcgtcgattttagttgcggttttcggagtagttttgaaaggtttaaagggtcgagcggtttcgtttttggaggttttaggtttcgtcgcgtcgttcgtcgggacgtggagttcgcgtagtttcggtttcggtgttcgcgttttgttcgagattataattttcgagttttcgcgttcgcgttacgggggaaacgtgggcggtgttttaatttcggaggatttgggcgcggagggttgtggcgtgaagatcgttttaaaatcgagatgattagaggtttcgtttaatcgatttttgtcggggaagcgttagtaggtggggatttcggggtagtttgtattttagttttatttgggattgtcgtcgtgtatatggttggaggagcgttttttcgttattgcgtatattttgtagtttgtatcggttaacggtgagttttttaggaagtttttttaacgtggcgttttatgtttgtttttggttaggg

SEQ ID NO: 25574 - DNA, 745 bp, Artificial Sequence
  chemically treated genomic DNA (Homo sapiens) CpG-island No: 25574
ccctaaccaaaaacaaacataaaacgccacgttaaaaaaacttcctaaaaaactcaccgttaaccgatacaaactacaaaatatacgcaataacgaaaaaacgctcctccaaccatatacacgacgacaatcccaaataaaactaaaatacaaactaccccgaaatccccacctactaacgcttccccgacaaaaatcgattaaacgaaacctctaatcatctcgattttaaaacgatcttcacgccacaaccctccgcgcccaaatcctccgaaattaaaacaccgcccacgtttcccccgtaacgcgaacgcgaaaactcgaaaattataatctcgaacaaaacgcgaacaccgaaaccgaaactacgcgaactccacgtcccgacgaacgacgcgacgaaacctaaaacctccaaaaacgaaaccgctcgaccctttaaacctttcaaaactactccgaaaaccgcaactaaaatcgacgccacgaaaaaaccgaacaaaatacgacgacgacgaaacgctccgaaaaaatacgtactaaactccttcccttcctccgaacttccaaaaatcacctaaaaactctcgcgtcccgaatcctaaaaaatcgccgaccgcaaaatccgaccccaaccgaaatccccgcgcccaaacgaacgaaaaccgaaccgaactaaactttccgcgtaaacccgcccctcgcccaaaacgccgataatcaaataattacctacgcgccgccg

SEQ ID NO: 25575 - DNA, 745 bp, Artificial Sequence
  chemically treated genomic DNA (Homo sapiens) CpG-island No: 25575
ttttggttagaggtaggtatggggcgttacgttgagagagttttttagaggatttatcgttggtcggtgtaggttgtaaaatgtgcgtagtggcggagagacgtttttttagttatgtgtacggcgataattttaggtagagttggaatgtaggttgtttcgagatttttatttgttgacgttttttcggtaggaatcggttaaacggaatttttagttatttcggttttagagcggtttttacgttatagtttttcgcgtttaggtttttcgaagttgggatatcgtttacgtttttttcgtgacgcgggcgcgggggttcgggagttgtagtttcgggtagggcgcgggtatcgaggtcggggttgcgcggattttacgtttcggcgggcggcgcggcgaggtttggggtttttaggggcggggtcgttcggttttttaaattttttagggttgtttcgagggtcgtagttagagtcggcgttacgagggggtcgagtagggtgcggcggcggcggggcgtttcggggaggtgcgtattgggtttttttttttttttcgggtttttaggaattatttggggattttcgcgtttcgggttttggggggtcgtcggtcgtagggttcggttttagtcggggttttcgcgtttaggcgagcgggggtcgggtcgggttgggtttttcgcgtgaattcgtttttcgtttagggcgtcgatggttaggtggttgtttgcgcgtcgtcg

SEQ ID NO: 25576 - DNA, 745 bp, Artificial Sequence
  chemically treated genomic DNA (Homo sapiens) CpG-island No: 25576
cgacgacgcgcaaacaaccacctaaccatcgacgccctaaacgaaaaacgaattcacgcgaaaaacccaacccgacccgacccccgctcgcctaaacgcgaaaaccccgactaaaaccgaaccctacgaccgacgaccccccaaaacccgaaacgcgaaaatccccaaataattcctaaaaacccgaaaaaaaaaaaaaaacccaatacgcacctccccgaaacgccccgccgccgccgcaccctactcgaccccctcgtaacgccgactctaactacgaccctcgaaacaaccctaaaaaatttaaaaaaccgaacgaccccgcccctaaaaaccccaaacctcgccgcgccgcccgccgaaacgtaaaatccgcgcaaccccgacctcgatacccgcgccctacccgaaactacaactcccgaacccccgcgcccgcgtcacgaaaaaaacgtaaacgatatcccaacttcgaaaaacctaaacgcgaaaaactataacgtaaaaaccgctctaaaaccgaaataactaaaaattccgtttaaccgattcctaccgaaaaaacgtcaacaaataaaaatctcgaaacaacctacattccaactctacctaaaattatcgccgtacacataactaaaaaaacgtctctccgccactacgcacattttacaacctacaccgaccaacgataaatcctctaaaaaactctctcaacgtaacgccccatacctacctctaaccaaaa

SEQ ID NO: 25577 - DNA, 552 bp, Artificial Sequence
  chemically treated genomic DNA (Homo sapiens) CpG-island No: 25577
gggagcggcgcggggtatataggaggagggggaagaaaaagtaagatgtcggtggtttgcggttttattattcggaagttggattcgttttcgttttttttttttttggcgcggagcgcgcgagtgagattatttttacgtatttattcggcggttgcggtcgttttatttgtaggcggggcggggcgggtttagtagtttcgtttagggggtggaggaacgagggcgggtcggtagtcgttatgttagtttgtggttgtcggcgcggtaggacgcgttggtgggagggggggcggttttgcgtggggtcgtttcgtattttttttttcgtttttatttttcggatttagggacgcgagtttagagaaaatcggttgtgggttcgtagcgtgtgtgggaattttattttggacgtttttcgggggtcgtttttaaagaattatagaggtagagcgggacgtaatgagttatgaacgtttgggttttttttttagttttttcgtagtagattttgggggcgcggttgtaaaatttagttgtttataggggcgg

SEQ ID NO: 25578 - DNA, 552 bp, Artificial Sequence
  chemically treated genomic DNA (Homo sapiens) CpG-island No: 25578
ccgcccctataaacaactaaattttacaaccgcgcccccaaaatctactacgaaaaaactaaaaaaaaaacccaaacgttcataactcattacgtcccgctctacctctataattctttaaaaacgacccccgaaaaacgtccaaaataaaattcccacacacgctacgaacccacaaccgattttctctaaactcgcgtccctaaatccgaaaaataaaaacgaaaaaaaaaatacgaaacgaccccacgcaaaaccgccccccctcccaccaacgcgtcctaccgcgccgacaaccacaaactaacataacgactaccgacccgccctcgttcctccaccccctaaacgaaactactaaacccgccccgccccgcctacaaataaaacgaccgcaaccgccgaataaatacgtaaaaataatctcactcgcgcgctccgcgccaaaaaaaaaaaaaacgaaaacgaatccaacttccgaataataaaaccgcaaaccaccgacatcttactttttcttccccctcctcctatataccccgcgccgctccc

SEQ ID NO: 25579 - DNA, 552 bp, Artificial Sequence
  chemically treated genomic DNA (Homo sapiens) CpG-island No: 25579
tcgtttttgtgggtagttaggttttgtaatcgcgtttttagagtttattgcgggaaaattagggaagaagtttaggcgtttatggtttattgcgtttcgttttatttttgtggttttttgggagcgattttcgggaagcgtttaaagtggagtttttatatacgttgcgaatttatagtcggttttttttgaattcgcgtttttgagttcgggaggtggaggcggagaaaagggtgcggagcgattttacgtagggtcgtttttttttttattagcgcgttttgtcgcgtcggtagttataggttggtatagcggttgtcgattcgttttcgtttttttattttttgaacgggattgttgggttcgtttcgtttcgtttgtaggtgaagcggtcgtagtcgtcgagtaggtgcgtggggatgattttattcgcgcgtttcgcgttaggaggaggaggagcgggagcggatttaattttcgggtagtggagtcgtaagttatcggtattttgtttttttttttttttttttttgtgtgtttcgcgtcgttttt

SEQ ID NO: 25580 - DNA, 552 bp, Artificial Sequence
  chemically treated genomic DNA (Homo sapiens) CpG-island No: 25580
aaaaacgacgcgaaacacacaaaaaaaaaaaaaaaaaaaaacaaaataccgataacttacgactccactacccgaaaattaaatccgctcccgctcctcctcctcctaacgcgaaacgcgcgaataaaatcatccccacgcacctactcgacgactacgaccgcttcacctacaaacgaaacgaaacgaacccaacaatcccgttcaaaaaataaaaaaacgaaaacgaatcgacaaccgctataccaacctataactaccgacgcgacaaaacgcgctaataaaaaaaaaaacgaccctacgtaaaatcgctccgcacccttttctccgcctccacctcccgaactcaaaaacgcgaattcaaaaaaaaccgactataaattcgcaacgtatataaaaactccactttaaacgcttcccgaaaatcgctcccaaaaaaccacaaaaataaaacgaaacgcaataaaccataaacgcctaaacttcttccctaattttcccgcaataaactctaaaaacgcgattacaaaacctaactacccacaaaaacga

SEQ ID NO: 25581 - DNA, 1005 bp, Artificial Sequence
  chemically treated genomic DNA (Homo sapiens) CpG-island No: 25581
taattttcgtggtcgcggtgtaattttcgtagtcgcggtgtaattttcgtagtcgcggtgttattttcgagattgcggagtaattttcgtagttgcggtgtaattttcgagattgcggtgtgattttcgagattgcggtgtgattttcgagattgcggtgtgattttcgtagttgcggtggaattttcgagattgcggtgtaattttcgaggttgcggtgtaattttcgtggttgcggtgtaattttcgtggttgcggtgtaattttcgtggttgcggtgtaattttcgtggttgcggtgtaattttcgtggttgcggtgtaattttcgaggttgcggtgtaatgttcgtggttgcggtgtaatgttcgtggttgcggtgtaattttcgaggttgcggtgtaatgttcgaggttgcggtgtaattttcgaggttgcggtgtaattttcgtggttgcggtgtaatgttcgtggttgcggtgtaatgttcgtggttgcggtgtaattttcgtggttgcggtgtaattttcgaggttgcggtgtaattttcgaggttgcggtgtaatgttcgtggttgcggtgtaatgttcgtggttgcggtgtaatgttcgtggttgcggtgtaatgttcgtggttgcggtgtaatgttcgtggttgcggtgtaatttacgaggttgcggtgtaatgttcgaggttgcggtgtaatttacgaggttgcggtgtaatttacgaggttgcggtgtaatgttcgtggttgcggtgtaatgttcgaggttgcggtgtaatgttcgtggttgcggtgtaatgttcgtggttgcggtgtaatttatcgaggttgcggtgtaatgttcgtggttgcggtgtaatgttcgaggttgcggtgtaatgttcgaggtaacgtgtaggtgatcgggagggggggatgattcgattcgagttcggtatcgaaatgttattttagtattcgttattttatcggtatttaattttggtagttattggtgtga

SEQ ID NO: 25582 - DNA, 1005 bp, Artificial Sequence
  chemically treated genomic DNA (Homo sapiens) CpG-island No: 25582
tcacaccaataactaccaaaattaaataccgataaaataacgaatactaaaataacatttcgataccgaactcgaatcgaatcatccccccctcccgatcacctacacgttacctcgaacattacaccgcaacctcgaacattacaccgcaaccacgaacattacaccgcaacctcgataaattacaccgcaaccacgaacattacaccgcaaccacgaacattacaccgcaacctcgaacattacaccgcaaccacgaacattacaccgcaacctcgtaaattacaccgcaacctcgtaaattacaccgcaacctcgaacattacaccgcaacctcgtaaattacaccgcaaccacgaacattacaccgcaaccacgaacattacaccgcaaccacgaacattacaccgcaaccacgaacattacaccgcaaccacgaacattacaccgcaacctcgaaaattacaccgcaacctcgaaaattacaccgcaaccacgaaaattacaccgcaaccacgaacattacaccgcaaccacgaacattacaccgcaaccacgaaaattacaccgcaacctcgaaaattacaccgcaacctcgaacattacaccgcaacctcgaaaattacaccgcaaccacgaacattacaccgcaaccacgaacattacaccgcaacctcgaaaattacaccgcaaccacgaaaattacaccgcaaccacgaaaattacaccgcaaccacgaaaattacaccgcaaccacgaaaattacaccgcaaccacgaaaattacaccgcaacctcgaaaattacaccgcaatctcgaaaattccaccgcaactacgaaaatcacaccgcaatctcgaaaatcacaccgcaatctcgaaaatcacaccgcaatctcgaaaattacaccgcaactacgaaaattactccgcaatctcgaaaataacaccgcgactacgaaaattacaccgcgactacgaaaattacaccgcgaccacgaaaatta

SEQ ID NO: 25583 - DNA, 1005 bp, Artificial Sequence
  chemically treated genomic DNA (Homo sapiens) CpG-island No: 25583
ttatattagtgattattagagttgaatgtcgatagagtaacggatgttaagatgatatttcggtatcgaattcgagtcgaattatttttttttttcggttatttatacgttgtttcggatattatatcgtagtttcggatattatatcgtagttacggatattatatcgtagtttcggtaaattatatcgtagttacggatattatatcgtagttacggatattatatcgtagtttcggatattatatcgtagttacggatattatatcgtagtttcgtaaattatatcgtagtttcgtaaattatatcgtagtttcggatattatatcgtagtttcgtaaattatatcgtagttacggatattatatcgtagttacggatattatatcgtagttacggatattatatcgtagttacggatattatatcgtagttacggatattatatcgtagtttcggaaattatatcgtagtttcggaaattatatcgtagttacggaaattatatcgtagttacggatattatatcgtagttacggatattatatcgtagttacggaaattatatcgtagtttcggaaattatatcgtagtttcggatattatatcgtagtttcggaaattatatcgtagttacggatattatatcgtagttacggatattatatcgtagtttcggaaattatatcgtagttacggaaattatatcgtagttacggaaattatatcgtagttacggaaattatatcgtagttacggaaattatatcgtagttacggaaattatatcgtagtttcggaaattatatcgtagtttcggaaattttatcgtagttacggaaattatatcgtagtttcggaaattatatcgtagtttcggaaattatatcgtagtttcggaaattatatcgtagttacggaaattatttcgtagtttcggaaatgatatcgcggttacggaaattatatcgcggttacggaaattatatcgcggttacggaaatta

SEQ ID NO: 25584 - DNA, 1005 bp, Artificial Sequence
  chemically treated genomic DNA (Homo sapiens) CpG-island No: 25584
taatttccgtaaccgcgatataatttccgtaaccgcgatataatttccgtaaccgcgatatcatttccgaaactacgaaataatttccgtaactacgatataatttccgaaactacgatataatttccgaaactacgatataatttccgaaactacgatataatttccgtaactacgataaaatttccgaaactacgatataatttccgaaactacgatataatttccgtaactacgatataatttccgtaactacgatataatttccgtaactacgatataatttccgtaactacgatataatttccgtaactacgatataatttccgaaactacgatataatatccgtaactacgatataatatccgtaactacgatataatttccgaaactacgatataatatccgaaactacgatataatttccgaaactacgatataatttccgtaactacgatataatatccgtaactacgatataatatccgtaactacgatataatttccgtaactacgatataatttccgaaactacgatataatttccgaaactacgatataatatccgtaactacgatataatatccgtaactacgatataatatccgtaactacgatataatatccgtaactacgatataatatccgtaactacgatataatttacgaaactacgatataatatccgaaactacgatataatttacgaaactacgatataatttacgaaactacgatataatatccgtaactacgatataatatccgaaactacgatataatatccgtaactacgatataatatccgtaactacgatataatttaccgaaactacgatataatatccgtaactacgatataatatccgaaactacgatataatatccgaaacaacgtataaataaccgaaaaaaaaaaataattcgactcgaattcgataccgaaatatcatcttaacatccgttactctatcgacattcaactctaataatcactaatataa

SEQ ID NO: 25585 - DNA, 764 bp, Artificial Sequence
  chemically treated genomic DNA (Homo sapiens) CpG-island No: 25585
tgattgtcggacgttttaacgtcggtaaatcgagtttgttaaacgcgttggcggggcgtgaagcggtaatcgtaatcgatatcgtcggaattacgcgtgacgtgttgcgtgagtatatttatattgacggaatgtcgttgtatattatcgatatcgtcgggttacgtgaagttagtgacgaagtagaacgtattggtatcgagcgcgcgtggtaggaaattgaataggtcgatcgcgtgttgtttatggtcgatggtattataatagacgtcgtggattcggtagagatttggtcggaatttattgttcgtttgttagcgaaattgtcgattatcgtggtgcgttataaagtcgatattatcggcgaaacgttgggaatgagtgacgtgaacggttacgcgttaattcgtttttcggataggattggtgataggcgtggaacgtgttgcgtatttattttaaatagagtatgggtttcgatattaatatggaaggcggttttttggcgcgtcgtcgttattataggcgttggaataggtagggaaaatttatattaggttaacgcgtatagtgcgatttatttagataacggcggaggacgattgcgacggtatagtaagttagcgataacggggtttattttaattatagagggacgatattaaaattaaacggttaaacggtaataaattatggacgtaatcgttaagagtttatagaggttattttagttattttttattgtatattagttttatgtaatg

SEQ ID NO: 25586 - DNA, 764 bp, Artificial Sequence
  chemically treated genomic DNA (Homo sapiens) CpG-island No: 25586
cattacataaaactaatatacaataaaaaataactaaaataacctctataaactcttaacgattacgtccataatttattaccgtttaaccgtttaattttaatatcgtccctctataattaaaataaaccccgttatcgctaacttactataccgtcgcaatcgtcctccgccgttatctaaataaatcgcactatacgcgttaacctaatataaattttccctacctattccaacgcctataataacgacgacgcgccaaaaaaccgccttccatattaatatcgaaacccatactctatttaaaataaatacgcaacacgttccacgcctatcaccaatcctatccgaaaaacgaattaacgcgtaaccgttcacgtcactcattcccaacgtttcgccgataatatcgactttataacgcaccacgataatcgacaatttcgctaacaaacgaacaataaattccgaccaaatctctaccgaatccacgacgtctattataataccatcgaccataaacaacacgcgatcgacctattcaatttcctaccacgcgcgctcgataccaatacgttctacttcgtcactaacttcacgtaacccgacgatatcgataatatacaacgacattccgtcaatataaatatactcacgcaacacgtcacgcgtaattccgacgatatcgattacgattaccgcttcacgccccgccaacgcgtttaacaaactcgatttaccgacgttaaaacgtccgacaatca

SEQ ID NO: 25587 - DNA, 764 bp, Artificial Sequence
  chemically treated genomic DNA (Homo sapiens) CpG-island No: 25587
tattgtatgggattgatgtgtagtgaaagatggttggggtgatttttgtagatttttggcgattgcgtttatggtttgttgtcgtttggtcgtttggttttggtatcgtttttttgtggttggggtaggtttcgttgtcgttgatttgttgtgtcgtcgtagtcgtttttcgtcgttgtttgggtgggtcgtattgtgcgcgttggtttggtgtagattttttttgtttgttttagcgtttgtagtggcgacgacgcgttaggaagtcgttttttatgttggtgtcgaagtttatgttttgtttgagatgggtacgtagtacgttttacgtttgttattagttttgttcgagagacgaattaacgcgtgatcgtttacgttatttatttttagcgtttcgtcggtgatatcggttttatggcgtattacggtgatcggtagtttcgttggtagacgggtaataaatttcggttagatttttgtcggatttacggcgtttgttgtggtgttatcgattataaatagtacgcggtcggtttgtttaattttttgttacgcgcgttcgatattaatacgttttatttcgttattggttttacgtagttcggcggtatcgatgatatgtagcggtatttcgttaatgtggatatgtttacgtagtacgttacgcgtagtttcggcgatatcggttacgattgtcgttttacgtttcgttagcgcgtttaataggttcgatttatcggcgttaggacgttcggtaatta

SEQ ID NO: 25588 - DNA, 764 bp, Artificial Sequence
  chemically treated genomic DNA (Homo sapiens) CpG-island No: 25588
taattaccgaacgtcctaacgccgataaatcgaacctattaaacgcgctaacgaaacgtaaaacgacaatcgtaaccgatatcgccgaaactacgcgtaacgtactacgtaaacatatccacattaacgaaataccgctacatatcatcgataccgccgaactacgtaaaaccaataacgaaataaaacgtattaatatcgaacgcgcgtaacaaaaaattaaacaaaccgaccgcgtactatttataatcgataacaccacaacaaacgccgtaaatccgacaaaaatctaaccgaaatttattacccgtctaccaacgaaactaccgatcaccgtaatacgccataaaaccgatatcaccgacgaaacgctaaaaataaataacgtaaacgatcacgcgttaattcgtctctcgaacaaaactaataacaaacgtaaaacgtactacgtacccatctcaaacaaaacataaacttcgacaccaacataaaaaacgacttcctaacgcgtcgtcgccactacaaacgctaaaacaaacaaaaaaaatctacaccaaaccaacgcgcacaatacgacccacccaaacaacgacgaaaaacgactacgacgacacaacaaatcaacgacaacgaaacctaccccaaccacaaaaaaacgataccaaaaccaaacgaccaaacgacaacaaaccataaacgcaatcgccaaaaatctacaaaaatcaccccaaccatctttcactacacatcaatcccatacaata

SEQ ID NO: 25589 - DNA, 857 bp, Artificial Sequence
  chemically treated genomic DNA (Homo sapiens) CpG-island No: 25589
gttagcgttggatgcggcgtgcggtcggtaaagattagatcgtttatatagaattggcgatcgttcggcgtatcgttaaaattatcgtcgtaagtcgattacgggttgtcgtttttattatatttaattagcgattgatttatttagttttagacgaagtcgttttgtaaacggggatattgacgaaacgtttgttagtatttagcgaaatcgttaagattgttatttatcgcgtgggcgtattcgtaaaggattagcgggcgcgtttttttaggtagcgaaagttattttttgatggattatttcggtatagtcgggaagggttggtttttatttacgcgcgcgtatatcgggtaaataatatcggtggtcgtggtgtcggtttcgtcgtttttatattgtatcgggcgggaaggatcgatagatttgatttagcgatatagcgcgtcgtgattagcgtcgtggtttgatttattttttagcgattagatgattatattcgggtgattacgatcgcgttgtattattcgcgttatttttcgtttatcgcggtagtagcgcggattatcgttagtcgtttattggtattattcgtgggttttttattgggttgtttatatattaggtcgagaggtttttcgcggtatttagggatggtcgttaagcgttcggtcgcgtaagtcgcgcgtatagagaatttcgtttttcgttttttggtattattttcgcgtgaattatgtaacgttatcgatagtgtttattgtgatgatggattgggtttcgttcgatggcgatagcgattttatttaggataattcgttgttgggcggagatttagtaacgtaatatttgatcga

SEQ ID NO: 25590 - DNA, 857 bp, Artificial Sequence
  chemically treated genomic DNA (Homo sapiens) CpG-island No: 25590
tcgatcaaatattacgttactaaatctccgcccaacaacgaattatcctaaataaaatcgctatcgccatcgaacgaaacccaatccatcatcacaataaacactatcgataacgttacataattcacgcgaaaataataccaaaaaacgaaaaacgaaattctctatacgcgcgacttacgcgaccgaacgcttaacgaccatccctaaataccgcgaaaaacctctcgacctaatatataaacaacccaataaaaaacccacgaataataccaataaacgactaacgataatccgcgctactaccgcgataaacgaaaaataacgcgaataatacaacgcgatcgtaatcacccgaatataatcatctaatcgctaaaaaataaatcaaaccacgacgctaatcacgacgcgctatatcgctaaatcaaatctatcgatccttcccgcccgatacaatataaaaacgacgaaaccgacaccacgaccaccgatattatttacccgatatacgcgcgcgtaaataaaaaccaacccttcccgactataccgaaataatccatcaaaaaataactttcgctacctaaaaaaacgcgcccgctaatcctttacgaatacgcccacgcgataaataacaatcttaacgatttcgctaaatactaacaaacgtttcgtcaatatccccgtttacaaaacgacttcgtctaaaactaaataaatcaatcgctaattaaatataataaaaacgacaacccgtaatcgacttacgacgataattttaacgatacgccgaacgatcgccaattctatataaacgatctaatctttaccgaccgcacgccgcatccaacgctaac

SEQ ID NO: 25591 - DNA, 857 bp, Artificial Sequence
  chemically treated genomic DNA (Homo sapiens) CpG-island No: 25591
tcgattagatattgcgttgttaagttttcgtttagtaacgagttattttgaataagatcgttgtcgttatcgaacggagtttagtttattattatagtaggtattgtcgataacgttgtatgatttacgcgaaggtggtattagggggcgaagggcgagattttttgtgcgcgcgatttacgcggtcgggcgtttagcgattatttttgggtatcgcgggggatttttcggtttgatgtgtggataatttaataggaaatttacggatggtgttaatgagcggttgacgatgattcgcgttgttatcgcgatgagcgaagggtaacgcgaatggtgtagcgcgatcgtaattattcgagtgtgattatttggtcgttggggaatgaattaggttacggcgttaattacgacgcgttgtatcgttggattaaatttgtcgatttttttcgttcggtgtagtatgaaggcggcggagtcgatattacggttatcgatattatttgttcgatgtacgcgcgcgtggatgaagattagtttttttcggttgtgtcgaaatggtttattaaaaaatggttttcgttatttggagagacgcgttcgttgattttttgcgaatacgtttacgcgatgggtaatagttttggcggtttcgttaaatattggtaggcgtttcgttagtattttcgtttatagggcggtttcgtttgggattgggtggattagtcgttgattaaatatgatgaaaacggtaattcgtggtcggtttacggcggtgattttggcgatacgtcgaacgatcgttagttttgtatgaacggtttggtttttgtcgatcgtacgtcgtatttagcgttgat

SEQ ID NO: 25592 - DNA, 857 bp, Artificial Sequence
  chemically treated genomic DNA (Homo sapiens) CpG-island No: 25592
atcaacgctaaatacgacgtacgatcgacaaaaaccaaaccgttcatacaaaactaacgatcgttcgacgtatcgccaaaatcaccgccgtaaaccgaccacgaattaccgttttcatcatatttaatcaacgactaatccacccaatcccaaacgaaaccgccctataaacgaaaatactaacgaaacgcctaccaatatttaacgaaaccgccaaaactattacccatcgcgtaaacgtattcgcaaaaaatcaacgaacgcgtctctccaaataacgaaaaccattttttaataaaccatttcgacacaaccgaaaaaaactaatcttcatccacgcgcgcgtacatcgaacaaataatatcgataaccgtaatatcgactccgccgccttcatactacaccgaacgaaaaaaatcgacaaatttaatccaacgatacaacgcgtcgtaattaacgccgtaacctaattcattccccaacgaccaaataatcacactcgaataattacgatcgcgctacaccattcgcgttacccttcgctcatcgcgataacaacgcgaatcatcgtcaaccgctcattaacaccatccgtaaatttcctattaaattatccacacatcaaaccgaaaaatcccccgcgatacccaaaaataatcgctaaacgcccgaccgcgtaaatcgcgcgcacaaaaaatctcgcccttcgccccctaataccaccttcgcgtaaatcatacaacgttatcgacaatacctactataataataaactaaactccgttcgataacgacaacgatcttattcaaaataactcgttactaaacgaaaacttaacaacgcaatatctaatcga

SEQ ID NO: 25593 - DNA, 736 bp, Artificial Sequence
  chemically treated genomic DNA (Homo sapiens) CpG-island No: 25593
tcgtatcgtcgtgtttttcggtttaagttttaatattcgggcgaattggcgtgttttattagttcggtagtatgaattattattcgttagttattttattggagacgacggaagatcgttgtcgaagcggcgttttatcgtttttagtatgacgttttgtattgttttattgttgaagtcgtcggtagtgatcgtttagtgtagtgttttacgattatagtagtttagcgcgaacgtgatacgtagttttttttcgttattatagtagaattcgaattcgttagagtattatcgttgattgtttttttttacggttattttgtttgtatgtgttcgtttcgatggcggtatagtaggttttcgtttaagtaatagcgtattttggcgtatgattcggtaaatacgtttggtattgatcgtaggtatattattaagttttgtttgtttgcgaagtagcgtttatattcgacgataattatacgttggtagtttttcgataatatggtgtatacggagaagtatattcgtattattagtgtgacgattgcggcggttatttatttagttatcggttcgtttgagaatgacgtgtaattgcgtacgcgatattcggagatacggttgattaagtttattttttattttcgggtaataagggcgtttgttattaataaaggtcgtttaattacggtttttgagagttattatatcgtatttgcgataggttgagattaat

SEQ ID NO: 25594 - DNA, 736 bp, Artificial Sequence
  chemically treated genomic DNA (Homo sapiens) CpG-island No: 25594
attaatctcaacctatcgcaaatacgatataataactctcaaaaaccgtaattaaacgacctttattaataacaaacgcccttattacccgaaaataaaaaataaacttaatcaaccgtatctccgaatatcgcgtacgcaattacacgtcattctcaaacgaaccgataactaaataaataaccgccgcaatcgtcacactaataatacgaatatacttctccgtatacaccatattatcgaaaaactaccaacgtataattatcgtcgaatataaacgctacttcgcaaacaaacaaaacttaataatatacctacgatcaataccaaacgtatttaccgaatcatacgccaaaatacgctattacttaaacgaaaacctactataccgccatcgaaacgaacacatacaaacaaaataaccgtaaaaaaaaacaatcaacgataatactctaacgaattcgaattctactataataacgaaaaaaaactacgtatcacgttcgcgctaaactactataatcgtaaaacactacactaaacgatcactaccgacgacttcaacaataaaacaatacaaaacgtcatactaaaaacgataaaacgccgcttcgacaacgatcttccgtcgtctccaataaaataactaacgaataataattcatactaccgaactaataaaacacgccaattcgcccgaatattaaaacttaaaccgaaaaacacgacgatacga

SEQ ID NO: 25595 - DNA, 736 bp, Artificial Sequence
  chemically treated genomic DNA (Homo sapiens) CpG-island No: 25595
gttaattttagtttgtcgtaagtacgatgtaatgatttttaagagtcgtgattggacggtttttattgatagtaagcgtttttattgttcggggatggggagtaagtttagttagtcgtgttttcgggtgtcgcgtgcgtagttgtacgttatttttagacgaatcgatgattggatggatggtcgtcgtagtcgttatattgatgatacggatgtgttttttcgtatatattatgttatcggagagttgttaacgtatggttatcgtcgggtatgggcgttgtttcgtagataggtagaatttgatggtatgtttgcgattaatgttaaacgtgtttatcggattatgcgttagaatgcgttgttgtttgagcgaaaatttgttgtatcgttatcgaaacgggtatatataggtagagtggtcgtgaaagaaagtaattagcgatggtgttttgacgggttcgagttttgttgtgataacggagagagattgcgtgttacgttcgcgttggattgttgtgatcgtgaggtattgtattgggcggttattatcggcggttttaatagtgaaatagtataggacgttatgttgggagcggtggaacgtcgtttcggtaacgatttttcgtcgtttttagtggagtggttgacggataatggtttatgttatcgggttaatgaaatacgttagttcgttcggatgttgggatttgaatcgaagaatacggcggtgcgg

SEQ ID NO: 25596 - DNA, 736 bp, Artificial Sequence
  chemically treated genomic DNA (Homo sapiens) CpG-island No: 25596
ccgcaccgccgtattcttcgattcaaatcccaacatccgaacgaactaacgtatttcattaacccgataacataaaccattatccgtcaaccactccactaaaaacgacgaaaaatcgttaccgaaacgacgttccaccgctcccaacataacgtcctatactatttcactattaaaaccgccgataataaccgcccaatacaatacctcacgatcacaacaatccaacgcgaacgtaacacgcaatctctctccgttatcacaacaaaactcgaacccgtcaaaacaccatcgctaattactttctttcacgaccactctacctatatatacccgtttcgataacgatacaacaaattttcgctcaaacaacaacgcattctaacgcataatccgataaacacgtttaacattaatcgcaaacataccatcaaattctacctatctacgaaacaacgcccatacccgacgataaccatacgttaacaactctccgataacataatatatacgaaaaaacacatccgtatcatcaatataacgactacgacgaccatccatccaatcatcgattcgtctaaaaataacgtacaactacgcacgcgacacccgaaaacacgactaactaaacttactccccatccccgaacaataaaaacgcttactatcaataaaaaccgtccaatcacgactcttaaaaatcattacatcgtacttacgacaaactaaaattaac

SEQ ID NO: 25597 - DNA, 660 bp, Artificial Sequence
  chemically treated genomic DNA (Homo sapiens) CpG-island No: 25597
  unsure (4, 19, 38, 113, 121, 436, 521, 547, 558, 575, 603, 628, 652)
tttnttcgtttcgaggttngcggggacggggtcgaggntaatgaggggattagtagggggagcgcgggtcgtttcgagattcgtgttttatttcgtttcgattttcgattggngcgtttanagggtcggagagggacggagaggggagtcgcgcgcgggtttcggcgggggagttttaaagataaagaggaggtcgggtcgcgttgagagaggtcggcggcggagacgtagttcggtgcgggagttagagggcggtggagacggtatagggattggagaggcggtgggagtggatggcgggggcggggagggaacgtcgtgtgtcgggattttaaggatagcggcgcggtgtgcggggtttagtcgcgggtagagtcggagaaagggcgatttggagaggcgtaggtaggggggtgcgttcgggaggttcgaggtnttcgaggaggttcggttattttcgttcggagggaatacggtcggattaaacgtagacgtcgttcggttttcgggggcgggaggangcgtggtttcggcgggcgcgtagttnggagaggaagnggtcggggagggaggangggagagagggagggaagaacggggganggcggggaggaagagggaggaggangagttcgtttttaggtaagggganggtgattt

SEQ ID NO: 25598 - DNA, 660 bp, Artificial Sequence
  chemically treated genomic DNA (Homo sapiens) CpG-island No: 25598
  unsure (9, 33, 58, 86, 103, 114, 140, 225, 540, 548, 623, 642, 657)
aaatcaccntccccttacctaaaaacgaactcntcctcctccctcttcctccccgccntcccccgttcttccctccctctctcccntcctccctccccgaccncttcctctccnaactacgcgcccgccgaaaccacgcntcctcccgcccccgaaaaccgaacgacgtctacgtttaatccgaccgtattccctccgaacgaaaataaccgaacctcctcgaanacctcgaacctcccgaacgcacccccctacctacgcctctccaaatcgccctttctccgactctacccgcgactaaaccccgcacaccgcgccgctatccttaaaatcccgacacacgacgttccctccccgcccccgccatccactcccaccgcctctccaatccctataccgtctccaccgccctctaactcccgcaccgaactacgtctccgccgccgacctctctcaacgcgacccgacctcctctttatctttaaaactcccccgccgaaacccgcgcgcgactcccctctccgtccctctccgaccctntaaacgcnccaatcgaaaatcgaaacgaaataaaacacgaatctcgaaacgacccgcgctccccctactaatcccctcattancctcgaccccgtccccgcnaacctcgaaacgaanaaa

SEQ ID NO: 25599 - DNA, 660 bp, Artificial Sequence
  chemically treated genomic DNA (Homo sapiens) CpG-island No: 25599
  unsure (9, 33, 58, 86, 103, 114, 140, 225, 540, 548, 623, 642, 657)
ggattattntttttttgtttgagggcgagtttnttttttttttttttttttttcgttntttttcgttttttttttttttttttttntttttttttttcggttnttttttttttnagttgcgcgttcgtcgggattacgtnttttttcgttttcgggagtcgagcggcgtttgcgtttggttcggtcgtgtttttttcgggcgggggtggtcgggttttttcgggngtttcgggtttttcgggcgtatttttttgtttgcgtttttttaagtcgtttttttttcggttttgttcgcggttgagtttcgtatatcgcgtcgttgtttttggggtttcggtatacggcgtttttttttcgttttcgttatttatttttatcgtttttttagtttttgtgtcgtttttatcgttttttgattttcgtatcgagttgcgttttcgtcgtcggttttttttagcgcggttcggttttttttttgtttttgaagttttttcgtcgaggttcgcgcgcggttttttttttcgttttttttcggttttntgggcgtnttagtcggaggtcggggcgggatggggtacgagtttcggggcggttcgcgttttttttattagtttttttattgntttcggtttcgttttcgtnagtttcggggcgggnagg

SEQ ID NO: 25600 - DNA, 660 bp, Artificial Sequence
  chemically treated genomic DNA (Homo sapiens) CpG-island No: 25600
  unsure (4, 19, 38, 113, 121, 436, 521, 547, 558, 575, 603, 628, 652)
cctncccgccccgaaactnacgaaaacgaaaccgaaancaataaaaaaactaataaaaaaaacgcgaaccgccccgaaactcgtaccccatcccgccccgacctccgactaanacgcccanaaaaccgaaaaaaaacgaaaaaaaaaaccgcgcgcgaacctcgacgaaaaaacttcaaaaacaaaaaaaaaaccgaaccgcgctaaaaaaaaccgacgacgaaaacgcaactcgatacgaaaatcaaaaaacgataaaaacgacacaaaaactaaaaaaacgataaaaataaataacgaaaacgaaaaaaaaacgccgtataccgaaaccccaaaaacaacgacgcgatatacgaaactcaaccgcgaacaaaaccgaaaaaaaaacgacttaaaaaaacgcaaacaaaaaaatacgcccgaaaaacccgaaacncccgaaaaaacccgaccacccccgcccgaaaaaaacacgaccgaaccaaacgcaaacgccgctcgactcccgaaaacgaaaaaanacgtaatcccgacgaacgcgcaactnaaaaaaaaaanaaccgaaaaaaaaaaanaaaaaaaaaaaaaaaaaaaacgaaaaanaacgaaaaaaaaaaaaaaaaaaaanaaactcgccctcaaacaaaaaaanaataatcc

SEQ ID NO: 25601 - DNA, 500 bp, Artificial Sequence
  chemically treated genomic DNA (Homo sapiens) CpG-island No: 25601
gcgtcgtcgtcgtcgtcgtttttgtagcgttgtcgatttagtcgttagtattttttcgagtatcgggatttcggggtaggaggcgacgcgggcgagtattagcgttagtcggttgcggttgtttatacggtttattatgggtttcgggcgtcgggttttgttcgcggtgtcggtcgtgttgttggtttttacgttgtcggggttgttcgtttgggtatagaacgatacggagtttatcgtgttggagggtaagtgtttggtggtgtgcgattcgaattcggttacggattttaagggttttttttttttttcgttggggatatcggttcgggcggttaattttaaggtcgttttttcggcggtgcggagtattaattacgagttattcgagatgagtaataagacgcgtattatttatttcgattaggttagattcggggggaagcgagtatttagggggtgggcggtttttaggtattttagtacgaggttgtttgttt

SEQ ID NO: 25602 - DNA, 500 bp, Artificial Sequence
  chemically treated genomic DNA (Homo sapiens) CpG-island No: 25602
aaacaaacaacctcgtactaaaatacctaaaaaccgcccaccccctaaatactcgcttccccccgaatctaacctaatcgaaataaataatacgcgtcttattactcatctcgaataactcgtaattaatactccgcaccgccgaaaaaacgaccttaaaattaaccgcccgaaccgatatccccaacgaaaaaaaaaaaaaacccttaaaatccgtaaccgaattcgaatcgcacaccaccaaacacttaccctccaacacgataaactccgtatcgttctatacccaaacgaacaaccccgacaacgtaaaaaccaacaacacgaccgacaccgcgaacaaaacccgacgcccgaaacccataataaaccgtataaacaaccgcaaccgactaacgctaatactcgcccgcgtcgcctcctaccccgaaatcccgatactcgaaaaaatactaacgactaaatcgacaacgctacaaaaacgacgacgacgacgacgc

SEQ ID NO: 25603 - DNA, 500 bp, Artificial Sequence
  chemically treated genomic DNA (Homo sapiens) CpG-island No: 25603
gggtaggtagtttcgtgttgaggtgtttggagatcgtttattttttaggtgttcgttttttttcgggtttgatttgatcgaagtaaatgatgcgcgttttgttgtttatttcggatggttcgtggttggtgtttcgtatcgtcgagaaggcgattttggagttggtcgttcggatcgatatttttagcggggaggaagaggagtttttggagttcgtggtcgggttcgagtcgtatattattagatatttgttttttagtacgatgggtttcgtgtcgttttgtgtttagacgggtagtttcggtagcgtgaggattagtagtacggtcggtatcgcggataaggttcggcgttcggagtttatggtgagtcgtgtgggtagtcgtagtcggttggcgttggtgttcgttcgcgtcgttttttatttcgggatttcggtgttcgggaagatgttagcggttaggtcgatagcgttgtaggagcgacggcggcggcggcgt

SEQ ID NO: 25604 - DNA, 500 bp, Artificial Sequence
  chemically treated genomic DNA (Homo sapiens) CpG-island No: 25604
acgccgccgccgccgtcgctcctacaacgctatcgacctaaccgctaacatcttcccgaacaccgaaatcccgaaataaaaaacgacgcgaacgaacaccaacgccaaccgactacgactacccacacgactcaccataaactccgaacgccgaaccttatccgcgataccgaccgtactactaatcctcacgctaccgaaactacccgtctaaacacaaaacgacacgaaacccatcgtactaaaaaacaaatatctaataatatacgactcgaacccgaccacgaactccaaaaactcctcttcctccccgctaaaaatatcgatccgaacgaccaactccaaaatcgccttctcgacgatacgaaacaccaaccacgaaccatccgaaataaacaacaaaacgcgcatcatttacttcgatcaaatcaaacccgaaaaaaaacgaacacctaaaaaataaacgatctccaaacacctcaacacgaaactacctaccc

SEQ ID NO: 25605 - DNA, 653 bp, Artificial Sequence
  chemically treated genomic DNA (Homo sapiens) CpG-island No: 25605
cgttgcgacgcggttttcgtgcggtttttatcgaggttgttgttttttgtcgcgcgggttcggtttttttcgtcgatcgaggcgcgtttcgggcgtagtgtcgtcgaggaggggatcggttttagtgtttacgcgggttttttcgtcgtcgcggtagggttcggttcgattttagcgagtagatttttcgtttgcggtcggtgattcgcgcgacgtttcggcggtatcgataatgttgtgttttagtttcgtaggcgtcgcggtagcgggtttcgggatgttttcgcggtttttatttggcgaggttcgtttcgtgcgttttcggggttttggttgggtcggcgtcgagtttagggcgatcgcggatcgtcggttacggcgtttttcggtgacgggggcgcgggttcgcggggcgcggggggcgttgtttaggttcggttcggtaggagttagagtttttagcggcgcgggcgagttcgggttagtagtcgagagggggttttgagcggagtcgcggtcgttttggtattttaaaggcgaggtagttggacgttgtttaagcggaaacgtagagagaaattttagttttcggggtagagcgttggtagcgaggggagggggtttaagagttttttgtaggcgtataaattaat

SEQ ID NO: 25606 - DNA, 653 bp, Artificial Sequence
  chemically treated genomic DNA (Homo sapiens) CpG-island No: 25606
attaatttatacgcctacaaaaaactcttaaaccccctcccctcgctaccaacgctctaccccgaaaactaaaatttctctctacgtttccgcttaaacaacgtccaactacctcgcctttaaaataccaaaacgaccgcgactccgctcaaaaccccctctcgactactaacccgaactcgcccgcgccgctaaaaactctaactcctaccgaaccgaacctaaacaacgccccccgcgccccgcgaacccgcgcccccgtcaccgaaaaacgccgtaaccgacgatccgcgatcgccctaaactcgacgccgacccaaccaaaaccccgaaaacgcacgaaacgaacctcgccaaataaaaaccgcgaaaacatcccgaaacccgctaccgcgacgcctacgaaactaaaacacaacattatcgataccgccgaaacgtcgcgcgaatcaccgaccgcaaacgaaaaatctactcgctaaaatcgaaccgaaccctaccgcgacgacgaaaaaacccgcgtaaacactaaaaccgatcccctcctcgacgacactacgcccgaaacgcgcctcgatcgacgaaaaaaaccgaacccgcgcgacaaaaaacaacaacctcgataaaaaccgcacgaaaaccgcgtcgcaacg

SEQ ID NO: 25607 - DNA, 653 bp, Artificial Sequence
  chemically treated genomic DNA (Homo sapiens) CpG-island No: 25607
attggtttgtgcgtttgtaaggagtttttgggtttttttttttcgttgttaacgttttgtttcgggggttgaagtttttttttgcgttttcgtttgaatagcgtttagttgtttcgtttttaaaatgttaggacggtcgcggtttcgtttagagttttttttcggttgttggttcgggttcgttcgcgtcgttgggggttttgatttttgtcgagtcgggtttgggtagcgtttttcgcgtttcgcgagttcgcgttttcgttatcgggaaacgtcgtagtcggcgattcgcggtcgttttgggttcggcgtcggtttagttaggatttcgggagcgtacgggacgggtttcgttaggtaaggatcgcgggagtatttcgggattcgttgtcgcggcgtttgcggggttggagtatagtattgtcggtgtcgtcggggcgtcgcgcgggttatcggtcgtaggcggaggatttgttcgttgaagtcgggtcgagttttgtcgcggcggcgaggagattcgcgtggatattgggatcgatttttttttcggcggtattgcgttcggggcgcgtttcggtcggcggggagggtcggattcgcgcggtaggggatagtagtttcggtgggagtcgtacgggagtcgcgtcgtagcg

SEQ ID NO: 25608 - DNA, 653 bp, Artificial Sequence
  chemically treated genomic DNA (Homo sapiens) CpG-island No: 25608
cgctacgacgcgactcccgtacgactcccaccgaaactactatcccctaccgcgcgaatccgaccctccccgccgaccgaaacgcgccccgaacgcaataccgccgaaaaaaaaatcgatcccaatatccacgcgaatctcctcgccgccgcgacaaaactcgacccgacttcaacgaacaaatcctccgcctacgaccgataacccgcgcgacgccccgacgacaccgacaatactatactccaaccccgcaaacgccgcgacaacgaatcccgaaatactcccgcgatccttacctaacgaaacccgtcccgtacgctcccgaaatcctaactaaaccgacgccgaacccaaaacgaccgcgaatcgccgactacgacgtttcccgataacgaaaacgcgaactcgcgaaacgcgaaaaacgctacccaaacccgactcgacaaaaatcaaaacccccaacgacgcgaacgaacccgaaccaacaaccgaaaaaaaactctaaacgaaaccgcgaccgtcctaacattttaaaaacgaaacaactaaacgctattcaaacgaaaacgcaaaaaaaaacttcaacccccgaaacaaaacgttaacaacgaaaaaaaaaaacccaaaaactccttacaaacgcacaaaccaat

SEQ ID NO: 25609 - DNA, 812 bp, Artificial Sequence
  chemically treated genomic DNA (Homo sapiens) CpG-island No: 25609
tcggttcgacgttgagattttggggtgagtgtgtgtaggggtcgcggttttattttcgggtgttcgagtacgtcgggtttagaaggtttttttgtcggagagaagtagtatgcgtatttgttgttcgttaaagagtttaggaggggttttttattggcggttttaggtttcgcgcgggcgttttcggggtacggaaatggtgtcggatgatgtgcgtgttatcgtgggggaaggttcggcgtttttagttttgagtattcgcggaggcgagttttcgaggtcgttgcgttcgtagtcgttttttcgtttttagttttcggggtagtattttttcgttggtttgtcgcggttgcgtttcgtttttattttcgggtcggtttaatataattttgcggcggtttcgcgggggcggggtttgagcgcggacggtaaggggtgggggaacgaggtggtcgaggtggtggcggttttttagttttttagttttttaacgggcgcgtattaggcggaggttatattgtagcgcggcggtaaagtcgttggcgtaggttgtttgttttgggtcggtcggtttcgttttttttttttcgttaatggggagcgcgcgcgtcgttgtgggtttgcgcgtgtttgtgagtgtgcgtgtgtgcgcgcgcggggtcgtttcgttagtcggttttttcgtttaggtgtgggttttagtttcgggtagttcgcgagggttttttgcgttttggagttcggggacgtagtttaggcgagtgcgtttggttggggggatacgttatagtttttttagggggatatttgaa

SEQ ID NO: 25610 - DNA, 812 bp, Artificial Sequence
  chemically treated genomic DNA (Homo sapiens) CpG-island No: 25610
ttcaaatatccccctaaaaaaactataacgtatccccccaaccaaacgcactcgcctaaactacgtccccgaactccaaaacgcaaaaaaccctcgcgaactacccgaaactaaaacccacacctaaacgaaaaaaccgactaacgaaacgaccccgcgcgcgcacacacgcacactcacaaacacgcgcaaacccacaacgacgcgcgcgctccccattaacgaaaaaaaaaaaacgaaaccgaccgacccaaaacaaacaacctacgccaacgactttaccgccgcgctacaatataacctccgcctaatacgcgcccgttaaaaaactaaaaaactaaaaaaccgccaccacctcgaccacctcgttcccccaccccttaccgtccgcgctcaaaccccgcccccgcgaaaccgccgcaaaattatattaaaccgacccgaaaataaaaacgaaacgcaaccgcgacaaaccaacgaaaaaatactaccccgaaaactaaaaacgaaaaaacgactacgaacgcaacgacctcgaaaactcgcctccgcgaatactcaaaactaaaaacgccgaaccttcccccacgataacacgcacatcatccgacaccatttccgtaccccgaaaacgcccgcgcgaaacctaaaaccgccaataaaaaacccctcctaaactctttaacgaacaacaaatacgcatactacttctctccgacaaaaaaaccttctaaacccgacgtactcgaacacccgaaaataaaaccgcgacccctacacacactcaccccaaaatctcaacgtcgaaccga

SEQ ID NO: 25611 - DNA, 812 bp, Artificial Sequence
  chemically treated genomic DNA (Homo sapiens) CpG-island No: 25611
tttaggtgtttttttaggggaattgtggcgtgtttttttaattaggcgtattcgtttaaattgcgttttcgaattttagggcgtagggagttttcgcgggttgttcggggttggggtttatatttgaacggaggagtcggttggcggagcggtttcgcgcgcgtatatacgtatatttatagatacgcgtaaatttatagcggcgcgcgcgttttttattggcgggaggaggaaggcggggtcggtcgatttaaaataaataatttgcgttagcgattttgtcgtcgcgttgtagtgtggttttcgtttggtgcgcgttcgttggggagttggggaattggggagtcgttattatttcggttatttcgtttttttattttttgtcgttcgcgtttaggtttcgttttcgcggagtcgtcgtagggttatattgggtcggttcgaaggtggaggcgagacgtagtcgcggtaggttagcggggagatgttgtttcggaggttgggagcgggaaggcggttgcgggcgtagcggtttcggggattcgttttcgcgggtgtttaaggttgaaggcgtcggatttttttttacggtggtacgtatattattcggtattattttcgtgtttcgaagacgttcgcgcgggatttgggatcgttagtgaagaattttttttgggttttttaacgagtagtagatgcgtatgttgttttttttcggtaggaaagttttttaagttcggcgtgttcgggtattcgagggtggaatcgcggtttttgtatatatttattttaaagttttaacgtcgaatcga

SEQ ID NO: 25612 - DNA, 812 bp, Artificial Sequence
  chemically treated genomic DNA (Homo sapiens) CpG-island No: 25612
tcgattcgacgttaaaactttaaaataaatatatacaaaaaccgcgattccaccctcgaatacccgaacacgccgaacttaaaaaactttcctaccgaaaaaaaacaacatacgcatctactactcgttaaaaaacccaaaaaaaattcttcactaacgatcccaaatcccgcgcgaacgtcttcgaaacacgaaaataataccgaataatatacgtaccaccgtaaaaaaaaatccgacgccttcaaccttaaacacccgcgaaaacgaatccccgaaaccgctacgcccgcaaccgccttcccgctcccaacctccgaaacaacatctccccgctaacctaccgcgactacgtctcgcctccaccttcgaaccgacccaatataaccctacgacgactccgcgaaaacgaaacctaaacgcgaacgacaaaaaataaaaaaacgaaataaccgaaataataacgactccccaattccccaactccccaacgaacgcgcaccaaacgaaaaccacactacaacgcgacgacaaaatcgctaacgcaaattatttattttaaatcgaccgaccccgccttcctcctcccgccaataaaaaacgcgcgcgccgctataaatttacgcgtatctataaatatacgtatatacgcgcgcgaaaccgctccgccaaccgactcctccgttcaaatataaaccccaaccccgaacaacccgcgaaaactccctacgccctaaaattcgaaaacgcaatttaaacgaatacgcctaattaaaaaaacacgccacaattcccctaaaaaaacacctaaa

SEQ ID NO: 25613 - DNA, 658 bp, Artificial Sequence
  chemically treated genomic DNA (Homo sapiens) CpG-island No: 25613
tttttcgacggcgcgtattcggcgttttcgggtttcgcggcgttatttaggttaggagcgtttttatcgggtacggtaggtgcgggttagggcggcggattgaggtcgtttgtagggttgcgggtagtcgtagggggtagtataggtgcgcgtcgtcggtcgtcgggtttcggagtggtttggcgggggtcgtcgtcgggagaggtgtaagtaggaggggcggcgcggtcggtggtatttcggtttcgcgcgcgtttagtcgcgtcggttcgttcgcgtcgtacgcgtagagcggtagtagggttttgtagggcgtcgcggggaggagcgcggggaacgcgggtagcggcgggtagggcgcggcgttttattgaagcgtcgtttcgggggtcgtgtttttgaggcggcggttgcggaagggtttgcgtaggatgttgtcgatggcgaaggagttggagaatttgttcgcggggttggcgcgttttttttggcgggcgggcgagcgtatgcggggcgaggtcggggcggcgggcgcgggcggcggggcggcggggaggttcggggttttttcgggtcgtagttcgggcgcggggatcggcgcgcggtggttgaggcgtttgcggcggcggcggaagatttcgtcggcgaaggtgtattt

SEQ ID NO: 25614 - DNA, 658 bp, Artificial Sequence
  chemically treated genomic DNA (Homo sapiens) CpG-island No: 25614
aaatacaccttcgccgacgaaatcttccgccgccgccgcaaacgcctcaaccaccgcgcgccgatccccgcgcccgaactacgacccgaaaaaaccccgaacctccccgccgccccgccgcccgcgcccgccgccccgacctcgccccgcatacgctcgcccgcccgccaaaaaaaacgcgccaaccccgcgaacaaattctccaactccttcgccatcgacaacatcctacgcaaacccttccgcaaccgccgcctcaaaaacacgacccccgaaacgacgcttcaataaaacgccgcgccctacccgccgctacccgcgttccccgcgctcctccccgcgacgccctacaaaaccctactaccgctctacgcgtacgacgcgaacgaaccgacgcgactaaacgcgcgcgaaaccgaaataccaccgaccgcgccgcccctcctacttacacctctcccgacgacgacccccgccaaaccactccgaaacccgacgaccgacgacgcgcacctatactaccccctacgactacccgcaaccctacaaacgacctcaatccgccgccctaacccgcacctaccgtacccgataaaaacgctcctaacctaaataacgccgcgaaacccgaaaacgccgaatacgcgccgtcgaaaaa

SEQ ID NO: 25615 - DNA, 658 bp, Artificial Sequence
  chemically treated genomic DNA (Homo sapiens) CpG-island No: 25615
gagtatattttcgtcgacggggtttttcgtcgtcgtcgtaagcgttttagttatcgcgcgtcggttttcgcgttcgggttgcggttcgaggaggtttcgggttttttcgtcgtttcgtcgttcgcgttcgtcgtttcggtttcgtttcgtatgcgttcgttcgttcgttaggaggagcgcgttagtttcgcgggtaagttttttagttttttcgttatcgatagtattttgcgtaagttttttcgtagtcgtcgttttagggatacggttttcgggacgacgttttagtggggcgtcgcgttttgttcgtcgttgttcgcgtttttcgcgttttttttcgcggcgttttgtagggttttgttgtcgttttgcgcgtacggcgcgggcgagtcggcgcggttgggcgcgcgcgaggtcgaggtgttatcgatcgcgtcgttttttttgtttgtatttttttcggcggcggttttcgttaagttatttcgaggttcggcggtcggcggcgcgtatttgtattgttttttgcggttgttcgtagttttgtaggcggttttagttcgtcgttttggttcgtatttgtcgtattcggtggagacgtttttagtttgagtagcgtcgcggggttcgggaacgtcgagtgcgcgtcgtcggggag

SEQ ID NO: 25616 - DNA, 658 bp, Artificial Sequence
  chemically treated genomic DNA (Homo sapiens) CpG-island No: 25616
ctccccgacgacgcgcactcgacgttcccgaaccccgcgacgctactcaaactaaaaacgtctccaccgaatacgacaaatacgaaccaaaacgacgaactaaaaccgcctacaaaactacgaacaaccgcaaaaaacaatacaaatacgcgccgccgaccgccgaacctcgaaataacttaacgaaaaccgccgccgaaaaaaatacaaacaaaaaaaacgacgcgatcgataacacctcgacctcgcgcgcgcccaaccgcgccgactcgcccgcgccgtacgcgcaaaacgacaacaaaaccctacaaaacgccgcgaaaaaaaacgcgaaaaacgcgaacaacgacgaacaaaacgcgacgccccactaaaacgtcgtcccgaaaaccgtatccctaaaacgacgactacgaaaaaacttacgcaaaatactatcgataacgaaaaaactaaaaaacttacccgcgaaactaacgcgctcctcctaacgaacgaacgaacgcatacgaaacgaaaccgaaacgacgaacgcgaacgacgaaacgacgaaaaaacccgaaacctcctcgaaccgcaacccgaacgcgaaaaccgacgcgcgataactaaaacgcttacgacgacgacgaaaaaccccgtcgacgaaaatatactc

SEQ ID NO: 25617 - DNA, 559 bp, Artificial Sequence
  chemically treated genomic DNA (Homo sapiens) CpG-island No: 25617
ttttcgcggtgcgtcggagtttagagttcgggttttagtattttgttcgttgcgtcgagggcgcgtttttttcgtgtcgggacgttcggtgtattttcggacggcgttggttaggttgggttttttttttagggatatcggcgcgggtcgggttcgtttttaagtttttcggcggttcgtaggggttattcggggcggggggggtgcggggcgtgtacgtgcgcgtcgggggcggggtcgttgcgttttttgggtagtttttagtttttagtcgcggttttacgtgggtttgcgggcgtggagcggcgatcggcgcgaggtttcgttttcgagttcgggagttaatgagcgtacgggggcgggatcggggcggggaggtttaagagcgcgggatattggtgttgcgttgttggattgcgtcgtcggagcgacgggtttcgggtcggtgtaaggtaggcgtacggggaagggcgcgtcgcgcggtcgttattttattatgtttaagcgttgcggtcggcgtttgttgttggcgttggcgggcgcgttgttcgtttgtttg

SEQ ID NO: 25618 - DNA, 559 bp, Artificial Sequence
  chemically treated genomic DNA (Homo sapiens) CpG-island No: 25618
caaacaaacgaacaacgcgcccgccaacgccaacaacaaacgccgaccgcaacgcttaaacataataaaataacgaccgcgcgacgcgcccttccccgtacgcctaccttacaccgacccgaaacccgtcgctccgacgacgcaatccaacaacgcaacaccaatatcccgcgctcttaaacctccccgccccgatcccgcccccgtacgctcattaactcccgaactcgaaaacgaaacctcgcgccgatcgccgctccacgcccgcaaacccacgtaaaaccgcgactaaaaactaaaaactacccaaaaaacgcaacgaccccgcccccgacgcgcacgtacacgccccgcaccccccccgccccgaataacccctacgaaccgccgaaaaacttaaaaacgaacccgacccgcgccgatatccctaaaaaaaaaacccaacctaaccaacgccgtccgaaaatacaccgaacgtcccgacacgaaaaaaacgcgccctcgacgcaacgaacaaaatactaaaacccgaactctaaactccgacgcaccgcgaaaa

SEQ ID NO: 25619 - DNA, 559 bp, Artificial Sequence
  chemically treated genomic DNA (Homo sapiens) CpG-island No: 25619
taggtaggcgagtagcgcgttcgttagcgttagtagtaggcgtcggtcgtagcgtttgagtatggtggggtggcggtcgcgcggcgcgttttttttcgtgcgtttgttttgtatcgattcgaagttcgtcgtttcggcggcgtagtttagtagcgtagtattagtgtttcgcgtttttaaattttttcgtttcggtttcgttttcgtgcgtttattggttttcgggttcgggggcggggtttcgcgtcggtcgtcgttttacgttcgtagatttacgtggggtcgcggttgggggttgggaattgtttagagggcgtagcggtttcgttttcggcgcgtacgtgtacgtttcgtatttttttcgtttcgggtagtttttgcgggtcgtcgaggggtttggggacgggttcggttcgcgtcggtgtttttgaagaggaaatttagtttggttagcgtcgttcggggatgtatcgggcgtttcggtacgggaggggcgcgttttcggcgtagcgggtagggtgttgagattcgggttttgggtttcgacgtatcgcggggg

SEQ ID NO: 25620 - DNA, 559 bp, Artificial Sequence
  chemically treated genomic DNA (Homo sapiens) CpG-island No: 25620
cccccgcgatacgtcgaaacccaaaacccgaatctcaacaccctacccgctacgccgaaaacgcgcccctcccgtaccgaaacgcccgatacatccccgaacgacgctaaccaaactaaatttcctcttcaaaaacaccgacgcgaaccgaacccgtccccaaacccctcgacgacccgcaaaaactacccgaaacgaaaaaaatacgaaacgtacacgtacgcgccgaaaacgaaaccgctacgccctctaaacaattcccaacccccaaccgcgaccccacgtaaatctacgaacgtaaaacgacgaccgacgcgaaaccccgcccccgaacccgaaaaccaataaacgcacgaaaacgaaaccgaaacgaaaaaatttaaaaacgcgaaacactaatactacgctactaaactacgccgccgaaacgacgaacttcgaatcgatacaaaacaaacgcacgaaaaaaaacgcgccgcgcgaccgccaccccaccatactcaaacgctacgaccgacgcctactactaacgctaacgaacgcgctactcgcctaccta

SEQ ID NO: 25621 - DNA, 1099 bp, Artificial Sequence
  chemically treated genomic DNA (Homo sapiens) CpG-island No: 25621
ggttttttttgttgttttttttttttaggcgtcggagtttcgtttttattaggtttacgtcgtttttttgtacgtgtaatgattgaagaaaataagggttatgtatagttatttatacgaagttgcgtatacgtcgtatatacgttttcgcgtatatagttacgtatacgttaatgcgggtacgtcgtatatacgtttttacgcgtatagttacgtatacgttattgcgcgtacgtcgtatatacgttttcgcgtatatagttacgtatacgttaatgcgtatacgtcgtatatacgttttcgcgcgtatagttaagtatacgttaatgcgtatacgtcgtacgtacgttttcgcgcgtatagttaagtatacgttaatgcgtatacgtcgtacgtacgttttcgcgcgtatagttacgtatacgttattgcgggtacgcgtacgtacgttttcgcgcgtatagttacgtatacgatattgcgggtacgcgtacgtacgttttcgcgcgtatagttacgtatacgttaatgcgcgtacgtcgtacgtacgttttcgcgcgtatagttacgtatacgttaatgcgcgtacgtcgtatataggttttcgcgcgtatagttacgtatacgttaatgcgtatacgtcgtatataggttttcgcgcgtatagttacgtatacgttaatgcgtatacgtcgtatatacgttttcgcgcgtatagttacgtatacgttaatcgggtacgtcgtatatacgttttcgtacgtatagttacgtatacgttaatcggtatacgtcgtatatacgttttcgcgcgtatagttaagtatacgttaatgcgtgtacgtcgtatatacgttttcgcgcgtatagttatgtatacgttaatgcgcgtacgtcgtatatacgttttcgtatatatagttacgtatacgttaatgtgtatatgtcgtatatatatttttacgggtatagttaagtatacgttattgcgtatatatcgtatatacgtttttacgtatatagttatgtatatattattgtatatatattatatatagttacgtatattatatcgcgtataggtttagggaagtattga

SEQ ID NO: 25622 - DNA, 1099 bp, Artificial Sequence
  chemically treated genomic DNA (Homo sapiens) CpG-island No: 25622
tcaatacttccctaaacctatacgcgatataatatacgtaactatatataatatatatacaataatatatacataactatatacgtaaaaacgtatatacgatatatacgcaataacgtatacttaactatacccgtaaaaatatatatacgacatatacacattaacgtatacgtaactatatatacgaaaacgtatatacgacgtacgcgcattaacgtatacataactatacgcgcgaaaacgtatatacgacgtacacgcattaacgtatacttaactatacgcgcgaaaacgtatatacgacgtataccgattaacgtatacgtaactatacgtacgaaaacgtatatacgacgtacccgattaacgtatacgtaactatacgcgcgaaaacgtatatacgacgtatacgcattaacgtatacgtaactatacgcgcgaaaacctatatacgacgtatacgcattaacgtatacgtaactatacgcgcgaaaacctatatacgacgtacgcgcattaacgtatacgtaactatacgcgcgaaaacgtacgtacgacgtacgcgcattaacgtatacgtaactatacgcgcgaaaacgtacgtacgcgtacccgcaatatcgtatacgtaactatacgcgcgaaaacgtacgtacgcgtacccgcaataacgtatacgtaactatacgcgcgaaaacgtacgtacgacgtatacgcattaacgtatacttaactatacgcgcgaaaacgtacgtacgacgtatacgcattaacgtatacttaactatacgcgcgaaaacgtatatacgacgtatacgcattaacgtatacgtaactatatacgcgaaaacgtatatacgacgtacgcgcaataacgtatacgtaactatacgcgtaaaaacgtatatacgacgtacccgcattaacgtatacgtaactatatacgcgaaaacgtatatacgacgtatacgcaacttcgtataaataactatacataacccttattttcttcaatcattacacgtacaaaaaaacgacgtaaacctaataaaaacgaaactccgacgcctaaaaaaaaaaaacaacaaaaaaaacc

SEQ ID NO: 25623 - DNA, 1099 bp, Artificial Sequence
  chemically treated genomic DNA (Homo sapiens) CpG-island No: 25623
ttagtgtttttttgggtttgtgcgcggtgtggtgtgcgtggttgtgtgtggtgtgtgtgtagtggtgtgtgtatggttgtgtacgtggggacgtgtgtgcggtgtgtgcgtagtggcgtgtgtttggttgtgttcgtggggatgtgtgtgcggtatatatatattggcgtgtgcgtggttgtgtgtgcggggacgtgtgtgcggcgtgcgcgtattggcgtgtgtatggttgtgcgcgcggggacgtgtgtgcggcgtgtacgtattggcgtgtatttggttgtgcgcgcggggacgtgtgtgcggcgtatatcgattggcgtgtgcgtggttgtgcgtgcggggacgtgtgtgcggcgtgttcgattggcgtgtgcgtggttgtgcgcgcggggacgtgtgtgcggcgtatacgtattggcgtgtgcgtggttgtgcgcgcggggatttgtgtgcggcgtatacgtattggcgtgtgcgtggttgtgcgcgcggggatttgtgtgcggcgtgcgcgtattggcgtgtgcgtggttgtgcgcgcggggacgtgcgtgcggcgtgcgcgtattggcgtgtgcgtggttgtgcgcgcggggacgtgcgtgcgcgtgttcgtagtgtcgtgtgcgtggttgtgcgcgcggggacgtgcgtgcgcgtgttcgtagtggcgtgtgcgtggttgtgcgcgcggggacgtgcgtgcggcgtgtgcgtattggcgtgtatttggttgtgcgcgcggggacgtgcgtgcggcgtgtgcgtattggcgtgtatttggttgtgcgcgcggggacgtgtgtgcggcgtgtgcgtattggcgtgtgcgtggttgtgtgcgcggggacgtgtgtgcggcgtgcgcgtagtggcgtgtgcgtggttgtgcgcgtggggacgtgtgtgcggcgtgttcgtattggcgtgtgcgtggttgtgtgcgcggggacgtgtgtgcggcgtgtgcgtagtttcgtgtggatggttgtgtatggtttttgttttttttagttattgtacgtgtagaagagcgacgtggatttgatgagaacgaagtttcggcgtttggaggaggaaaatagtaggaaggatt

SEQ ID NO: 25624 - DNA, 1099 bp, Artificial Sequence
  chemically treated genomic DNA (Homo sapiens) CpG-island No: 25624
aatccttcctactattttcctcctccaaacgccgaaacttcgttctcatcaaatccacgtcgctcttctacacgtacaataactaaaaaaaacaaaaaccatacacaaccatccacacgaaactacgcacacgccgcacacacgtccccgcgcacacaaccacgcacacgccaatacgaacacgccgcacacacgtccccacgcgcacaaccacgcacacgccactacgcgcacgccgcacacacgtccccgcgcacacaaccacgcacacgccaatacgcacacgccgcacacacgtccccgcgcgcacaaccaaatacacgccaatacgcacacgccgcacgcacgtccccgcgcgcacaaccaaatacacgccaatacgcacacgccgcacgcacgtccccgcgcgcacaaccacgcacacgccactacgaacacgcgcacgcacgtccccgcgcgcacaaccacgcacacgacactacgaacacgcgcacgcacgtccccgcgcgcacaaccacgcacacgccaatacgcgcacgccgcacgcacgtccccgcgcgcacaaccacgcacacgccaatacgcgcacgccgcacacaaatccccgcgcgcacaaccacgcacacgccaatacgtatacgccgcacacaaatccccgcgcgcacaaccacgcacacgccaatacgtatacgccgcacacacgtccccgcgcgcacaaccacgcacacgccaatcgaacacgccgcacacacgtccccgcacgcacaaccacgcacacgccaatcgatatacgccgcacacacgtccccgcgcgcacaaccaaatacacgccaatacgtacacgccgcacacacgtccccgcgcgcacaaccatacacacgccaatacgcgcacgccgcacacacgtccccgcacacacaaccacgcacacgccaatatatatataccgcacacacatccccacgaacacaaccaaacacacgccactacgcacacaccgcacacacgtccccacgtacacaaccatacacacaccactacacacacaccacacacaaccacgcacaccacaccgcgcacaaacccaaaaaaacactaa

SEQ ID NO: 25625 - DNA, 649 bp, Artificial Sequence
  chemically treated genomic DNA (Homo sapiens) CpG-island No: 25625
gtttcgttatttgcgggtcgtagattcgtaggcgtttagaggcgagggcgcggcgtttcggagagttttttggaagcggcggtttttgcgaaagcgggcgcgggcgaggttgtaggcggcgcggggtttgtagcgcgtttttgtgcggtaataataatggtagttgttattcggtcgtgcgtttcgtttttacgtttcgggtcggtttttgcgcggggtttcgaggttgcgggcgacggagacgagtcgaggtttcgcggacgttcgttcggcgtcgttttttcgttcgtttttatcgtgtttaaggtcggtttttcggtgtttaggaatatggtggcggcgttgttcggtcgttttttagggttgttggttcgggcgttcgggtttgggaattcgcgggtagttttggtcgttcgtagtttcggggttttttttggcgtcggttcgcgatttcgttgttatggtaattaggtcgtcgatttatttagtcgggtaagcgatttgcgttttttttggggcgattatgcgcgtgcgtagagttcgcgggcgtcggtcggtcgattaggagcgttttcggagttttcggggcggagcgcgggggttgagagggggaaaaaaatcggttcggcgtagtggttcgcgtttgtaa

SEQ ID NO: 25626 - DNA, 649 bp, Artificial Sequence
  chemically treated genomic DNA (Homo sapiens) CpG-island No: 25626
ttacaaacgcgaaccactacgccgaaccgatttttttccccctctcaacccccgcgctccgccccgaaaactccgaaaacgctcctaatcgaccgaccgacgcccgcgaactctacgcacgcgcataatcgccccaaaaaaaacgcaaatcgcttacccgactaaataaatcgacgacctaattaccataacaacgaaatcgcgaaccgacgccaaaaaaaaccccgaaactacgaacgaccaaaactacccgcgaattcccaaacccgaacgcccgaaccaacaaccctaaaaaacgaccgaacaacgccgccaccatattcctaaacaccgaaaaaccgaccttaaacacgataaaaacgaacgaaaaaacgacgccgaacgaacgtccgcgaaacctcgactcgtctccgtcgcccgcaacctcgaaaccccgcgcaaaaaccgacccgaaacgtaaaaacgaaacgcacgaccgaataacaactaccattattattaccgcacaaaaacgcgctacaaaccccgcgccgcctacaacctcgcccgcgcccgctttcgcaaaaaccgccgcttccaaaaaactctccgaaacgccgcgccctcgcctctaaacgcctacgaatctacgacccgcaaataacgaaac

SEQ ID NO: 25627 - DNA, 649 bp, Artificial Sequence
  chemically treated genomic DNA (Homo sapiens) CpG-island No: 25627
ttatagacgcgagttattgcgtcgggtcggttttttttttttttttagttttcgcgtttcgtttcgggaatttcgggagcgtttttggtcggtcggtcggcgttcgcggattttgcgtacgcgtatggtcgttttagggggaacgtaggtcgtttattcggttgggtaggtcggcggtttggttgttatggtagcggggtcgcgggtcggcgttagggaaggtttcgaggttgcgggcggttagggttgttcgcggatttttagattcggacgttcgagttagtaattttgaggggcggtcgggtagcgtcgttattatgtttttgggtatcggggagtcggttttggatacggtaagaacgggcgagggggcgacgtcgggcgggcgttcgcgaggtttcggttcgttttcgtcgttcgtagtttcggggtttcgcgtaggggtcggttcggggcgtgaggacggggcgtacggtcgggtgatagttgttattattgttatcgtataagagcgcgttgtaggtttcgcgtcgtttgtagtttcgttcgcgttcgttttcgtagaggtcgtcgtttttaggaagtttttcgggacgtcgcgttttcgtttttgggcgtttgcgagtttgcggttcgtaggtgacggagt

SEQ ID NO: 25628 - DNA, 649 bp, Artificial Sequence
  chemically treated genomic DNA (Homo sapiens) CpG-island No: 25628
actccgtcacctacgaaccgcaaactcgcaaacgcccaaaaacgaaaacgcgacgtcccgaaaaacttcctaaaaacgacgacctctacgaaaacgaacgcgaacgaaactacaaacgacgcgaaacctacaacgcgctcttatacgataacaataataacaactatcacccgaccgtacgccccgtcctcacgccccgaaccgacccctacgcgaaaccccgaaactacgaacgacgaaaacgaaccgaaacctcgcgaacgcccgcccgacgtcgccccctcgcccgttcttaccgtatccaaaaccgactccccgatacccaaaaacataataacgacgctacccgaccgcccctcaaaattactaactcgaacgtccgaatctaaaaatccgcgaacaaccctaaccgcccgcaacctcgaaaccttccctaacgccgacccgcgaccccgctaccataacaaccaaaccgccgacctacccaaccgaataaacgacctacgttccccctaaaacgaccatacgcgtacgcaaaatccgcgaacgccgaccgaccgaccaaaaacgctcccgaaattcccgaaacgaaacgcgaaaactaaaaaaaaaaaaaaaaccgacccgacgcaataactcgcgtctataa

SEQ ID NO: 25629 - DNA, 653 bp, Artificial Sequence
  chemically treated genomic DNA (Homo sapiens) CpG-island No: 25629
cgagcgagttaggtaaagttcggtttttttgaagtttttcgtagcggcgggggcggagaagagattttagtttcgcgggttcgtatagttggcgcggattacgttttcgttcgggcggcggttttagcgtttttcgaatgaatatttttcgttcgttggtcgtttcgaggcgggtcgtgtcgtggtttcggtgtacggagggggacgtcgaggttcggagtagggttcgtttcggtttgtgttcggagttaggcgtagggtcgcgggcgcggcggcgcggagacggttgcgttttcgtttttcgttagcgtttggcgtcgttttacgtgacgggaagcggcggttgcggggtcgggttagtttaggagtcgcgggtcggagcggggcgcggtggtttaggcgcggtggcgtttgggacggcgggcgcgcgcggtggagtgaggagggcggcggggtcggggtgcggggtttagggcgcggggcgtgggggtaggagggcggggagtaggagtggggggtaggcggcggggcggggtggagggcgagttcgtgcgtgtgcgttggggtaggtgtagtgggggttggaacgcggggtggggggagtaagtggttatatatttgggggtaggtgtgcgggtgtgcgatttggtagt

SEQ ID NO: 25630 - DNA, 653 bp, Artificial Sequence
  chemically treated genomic DNA (Homo sapiens) CpG-island No: 25630
actaccaaatcgcacacccgcacacctacccccaaatatataaccacttactccccccaccccgcgttccaacccccactacacctaccccaacgcacacgcacgaactcgccctccaccccgccccgccgcctaccccccactcctactccccgccctcctacccccacgccccgcgccctaaaccccgcaccccgaccccgccgccctcctcactccaccgcgcgcgcccgccgtcccaaacgccaccgcgcctaaaccaccgcgccccgctccgacccgcgactcctaaactaacccgaccccgcaaccgccgcttcccgtcacgtaaaacgacgccaaacgctaacgaaaaacgaaaacgcaaccgtctccgcgccgccgcgcccgcgaccctacgcctaactccgaacacaaaccgaaacgaaccctactccgaacctcgacgtccccctccgtacaccgaaaccacgacacgacccgcctcgaaacgaccaacgaacgaaaaatattcattcgaaaaacgctaaaaccgccgcccgaacgaaaacgtaatccgcgccaactatacgaacccgcgaaactaaaatctcttctccgcccccgccgctacgaaaaacttcaaaaaaaccgaactttacctaactcgctcg

SEQ ID NO: 25631 - DNA, 653 bp, Artificial Sequence
  chemically treated genomic DNA (Homo sapiens) CpG-island No: 25631
gttattaagtcgtatattcgtatatttgtttttaagtgtatagttatttgttttttttatttcgcgttttagtttttattatatttgttttagcgtatacgtacgggttcgttttttatttcgtttcgtcgtttattttttatttttgtttttcgtttttttgtttttacgtttcgcgttttgagtttcgtatttcggtttcgtcgttttttttattttatcgcgcgcgttcgtcgttttagacgttatcgcgtttgggttatcgcgtttcgtttcggttcgcggtttttgggttggttcgatttcgtagtcgtcgtttttcgttacgtggggcggcgttaggcgttggcggagggcgggagcgtagtcgttttcgcgtcgtcgcgttcgcggttttgcgtttggtttcgagtataggtcgagacgggttttgtttcgggtttcggcgttttttttcgtgtatcggggttacgatacggttcgtttcggggcggttagcgggcggaaggtgtttattcggggggcgttgaggtcgtcgttcgggcgagagcgtggttcgcgttagttgtgcgagttcgcggggttgaggtttttttttcgttttcgtcgttgcggggagttttagggaagtcgggttttgtttggttcgttcg

SEQ ID NO: 25632 - DNA, 653 bp, Artificial Sequence
  chemically treated genomic DNA (Homo sapiens) CpG-island No: 25632
cgaacgaaccaaacaaaacccgacttccctaaaactccccgcaacgacgaaaacgaaaaaaaaacctcaaccccgcgaactcgcacaactaacgcgaaccacgctctcgcccgaacgacgacctcaacgccccccgaataaacaccttccgcccgctaaccgccccgaaacgaaccgtatcgtaaccccgatacacgaaaaaaaacgccgaaacccgaaacaaaacccgtctcgacctatactcgaaaccaaacgcaaaaccgcgaacgcgacgacgcgaaaacgactacgctcccgccctccgccaacgcctaacgccgccccacgtaacgaaaaacgacgactacgaaatcgaaccaacccaaaaaccgcgaaccgaaacgaaacgcgataacccaaacgcgataacgtctaaaacgacgaacgcgcgcgataaaataaaaaaaacgacgaaaccgaaatacgaaactcaaaacgcgaaacgtaaaaacaaaaaaacgaaaaacaaaaataaaaaataaacgacgaaacgaaataaaaaacgaacccgtacgtatacgctaaaacaaatataataaaaactaaaacgcgaaataaaaaaaacaaataactatacacttaaaaacaaatatacgaatatacgacttaataac

SEQ ID NO: 25633 - DNA, 785 bp, Artificial Sequence
  chemically treated genomic DNA (Homo sapiens) CpG-island No: 25633
agatttacgcggcgaaggcgcgggtggatgtcgtatagtttttttttgtttgggaatttattttcgcggatttgtagttttttcggtagtaatttttaaatagtttcgcgcgttttcgagtttttttcgtatcgtcgtagtacgggcgtcggcggtcgtttcggcgggtatagcgtggatatttattttggaagcggtggtcgaagaagcggtttcgtagatttaggggtagaaatggagagggtttcggtgttgggcgtcgaagaaggagtgcgggggttgtagcggggaggcgtttagttggtgcgcgatatgtacggttagcgcggggtggtttatggtttcggggaatacgagttcgggtttatcgtagagcgagcgttcgcgttcggcggtcgcggtagggaagttatttacgaaggtcgtttcggtcgcgttggggtgagggtagttgagcgtcgtgggtcggagcggtttttcggaggcggtcgcgttaggagatgggagttcgcgttttcgtcgttagtgttttcgtcggtgtcgtcgtttttggttattaaggattttatggtaaagtcgcgtttggcgcgggttggaatatggtcgtagtcgcgggagttgtgcgaggtagtcgggttttggggagttcggttttgcgtcgcgtttgcgggtgtgtatttagttaggtatatgtatattcgttcgtattttttatttttttcgttcgttcgttcgcgttcggttttcgcgggcgagttaggcgcggagcggcgaggggtgtgtga

SEQ ID NO: 25634 - DNA, 785 bp, Artificial Sequence
  chemically treated genomic DNA (Homo sapiens) CpG-island No: 25634
tcacacacccctcgccgctccgcgcctaactcgcccgcgaaaaccgaacgcgaacgaacgaacgaaaaaaataaaaaatacgaacgaatatacatatacctaactaaatacacacccgcaaacgcgacgcaaaaccgaactccccaaaacccgactacctcgcacaactcccgcgactacgaccatattccaacccgcgccaaacgcgactttaccataaaatccttaataaccaaaaacgacgacaccgacgaaaacactaacgacgaaaacgcgaactcccatctcctaacgcgaccgcctccgaaaaaccgctccgacccacgacgctcaactaccctcaccccaacgcgaccgaaacgaccttcgtaaataacttccctaccgcgaccgccgaacgcgaacgctcgctctacgataaacccgaactcgtattccccgaaaccataaaccaccccgcgctaaccgtacatatcgcgcaccaactaaacgcctccccgctacaacccccgcactccttcttcgacgcccaacaccgaaaccctctccatttctacccctaaatctacgaaaccgcttcttcgaccaccgcttccaaaataaatatccacgctatacccgccgaaacgaccgccgacgcccgtactacgacgatacgaaaaaaactcgaaaacgcgcgaaactatttaaaaattactaccgaaaaaactacaaatccgcgaaaataaattcccaaacaaaaaaaaactatacgacatccacccgcgccttcgccgcgtaaatct

SEQ ID NO: 25635 - DNA, 785 bp, Artificial Sequence
  chemically treated genomic DNA (Homo sapiens) CpG-island No: 25635
ttatatatttttcgtcgtttcgcgtttggttcgttcgcgggggtcgagcgcgagcgggcgggcgggggaggtgaggggtgcgggcgggtgtgtatgtgtttggttgggtgtatattcgtaagcgcggcgtaggatcggattttttagagttcggttgtttcgtatagttttcgcggttgcgattatgttttagttcgcgttaagcgcggttttattatagagtttttggtggttaaggacggcggtatcggcgggggtattggcggcgggggcgcgggtttttattttttggcgcggtcgttttcgaggaatcgtttcggtttacggcgtttaattatttttattttagcgcggtcgaggcggttttcgtgagtggtttttttgtcgcggtcgtcgggcgcgggcgttcgttttacggtgggttcgagttcgtgtttttcgaggttatgaattatttcgcgttgatcgtgtatatcgcgtattagttgggcgttttttcgttgtagttttcgtatttttttttcggcgtttagtatcgggattttttttatttttatttttgggtttgcggaatcgttttttcggttatcgtttttagggtgagtgtttacgttgtgttcgtcgaggcggtcgtcggcgttcgtgttgcggcgatgcgggggaggttcgggggcgcgcggggttgtttagaagttattgtcgggaaggttgtaggttcgcggaggtagatttttaggtagggaagagttgtgcggtatttattcgcgttttcgtcgcgtaggttt

SEQ ID NO: 25636 - DNA, 785 bp, Artificial Sequence
  chemically treated genomic DNA (Homo sapiens) CpG-island No: 25636
aaacctacgcgacgaaaacgcgaataaataccgcacaactcttccctacctaaaaatctacctccgcgaacctacaaccttcccgacaataacttctaaacaaccccgcgcgcccccgaacctcccccgcatcgccgcaacacgaacgccgacgaccgcctcgacgaacacaacgtaaacactcaccctaaaaacgataaccgaaaaaacgattccgcaaacccaaaaataaaaataaaaaaaatcccgatactaaacgccgaaaaaaaaatacgaaaactacaacgaaaaaacgcccaactaatacgcgatatacacgatcaacgcgaaataattcataacctcgaaaaacacgaactcgaacccaccgtaaaacgaacgcccgcgcccgacgaccgcgacaaaaaaaccactcacgaaaaccgcctcgaccgcgctaaaataaaaataattaaacgccgtaaaccgaaacgattcctcgaaaacgaccgcgccaaaaaataaaaacccgcgcccccgccgccaatacccccgccgataccgccgtccttaaccaccaaaaactctataataaaaccgcgcttaacgcgaactaaaacataatcgcaaccgcgaaaactatacgaaacaaccgaactctaaaaaatccgatcctacgccgcgcttacgaatatacacccaaccaaacacatacacacccgcccgcacccctcacctcccccgcccgcccgctcgcgctcgacccccgcgaacgaaccaaacgcgaaacgacgaaaaatatataa

SEQ ID NO: 25637 - DNA, 616 bp, Artificial Sequence
  chemically treated genomic DNA (Homo sapiens) CpG-island No: 25637
gatttttattttttattcgcgatcggaatcgcggacgattttgtttcggttagttttttcgtacggcggacgaatttttcgggggtagtttttacgataggttgtgagagtcggatttttaaatttttttattttattttcgaggtcgtagaaaggcgtcgtttcgaggtttaggagggcgcgggcggcggtggggaggttgggatttggattttgtcggcgtattgcggagagggagtcgtagagagtttcgttttttcgtcgttgtcggggtttattttagcggtttgagcgttgtttgggcgcgtagatttgggttgggttttttgacgttttaaggttacggggttcgtgcgtcgcgtaattttgcggggattttaggtcgggttttggtagcggtcgtttgagcgtcgggagtcgtggtttggagagcgtttagggcgtttcggtcgttataaagcgggttaaagtttattttttattcgattgtttcgaaaagttttcgcgcgtcgacgtcgtttcggttttttgggcgaggtggggaggggcggttaggggtggggaggcgaggcggtcgtatttagtattttttcgcgttttgggaatttcggggttt

SEQ ID NO: 25638 - DNA, 616 bp, Artificial Sequence
  chemically treated genomic DNA (Homo sapiens) CpG-island No: 25638
aaaccccgaaattcccaaaacgcgaaaaaatactaaatacgaccgcctcgcctccccacccctaaccgcccctccccacctcgcccaaaaaaccgaaacgacgtcgacgcgcgaaaacttttcgaaacaatcgaataaaaaataaactttaacccgctttataacgaccgaaacgccctaaacgctctccaaaccacgactcccgacgctcaaacgaccgctaccaaaacccgacctaaaatccccgcaaaattacgcgacgcacgaaccccgtaaccttaaaacgtcaaaaaacccaacccaaatctacgcgcccaaacaacgctcaaaccgctaaaataaaccccgacaacgacgaaaaaacgaaactctctacgactccctctccgcaatacgccgacaaaatccaaatcccaacctccccaccgccgcccgcgccctcctaaacctcgaaacgacgcctttctacgacctcgaaaataaaataaaaaaatttaaaaatccgactctcacaacctatcgtaaaaactacccccgaaaaattcgtccgccgtacgaaaaaactaaccgaaacaaaatcgtccgcgattccgatcgcgaataaaaaataaaaatc

SEQ ID NO: 25639 - DNA, 616 bp, Artificial Sequence
  chemically treated genomic DNA (Homo sapiens) CpG-island No: 25639
aggtttcggggtttttaggacgcggaggagtgttgggtgcggtcgtttcgtttttttatttttggtcgtttttttttatttcgtttaaggggtcggaacggcgtcggcgcgcgggggtttttcggagtagtcgagtggaaaatagattttaattcgttttgtggcggtcggggcgttttgagcgttttttaaattacggttttcggcgtttaggcggtcgttgttaagattcggtttggagttttcgtagagttgcgcggcgtacggatttcgtggttttggggcgttaggaggtttaatttagatttgcgcgtttaggtagcgtttaggtcgttagaatggatttcggtagcggcgaggaagcggaattttttgcggtttttttttcgtagtgcgtcggtaaggtttaggttttagtttttttatcgtcgttcgcgtttttttaggtttcggagcggcgtttttttgcggtttcgaaggtggggtgggaaagtttgggagttcggtttttatagtttgtcgtgagaattgttttcggggaattcgttcgtcgtacggaaaaattggtcggagtagagtcgttcgcggtttcggtcgcgggtggaaggtgaaggtt

SEQ ID NO: 25640 - DNA, 616 bp, Artificial Sequence
  chemically treated genomic DNA (Homo sapiens) CpG-island No: 25640
aaccttcaccttccacccgcgaccgaaaccgcgaacgactctactccgaccaatttttccgtacgacgaacgaattccccgaaaacaattctcacgacaaactataaaaaccgaactcccaaactttcccaccccaccttcgaaaccgcaaaaaaacgccgctccgaaacctaaaaaaacgcgaacgacgataaaaaaactaaaacctaaaccttaccgacgcactacgaaaaaaaaaccgcaaaaaattccgcttcctcgccgctaccgaaatccattctaacgacctaaacgctacctaaacgcgcaaatctaaattaaacctcctaacgccccaaaaccacgaaatccgtacgccgcgcaactctacgaaaactccaaaccgaatcttaacaacgaccgcctaaacgccgaaaaccgtaatttaaaaaacgctcaaaacgccccgaccgccacaaaacgaattaaaatctattttccactcgactactccgaaaaacccccgcgcgccgacgccgttccgaccccttaaacgaaataaaaaaaaacgaccaaaaataaaaaaacgaaacgaccgcacccaacactcctccgcgtcctaaaaaccccgaaacct

SEQ ID NO: 25641 - DNA, 631 bp, Artificial Sequence
  chemically treated genomic DNA (Homo sapiens) CpG-island No: 25641
  unsure (98, 114)
ttatcgtcgatttttatagggcgcgtagtgggtgattgcggtattggttcgcgttttcgttcgagggagacgaggcgggatagcgggcgggaaagggnagtttgcgtcgtaatnttttttcgttcgaaagattcgtttcgcggtgggttttagttttcgttcggttcgcggcgttgtcggttttttttcgtcgtcgcggagttggatcgtagttgtgtttcgtcgattatgcgtcgtttttcgcgggttttgttgttgtagttgcgtttcgttttgttggtggtcgcgggggtttcggaggtgttggttagcgcgtcgcggagtttggtgtgggggttcgggttgtaggcggtcgtcgttttgtcggttcgttatttttatttgtaggcggttaattcggagggttagaattttattcgttttttcgtaggtagtgtttagtcgtcggtttttttcgtttcgcggtcgggttttcgcgcgttttcgtcgttcgggagttcgttcgcggtttgcgtggcgttttttttcggcgtgtgtcgtttttttttgggtttggttagtttttttttttttttttcgtttatatttaaagcgggtaaaaattattacgaaagtttgtggaatgaatgaa

SEQ ID NO: 25642 - DNA, 631 bp, Artificial Sequence
  chemically treated genomic DNA (Homo sapiens) CpG-island No: 25642
  unsure (518, 534)
ttcattcattccacaaactttcgtaataatttttacccgctttaaatataaacgaaaaaaaaaaaaaaaaactaaccaaacccaaaaaaaaacgacacacgccgaaaaaaaacgccacgcaaaccgcgaacgaactcccgaacgacgaaaacgcgcgaaaacccgaccgcgaaacgaaaaaaaccgacgactaaacactacctacgaaaaaacgaataaaattctaaccctccgaattaaccgcctacaaataaaaataacgaaccgacaaaacgacgaccgcctacaacccgaacccccacaccaaactccgcgacgcgctaaccaacacctccgaaacccccgcgaccaccaacaaaacgaaacgcaactacaacaacaaaacccgcgaaaaacgacgcataatcgacgaaacacaactacgatccaactccgcgacgacgaaaaaaaaccgacaacgccgcgaaccgaacgaaaactaaaacccaccgcgaaacgaatctttcgaacgaaaaaanattacgacgcaaactnccctttcccgcccgctatcccgcctcgtctccctcgaacgaaaacgcgaaccaataccgcaatcacccactacgcgccctataaaaatcgacgataa

SEQ ID NO: 25643 - DNA, 631 bp, Artificial Sequence
  chemically treated genomic DNA (Homo sapiens) CpG-island No: 25643
  unsure (518, 534)
tttatttattttataaattttcgtggtgatttttgttcgttttgagtatgggcgggaggagggaagaggagttgattagatttaaaaaggggcgatatacgtcggggagggacgttacgtaggtcgcgggcggattttcgggcggcggggacgcgcggggattcggtcgcgggacgagggaggtcggcggttggatattatttgcgggagagcgagtgaggttttggtttttcgagttgatcgtttgtaggtagaaatagcggatcggtaggacgacggtcgtttgtagttcgggtttttatattaggtttcgcggcgcgttgattagtattttcggggttttcgcggttattagtagggcgaggcgtagttgtagtagtagggttcgcgggaggcggcgtatggtcggcggggtataattgcggtttagtttcgcggcggcgaggaggggtcggtagcgtcgcggatcgggcggggattggggtttatcgcggggcgggtttttcgggcgggaaagnattgcggcgtaggttnttttttttcgttcgttgtttcgtttcgtttttttcgggcgggaacgcgagttagtgtcgtaattatttattgcgcgttttgtaggggtcgacgatgg

SEQ ID NO: 25644 - DNA, 631 bp, Artificial Sequence
  chemically treated genomic DNA (Homo sapiens) CpG-island No: 25644
  unsure (98, 114)
ccatcgtcgacccctacaaaacgcgcaataaataattacgacactaactcgcgttcccgcccgaaaaaaacgaaacgaaacaacgaacgaaaaaaaanaacctacgccgcaatnctttcccgcccgaaaaacccgccccgcgataaaccccaatccccgcccgatccgcgacgctaccgacccctcctcgccgccgcgaaactaaaccgcaattataccccgccgaccatacgccgcctcccgcgaaccctactactacaactacgcctcgccctactaataaccgcgaaaaccccgaaaatactaatcaacgcgccgcgaaacctaatataaaaacccgaactacaaacgaccgtcgtcctaccgatccgctatttctacctacaaacgatcaactcgaaaaaccaaaacctcactcgctctcccgcaaataatatccaaccgccgacctccctcgtcccgcgaccgaatccccgcgcgtccccgccgcccgaaaatccgcccgcgacctacgtaacgtccctccccgacgtatatcgcccctttttaaatctaatcaactcctcttccctcctcccgcccatactcaaaacgaacaaaaatcaccacgaaaatttataaaataaataaa

SEQ ID NO: 25645 - DNA, 752 bp, Artificial Sequence
  chemically treated genomic DNA (Homo sapiens) CpG-island No: 25645
tcggggtagagaagttatcggttacggtcgaaggggtggggtaaggtttgcgtgacggttagggtcgcggttgcgagaatttcgaggtggggtgagggtcggatttcggttttatttaaagtttttgtcgttggatgttattttttttagtaaattggaaatgtggtacgaggcgttcgttatgttgacggtttcgatttcgtttgttggcgttgttggagttgttgttcgttgtcgttgtcgtcgtcgtcgtcgtcgtcgtcgtcgtcgtcgtcgtcgtcgtcgttattggagttttttttttcgttcgcggcggttttcgtttttagggtcgtagcgcgacgtcgacgttgattagggaggcgtttcgacgggttgttttttttttggcgaggcgtgggtttgtttcggggtaagtcgaggttatagagttagtttaacgacggcgttgttcgcgtgagaacgagtttatgggcggcggggcgtatagaagggtttttacggggagttagatatttttatttagggtcgtttcgtttttattcgtttcgtattcgttttttagggtaaaaggttaaagttcgtttttttcgtttcgggggcgggggcggtagacgcgggcgttacggaaagttaaggttagagtttacggaggtttttttacgtacgttgtggagaagagagttaaaaaataattcggttggttgaagtttgtgttagtttttatgtgattcgttttttggaggtatgat

SEQ ID NO: 25646 - DNA, 752 bp, Artificial Sequence
  chemically treated genomic DNA (Homo sapiens) CpG-island No: 25646
atcatacctccaaaaaacgaatcacataaaaactaacacaaacttcaaccaaccgaattattttttaactctcttctccacaacgtacgtaaaaaaacctccgtaaactctaaccttaactttccgtaacgcccgcgtctaccgcccccgcccccgaaacgaaaaaaacgaactttaaccttttaccctaaaaaacgaatacgaaacgaataaaaacgaaacgaccctaaataaaaatatctaactccccgtaaaaacccttctatacgccccgccgcccataaactcgttctcacgcgaacaacgccgtcgttaaactaactctataacctcgacttaccccgaaacaaacccacgcctcgccaaaaaaaaaacaacccgtcgaaacgcctccctaatcaacgtcgacgtcgcgctacgaccctaaaaacgaaaaccgccgcgaacgaaaaaaaaaactccaataacgacgacgacgacgacgacgacgacgacgacgacgacgacgacgacaacgacaacgaacaacaactccaacaacgccaacaaacgaaatcgaaaccgtcaacataacgaacgcctcgtaccacatttccaatttactaaaaaaaataacatccaacgacaaaaactttaaataaaaccgaaatccgaccctcaccccacctcgaaattctcgcaaccgcgaccctaaccgtcacgcaaaccttaccccaccccttcgaccgtaaccgataacttctctaccccga

SEQ ID NO: 25647 - DNA, 752 bp, Artificial Sequence
  chemically treated genomic DNA (Homo sapiens) CpG-island No: 25647
gttatgtttttaaaaggcgggttatatgaaaattgatataggttttagttaatcgaattgttttttaatttttttttttatagcgtgcgtggggaggttttcgtgaattttgattttagtttttcgtagcgttcgcgtttgtcgttttcgttttcggagcgaaggaggcgggttttggttttttgttttagggagcgagtgcggagcgagtgggagcgagacggttttgagtggaagtgtttggtttttcgtagaggtttttttgtacgtttcgtcgtttatgagttcgtttttacgcgaatagcgtcgtcgttaggttggttttgtagtttcggtttatttcgggataggtttacgtttcgttagggagggggtagttcgtcgaggcgtttttttagttagcgtcggcgtcgcgttgcgattttggaagcgggagtcgtcgcgagcgagaggaggagttttagtggcggcggcggcggcggcggcggcggcggcggcggcggcggcggcggtagcggtagcgggtagtagttttagtagcgttagtaggcgggatcgaggtcgttaatatggcgagcgtttcgtattatatttttaatttgttggaaaaaatgatatttagcgataaggattttaggtgaggtcgagattcgatttttattttatttcggggttttcgtagtcgcggttttggtcgttacgtaggttttgttttattttttcggtcgtagtcggtagtttttttgtttcga

SEQ ID NO: 25648 - DNA, 752 bp, Artificial Sequence
  chemically treated genomic DNA (Homo sapiens) CpG-island No: 25648
tcgaaacaaaaaaactaccgactacgaccgaaaaaataaaacaaaacctacgtaacgaccaaaaccgcgactacgaaaaccccgaaataaaataaaaatcgaatctcgacctcacctaaaatccttatcgctaaatatcattttttccaacaaattaaaaatataatacgaaacgctcgccatattaacgacctcgatcccgcctactaacgctactaaaactactacccgctaccgctaccgccgccgccgccgccgccgccgccgccgccgccgccgccgccgccactaaaactcctcctctcgctcgcgacgactcccgcttccaaaatcgcaacgcgacgccgacgctaactaaaaaaacgcctcgacgaactaccccctccctaacgaaacgtaaacctatcccgaaataaaccgaaactacaaaaccaacctaacgacgacgctattcgcgtaaaaacgaactcataaacgacgaaacgtacaaaaaaacctctacgaaaaaccaaacacttccactcaaaaccgtctcgctcccactcgctccgcactcgctccctaaaacaaaaaaccaaaacccgcctccttcgctccgaaaacgaaaacgacaaacgcgaacgctacgaaaaactaaaatcaaaattcacgaaaacctccccacgcacgctataaaaaaaaaaattaaaaaacaattcgattaactaaaacctatatcaattttcatataacccgccttttaaaaacataac

SEQ ID NO: 25649 - DNA, 720 bp, Artificial Sequence
  chemically treated genomic DNA (Homo sapiens) CpG-island No: 25649
gcgttggggtcgtattttattattttattttatgtggtttgcgcgttattatattatacggttattttcgttttattttgaaattgatcgtagtaggttgggcgtggggttttcggttcggtttcgtttcgtttcgttttcgttttcgttttagattcgtttattttttatcgatttcgttttcgttagatttcgttttcggtttcgtttatttttcgtttcgtagcggcgggagggtaggtttgcgtcgttacgtgtttcgacgtaggagttgttcgtttgtagggtagagcgcgggtagattttgggtcgggtagtagtagtcgtagagcggcgcggcggcggtggcggtagtaggtagtaggtatgattatggtagcggcggcggtggtggtacgcggggtcggggcgagggtagcgatagcggcggttttgcggggtggttgcgggatcgcggttcgggggcggtcgtgtgcgggtttcgttcggtttttgtgtattgtattcgggatcgtttcggatatgaagcgttatttgtgggagcgttatcgggaggcgaagagaagtatagaaggtgagtgaggcggcgatttcgtttcggcgtttggggttttttttgcgcgtttagttgggaagcgggcgttttaggattcggattagtttagttgcggatttttagggtttttagtcgcgaatttcggtgtttatatttttagtcgt

SEQ ID NO: 25650 - DNA, 720 bp, Artificial Sequence
  chemically treated genomic DNA (Homo sapiens) CpG-island No: 25650
acgactaaaaatataaacaccgaaattcgcgactaaaaaccctaaaaatccgcaactaaactaatccgaatcctaaaacgcccgcttcccaactaaacgcgcaaaaaaaaccccaaacgccgaaacgaaatcgccgcctcactcaccttctatacttctcttcgcctcccgataacgctcccacaaataacgcttcatatccgaaacgatcccgaatacaatacacaaaaaccgaacgaaacccgcacacgaccgcccccgaaccgcgatcccgcaaccaccccgcaaaaccgccgctatcgctaccctcgccccgaccccgcgtaccaccaccgccgccgctaccataatcatacctactacctactaccgccaccgccgccgcgccgctctacgactactactacccgacccaaaatctacccgcgctctaccctacaaacgaacaactcctacgtcgaaacacgtaacgacgcaaacctaccctcccgccgctacgaaacgaaaaataaacgaaaccgaaaacgaaatctaacgaaaacgaaatcgataaaaaataaacgaatctaaaacgaaaacgaaaacgaaacgaaacgaaaccgaaccgaaaaccccacgcccaacctactacgatcaatttcaaaataaaacgaaaataaccgtataatataataacgcgcaaaccacataaaataaaataataaaatacgaccccaacgc

SEQ ID NO: 25651 - DNA, 720 bp, Artificial Sequence
  chemically treated genomic DNA (Homo sapiens) CpG-island No: 25651
gcggttgggggtgtgggtatcggggttcgcgattggaggttttggaggttcgtagttgggttggttcgggttttagggcgttcgttttttagttgagcgcgtaggaggggttttaggcgtcggggcggggtcgtcgttttatttattttttgtgttttttttcgtttttcggtagcgtttttataggtagcgttttatgttcggggcggtttcgggtgtagtgtataagggtcgggcggggttcgtatacggtcgttttcgagtcgcggtttcgtagttatttcgtaaagtcgtcgttgtcgttgttttcgtttcggtttcgcgtgttattatcgtcgtcgttgttatggttatgtttgttgtttgttgtcgttatcgtcgtcgcgtcgttttgcgattgttgttgttcggtttaagatttattcgcgttttgttttgtaggcgggtagtttttgcgtcggaatacgtggcggcgtaggtttgttttttcgtcgttgcggggcggggagtgggcggagtcggaggcggggtttaacgggggcggggtcgatggggagtgggcgggtttgggacgggggcggagacggggcggggcggggtcgggtcgggggttttacgtttagtttattgcggttaattttagggtggggcgggggtggtcgtgtggtgtggtggcgcgtaggttatatgggatggaatgatgaggtacgattttagcgt

SEQ ID NO: 25652 - DNA, 720 bp, Artificial Sequence
  chemically treated genomic DNA (Homo sapiens) CpG-island No: 25652
acgctaaaatcgtacctcatcattccatcccatataacctacgcgccaccacaccacacgaccacccccgccccaccctaaaattaaccgcaataaactaaacgtaaaacccccgacccgaccccgccccgccccgtctccgcccccgtcccaaacccgcccactccccatcgaccccgcccccgttaaaccccgcctccgactccgcccactccccgccccgcaacgacgaaaaaacaaacctacgccgccacgtattccgacgcaaaaactacccgcctacaaaacaaaacgcgaataaatcttaaaccgaacaacaacaatcgcaaaacgacgcgacgacgataacgacaacaaacaacaaacataaccataacaacgacgacgataataacacgcgaaaccgaaacgaaaacaacgacaacgacgactttacgaaataactacgaaaccgcgactcgaaaacgaccgtatacgaaccccgcccgacccttatacactacacccgaaaccgccccgaacataaaacgctacctataaaaacgctaccgaaaaacgaaaaaaaacacaaaaaataaataaaacgacgaccccgccccgacgcctaaaacccctcctacgcgctcaactaaaaaacgaacgccctaaaacccgaaccaacccaactacgaacctccaaaacctccaatcgcgaaccccgatacccacacccccaaccgc

SEQ ID NO: 25653 - DNA, 506 bp, Artificial Sequence
  chemically treated genomic DNA (Homo sapiens) CpG-island No: 25653
  unsure (49)
tatggcgcgaatattttgaattgtcggtatttcgttcgcgcgcgggcgncggttaatatttggatattagatttaattttttttcgttttcggtatttgggatggttgtcgcgtatagacggtcggtttttgtttaagttttatacggtcgttttttatttatattttaataggcgacggtttcgtgcgttgtgtagaggttattttttatttttttttttttttttttttcggtcggcgggcgagttattatgttatttgtgttcgtaatttttttcgttggtcggttatcggtcgtgttatatagtcgttttcgtgcgttattcgtcgcgttcgtattttttataataaggggggtggtcgtattcgttttttaatttacgtcgttttcgttcgcggaatatatgcgggcggtcgtcgcgcgtttttatatagatggtatataattaagatcgatacgattatgggttaatcggtttttcgatcggtacggttttttattatat

SEQ ID NO: 25654 - DNA, 506 bp, Artificial Sequence
  chemically treated genomic DNA (Homo sapiens) CpG-island No: 25654
  unsure (458)
atataataaaaaaccgtaccgatcgaaaaaccgattaacccataatcgtatcgatcttaattatataccatctatataaaaacgcgcgacgaccgcccgcatatattccgcgaacgaaaacgacgtaaattaaaaaacgaatacgaccaccccccttattataaaaaatacgaacgcgacgaataacgcacgaaaacgactatataacacgaccgataaccgaccaacgaaaaaaattacgaacacaaataacataataactcgcccgccgaccgaaaaaaaaaaaaaaaaaaaaataaaaaataacctctacacaacgcacgaaaccgtcgcctattaaaatataaataaaaaacgaccgtataaaacttaaacaaaaaccgaccgtctatacgcgacaaccatcccaaataccgaaaacgaaaaaaaattaaatctaatatccaaatattaaccgncgcccgcgcgcgaacgaaataccgacaattcaaaatattcgcgccata

SEQ ID NO: 25655 - DNA, 506 bp, Artificial Sequence
  chemically treated genomic DNA (Homo sapiens) CpG-island No: 25655
  unsure (458)
gtatggtagggggtcgtgtcggtcggggggtcggttggtttatgatcgtgtcggttttggttgtatattatttgtgtgagagcgcgcggcggtcgttcgtatgtgtttcgcgggcggaggcggcgtggattggggggcgggtgcggttattttttttgttgtgggggatacgggcgcggcgggtggcgtacgagggcggttgtatggtacggtcggtggtcggttagcgggggggattgcgggtatagatggtataatagttcgttcgtcggtcgggaggaggaaggagggggaggtgggaggtggtttttatatagcgtacgaggtcgtcgtttgttggggtgtgggtggggggcggtcgtgtgggatttgaataggaatcgatcgtttatgcgcggtagttattttaggtgtcgaaggcgaggggagattaggtttgatgtttagatattaatcgncgttcgcgcgcgggcgaaatatcgatagtttagagtgttcgcgttatg

SEQ ID NO: 25656 - DNA, 506 bp, Artificial Sequence
  chemically treated genomic DNA (Homo sapiens) CpG-island No: 25656
  unsure (49)
cataacgcgaacactctaaactatcgatatttcgcccgcgcgcgaacgncgattaatatctaaacatcaaacctaatctcccctcgccttcgacacctaaaataactaccgcgcataaacgatcgattcctattcaaatcccacacgaccgccccccacccacaccccaacaaacgacgacctcgtacgctatataaaaaccacctcccacctccccctccttcctcctcccgaccgacgaacgaactattataccatctatacccgcaatcccccccgctaaccgaccaccgaccgtaccatacaaccgccctcgtacgccacccgccgcgcccgtatcccccacaacaaaaaaaataaccgcacccgccccccaatccacgccgcctccgcccgcgaaacacatacgaacgaccgccgcgcgctctcacacaaataatatacaaccaaaaccgacacgatcataaaccaaccgaccccccgaccgacacgaccccctaccatac

SEQ ID NO: 25657 - DNA, 503 bp, Artificial Sequence
  chemically treated genomic DNA (Homo sapiens) CpG-island No: 25657
  unsure (326, 437)
ggatggtgtcgtttcgtgtcgtgtggtggatcggcgttcgatacgcggtatcggtcgtatttttaggtcgggggtgggtcggtgttaggtttgtattattaaattacgtagtcgtcgggagcgggtcggcggtcggtcggggggcggcgtcgtcggcgttcgcgtttaatacgaagcgcgcgcgcgttgatacgattattgaaagtttaagttattaattaattcggtcgcgggtacgcggcgttgtatatttttttatatacgcgttcgtttatttcggtttcgttttattcgtttatttagtcgcgtatttttttcgcggtcgngcgtaacgtttggtttacgcggagacgattattatcgttggtcgatatttattattaattttcgttacgcgtgttatttataatattgtgaagtatataatataagcgttngttatacgggagagcggttttacggttcggttcgcgtttttgtagtatttaattatttacgtcgtt

SEQ ID NO: 25658 - DNA, 503 bp, Artificial Sequence
  chemically treated genomic DNA (Homo sapiens) CpG-island No: 25658
  unsure (67, 178)
aacgacgtaaataattaaatactacaaaaacgcgaaccgaaccgtaaaaccgctctcccgtataacnaacgcttatattatatacttcacaatattataaataacacgcgtaacgaaaattaataataaatatcgaccaacgataataatcgtctccgcgtaaaccaaacgttacgcncgaccgcgaaaaaaatacgcgactaaataaacgaataaaacgaaaccgaaataaacgaacgcgtatataaaaaaatatacaacgccgcgtacccgcgaccgaattaattaataacttaaactttcaataatcgtatcaacgcgcgcgcgcttcgtattaaacgcgaacgccgacgacgccgccccccgaccgaccgccgacccgctcccgacgactacgtaatttaataatacaaacctaacaccgacccacccccgacctaaaaatacgaccgataccgcgtatcgaacgccgatccaccacacgacacgaaacgacaccatcc

SEQ ID NO: 25659 - DNA, 503 bp, Artificial Sequence
  chemically treated genomic DNA (Homo sapiens) CpG-island No: 25659
  unsure (67, 178)
aacgacgtaagtgattaggtgttgtagggacgcggatcgagtcgtgggatcgttttttcgtatgatngacgtttatgttgtgtattttataatattgtgagtgatacgcgtggcggaggttggtggtgggtgtcggttaacgatggtggtcgttttcgcgtaagttagacgttgcgtncgatcgcggggagggtgcgcggttgaatgggcgggtgaggcgaggtcggggtgggcgggcgcgtgtgtgggagggtgtgtagcgtcgcgtgttcgcggtcgggttggttggtggtttggatttttagtaatcgtgttagcgcgcgcgcgtttcgtattgggcgcggacgtcggcggcgtcgtttttcggtcggtcgtcggttcgttttcggcggttgcgtggtttagtgatgtaagtttagtatcggtttattttcggtttgggggtgcgatcggtatcgcgtatcgggcgtcggtttattatacggtacgagacggtattattt

SEQ ID NO: 25660 - DNA, 503 bp, Artificial Sequence
  chemically treated genomic DNA (Homo sapiens) CpG-island No: 25660
  unsure (326, 437)
aaataataccgtctcgtaccgtataataaaccgacgcccgatacgcgataccgatcgcacccccaaaccgaaaataaaccgatactaaacttacatcactaaaccacgcaaccgccgaaaacgaaccgacgaccgaccgaaaaacgacgccgccgacgtccgcgcccaatacgaaacgcgcgcgcgctaacacgattactaaaaatccaaaccaccaaccaacccgaccgcgaacacgcgacgctacacaccctcccacacacgcgcccgcccaccccgacctcgcctcacccgcccattcaaccgcgcaccctccccgcgatcgnacgcaacgtctaacttacgcgaaaacgaccaccatcgttaaccgacacccaccaccaacctccgccacgcgtatcactcacaatattataaaatacacaacataaacgtcnatcatacgaaaaaacgatcccacgactcgatccgcgtccctacaacacctaatcacttacgtcgtt

SEQ ID NO: 25661 - DNA, 504 bp, Artificial Sequence
  chemically treated genomic DNA (Homo sapiens) CpG-island No: 25661
ttttttttcgtttttttcgtttagtttgcgagtgttttgagggaagtaaggaggcggcggcggtcgtagcgagtggcgagtagtggaaacgttgtttttgaggggagtttaaggtagggaggcgaggcgacggtgtgcgggagcgggttttttagggatttttcgggttcgtaattggtagggtcgttcgattcgtaggggatttcgtttcgtttttgttgttttttttttatttttaggagtgttcggggcgacgggatttcgggagaggggaaagggaatagtttggggttcgggtatcgttgtgggtcgggttgggtttagggggacggcggtgcgggttgggtcggtttgggcgcggcgggggtcggatgatggggcgagttcggattttggcgggcgagtgttcggcgtaggcgtaagcgtagagttttttcgcggtcgtttttttggttttttttttttgggggatttttagtgttaggttgttagtgcgtagttttt

SEQ ID NO: 25662 - DNA, 504 bp, Artificial Sequence
  chemically treated genomic DNA (Homo sapiens) CpG-island No: 25662
aaaaactacgcactaacaacctaacactaaaaatcccccaaaaaaaaaaaaccaaaaaaacgaccgcgaaaaaactctacgcttacgcctacgccgaacactcgcccgccaaaatccgaactcgccccatcatccgacccccgccgcgcccaaaccgacccaacccgcaccgccgtccccctaaacccaacccgacccacaacgatacccgaaccccaaactattccctttcccctctcccgaaatcccgtcgccccgaacactcctaaaaataaaaaaaaaacaacaaaaacgaaacgaaatcccctacgaatcgaacgaccctaccaattacgaacccgaaaaatccctaaaaaacccgctcccgcacaccgtcgcctcgcctccctaccttaaactcccctcaaaaacaacgtttccactactcgccactcgctacgaccgccgccgcctccttacttccctcaaaacactcgcaaactaaacgaaaaaaacgaaaaaaaa

SEQ ID NO: 25663 - DNA, 504 bp, Artificial Sequence
  chemically treated genomic DNA (Homo sapiens) CpG-island No: 25663
gggggttgcgtattgatagtttggtattgggggttttttagaggggaggggttaaaaggacgatcgcgaggagattttgcgtttgcgtttgcgtcgagtattcgttcgttaaggttcggattcgttttattattcggttttcgtcgcgtttaaatcggtttagttcgtatcgtcgtttttttaaatttagttcggtttatagcgatgttcggattttagattgtttttttttttttttttcggggtttcgtcgtttcgggtatttttaaaaataaagggaaaataatagaaacgaaacgggattttttgcgaatcgaacggttttgttagttgcggattcgggaagtttttggagagttcgttttcgtatatcgtcgtttcgtttttttattttgggttttttttagaagtaacgtttttattattcgttattcgttgcggtcgtcgtcgtttttttgttttttttagaatattcgtaggttaggcgaaggaggcggagaggaa

SEQ ID NO: 25664 - DNA, 504 bp, Artificial Sequence
  chemically treated genomic DNA (Homo sapiens) CpG-island No: 25664
ttcctctccgcctccttcgcctaacctacgaatattctaaaaaaaacaaaaaaacgacgacgaccgcaacgaataacgaataataaaaacgttacttctaaaaaaaacccaaaataaaaaaacgaaacgacgatatacgaaaacgaactctccaaaaacttcccgaatccgcaactaacaaaaccgttcgattcgcaaaaaatcccgtttcgtttctattattttccctttatttttaaaaatacccgaaacgacgaaaccccgaaaaaaaaaaaaaaaaacaatctaaaatccgaacatcgctataaaccgaactaaatttaaaaaaacgacgatacgaactaaaccgatttaaacgcgacgaaaaccgaataataaaacgaatccgaaccttaacgaacgaatactcgacgcaaacgcaaacgcaaaatctcctcgcgatcgtccttttaacccctcccctctaaaaaacccccaataccaaactatcaatacgcaaccccc

SEQ ID NO: 25665 - DNA, 733 bp, Artificial Sequence
  chemically treated genomic DNA (Homo sapiens) CpG-island No: 25665
tgaaggtcgttggatttttcggcgttttcggttcggtttagtttttttcggggttcggataaggaggtcgggcgtttttttttttatttttttggggttttagatcggtcgtagtagcggtacggaagagattatcgggtgcgagtagtagacggggtgcgggaaggtgagtagcggttggttgattggtatcggggttttcgcggttgtagtcgtcgcgttttcggtcgtcgagttttcgtggtagaggatgggtatttttacgatgcgttgcgtcgcggtatggtttaagttggtcgtttttagtttagtcgagagttgtcgtttttatttgttgcggcggttttggaattaagtttttatttgggtttgcgggagttgtaggttggaggcgaggtaggcgcgtttcgagttgtttaggtagcgttttatgtcgaaggtggattcgagttggtatatttggttgcgcgaaaagacggtgcgcgttttttttttggtcgcgtcggtttgtcgtttagcgtcgtcgtttcgcggtcgttcggatttcggcgagggcgaagttcgcgggtaggagttttttttttttttttttaaagttcgagtgcgaaggagagaggaaaggcgtgcgttttaagtcgttcgggttcgagtttacgatgtttttgggggtatttgaggagcgagaatagatagaaaggttatggagttggttggggagtttcggagatcgtta

SEQ ID NO: 25666 - DNA, 733 bp, Artificial Sequence
  chemically treated genomic DNA (Homo sapiens) CpG-island No: 25666
taacgatctccgaaactccccaaccaactccataacctttctatctattctcgctcctcaaatacccccaaaaacatcgtaaactcgaacccgaacgacttaaaacgcacgcctttcctctctccttcgcactcgaactttaaaaaaaaaaaaaaaaaactcctacccgcgaacttcgccctcgccgaaatccgaacgaccgcgaaacgacgacgctaaacgacaaaccgacgcgaccaaaaaaaaaacgcgcaccgtcttttcgcgcaaccaaatataccaactcgaatccaccttcgacataaaacgctacctaaacaactcgaaacgcgcctacctcgcctccaacctacaactcccgcaaacccaaataaaaacttaattccaaaaccgccgcaacaaataaaaacgacaactctcgactaaactaaaaacgaccaacttaaaccataccgcgacgcaacgcatcgtaaaaatacccatcctctaccacgaaaactcgacgaccgaaaacgcgacgactacaaccgcgaaaaccccgataccaatcaaccaaccgctactcaccttcccgcaccccgtctactactcgcacccgataatctcttccgtaccgctactacgaccgatctaaaaccccaaaaaaataaaaaaaaaaacgcccgacctccttatccgaaccccgaaaaaaactaaaccgaaccgaaaacgccgaaaaatccaacgaccttca

SEQ ID NO: 25667 - DNA, 733 bp, Artificial Sequence
  chemically treated genomic DNA (Homo sapiens) CpG-island No: 25667
tggcggttttcgaggttttttaattaattttatggtttttttgtttgttttcgttttttaggtatttttaagggtatcgtaggttcgggttcgggcggtttggagcgtacgttttttttttttttttcgtattcggattttaaagaagagaaagagaggtttttgttcgcgggtttcgttttcgtcggggttcgagcggtcgcgggacggcggcgttgagcggtaggtcggcgcggttaagaagaagacgcgtatcgttttttcgcgtagttaggtgtattagttcgagtttattttcgatatgaagcgttatttgagtagttcggagcgcgtttgtttcgtttttagtttgtagttttcgtagatttaggtaaagatttggttttagaatcgtcgtaataagtggaagcggtagttttcggttgagttggaggcggttaatttgagttatgtcgcggcgtagcgtatcgtgagggtgtttattttttattacgagaattcggcggtcgagggcgcggcggttgtagtcgcgggggtttcggtgttagttagttagtcgttgtttattttttcgtatttcgtttattattcgtattcggtggtttttttcgtgtcgttgttacggtcggtttgaggttttagaggggtgggggagggagcgttcggtttttttgttcggatttcggaggagattgggtcgggtcgagggcgtcgagaagtttagcggttttta

SEQ ID NO: 25668 - DNA, 733 bp, Artificial Sequence
  chemically treated genomic DNA (Homo sapiens) CpG-island No: 25668
taaaaaccgctaaacttctcgacgccctcgacccgacccaatctcctccgaaatccgaacaaaaaaaccgaacgctccctcccccacccctctaaaacctcaaaccgaccgtaacaacgacacgaaaaaaaccaccgaatacgaataataaacgaaatacgaaaaaataaacaacgactaactaactaacaccgaaacccccgcgactacaaccgccgcgccctcgaccgccgaattctcgtaataaaaaataaacaccctcacgatacgctacgccgcgacataactcaaattaaccgcctccaactcaaccgaaaactaccgcttccacttattacgacgattctaaaaccaaatctttacctaaatctacgaaaactacaaactaaaaacgaaacaaacgcgctccgaactactcaaataacgcttcatatcgaaaataaactcgaactaatacacctaactacgcgaaaaaacgatacgcgtcttcttcttaaccgcgccgacctaccgctcaacgccgccgtcccgcgaccgctcgaaccccgacgaaaacgaaacccgcgaacaaaaacctctctttctcttctttaaaatccgaatacgaaaaaaaaaaaaaaaacgtacgctccaaaccgcccgaacccgaacctacgatacccttaaaaatacctaaaaaacgaaaacaaacaaaaaaaccataaaattaattaaaaaacctcgaaaaccgcca

SEQ ID NO: 25669 - DNA, 1128 bp, Artificial Sequence
  chemically treated genomic DNA (Homo sapiens) CpG-island No: 25669
tttttcggtttaggcgtattggaattattttttttttttaggtcgtgttttaagtttcggtcgttcgaagtttttttatttacgttcgaggttatttttttcgggaagtatcgtgttcggggttttaattttatttttttttttattaagtgggattggattaacgggtagcgtaatttagcgcgagggtaggttaggggtcgaaaaaaattgatcgagtagagggtttgcgggtgttggggttttagaattgcggagggaagtatcgcggggcggggacggggcgggcgcgtagggggataacgaaagtttaaagagaggtcggtatttttaggtcgtgggaggtggtcgtcggcgggggttagggtgtaggggtattattaggttggggagcgttttaggttgtgcgcgggtagggtaaatttttgtgtcgggattttaaagcgagggaaagttacgtcgtttatttgcgatagcgcgaagttcgcggcgttttttagggtttttttggttgtcgttggtagcggtagcggagttcgtggtggttgtttaggttgtcgcgaagagcgtttcgtgggtcggttgatgtttatggggcgttcggatgtggtttacgttgagtaggtttttgatggagaacggggattttttgggaacgggtggggggggcgtcggcggttggggttgtgcgttggcggtgtcggtagcgttcggttcgggtttcggtatggttttttttttttcgggttttcgggagggagggagcgggataggcgggcggcggggcgagtaggcgagaggtcggaaattagattataaacggaatttaattacggggcgtaaagtcgggggtcgtttcgggcgtaaatttaacggcgggagggcggagtgaggatttagacgggcgggttcgtatgagggaggggtgcgaggggcggggagcggttttgtcgcggtatcgagggatcgaggcggttcggttgcggttgcggttttcgcggaggaggtagtaagagtagttttcggttcgaggttgcgttaattcggcgtcggatgttaatgatgaaattaaaatgttatttaagttaaatgcggggagtatacggcgattgggcgcgtataatggta

SEQ ID NO: 25670 - DNA, 1128 bp, Artificial Sequence
  chemically treated genomic DNA (Homo sapiens) CpG-island No: 25670
taccattatacgcgcccaatcgccgtatactccccgcatttaacttaaataacattttaatttcatcattaacatccgacgccgaattaacgcaacctcgaaccgaaaactactcttactacctcctccgcgaaaaccgcaaccgcaaccgaaccgcctcgatccctcgataccgcgacaaaaccgctccccgcccctcgcacccctccctcatacgaacccgcccgtctaaatcctcactccgccctcccgccgttaaatttacgcccgaaacgacccccgactttacgccccgtaattaaattccgtttataatctaatttccgacctctcgcctactcgccccgccgcccgcctatcccgctccctccctcccgaaaacccgaaaaaaaaaaaaccataccgaaacccgaaccgaacgctaccgacaccgccaacgcacaaccccaaccgccgacgccccccccacccgttcccaaaaaatccccgttctccatcaaaaacctactcaacgtaaaccacatccgaacgccccataaacatcaaccgacccacgaaacgctcttcgcgacaacctaaacaaccaccacgaactccgctaccgctaccaacgacaaccaaaaaaaccctaaaaaacgccgcgaacttcgcgctatcgcaaataaacgacgtaactttccctcgctttaaaatcccgacacaaaaatttaccctacccgcgcacaacctaaaacgctccccaacctaataatacccctacaccctaacccccgccgacgaccacctcccacgacctaaaaataccgacctctctttaaactttcgttatccccctacgcgcccgccccgtccccgccccgcgatacttccctccgcaattctaaaaccccaacacccgcaaaccctctactcgatcaatttttttcgacccctaacctaccctcgcgctaaattacgctacccgttaatccaatcccacttaataaaaaaaaaaataaaattaaaaccccgaacacgatacttcccgaaaaaaataacctcgaacgtaaataaaaaaacttcgaacgaccgaaacttaaaacacgacctaaaaaaaaaaaataattccaatacgcctaaaccgaaaaa

SEQ ID NO: 25671 - DNA, 1128 bp, Artificial Sequence
  chemically treated genomic DNA (Homo sapiens) CpG-island No: 25671
tgttattgtacgcgtttaatcgtcgtatatttttcgtatttaatttggatgatattttgattttattattagtattcggcgtcggattgacgtagtttcgagtcggggattgtttttgttgtttttttcgcgggagtcgtagtcgtagtcgagtcgtttcgatttttcggtgtcgcggtagggtcgtttttcgtttttcgtattttttttttatgcgagttcgttcgtttgggtttttatttcgttttttcgtcgttggatttgcgttcggggcggttttcgattttgcgtttcgtagttgagtttcgtttatggtttgattttcggtttttcgtttgttcgtttcgtcgttcgtttgtttcgttttttttttttcggggattcggaggagaggggattatgtcggaattcgggtcggacgttgtcggtatcgttagcgtatagttttaatcgtcgacgttttttttattcgtttttaaggagttttcgttttttattaagaatttgtttaacgtaaattatattcggacgttttataagtattagtcgatttacgagacgtttttcgcggtagtttagataattattacggatttcgttgtcgttgttagcggtagttaaaggggttttggagggcgtcgcgggtttcgcgttatcgtaggtgggcgacgtggttttttttcgttttgagatttcggtatagaggtttgttttgttcgcgtataatttgaagcgttttttagtttggtggtatttttatattttgattttcgtcggcggttattttttacgatttgaaggtatcgatttttttttgaattttcgttgtttttttgcgcgttcgtttcgttttcgtttcgcgatgttttttttcgtagttttgggattttagtattcgtaaattttttgttcggttagtttttttcggtttttagtttgttttcgcgttgggttgcgttgttcgttaatttaattttatttggtgagaaaagaagtggaattggagtttcgggtacggtgtttttcgggaaaagtggtttcgggcgtgaatagggaggtttcggacggtcggggtttgggatacggtttggaaggagggggtgattttaatgcgtttaagtcgaaagg

SEQ ID NO: 25672 - DNA, 1128 bp, Artificial Sequence
  chemically treated genomic DNA (Homo sapiens) CpG-island No: 25672
cctttcgacttaaacgcattaaaatcaccccctccttccaaaccgtatcccaaaccccgaccgtccgaaacctccctattcacgcccgaaaccacttttcccgaaaaacaccgtacccgaaactccaattccacttcttttctcaccaaataaaattaaattaacgaacaacgcaacccaacgcgaaaacaaactaaaaaccgaaaaaaactaaccgaacaaaaaatttacgaatactaaaatcccaaaactacgaaaaaaaacatcgcgaaacgaaaacgaaacgaacgcgcaaaaaaacaacgaaaattcaaaaaaaaatcgataccttcaaatcgtaaaaaataaccgccgacgaaaatcaaaatataaaaataccaccaaactaaaaaacgcttcaaattatacgcgaacaaaacaaacctctataccgaaatctcaaaacgaaaaaaaaccacgtcgcccacctacgataacgcgaaacccgcgacgccctccaaaacccctttaactaccgctaacaacgacaacgaaatccgtaataattatctaaactaccgcgaaaaacgtctcgtaaatcgactaatacttataaaacgtccgaatataatttacgttaaacaaattcttaataaaaaacgaaaactccttaaaaacgaataaaaaaaacgtcgacgattaaaactatacgctaacgataccgacaacgtccgacccgaattccgacataatcccctctcctccgaatccccgaaaaaaaaaaaacgaaacaaacgaacgacgaaacgaacaaacgaaaaaccgaaaatcaaaccataaacgaaactcaactacgaaacgcaaaatcgaaaaccgccccgaacgcaaatccaacgacgaaaaaacgaaataaaaacccaaacgaacgaactcgcataaaaaaaaaatacgaaaaacgaaaaacgaccctaccgcgacaccgaaaaatcgaaacgactcgactacgactacgactcccgcgaaaaaaacaacaaaaacaatccccgactcgaaactacgtcaatccgacgccgaatactaataataaaatcaaaatatcatccaaattaaatacgaaaaatatacgacgattaaacgcgtacaataaca

SEQ ID NO: 25673 - DNA, 501 bp, Artificial Sequence
  chemically treated genomic DNA (Homo sapiens) CpG-island No: 25673
gaaattcgcgtggttttggtttttagttttggaaaatcgaagagtgagttttttttcgggattaggagtgggtgtgtttgtgtgcgtatgcgcgttgattcggttaaaattcgcgcgttattcggtggggttgttggggtaatagtttttcggtatcgacggttgttttcggaagggtatttttttgttttggtcgtcggtgtttaaggttcgcggattaatttcgagtttgtgatttcgacgatagtatttttttttaggaagttttttcggttagttggcgtttggagttgtttaattaacgttttaatgggggtaaggtgaatcgaaggcgtagcggcgtagtttttttcgtcgcggtaagtagcggtattcgttgcgcgtttcgacggtagcgaagtttttagagaattatattggatttttgtagaacggtttagtgaaaggatattttattttattggttttaaaaatagtttttcggttcgtacgagaagttta

SEQ ID NO: 25674 - DNA, 501 bp, Artificial Sequence
  chemically treated genomic DNA (Homo sapiens) CpG-island No: 25674
taaacttctcgtacgaaccgaaaaactatttttaaaaccaataaaataaaatatcctttcactaaaccgttctacaaaaatccaatataattctctaaaaacttcgctaccgtcgaaacgcgcaacgaataccgctacttaccgcgacgaaaaaaactacgccgctacgccttcgattcaccttacccccattaaaacgttaattaaacaactccaaacgccaactaaccgaaaaaacttcctaaaaaaaaatactatcgtcgaaatcacaaactcgaaattaatccgcgaaccttaaacaccgacgaccaaaacaaaaaaatacccttccgaaaacaaccgtcgataccgaaaaactattaccccaacaaccccaccgaataacgcgcgaattttaaccgaatcaacgcgcatacgcacacaaacacacccactcctaatcccgaaaaaaaactcactcttcgattttccaaaactaaaaaccaaaaccacgcgaatttc

SEQ ID NO: 25675 - DNA, 501 bp, Artificial Sequence
  chemically treated genomic DNA (Homo sapiens) CpG-island No: 25675
tgggtttttcgtgcgaatcggggagttgtttttaaagttagtggagtggaatgtttttttattaagtcgttttgtaaaggtttagtgtggttttttaaggatttcgttgtcgtcgagacgcgtagcggatgtcgttgtttgtcgcggcggaggaagttacgtcgttgcgttttcggtttattttgtttttattaaagcgttagttagatagttttaaacgttagttggtcggagagattttttgggagaaagtgttgtcgtcggggttatagattcggagttgattcgcgagttttgggtatcggcggttagagtagaggggtgttttttcgagagtagtcgtcggtgtcgagaagttgttgttttagtagttttatcgagtgacgcgcgggttttggtcgggttagcgcgtatacgtatataggtatatttatttttggtttcgggggaaggtttatttttcggttttttagggttaaaggttaaggttacgcggatttt

SEQ ID NO: 25676 - DNA, 501 bp, Artificial Sequence
  chemically treated genomic DNA (Homo sapiens) CpG-island No: 25676
aaaatccgcgtaaccttaacctttaaccctaaaaaaccgaaaaataaaccttcccccgaaaccaaaaataaatatacctatatacgtatacgcgctaacccgaccaaaacccgcgcgtcactcgataaaactactaaaacaacaacttctcgacaccgacgactactctcgaaaaaacacccctctactctaaccgccgatacccaaaactcgcgaatcaactccgaatctataaccccgacgacaacactttctcccaaaaaatctctccgaccaactaacgtttaaaactatctaactaacgctttaataaaaacaaaataaaccgaaaacgcaacgacgtaacttcctccgccgcgacaaacaacgacatccgctacgcgtctcgacgacaacgaaatccttaaaaaaccacactaaacctttacaaaacgacttaataaaaaaacattccactccactaactttaaaaacaactccccgattcgcacgaaaaaccca

SEQ ID NO: 25677 - DNA, 764 bp, Artificial Sequence
  chemically treated genomic DNA (Homo sapiens) CpG-island No: 25677
cgaaattcggtagcgtagttgttttttcgtagttgttttagttagttttagtaagttcgagcgttcggcgtcgtcgttatttttttcgtttttgcgcggcgcggttgggattggtttagaggcgtggtcgggagcggaggggcgtgttttgggtcgggggtggggcgagggagagttaggaggcggaagttttcgcgggcggtggggacggcgtttttatcgcgagttatttgttagtttttgtttgaggcggaggtagtttcgcgtcgcgtcggattcgaggtgagtggcggtcggtcggcgatgcgtttttcggattttcggtgggagaagggaaagaatcggtcgttgtgcgtcgaacgcgagaagggaagttcggttggggacgaggagggggcgtttttcgggtagggatggttttttaggtgttttttgggcgcggagcggcggaggtgggagagtagtttgggaaaaggagcgttcggaaaagggtagcgttggagttcgtatgaggttagagggcgagttttggggttttcgtagttcgggtcgatcgggattagcgtagcggagacggggacgcgggagggcgttcggaggtggcgagggtcggtagggacgggtattgtcgtttttatttattcggttgtcggcgtcgttcggtattatcgtggtgtggtgtttgagtgtttagttttgcgttagttttttggagggtaggaagcgggatttaaaggaaaaggcgcgttagtttttttttgttt

SEQ ID NO: 25678 - DNA, 764 bp, Artificial Sequence
  chemically treated genomic DNA (Homo sapiens) CpG-island No: 25678
aaacaaaaaaaaactaacgcgccttttcctttaaatcccgcttcctaccctccaaaaaactaacgcaaaactaaacactcaaacaccacaccacgataataccgaacgacgccgacaaccgaataaataaaaacgacaatacccgtccctaccgaccctcgccacctccgaacgccctcccgcgtccccgtctccgctacgctaatcccgatcgacccgaactacgaaaaccccaaaactcgccctctaacctcatacgaactccaacgctacccttttccgaacgctccttttcccaaactactctcccacctccgccgctccgcgcccaaaaaacacctaaaaaaccatccctacccgaaaaacgccccctcctcgtccccaaccgaacttcccttctcgcgttcgacgcacaacgaccgattctttcccttctcccaccgaaaatccgaaaaacgcatcgccgaccgaccgccactcacctcgaatccgacgcgacgcgaaactacctccgcctcaaacaaaaactaacaaataactcgcgataaaaacgccgtccccaccgcccgcgaaaacttccgcctcctaactctccctcgccccacccccgacccaaaacacgcccctccgctcccgaccacgcctctaaaccaatcccaaccgcgccgcgcaaaaacgaaaaaaataacgacgacgccgaacgctcgaacttactaaaactaactaaaacaactacgaaaaaacaactacgctaccgaatttcg

SEQ ID NO: 25679 - DNA, 764 bp, Artificial Sequence
  chemically treated genomic DNA (Homo sapiens) CpG-island No: 25679
gagtaaagaaaaattaacgcgtttttttttttgagtttcgttttttattttttaagagattggcgtaggattgggtatttagatattatattacggtggtgtcgggcgacgtcggtagtcgggtgggtgggagcggtagtgttcgtttttgtcggttttcgttattttcgggcgttttttcgcgttttcgttttcgttacgttggtttcggtcggttcgggttgcggggattttagggttcgttttttggttttatgcggattttagcgttgttttttttcgggcgtttttttttttaagttgtttttttattttcgtcgtttcgcgtttagaaagtatttgaggagttatttttgttcgaggagcgtttttttttcgtttttaatcgggttttttttttcgcgttcggcgtatagcggtcggttttttttttttttttatcggagattcgagaggcgtatcgtcggtcggtcgttatttatttcgggttcggcgcggcgcggggttgttttcgttttagataagggttgataagtgattcgcggtgagggcgtcgtttttatcgttcgcgggaattttcgttttttggttttttttcgttttattttcgatttaggatacgttttttcgttttcggttacgtttttgggttagttttagtcgcgtcgcgtaggggcggggaaggtggcggcggcgtcgggcgttcgggtttgttggggttggttgaagtagttgcggaaagataattgcgttatcgagtttcg

SEQ ID NO: 25680 - DNA, 764 bp, Artificial Sequence
  chemically treated genomic DNA (Homo sapiens) CpG-island No: 25680
cgaaactcgataacgcaattatctttccgcaactacttcaaccaaccccaacaaacccgaacgcccgacgccgccgccaccttccccgcccctacgcgacgcgactaaaactaacccaaaaacgtaaccgaaaacgaaaaaacgtatcctaaatcgaaaataaaacgaaaaaaaaccaaaaaacgaaaattcccgcgaacgataaaaacgacgccctcaccgcgaatcacttatcaacccttatctaaaacgaaaacaaccccgcgccgcgccgaacccgaaataaataacgaccgaccgacgatacgcctctcgaatctccgataaaaaaaaaaaaaaaaccgaccgctatacgccgaacgcgaaaaaaaaaacccgattaaaaacgaaaaaaaaacgctcctcgaacaaaaataactcctcaaatactttctaaacgcgaaacgacgaaaataaaaaaacaacttaaaaaaaaaaacgcccgaaaaaaaacaacgctaaaatccgcataaaaccaaaaaacgaaccctaaaatccccgcaacccgaaccgaccgaaaccaacgtaacgaaaacgaaaacgcgaaaaaacgcccgaaaataacgaaaaccgacaaaaacgaacactaccgctcccacccacccgactaccgacgtcgcccgacaccaccgtaatataatatctaaatacccaatcctacgccaatctcttaaaaaataaaaaacgaaactcaaaaaaaaaaacgcgttaatttttctttactc

SEQ ID NO: 25681 - DNA, 1164 bp, Artificial Sequence
  chemically treated genomic DNA (Homo sapiens) CpG-island No: 25681
gggggtcgcggttcggtggtagtttgggcgagggtttcgtgtttacgcgcgggttattcggcgtcgttattggtcggttattttcggcggggaagtaggtgacgggattcgcgcgggcgcgaggcggcgacgagggacgtagagacgtagagtttcgcgtcgggttttttagttaagagtcgataaaaataaaggggaaaaatttaaaatttttatttattaagtatagaaaggagaggggcgcggggagagttcgcggggaagaataaaacgagggacgtttttttcggggcgggtattgatttaggtggcggggtcggtttttcggtgtcgcgattttaagggggagggggagattaaaaaataatttagattcgtttaggaggcggggattcgggcggtaggtcggggttcgaggggtcgtgggggtcggattttcgcggtcgcgggttaggagggcgcggcgttcggtcgggttaggttcggggtttagcgtgttttgcgcggggaggagcggtcgtcgtaacgtcgcgttcgaagtttaggttttaggtttcgtcgatcgtttaggtttcgcgagaagagcggcgggtacggcggcggttttaggttcgttcgggtcggttggcgggcggcgttttttaggcgggcgggtattgcggttcggtttaggatggggcgtcgcggtttttgtagatggaatcggtttcggagggaaaaaattaataataggtttcgagattgtttttttaggcggttattcggttgtttttcggttatttagcgttcgtttcgttcggatgggtagtgtcggtcgtagtattcgtttttaatattttcgttattttcggagatcgcggtcgtattttttataatcgtgtattagcggcggtcgcggtcggagtcgagatataataattgacgtcgcgatgaggcggggtcggggcggggtttgtagggtgcgttcgtaggggtcgagggcggggaattcggggagtcgcggggttatcggattatcgaacgaggggcgggaggagaggcggagtcgtagcgtggtcggggttttttcgcggtgtcgaaagttgttttttcgtgtttttgcggcgtggtttttttttttgtttttttaatgtttagtaattgattttgtttgaggattagttt

SEQ ID NO: 25682 - DNA, 1164 bp, Artificial Sequence
  chemically treated genomic DNA (Homo sapiens) CpG-island No: 25682
aaactaatcctcaaacaaaatcaattactaaacattaaaaaaacaaaaaaaaaaaccacgccgcaaaaacacgaaaaaacaactttcgacaccgcgaaaaaaccccgaccacgctacgactccgcctctcctcccgcccctcgttcgataatccgataaccccgcgactccccgaattccccgccctcgacccctacgaacgcaccctacaaaccccgccccgaccccgcctcatcgcgacgtcaattattatatctcgactccgaccgcgaccgccgctaatacacgattataaaaaatacgaccgcgatctccgaaaataacgaaaatattaaaaacgaatactacgaccgacactacccatccgaacgaaacgaacgctaaataaccgaaaaacaaccgaataaccgcctaaaaaaacaatctcgaaacctattattaattttttccctccgaaaccgattccatctacaaaaaccgcgacgccccatcctaaaccgaaccgcaatacccgcccgcctaaaaaacgccgcccgccaaccgacccgaacgaacctaaaaccgccgccgtacccgccgctcttctcgcgaaacctaaacgatcgacgaaacctaaaacctaaacttcgaacgcgacgttacgacgaccgctcctccccgcgcaaaacacgctaaaccccgaacctaacccgaccgaacgccgcgccctcctaacccgcgaccgcgaaaatccgacccccacgacccctcgaaccccgacctaccgcccgaatccccgcctcctaaacgaatctaaattattttttaatctccccctcccccttaaaatcgcgacaccgaaaaaccgaccccgccacctaaatcaatacccgccccgaaaaaaacgtccctcgttttattcttccccgcgaactctccccgcgcccctctcctttctatacttaataaataaaaattttaaatttttcccctttatttttatcgactcttaactaaaaaacccgacgcgaaactctacgtctctacgtccctcgtcgccgcctcgcgcccgcgcgaatcccgtcacctacttccccgccgaaaataaccgaccaataacgacgccgaataacccgcgcgtaaacacgaaaccctcgcccaaactaccaccgaaccgcgaccccc

SEQ ID NO: 25683 - DNA, 1164 bp, Artificial Sequence
  chemically treated genomic DNA (Homo sapiens) CpG-island No: 25683
agattaatttttagataaaattaattgttaaatattggaggggtaaaaggggagattacgtcgtaaaagtacggagaggtaattttcggtatcgcgggaaggtttcgattacgttgcggtttcgttttttttttcgtttttcgttcggtagttcggtagtttcgcggtttttcgaatttttcgttttcggtttttgcgggcgtattttgtaggtttcgtttcggtttcgttttatcgcgacgttagttgttatgtttcggtttcggtcgcggtcgtcgttgatatacggttgtggagggtacggtcgcggttttcggaggtggcgggggtgttggggacgggtgttgcgatcggtattgtttattcgagcgggacgggcgttgagtggtcgggaggtagtcgggtagtcgtttggaggagtagtttcggggtttattattggtttttttttttcgagatcgattttatttgtagagatcgcgacgttttattttgggtcgggtcgtagtgttcgttcgtttgagaggcgtcgttcgttagtcggttcgagcgaatttggagtcgtcgtcgtgttcgtcgtttttttcgcggagtttgggcggtcggcggggtttggggtttgggtttcgggcgcggcgttgcggcggtcgttttttttcgcgtagaatacgttgggtttcgggtttggttcggtcgagcgtcgcgtttttttgattcgcggtcgcgggagttcggtttttacggtttttcgggtttcggtttgtcgttcggattttcgttttttgggcggatttgagttattttttggttttttttttttttttgagatcgcggtatcggagggtcgatttcgttatttgggttagtgttcgtttcgggggaagcgtttttcgttttgttttttttcgcgagtttttttcgcgttttttttttttttgtgtttaatggatgggggttttgagttttttttttttatttttgtcggtttttgattgggaggttcggcgcgaggttttgcgtttttgcgtttttcgtcgtcgtttcgcgttcgcgcggatttcgttatttgttttttcgtcggggatggtcggttagtgacggcgtcgggtggttcgcgcgtggatacggggttttcgtttaagttgttatcgagtcgcggttttt

SEQ ID NO: 25684 - DNA, 1164 bp, Artificial Sequence
  chemically treated genomic DNA (Homo sapiens) CpG-island No: 25684
aaaaaccgcgactcgataacaacttaaacgaaaaccccgtatccacgcgcgaaccacccgacgccgtcactaaccgaccatccccgacgaaaaaacaaataacgaaatccgcgcgaacgcgaaacgacgacgaaaaacgcaaaaacgcaaaacctcgcgccgaacctcccaatcaaaaaccgacaaaaataaaaaaaaaaaactcaaaacccccatccattaaacacaaaaaaaaaaaaaacgcgaaaaaaactcgcgaaaaaaaacaaaacgaaaaacgcttcccccgaaacgaacactaacccaaataacgaaatcgaccctccgataccgcgatctcaaaaaaaaaaaaaaaaccaaaaaataactcaaatccgcccaaaaaacgaaaatccgaacgacaaaccgaaacccgaaaaaccgtaaaaaccgaactcccgcgaccgcgaatcaaaaaaacgcgacgctcgaccgaaccaaacccgaaacccaacgtattctacgcgaaaaaaaacgaccgccgcaacgccgcgcccgaaacccaaaccccaaaccccgccgaccgcccaaactccgcgaaaaaaacgacgaacacgacgacgactccaaattcgctcgaaccgactaacgaacgacgcctctcaaacgaacgaacactacgacccgacccaaaataaaacgtcgcgatctctacaaataaaatcgatctcgaaaaaaaaaaaccaataataaaccccgaaactactcctccaaacgactacccgactacctcccgaccactcaacgcccgtcccgctcgaataaacaataccgatcgcaacacccgtccccaacacccccgccacctccgaaaaccgcgaccgtaccctccacaaccgtatatcaacgacgaccgcgaccgaaaccgaaacataacaactaacgtcgcgataaaacgaaaccgaaacgaaacctacaaaatacgcccgcaaaaaccgaaaacgaaaaattcgaaaaaccgcgaaactaccgaactaccgaacgaaaaacgaaaaaaaaaacgaaaccgcaacgtaatcgaaaccttcccgcgataccgaaaattacctctccgtacttttacgacgtaatctccccttttacccctccaatatttaacaattaattttatctaaaaattaatct

SEQ ID NO: 25685 - DNA, 1370 bp, Artificial Sequence
  chemically treated genomic DNA (Homo sapiens) CpG-island No: 25685
tgtcgtcgtggatttttgattatgtcgttgcgggtttttgcggttttttgttttcgtcgtcgcggttttttgattttggtttcgtcgaatttagtttttgtcgttacggttttttggggttttttgttttcgtcgtcgcggttttttgtcgtcgtagttttttgtatttttttttttttgttttcgtggttttttgtttttgaagttatagttttttgttttcgtcgtcgcggttttttgcgatttttttttttttgttgtcgtagttttttgtttttattatcgcgaatttttttgtcgcggttttttgttatcgtcgtcgtggttttttatggtttttggttttcggtgtcgtggttttttattgtttattgttttcgtcgtcgtaggtttttttcgtcgcggttttttgtttcgtagtttcggttttttgcggttttttgtcgtcgtggtttttggttttcgttattgtggttttttacgttttttcgttttcgtcgtcgtaggtttttttagtcgcggttttttgtttttattgttcgggttttttgtgtcgttttgttttcgtcgtcgcggttttttgttgttatttgtttttgttattatagttttttgttttcgtcgtcgcggttttttgttttttacgtggttttttgttttcgttttcgcggttttttattattttagtcgttttttgttttcgtcgttacgggtttttgtttttgtcgtcgagggtttttgcgtttttatgtttttatcgtcgtggttttttgtcgtttttgttttttgttttttttgacgcggttttttgcggttttttattatttttatcgtggttttttgcggtttttggtatcggacgttatggtttttttaggttttttgttttcgtcgttacggttttttgttgtcgttatatcgtttagtttttatcgcgtttttttgtattcgtagtcgtatttttttgtcgtcgcgattttttatttcgttatcgcggtttttgttttcgttgtcgtggttttttgttttcgatgttgcggttttttatagttttttgttttcgttatcgtagttttttgtttttattatcgcggttttttgttttcgttattatagttttttgttatcgcggttgtttgtttcgattgttatggtttgttgttttcgtcgtcgtggtttgttgtttttgtagttttagtttttttttttatcgtttcggttttttgattttatcgttgcggttttttacgttcgtcgtcgtggttttttgcggttttttgtttttatcgtcgcggttttttgtttttattatcgaggtttttttttcgtcgttgcggttttttgtacgtcgtttttaagtttttattttt

SEQ ID NO: 25686 - DNA, 1370 bp, Artificial Sequence
  chemically treated genomic DNA (Homo sapiens) CpG-island No: 25686
aaaaataaaaacttaaaaacgacgtacaaaaaaccgcaacgacgaaaaaaaaacctcgataataaaaacaaaaaaccgcgacgataaaaacaaaaaaccgcaaaaaaccacgacgacgaacgtaaaaaaccgcaacgataaaatcaaaaaaccgaaacgataaaaaaaaaaactaaaactacaaaaacaacaaaccacgacgacgaaaacaacaaaccataacaatcgaaacaaacaaccgcgataacaaaaaactataataacgaaaacaaaaaaccgcgataataaaaacaaaaaactacgataacgaaaacaaaaaactataaaaaaccgcaacatcgaaaacaaaaaaccacgacaacgaaaacaaaaaccgcgataacgaaataaaaaatcgcgacgacaaaaaaatacgactacgaatacaaaaaaacgcgataaaaactaaacgatataacgacaacaaaaaaccgtaacgacgaaaacaaaaaacctaaaaaaaccataacgtccgataccaaaaaccgcaaaaaaccacgataaaaataataaaaaaccgcaaaaaaccgcgtcaaaaaaaacaaaaaacaaaaacgacaaaaaaccacgacgataaaaacataaaaacgcaaaaaccctcgacgacaaaaacaaaaacccgtaacgacgaaaacaaaaaacgactaaaataataaaaaaccgcgaaaacgaaaacaaaaaaccacgtaaaaaacaaaaaaccgcgacgacgaaaacaaaaaactataataacaaaaacaaataacaacaaaaaaccgcgacgacgaaaacaaaacgacacaaaaaacccgaacaataaaaacaaaaaaccgcgactaaaaaaacctacgacgacgaaaacgaaaaaacgtaaaaaaccacaataacgaaaaccaaaaaccacgacgacaaaaaaccgcaaaaaaccgaaactacgaaacaaaaaaccgcgacgaaaaaaacctacgacgacgaaaacaataaacaataaaaaaccacgacaccgaaaaccaaaaaccataaaaaaccacgacgacgataacaaaaaaccgcgacaaaaaaattcgcgataataaaaacaaaaaactacgacaacaaaaaaaaaaaaatcgcaaaaaaccgcgacgacgaaaacaaaaaactataacttcaaaaacaaaaaaccacgaaaacaaaaaaaaaaaaatacaaaaaactacgacgacaaaaaaccgcgacgacgaaaacaaaaaaccccaaaaaaccgtaacgacaaaaactaaattcgacgaaaccaaaatcaaaaaaccgcgacgacgaaaacaaaaaaccgcaaaaacccgcaacgacataatcaaaaatccacgacgaca

SEQ ID NO: 25687 - DNA, 1370 bp, Artificial Sequence
  chemically treated genomic DNA (Homo sapiens) CpG-island No: 25687
agaagtgaaaatttaaaagcggcgtgtaaaaagtcgtagcggcggggaaaaagtttcggtgatggggataaaaagtcgcggcggtgggagtaaaaagtcgtaaaaagttacggcggcgggcgtaaaaagtcgtaacggtggggttaaaaagtcggggcggtgggggaaaaagttggggttataggggtaataagttacggcggcgggggtaataagttatgatagtcgaggtaaatagtcgcggtgataaaaagttgtggtggcgggggtaaaaagtcgcggtggtgggggtaaaaagttgcggtgacgggggtaaaaagttgtaaaaagtcgtagtatcgggggtagaaagttacgatagcggaggtaaaaatcgcggtggcggggtaagaagtcgcggcggtaaaaagatgcggttgcgggtgtaaaaaggcgcggtgggggttaaacggtgtggcggtagtaaaaagtcgtggcggcgggggtaaaaagtttgaaaaagttatggcgttcggtgttaaaagtcgtaaaaagttacggtggaggtggtaaaaagtcgtaaaaagtcgcgttagagggggtaaaaagtaggggcggtaaaaagttacgacggtggggatatgaaggcgtaaaaattttcggcggtaggagtaaaaattcgtggcggcgggggtaaaaagcggttggggtgataaaaagtcgcggaggcggggataggaagttacgtagggggtaaggagtcgcggcggcgggggtaaaaagttgtggtggtagggataaatagtagtaaaaagtcgcggcggcgggggtaaaacgatataaaaagttcgggtagtgggggtaagaagtcgcggttggaaaaatttgcggcggcgggggcgaaaaggcgtaaaaagttatagtggcgggggttaaaagttacggcggtaaaaagtcgtaaaaagtcggggttgcggggtaggaagtcgcggcgggaaaaatttgcggcggcgggggtaataagtagtaaaaagttacggtatcgggggttaaaagttataaaaagttacggcggcggtgataaaaagtcgcggtagaaaaattcgcggtggtgggggtaaaaagttgcggtagtaggggggaaaaggtcgtaaaaagtcgcggcggcgagggtaaaaagttgtggttttaggggtaaaaagttacggaggtagggggagaaagatgtaaaaagttgcggcggtaaaaagtcgcggcggcgagggtaaagagttttaaaaagtcgtgacggtaggggttaaattcggcgaggttagggttagaaagtcgcggcggcgggggtagaaagtcgtaaaaattcgtagcggtatggttaaaaatttacggcggta

SEQ ID NO: 25688 - DNA, 1370 bp, Artificial Sequence
  chemically treated genomic DNA (Homo sapiens) CpG-island No: 25688
taccgccgtaaatttttaaccataccgctacgaatttttacgactttctacccccgccgccgcgactttctaaccctaacctcgccgaatttaacccctaccgtcacgactttttaaaactctttaccctcgccgccgcgactttttaccgccgcaactttttacatctttctccccctacctccgtaactttttacccctaaaaccacaactttttaccctcgccgccgcgactttttacgaccttttcccccctactaccgcaactttttacccccaccaccgcgaatttttctaccgcgactttttatcaccgccgccgtaactttttataacttttaacccccgataccgtaactttttactacttattacccccgccgccgcaaatttttcccgccgcgacttcctaccccgcaaccccgactttttacgactttttaccgccgtaacttttaacccccgccactataactttttacgccttttcgcccccgccgccgcaaatttttccaaccgcgacttcttacccccactacccgaactttttatatcgttttacccccgccgccgcgactttttactactatttatccctaccaccacaactttttacccccgccgccgcgactccttaccccctacgtaacttcctatccccgcctccgcgactttttatcaccccaaccgctttttacccccgccgccacgaatttttactcctaccgccgaaaatttttacgccttcatatccccaccgtcgtaactttttaccgcccctactttttaccccctctaacgcgactttttacgactttttaccacctccaccgtaactttttacgacttttaacaccgaacgccataactttttcaaactttttacccccgccgccacgactttttactaccgccacaccgtttaacccccaccgcgcctttttacacccgcaaccgcatctttttaccgccgcgacttcttaccccgccaccgcgatttttacctccgctatcgtaactttctacccccgatactacgactttttacaactttttacccccgtcaccgcaactttttacccccaccaccgcgactttttacccccgccaccacaactttttatcaccgcgactatttacctcgactatcataacttattacccccgccgccgtaacttattacccctataaccccaactttttcccccaccgccccgactttttaaccccaccgttacgactttttacgcccgccgccgtaactttttacgactttttactcccaccgccgcgactttttatccccatcaccgaaactttttccccgccgctacgactttttacacgccgcttttaaattttcacttct

SEQ ID NO: 25689 - DNA, 647 bp, Artificial Sequence
  chemically treated genomic DNA (Homo sapiens) CpG-island No: 25689
taagagggtaaggggtaggggatacgaagggcggcgatagcgaacgaacggcgagtcggcggatataaaagtttagattacgggacgtgattatagagataagcgaggggggagcgaggaggggggaaggggacgcgtgcgggggggagaaagaggaaatacgaagaggagggagaaaaggaggaaaaaacgagcggagagggagagcggagaagggaggagaggagagggtaggaaaggggtaagagcggtaaaaggcgaaagataaggatagtagaagaggggggggcgggggggcgaggacggggggataggggaggggggagtcgggcgacgagggacgggtacgaaaaagggaaaagtagagggaaggggggagtaagttaagaaaaaaagggcgggaagaagaatagggggagaggagcggggagagcggaaggcgggggagggggggagaaagaagagacgagtaaggcggggggaggtagagaggaggaaaaaaaataaagaagcgggggggggcgaaaatacgggacgagacggggaggcggcgtttagcggaggggcggaagggtcgtttaaaaaaaaaggaggaaaataaaagaaaaagagggtagcggcgcgatttttttgaattgataatataa

SEQ ID NO: 25690 - DNA, 647 bp, Artificial Sequence
  chemically treated genomic DNA (Homo sapiens) CpG-island No: 25690
ttatattatcaattcaaaaaaatcgcgccgctaccctctttttcttttattttcctcctttttttttaaacgacccttccgcccctccgctaaacgccgcctccccgtctcgtcccgtattttcgcccccccccgcttctttattttttttcctcctctctacctccccccgccttactcgtctcttctttctccccccctcccccgccttccgctctccccgctcctctccccctattcttcttcccgccctttttttcttaacttactccccccttccctctacttttccctttttcgtacccgtccctcgtcgcccgactcccccctcccctatccccccgtcctcgcccccccgcccccccctcttctactatccttatctttcgccttttaccgctcttacccctttcctaccctctcctctcctcccttctccgctctccctctccgctcgttttttcctccttttctccctcctcttcgtatttcctctttctcccccccgcacgcgtccccttcccccctcctcgctcccccctcgcttatctctataatcacgtcccgtaatctaaacttttatatccgccgactcgccgttcgttcgctatcgccgcccttcgtatcccctaccccttaccctctta

SEQ ID NO: 25691 - DNA, 647 bp, Artificial Sequence
  chemically treated genomic DNA (Homo sapiens) CpG-island No: 25691
ttgtattgttaatttaaaaagatcgcgtcgttgtttttttttttttttgttttttttttttttttttgggcggttttttcgttttttcgttgggcgtcgttttttcgtttcgtttcgtgttttcgttttttttcgtttttttgttttttttttttttttttgttttttttcgttttgttcgttttttttttttttttttttttttcgtttttcgtttttttcgtttttttttttttgttttttttttcgtttttttttttttggtttgttttttttttttttttgtttttttttttttcgtgttcgtttttcgtcgttcggttttttttttttttgttttttcgttttcgttttttcgttttttttttttttgttgtttttgtttttcgttttttgtcgtttttgttttttttttgttttttttttttttttttttttcgtttttttttttcgttcgtttttttttttttttttttttttttttcgtgttttttttttttttttttcgtacgcgtttttttttttttttttcgtttttttttcgtttgtttttgtggttacgtttcgtggtttgggtttttgtattcgtcggttcgtcgttcgttcgttgtcgtcgtttttcgtgttttttgttttttgtttttttg

SEQ ID NO: 25692 - DNA, 647 bp, Artificial Sequence
  chemically treated genomic DNA (Homo sapiens) CpG-island No: 25692
caaaaaaacaaaaaacaaaaaacacgaaaaacgacgacaacgaacgaacgacgaaccgacgaatacaaaaacccaaaccacgaaacgtaaccacaaaaacaaacgaaaaaaaaacgaaaaaaaaaaaaaaaaacgcgtacgaaaaaaaaaaaaaaaaaacacgaaaaaaaaaaaaaaaaaaaaaaaaaaacgaacgaaaaaaaaaaacgaaaaaaaaaaaaaaaaaaaaaacaaaaaaaaaacaaaaacgacaaaaaacgaaaaacaaaaacaacaaaaaaaaaaaaaacgaaaaaacgaaaacgaaaaaacaaaaaaaaaaaaaaccgaacgacgaaaaacgaacacgaaaaaaaaaaaaacaaaaaaaaaaaaaaaacaaaccaaaaaaaaaaaaacgaaaaaaaaaacaaaaaaaaaaaaacgaaaaaaacgaaaaacgaaaaaaaaaaaaaaaaaaaaaaaacgaacaaaacgaaaaaaaacaaaaaaaaaaaaaaaaaacaaaaaaacgaaaaaaaacgaaaacacgaaacgaaacgaaaaaacgacgcccaacgaaaaaacgaaaaaaccgcccaaaaaaaaaaaaaaaaaacaaaaaaaaaaaaaaacaacgacgcgatctttttaaattaacaatacaa

SEQ ID NO: 25693 - DNA, 511 bp, Artificial Sequence
  chemically treated genomic DNA (Homo sapiens) CpG-island No: 25693
ttcgattcgaaatacgttcgaggtatttattttaaaaaacgataaggttcgggcgtttagtagaacggttcggttcgatcgcgcgtagtttgtaggtaggggggtgtgtaggttatcgtttatttcggcgagtagagtcgcggagggcgttacgtcggtgacgttatggttcgagcggggcgggatttttttgtattttcggaagttttcgcgggtagttggggaggaaaacgcggttacgcgttcggggggttcggttcgggaagggtagtgcgcgcgtatgcgttggggcggggcgtttgggatttgcgttttaggtttagcgcgtcgttagtcggagtgttcggcgttcgtcgaaaggtttttgcgtcggtttaggattcgtatttagtacgttgcggagttttagttcgtagtatttttttatttatcgtttttggttgttttttttttgagtttgcggggcggggtcgtttttgttttttataaaaatgtatgtaaaggtatttcg

SEQ ID NO: 25694 - DNA, 511 bp, Artificial Sequence
  chemically treated genomic DNA (Homo sapiens) CpG-island No: 25694
cgaaatacctttacatacatttttataaaaaacaaaaacgaccccgccccgcaaactcaaaaaaaaaacaaccaaaaacgataaataaaaaaatactacgaactaaaactccgcaacgtactaaatacgaatcctaaaccgacgcaaaaacctttcgacgaacgccgaacactccgactaacgacgcgctaaacctaaaacgcaaatcccaaacgccccgccccaacgcatacgcgcgcactacccttcccgaaccgaaccccccgaacgcgtaaccgcgttttcctccccaactacccgcgaaaacttccgaaaatacaaaaaaatcccgccccgctcgaaccataacgtcaccgacgtaacgccctccgcgactctactcgccgaaataaacgataacctacacacccccctacctacaaactacgcgcgatcgaaccgaaccgttctactaaacgcccgaaccttatcgttttttaaaataaatacctcgaacgtatttcgaatcgaa

SEQ ID NO: 25695 - DNA, 511 bp, Artificial Sequence
  chemically treated genomic DNA (Homo sapiens) CpG-island No: 25695
cgaaatatttttatatatatttttgtaaaaaataaaaacgatttcgtttcgtagatttaggagaaaagtagttaggagcggtgggtgggagggtgttgcgagttggggtttcgtagcgtattgggtgcgggttttgaatcggcgtaggggtttttcgacgggcgtcgggtatttcggttggcggcgcgttgggtttggggcgtaggttttaggcgtttcgttttaacgtatgcgcgcgtattgtttttttcgagtcgggtttttcgagcgcgtggtcgcgtttttttttttagttgttcgcgggggttttcgggggtataggaaggtttcgtttcgttcgggttatgacgttatcgacgtggcgtttttcgcggttttgttcgtcggggtgggcggtgatttgtatatttttttgtttgtaagttgcgcgcggtcgagtcgggtcgttttgttgggcgttcggattttgtcgttttttaggataaatgtttcgggcgtatttcgggtcgag

SEQ ID NO: 25696 - DNA, 511 bp, Artificial Sequence
  chemically treated genomic DNA (Homo sapiens) CpG-island No: 25696
ctcgacccgaaatacgcccgaaacatttatcctaaaaaacgacaaaatccgaacgcccaacaaaacgacccgactcgaccgcgcgcaacttacaaacaaaaaaatatacaaatcaccgcccaccccgacgaacaaaaccgcgaaaaacgccacgtcgataacgtcataacccgaacgaaacgaaaccttcctatacccccgaaaacccccgcgaacaactaaaaaaaaaaacgcgaccacgcgctcgaaaaacccgactcgaaaaaaacaatacgcgcgcatacgttaaaacgaaacgcctaaaacctacgccccaaacccaacgcgccgccaaccgaaatacccgacgcccgtcgaaaaacccctacgccgattcaaaacccgcacccaatacgctacgaaaccccaactcgcaacaccctcccacccaccgctcctaactacttttctcctaaatctacgaaacgaaatcgtttttattttttacaaaaatatatataaaaatatttcg

SEQ ID NO: 25697 - DNA, 581 bp, Artificial Sequence
  chemically treated genomic DNA (Homo sapiens) CpG-island No: 25697
aaggtttcggtcgattcgttttcggcgtcgttagggtatatttttattgggcgtcgttttttgtttatcggtttgttttagcggaagtgttttatggagtaggagcgtttgttttcgcgcgggttcggtttggtattatcgttgcggggttcggggtcgtttttaggtagcgggtcgtagttttcgttcgttgagacgttttcgcgtttttgttttgcgtcgttgttgtcgttgttgttgttgttgcggcggtcgaatcggttttagcggaagtggtttatgacgtattttcgggggttttcggttagaggttgttcgtcgttatttttcgggaatatgggagtttcggtcgagaggtcgggtttgtaggttcggatgtatttttgggggaagacgcgagggtatgagggtagttcgtgtttcgtatttcggttcggttgtcgcgttcgttattgcgtttaggttttggtcgttttcgttacgtgtcgaggatatagggtatagtgtcgggcgtgttaagcgtcgaggtttttttatagagtaggtttgtttatttgtttttttggtattcgtgggtattt

SEQ ID NO: 25698 - DNA, 581 bp, Artificial Sequence
  chemically treated genomic DNA (Homo sapiens) CpG-island No: 25698
aaatacccacgaataccaaaaaaacaaataaacaaacctactctataaaaaaacctcgacgcttaacacgcccgacactataccctatatcctcgacacgtaacgaaaacgaccaaaacctaaacgcaataacgaacgcgacaaccgaaccgaaatacgaaacacgaactaccctcataccctcgcgtcttcccccaaaaatacatccgaacctacaaacccgacctctcgaccgaaactcccatattcccgaaaaataacgacgaacaacctctaaccgaaaacccccgaaaatacgtcataaaccacttccgctaaaaccgattcgaccgccgcaacaacaacaacaacgacaacaacgacgcaaaacaaaaacgcgaaaacgtctcaacgaacgaaaactacgacccgctacctaaaaacgaccccgaaccccgcaacgataataccaaaccgaacccgcgcgaaaacaaacgctcctactccataaaacacttccgctaaaacaaaccgataaacaaaaaacgacgcccaataaaaatataccctaacgacgccgaaaacgaatcgaccgaaacctt

SEQ ID NO: 25699 - DNA, 581 bp, Artificial Sequence
  chemically treated genomic DNA (Homo sapiens) CpG-island No: 25699
agatgtttacgagtgttaagaaagtaggtgggtagatttgttttgtagggaggtttcgacgtttgatacgttcgatattgtgttttgtgttttcggtacgtggcgagggcggttagggtttaggcgtagtgacgggcgcggtagtcgggtcggggtgcggggtacgggttgtttttatgttttcgcgtttttttttaggagtgtattcgggtttgtaagttcgatttttcggtcgagatttttatgttttcgggaaatggcgacgagtagtttttgatcgagaattttcggaagtacgttatgggttattttcgttgggatcgattcggtcgtcgtaatagtagtagtagcggtagtagcggcgtagggtagaagcgcgaggacgttttagcgggcgaagattgcggttcgttgtttgagggcggtttcgagtttcgtagcgatggtgttaagtcgggttcgcgcgagggtaagcgtttttattttatggagtattttcgttggggtaagtcggtgggtaagaagcggcgtttagtgaaggtgtattttaacggcgtcgaggacgagtcggtcgaggtttt

SEQ ID NO: 25700 - DNA, 581 bp, Artificial Sequence
  chemically treated genomic DNA (Homo sapiens) CpG-island No: 25700
aaaacctcgaccgactcgtcctcgacgccgttaaaatacaccttcactaaacgccgcttcttacccaccgacttaccccaacgaaaatactccataaaataaaaacgcttaccctcgcgcgaacccgacttaacaccatcgctacgaaactcgaaaccgccctcaaacaacgaaccgcaatcttcgcccgctaaaacgtcctcgcgcttctaccctacgccgctactaccgctactactactattacgacgaccgaatcgatcccaacgaaaataacccataacgtacttccgaaaattctcgatcaaaaactactcgtcgccatttcccgaaaacataaaaatctcgaccgaaaaatcgaacttacaaacccgaatacactcctaaaaaaaaacgcgaaaacataaaaacaacccgtaccccgcaccccgacccgactaccgcgcccgtcactacgcctaaaccctaaccgccctcgccacgtaccgaaaacacaaaacacaatatcgaacgtatcaaacgtcgaaacctccctacaaaacaaatctacccacctactttcttaacactcgtaaacatct

SEQ ID NO: 25701 - DNA, 594 bp, Artificial Sequence
  chemically treated genomic DNA (Homo sapiens) CpG-island No: 25701
ggaacggatagttcggcgtttttcgaagcggcgcgtagttgtcggggcgagggggagaaagggagagagggagggggagggcgggcgaacgggagagttagagatttttcggcgttgagcggcggcggttcgggtagttttacgtttttgtttcgcgcgtcgttcgcgttatgaagtatatttcggttttcgaggacgggtcgtggaagatcgtgtgcgtgaaggagttgaacggttttaagaagtttaagcggaaaggtaaggagttggcgcgcgtcgaattagttataaaatttttcgattggatttggaagtattcgaatttcgcgtcgtagttattaataggttgcgggataggatttatcggttgtagggatttcggtatcggtagtcgtgttagttttagtggcgtcggtcgtttttttaagagggttacggatatagtcggggagcgcgggggttttcgggcgttcgaggttttcgacgcgcggaaacgtgtttcgttttagagttagtggggttaggattttttacgtcgtcgtcgtcgtcgttttttgcgttttagagttaggtatttgggggttagaggatagt

SEQ ID NO: 25702 - DNA, 594 bp, Artificial Sequence
  chemically treated genomic DNA (Homo sapiens) CpG-island No: 25702
actatcctctaacccccaaatacctaactctaaaacgcaaaaaacgacgacgacgacgacgtaaaaaatcctaaccccactaactctaaaacgaaacacgtttccgcgcgtcgaaaacctcgaacgcccgaaaacccccgcgctccccgactatatccgtaaccctcttaaaaaaacgaccgacgccactaaaactaacacgactaccgataccgaaatccctacaaccgataaatcctatcccgcaacctattaataactacgacgcgaaattcgaatacttccaaatccaatcgaaaaattttataactaattcgacgcgcgccaactccttacctttccgcttaaacttcttaaaaccgttcaactccttcacgcacacgatcttccacgacccgtcctcgaaaaccgaaatatacttcataacgcgaacgacgcgcgaaacaaaaacgtaaaactacccgaaccgccgccgctcaacgccgaaaaatctctaactctcccgttcgcccgccctccccctccctctctccctttctccccctcgccccgacaactacgcgccgcttcgaaaaacgccgaactatccgttcc

SEQ ID NO: 25703 - DNA, 594 bp, Artificial Sequence
  chemically treated genomic DNA (Homo sapiens) CpG-island No: 25703
gttgttttttggtttttaggtgtttggttttggggcgtaggaggcggcggcggcggcggcgtggggagttttggttttattggttttagggcgaagtacgttttcgcgcgtcggagatttcgggcgttcgagagttttcgcgtttttcggttgtgttcgtgatttttttgggggaacggtcggcgttattgggattggtacggttatcggtatcgggatttttgtagtcgatgagttttgtttcgtagtttgttggtggttacggcgcggggttcgggtgtttttaagtttagtcggaaagttttatagttagttcggcgcgcgttagttttttgttttttcgtttgagttttttaaggtcgtttagtttttttacgtatacggttttttacggttcgttttcgaggatcgggatgtgttttatgacgcgggcggcgcgcgaggtaggggcgtggggttgttcgggtcgtcgtcgtttagcgtcgaggagtttttggttttttcgttcgttcgttttttttttttttttttttttttttttttttcgtttcggtagttgcgcgtcgtttcgggaagcgtcgggttgttcgtttt

SEQ ID NO: 25704 - DNA, 594 bp, Artificial Sequence
  chemically treated genomic DNA (Homo sapiens) CpG-island No: 25704
aaaacgaacaacccgacgcttcccgaaacgacgcgcaactaccgaaacgaaaaaaaaaaaaaaaaaaaaaaaaaaaaaaaacgaacgaacgaaaaaaccaaaaactcctcgacgctaaacgacgacgacccgaacaaccccacgcccctacctcgcgcgccgcccgcgtcataaaacacatcccgatcctcgaaaacgaaccgtaaaaaaccgtatacgtaaaaaaactaaacgaccttaaaaaactcaaacgaaaaaacaaaaaactaacgcgcgccgaactaactataaaactttccgactaaacttaaaaacacccgaaccccgcgccgtaaccaccaacaaactacgaaacaaaactcatcgactacaaaaatcccgataccgataaccgtaccaatcccaataacgccgaccgttcccccaaaaaaatcacgaacacaaccgaaaaacgcgaaaactctcgaacgcccgaaatctccgacgcgcgaaaacgtacttcgccctaaaaccaataaaaccaaaactccccacgccgccgccgccgccgcctcctacgccccaaaaccaaacacctaaaaaccaaaaaacaac

SEQ ID NO: 25705 - DNA, 698 bp, Artificial Sequence
  chemically treated genomic DNA (Homo sapiens) CpG-island No: 25705
gtttgcgcggtatttttaggtaatacgggcggtgcggcggtagtattcgggggtttacggcggcgcggcgtttaagaggttttagtagtcgaagggaaatcggcgcgtttttcgttcgtttaggcgttagttgatgggttgtttgtcgaggaggtcgtagtagtcgtcgcgcgaatatggcggtcgaaatttattttaggtcgtagagtagtcgttcggtgttgttgagtaagatcgaggggtattaggacgtcgttacggcgcgttgtttatttttaaggaggacggcgtgattacggttagcgaggataggtagggttcgggcgtacgcggtttcgaatttcgcgacgacggggtgtgggggcggtggggttcgcggtttcggttttttttgcgtgagggggttttttcggtagtacggttttatttttattttgcgttttttagtttcgtcgggttttcgtttttttttcgtcggttttttagtttcgatttgtatttttttagtttgggatttcggtttcgtcgcgtttttttagttcggattttttgttttatcgcgtttttttagttcgggaatttcgttttatcgcgtcgtttaagttcgggatttttgttttaacgtgtttttttagtttaggatttttgttttagtgcgttttatcgcgttttttttagtttatttcgttttttttgtt

SEQ ID NO: 25706 - DNA, 698 bp, Artificial Sequence
  chemically treated genomic DNA (Homo sapiens) CpG-island No: 25706
aacaaaaaaaacgaaataaactaaaaaaaacgcgataaaacgcactaaaacaaaaatcctaaactaaaaaaacacgttaaaacaaaaatcccgaacttaaacgacgcgataaaacgaaattcccgaactaaaaaaacgcgataaaacaaaaaatccgaactaaaaaaacgcgacgaaaccgaaatcccaaactaaaaaaatacaaatcgaaactaaaaaaccgacgaaaaaaaaacgaaaacccgacgaaactaaaaaacgcaaaataaaaataaaaccgtactaccgaaaaaaccccctcacgcaaaaaaaaccgaaaccgcgaaccccaccgcccccacaccccgtcgtcgcgaaattcgaaaccgcgtacgcccgaaccctacctatcctcgctaaccgtaatcacgccgtcctccttaaaaataaacaacgcgccgtaacgacgtcctaatacccctcgatcttactcaacaacaccgaacgactactctacgacctaaaataaatttcgaccgccatattcgcgcgacgactactacgacctcctcgacaaacaacccatcaactaacgcctaaacgaacgaaaaacgcgccgatttcccttcgactactaaaacctcttaaacgccgcgccgccgtaaacccccgaatactaccgccgcaccgcccgtattacctaaaaataccgcgcaaac

SEQ ID NO: 25707 - DNA, 698 bp, Artificial Sequence
  chemically treated genomic DNA (Homo sapiens) CpG-island No: 25707
agtaggaggggcgaggtgggttgggaggggcgcggtagggcgtattggaataggggttttgggttggaaagatacgttggaataagggtttcgggtttgggcggcgcggtgagacggagttttcgggttggaggggcgcggtgggataggggattcgggttggaggggcgcggcgagatcggggttttaggttggaaaggtgtaagtcgaggttggaggatcggcgggagggaaacgggaattcggcggagttaaggggcgtagagtgggggtggggtcgtgttgtcgggggagtttttttacgtaggaaggatcggggtcgcggattttatcgtttttatatttcgtcgtcgcggagttcgggatcgcgtgcgttcgggttttatttgttttcgttggtcgtgattacgtcgttttttttggggatgagtagcgcgtcgtgacggcgttttggtgtttttcgattttgtttagtagtatcgggcggttgttttgcggtttggagtggatttcggtcgttatgttcgcgcggcgattgttgcggttttttcggtaggtagtttattagttgacgtttgggcgggcgggggacgcgtcggttttttttcggttgttggggttttttgggcgtcgcgtcgtcgtaagttttcgagtgttgtcgtcgtatcgttcgtattgtttggggatgtcgcgtaagt

SEQ ID NO: 25708 - DNA, 698 bp, Artificial Sequence
  chemically treated genomic DNA (Homo sapiens) CpG-island No: 25708
acttacgcgacatccccaaacaatacgaacgatacgacgacaacactcgaaaacttacgacgacgcgacgcccaaaaaaccccaacaaccgaaaaaaaaccgacgcgtcccccgcccgcccaaacgtcaactaataaactacctaccgaaaaaaccgcaacaatcgccgcgcgaacataacgaccgaaatccactccaaaccgcaaaacaaccgcccgatactactaaacaaaatcgaaaaacaccaaaacgccgtcacgacgcgctactcatccccaaaaaaaacgacgtaatcacgaccaacgaaaacaaataaaacccgaacgcacgcgatcccgaactccgcgacgacgaaatataaaaacgataaaatccgcgaccccgatccttcctacgtaaaaaaactcccccgacaacacgaccccacccccactctacgccccttaactccgccgaattcccgtttccctcccgccgatcctccaacctcgacttacacctttccaacctaaaaccccgatctcgccgcgcccctccaacccgaatcccctatcccaccgcgcccctccaacccgaaaactccgtctcaccgcgccgcccaaacccgaaacccttattccaacgtatctttccaacccaaaacccctattccaatacgccctaccgcgcccctcccaacccacctcgcccctcctact

SEQ ID NO: 25709 - DNA, 593 bp, Artificial Sequence
  chemically treated genomic DNA (Homo sapiens) CpG-island No: 25709
cgcgtttttttagttcgggatttttgttttattgcgttcgtttatttcgggagtttcgttttatcgcgtttttttagttcggattttttgttttattgcgtttttttagttcgggaattttgttttatcgcgttatttaagttcgggatttcggttttagtgcgttttaacgtatttttttagtttaggatttttgttttatcgcgtttttttagcgcgggaattttgttttatcgcgttgtttaagtcggggatttttgttttagtgcgtattaacgcgttttttttagtttatcgcgtttttttaattagggaatttcgatttgcggtgtcgtattagtttgggattttcgtttcggtttttttttttggcggggtttagtttggtattcggaaggtgttttttggttttttcgggttagttttaaatcgttttttttggaagcgtggaggatcggcggttggttattgcggattttggtgttcggggtttgtttttttgcgaggaattttagtcgttttcgttttttttttttttttgtatttagggattttacgttacgttaggtttttagattagttatttttgttat

SEQ ID NO: 25710 - DNA, 593 bp, Artificial Sequence
  chemically treated genomic DNA (Homo sapiens) CpG-island No: 25710
ataacaaaaataactaatctaaaaacctaacgtaacgtaaaatccctaaatacaaaaaaaaaaaaaaaacgaaaacgactaaaattcctcgcaaaaaaacaaaccccgaacaccaaaatccgcaataaccaaccgccgatcctccacgcttccaaaaaaaacgatttaaaactaacccgaaaaaaccaaaaaacaccttccgaataccaaactaaaccccgccaaaaaaaaaaaccgaaacgaaaatcccaaactaatacgacaccgcaaatcgaaattccctaattaaaaaaacgcgataaactaaaaaaaacgcgttaatacgcactaaaacaaaaatccccgacttaaacaacgcgataaaacaaaattcccgcgctaaaaaaacgcgataaaacaaaaatcctaaactaaaaaaatacgttaaaacgcactaaaaccgaaatcccgaacttaaataacgcgataaaacaaaattcccgaactaaaaaaacgcaataaaacaaaaaatccgaactaaaaaaacgcgataaaacgaaactcccgaaataaacgaacgcaataaaacaaaaatcccgaactaaaaaaacgcg

SEQ ID NO: 25711 - DNA, 593 bp, Artificial Sequence
  chemically treated genomic DNA (Homo sapiens) CpG-island No: 25711
gtggtaaaaataattgatttagaggtttggcgtggcgtgaaatttttgagtatagggggaggaagagagcgaaggcggttggagtttttcgtaaagaagtaagtttcgggtattagggttcgtagtgattagtcgtcggttttttacgtttttagaggagacgatttggaattgattcgggagggttaagaaatatttttcgagtattaggttaaatttcgttagggagagagatcgggacgaaggttttaggttagtgcgatatcgtaggtcggggttttttggttggaggagcgcggtgggttgggaggggcgcgttggtgcgtattggaataggggttttcggtttgagtagcgcggtgagatagagttttcgcgttggaggggcgcggtgagatagaggttttgggttggagaggtgcgttggggcgtattggaatcggggtttcgggtttgagtggcgcggtgggatagagttttcgggttggaggggcgtagtgggatagaagattcgggttagaggggcgcggtgggacggagttttcgggatggacgggcgtagtgggataagggtttcggattggaggggcgcg

SEQ ID NO: 25712 - DNA, 593 bp, Artificial Sequence
  chemically treated genomic DNA (Homo sapiens) CpG-island No: 25712
cgcgcccctccaatccgaaacccttatcccactacgcccgtccatcccgaaaactccgtcccaccgcgcccctctaacccgaatcttctatcccactacgcccctccaacccgaaaactctatcccaccgcgccactcaaacccgaaaccccgattccaatacgccccaacgcacctctccaacccaaaacctctatctcaccgcgcccctccaacgcgaaaactctatctcaccgcgctactcaaaccgaaaacccctattccaatacgcaccaacgcgcccctcccaacccaccgcgctcctccaaccaaaaaaccccgacctacgatatcgcactaacctaaaaccttcgtcccgatctctctccctaacgaaatttaacctaatactcgaaaaatatttcttaaccctcccgaatcaattccaaatcgtctcctctaaaaacgtaaaaaaccgacgactaatcactacgaaccctaatacccgaaacttacttctttacgaaaaactccaaccgccttcgctctcttcctccccctatactcaaaaatttcacgccacgccaaacctctaaatcaattatttttaccac

SEQ ID NO: 25713 - DNA, 1058 bp, Artificial Sequence
  chemically treated genomic DNA (Homo sapiens) CpG-island No: 25713
tagggacgcggtacgagttttggtatttttttcgttattttatatatttttattcgggagatttacgtgtagttgggttcgggttggcgtcgtatttcggggtttgcgcgttttttcggcgcgtttcgggcgtagttttacgatacggatttttggcggggcggtattcgagaagtcgtaggcggagagggggcgttttggaggtcgggcgcggggacgttgcggttcgcggttatataaaggaggcggcgggaaggcggggtaaggcgggtcgggggcgggggcggtaggaaggggcgggggtcgcgcggcgtcgtcgataaagttttcgtcgtcgcggtagttagtttgcgttgtggggttgttcgggttgcgcggcgtttgtaggcgttatcgttgttttttttcggttgtgatttttttcgtcgtcgtcgtttggttgcgtttttcgatttttcgcgtcgtcgagattaggttttcgtttcggttgcggtcgtatcgtttttcgcggtcgttttttggggatttagcgagcgcggtgagtataggttgcgcggtgagtttcgggcgcggtcggcgttgtttcggcgggggacgttttttcgggcgttcgcgtttatcggttttgttttttgattttgcgtcggtcgggaagttgcggggttagcgggattttggggcgtcgacgtcggggagtagagaatttttttagtttttcgcgggtcgttttggtcggggttgggtgttcgtcgggtatttcggtttcgttcgtcgggagtttcgagcgggattcgggtagggtaaggcggggcgtttcggggtggcgtttagtgatattcgtagttgggagtatcggggtcggcgtggtttttgttcggttattcgagtcggttttgattttgaatttgaggtttttagttgttcgtcggtaatttttatttcggatttaggttgcgcgtcgtcggatggggagagattggcgtatttttatttgttatttttgtttgggtagaggaggtgacgcgcggtgtggggaaagtttttaatttggtttttgg

SEQ ID NO: 25714 - DNA, 1058 bp, Artificial Sequence
  chemically treated genomic DNA (Homo sapiens) CpG-island No: 25714
ccaaaaaccaaattaaaaactttccccacaccgcgcgtcacctcctctacccaaacaaaaataacaaataaaaatacgccaatctctccccatccgacgacgcgcaacctaaatccgaaataaaaattaccgacgaacaactaaaaacctcaaattcaaaatcaaaaccgactcgaataaccgaacaaaaaccacgccgaccccgatactcccaactacgaatatcactaaacgccaccccgaaacgccccgccttaccctacccgaatcccgctcgaaactcccgacgaacgaaaccgaaatacccgacgaacacccaaccccgaccaaaacgacccgcgaaaaactaaaaaaattctctactccccgacgtcgacgccccaaaatcccgctaaccccgcaacttcccgaccgacgcaaaatcaaaaaacaaaaccgataaacgcgaacgcccgaaaaaacgtcccccgccgaaacaacgccgaccgcgcccgaaactcaccgcgcaacctatactcaccgcgctcgctaaatccccaaaaaacgaccgcgaaaaacgatacgaccgcaaccgaaacgaaaacctaatctcgacgacgcgaaaaatcgaaaaacgcaaccaaacgacgacgacgaaaaaaatcacaaccgaaaaaaaacaacgataacgcctacaaacgccgcgcaacccgaacaaccccacaacgcaaactaactaccgcgacgacgaaaactttatcgacgacgccgcgcgacccccgccccttcctaccgcccccgcccccgacccgccttaccccgccttcccgccgcctcctttatataaccgcgaaccgcaacgtccccgcgcccgacctccaaaacgccccctctccgcctacgacttctcgaataccgccccgccaaaaatccgtatcgtaaaactacgcccgaaacgcgccgaaaaaacgcgcaaaccccgaaatacgacgccaacccgaacccaactacacgtaaatctcccgaataaaaatatataaaataacgaaaaaaataccaaaactcgtaccgcgtcccta

SEQ ID NO: 25715 - DNA, 1058 bp, Artificial Sequence
  chemically treated genomic DNA (Homo sapiens) CpG-island No: 25715
ttagaggttaagttaaaggttttttttatatcgcgcgttattttttttgtttaggtagaggtaataagtaagagtgcgttagtttttttttattcggcggcgcgtagtttaagttcggggtaggggttgtcggcgagtagttggaaattttaggtttagggttagggtcggttcggatggtcgggtaggagttacgtcggtttcggtgtttttagttgcgggtattattggacgttatttcggggcgtttcgttttgttttgttcgggtttcgttcggggttttcggcgggcgggatcgggatgttcggcgagtatttagtttcggttaaggcggttcgcgggaggttgagaaagttttttgtttttcgacgtcggcgttttagggtttcgttggtttcgtagtttttcggtcggcgtaaggttagggagtagggtcggtgggcgcggacgttcggggaagcgtttttcgtcgaggtagcgtcggtcgcgttcgggatttatcgcgtagtttgtatttatcgcgttcgttggatttttagggggcggtcgcggagggcggtgcggtcgtaatcggagcgggagtttggtttcggcggcgcggggagtcggaggacgtagttaagcggcggcggcgaggagggttatagtcggaaagaggtagcggtggcgtttgtagacgtcgcgtagttcgggtagttttatagcgtaagttggttgtcgcggcggcgggggttttatcggcggcgtcgcgcggttttcgtttttttttgtcgttttcgttttcggttcgttttgtttcgttttttcgtcgttttttttgtgtggtcgcgggtcgtagcgttttcgcgttcggtttttaggacgtttttttttcgtttgcgatttttcggatgtcgtttcgttaggggttcgtgtcgtggggttgcgttcggaacgcgtcggggagacgcgtagatttcgaggtgcggcgttagttcgggtttagttgtacgtgggtttttcggatgggggtgtgtgaggtggcggggggaatattagggttcgtatcgcgtttttg

SEQ ID NO: 25716 - DNA, 1058 bp, Artificial Sequence
  chemically treated genomic DNA (Homo sapiens) CpG-island No: 25716
caaaaacgcgatacgaaccctaatattccccccgccacctcacacacccccatccgaaaaacccacgtacaactaaacccgaactaacgccgcacctcgaaatctacgcgtctccccgacgcgttccgaacgcaaccccacgacacgaacccctaacgaaacgacatccgaaaaatcgcaaacgaaaaaaaaacgtcctaaaaaccgaacgcgaaaacgctacgacccgcgaccacacaaaaaaaacgacgaaaaaacgaaacaaaacgaaccgaaaacgaaaacgacaaaaaaaaacgaaaaccgcgcgacgccgccgataaaacccccgccgccgcgacaaccaacttacgctataaaactacccgaactacgcgacgtctacaaacgccaccgctacctctttccgactataaccctcctcgccgccgccgcttaactacgtcctccgactccccgcgccgccgaaaccaaactcccgctccgattacgaccgcaccgccctccgcgaccgccccctaaaaatccaacgaacgcgataaatacaaactacgcgataaatcccgaacgcgaccgacgctacctcgacgaaaaacgcttccccgaacgtccgcgcccaccgaccctactccctaaccttacgccgaccgaaaaactacgaaaccaacgaaaccctaaaacgccgacgtcgaaaaacaaaaaactttctcaacctcccgcgaaccgccttaaccgaaactaaatactcgccgaacatcccgatcccgcccgccgaaaaccccgaacgaaacccgaacaaaacaaaacgaaacgccccgaaataacgtccaataatacccgcaactaaaaacaccgaaaccgacgtaactcctacccgaccatccgaaccgaccctaaccctaaacctaaaatttccaactactcgccgacaacccctaccccgaacttaaactacgcgccgccgaataaaaaaaaactaacgcactcttacttattacctctacctaaacaaaaaaaataacgcgcgatataaaaaaaacctttaacttaacctctaa

SEQ ID NO: 25717 - DNA, 634 bp, Artificial Sequence
  chemically treated genomic DNA (Homo sapiens) CpG-island No: 25717
gatgcgcgtttcgttcgtagtttttttttttttcgcgtatattttttatagatcgttattcgttatagtttcgttagttttcgtttttttttgtttagtcgtttttattttaatcgaattaaaggcggttcgtttcgatataatttttttttcgcgttttcggttcgggattttggttttttttttttttttgtttcgggttcgttagtagtcggttcggcggcgagggattaggacgcggttggagcggcgtcgggagacgaggggttgagagacggcggcggtcgaaagcggagagatgttgggcgtggcggtcgggatgatttataggttacgtatcgcgcggttttcgttacgttcgtttcgtagttttcggcgtgtttcgggtcgggtcgggtcgggtttggcgcgggcgggcggtcgggttttttttacggtttttttcggtcggtcggagtttcgatttttagcgttcgggtggcggcgtggttgcgttcgggttcgcggaggagacggttgttgtttattttcgggtgttcgcggtggtattagacgtgacgacgtttcgttgtttcgagagttttataagataaattagtatttgtcgagttaattatttattttttagtagtag

SEQ ID NO: 25718 - DNA, 634 bp, Artificial Sequence
  chemically treated genomic DNA (Homo sapiens) CpG-island No: 25718
ctactactaaaaaataaataattaactcgacaaatactaatttatcttataaaactctcgaaacaacgaaacgtcgtcacgtctaataccaccgcgaacacccgaaaataaacaacaaccgtctcctccgcgaacccgaacgcaaccacgccgccacccgaacgctaaaaatcgaaactccgaccgaccgaaaaaaaccgtaaaaaaaacccgaccgcccgcccgcgccaaacccgacccgacccgacccgaaacacgccgaaaactacgaaacgaacgtaacgaaaaccgcgcgatacgtaacctataaatcatcccgaccgccacgcccaacatctctccgctttcgaccgccgccgtctctcaacccctcgtctcccgacgccgctccaaccgcgtcctaatccctcgccgccgaaccgactactaacgaacccgaaacaaaaaaaaaaaaaaaaccaaaatcccgaaccgaaaacgcgaaaaaaaaattatatcgaaacgaaccgcctttaattcgattaaaataaaaacgactaaacaaaaaaaaacgaaaactaacgaaactataacgaataacgatctataaaaaatatacgcgaaaaaaaaaaaaactacgaacgaaacgcgcatc

SEQ ID NO: 25719 - DNA, 634 bp, Artificial Sequence
  chemically treated genomic DNA (Homo sapiens) CpG-island No: 25719
ttattgttagaagataaatgattagttcggtaaatattgatttgttttatggaattttcggagtagcggggcgtcgttacgtttgatgttatcgcggatattcgggagtgaatagtagtcgtttttttcgcgggttcggacgtagttacgtcgttattcgagcgttgggggtcggggtttcggtcgatcgggggaggtcgtagggaaagttcggtcgttcgttcgcgttaggttcggttcggttcggttcgaagtacgtcgggagttgcggggcggacgtggcgggggtcgcgcggtgcgtaatttgtgggttatttcggtcgttacgtttagtattttttcgttttcggtcgtcgtcgttttttagtttttcgtttttcggcgtcgttttagtcgcgttttagtttttcgtcgtcgggtcggttattggcgggttcggagtaggaaggggaggaaggttagggtttcgggtcgggggcgcgggaggggggttatgtcgaggcgggtcgtttttaattcggttggggtgggagcggttgggtaaggaggggcggggattggcggggttgtggcgaatggcgatttgtgagaggtatgcgcggaggaggggggggttgcgggcggggcgcgtatt

SEQ ID NO: 25720 - DNA, 634 bp, Artificial Sequence
  chemically treated genomic DNA (Homo sapiens) CpG-island No: 25720
aatacgcgccccgcccgcaacccccccctcctccgcgcatacctctcacaaatcgccattcgccacaaccccgccaatccccgcccctccttacccaaccgctcccaccccaaccgaattaaaaacgacccgcctcgacataacccccctcccgcgcccccgacccgaaaccctaaccttcctccccttcctactccgaacccgccaataaccgacccgacgacgaaaaactaaaacgcgactaaaacgacgccgaaaaacgaaaaactaaaaaacgacgacgaccgaaaacgaaaaaatactaaacgtaacgaccgaaataacccacaaattacgcaccgcgcgacccccgccacgtccgccccgcaactcccgacgtacttcgaaccgaaccgaaccgaacctaacgcgaacgaacgaccgaactttccctacgacctcccccgatcgaccgaaaccccgacccccaacgctcgaataacgacgtaactacgtccgaacccgcgaaaaaaacgactactattcactcccgaatatccgcgataacatcaaacgtaacgacgccccgctactccgaaaattccataaaacaaatcaatatttaccgaactaatcatttatcttctaacaataa

SEQ ID NO: 25721 - DNA, 674 bp, Artificial Sequence
  chemically treated genomic DNA (Homo sapiens) CpG-island No: 25721
tttcgttcgtttcgggtattattgttagttttcgtttagcgcgattcgtatttagaattcgtttttttcgattttacggagtatcgggtggagttcgtttgttttttttttttcgtttatgagttatttttttaatttttttatttgaacggtcgcgagatgattgtcggttatcgatatcgaggattcgttaggtgttttaatttcggaatttgtttcgtttggtttgggggtggagtcggtgggtaggcggttcgttttgtcgttattggtttgcgagatttcgttttttcggcgcggtgattggtttgtgtagttgtcgatatcgtgtgattcgcgcgaacgagtttttggcggttttagttattggtttcgcggatggagtgaggatagtgagattttagagttagttaatggtcggtatcgcggagttcggaggcggggaagcgtgagacggttacggcgtgagggggcgggtatagacggatggtcgtttcgttttgtagcgcggagtcgttttggtaattgcggtttcggtagatttttagtgagagtttgtttgtgcgggggagagtgtcgcgtcggtcgtcgttttaggatttttattttaaatgtgatttgtgtagtaatcgtagtttttaaattcgggaagaagagagtatagatgagtttta

SEQ ID NO: 25722 - DNA, 674 bp, Artificial Sequence
  chemically treated genomic DNA (Homo sapiens) CpG-island No: 25722
taaaactcatctatactctcttcttcccgaatttaaaaactacgattactacacaaatcacatttaaaataaaaatcctaaaacgacgaccgacgcgacactctcccccgcacaaacaaactctcactaaaaatctaccgaaaccgcaattaccaaaacgactccgcgctacaaaacgaaacgaccatccgtctatacccgccccctcacgccgtaaccgtctcacgcttccccgcctccgaactccgcgataccgaccattaactaactctaaaatctcactatcctcactccatccgcgaaaccaataactaaaaccgccaaaaactcgttcgcgcgaatcacacgatatcgacaactacacaaaccaatcaccgcgccgaaaaaacgaaatctcgcaaaccaataacgacaaaacgaaccgcctacccaccgactccacccccaaaccaaacgaaacaaattccgaaattaaaacacctaacgaatcctcgatatcgataaccgacaatcatctcgcgaccgttcaaataaaaaaattaaaaaaataactcataaacgaaaaaaaaaaaacaaacgaactccacccgatactccgtaaaatcgaaaaaaacgaattctaaatacgaatcgcgctaaacgaaaactaacaataatacccgaaacgaacgaaa

SEQ ID NO: 25723 - DNA, 674 bp, Artificial Sequence
  chemically treated genomic DNA (Homo sapiens) CpG-island No: 25723
taagatttatttatattttttttttttcgggtttgggaattgcggttgttatataggttatatttgaaataaaagttttgggacggcggtcggcgcgatattttttttcgtataggtaggtttttattgggaatttgtcgggatcgtagttgttaaggcgatttcgcgttgtagggcgaggcggttattcgtttgtgttcgtttttttacgtcgtggtcgttttacgttttttcgttttcgggtttcgcggtgtcgattattggttggttttgaggttttattatttttattttattcgcggagttaatggttgggatcgttaggagttcgttcgcgcgagttatacgatgtcggtaattgtatagattaattatcgcgtcgagaaggcgggatttcgtaggttaataacgataggacgggtcgtttgtttatcggttttatttttaagttaggcgaggtaggtttcgaggttggaatatttggcgagttttcggtgtcggtggtcggtagttatttcgcggtcgtttaggtgagggggttggaggagtggtttatgagcgaggaagggggagtaggcgggttttattcggtgtttcgtgagatcgaggggagcgggttttgggtgcggatcgcgttgggcgggagttggtagtggtattcgagacgggcggaa

SEQ ID NO: 25724 - DNA, 674 bp, Artificial Sequence
  chemically treated genomic DNA (Homo sapiens) CpG-island No: 25724
ttccgcccgtctcgaataccactaccaactcccgcccaacgcgatccgcacccaaaacccgctcccctcgatctcacgaaacaccgaataaaacccgcctactcccccttcctcgctcataaaccactcctccaaccccctcacctaaacgaccgcgaaataactaccgaccaccgacaccgaaaactcgccaaatattccaacctcgaaacctacctcgcctaacttaaaaataaaaccgataaacaaacgacccgtcctatcgttattaacctacgaaatcccgccttctcgacgcgataattaatctatacaattaccgacatcgtataactcgcgcgaacgaactcctaacgatcccaaccattaactccgcgaataaaataaaaataataaaacctcaaaaccaaccaataatcgacaccgcgaaacccgaaaacgaaaaaacgtaaaacgaccacgacgtaaaaaaacgaacacaaacgaataaccgcctcgccctacaacgcgaaatcgccttaacaactacgatcccgacaaattcccaataaaaacctacctatacgaaaaaaaatatcgcgccgaccgccgtcccaaaacttttatttcaaatataacctatataacaaccgcaattcccaaacccgaaaaaaaaaaaatataaataaatctta

SEQ ID NO: 25725 - DNA, 511 bp, Artificial Sequence
  chemically treated genomic DNA (Homo sapiens) CpG-island No: 25725
gcgtttgtcgttttttttgggtggttagtgcgcgggttgatatttatttagtcggggaaggtgaggcgagtagaggttggtgcggaatttgtcgttttagtagttcggcggttaagttagggtcggtagataaaagaggtcgttcgcgtaggaaggtacggcggacgcggcggattttatagtggcggcgacgggggtagtcgttcgtggttttgtgcggggtttggcgtgttgcgggtggtttttgggcgtcgattcgagaagagattgttcgcggcggtatgacggcggcgggcgttgtagtaagaggacggtatttttttcgagtatatcgttatttcgagttgcgaggcgtcgtgttcgtgtggttgtagtgtatcgttattagtaggatttatacggtggggcgtatttcgagggtcgggagtttttggttatcgagttgttcgataattttggcgtttatgagtttggtaagcgttgtttttgatattttgggtatttcggaggg

SEQ ID NO: 25726 - DNA, 511 bp, Artificial Sequence
  chemically treated genomic DNA (Homo sapiens) CpG-island No: 25726
ccctccgaaatacccaaaatatcaaaaacaacgcttaccaaactcataaacgccaaaattatcgaacaactcgataaccaaaaactcccgaccctcgaaatacgccccaccgtataaatcctactaataacgatacactacaaccacacgaacacgacgcctcgcaactcgaaataacgatatactcgaaaaaaataccgtcctcttactacaacgcccgccgccgtcataccgccgcgaacaatctcttctcgaatcgacgcccaaaaaccacccgcaacacgccaaaccccgcacaaaaccacgaacgactacccccgtcgccgccactataaaatccgccgcgtccgccgtaccttcctacgcgaacgacctcttttatctaccgaccctaacttaaccgccgaactactaaaacgacaaattccgcaccaacctctactcgcctcaccttccccgactaaataaatatcaacccgcgcactaaccacccaaaaaaaacgacaaacgc

SEQ ID NO: 25727 - DNA, 511 bp, Artificial Sequence
  chemically treated genomic DNA (Homo sapiens) CpG-island No: 25727
tttttcgggatgtttagggtgttaggggtagcgtttattaggtttatggacgttagggttgtcggatagttcgatgattaggagttttcggttttcgaagtgcgttttatcgtgtaaattttgttgatggcggtgtattgtagttatacggatacgacgtttcgtagttcggggtagcggtgtattcgaaggagatgtcgtttttttgttgtagcgttcgtcgtcgttatgtcgtcgcgggtagttttttttcgggtcggcgtttaggagttattcgtagtacgttaggtttcgtatagagttacgagcggttgttttcgtcgtcgttattatgaggttcgtcgcgttcgtcgtgtttttttacgcgggcggttttttttgtttgtcggttttggtttagtcgtcgggttgttggggcggtaagtttcgtattagtttttattcgttttatttttttcggttgaatgagtgttagttcgcgtattggttatttagaggagacggtaagcgt

SEQ ID NO: 25728 - DNA, 511 bp, Artificial Sequence
  chemically treated genomic DNA (Homo sapiens) CpG-island No: 25728
acgcttaccgtctcctctaaataaccaatacgcgaactaacactcattcaaccgaaaaaaataaaacgaataaaaactaatacgaaacttaccgccccaacaacccgacgactaaaccaaaaccgacaaacaaaaaaaaccgcccgcgtaaaaaaacacgacgaacgcgacgaacctcataataacgacgacgaaaacaaccgctcgtaactctatacgaaacctaacgtactacgaataactcctaaacgccgacccgaaaaaaaactacccgcgacgacataacgacgacgaacgctacaacaaaaaaacgacatctccttcgaatacaccgctaccccgaactacgaaacgtcgtatccgtataactacaatacaccgccatcaacaaaatttacacgataaaacgcacttcgaaaaccgaaaactcctaatcatcgaactatccgacaaccctaacgtccataaacctaataaacgctacccctaacaccctaaacatcccgaaaaa

SEQ ID NO: 25729 - DNA, 639 bp, Artificial Sequence
  chemically treated genomic DNA (Homo sapiens) CpG-island No: 25729
cgacggggcgcgtttgggtcgtgagtttgggtttttcgttttatcgtttgagttttagatttttttattttagtcggcgttagtaggatttcggtggtcgaggtcggcgtaggggtcgacgtcgacgttttgttagttttgtcgtttttgatgttagttacggcgggttggaagttaatttttattatggttgcgtcggttcgcgcgttcgtttcgtagtttttgtcggtgtagtttcggtttttgttttcgtcgtttcgagttttgtaggtatcggaagtttggatttcgttcgcgtttttttttttaattttatttttagtttttttcgtttcgttttcgcgggagggtttcggcgtcgcgcgtttgcgttttttttcgttcgcgggttcgtagtgatttttgtcgggcgcgtcgtttcgtatttggggcgggtcggagttttttttgtcgttcgttcgtatagttatttattcgttcgtttatttatttatttatttattcgtttatttatttatttagtcgttacgttcggattcgtttttcgtagtataattttttcgtattttttgtttaaggttagtattttcgtaacgtaagtttttgttaatttagtgtttgttaggtaaatgtagtttt

SEQ ID NO: 25730 - DNA, 639 bp, Artificial Sequence
  chemically treated genomic DNA (Homo sapiens) CpG-island No: 25730
aaaactacatttacctaacaaacactaaattaacaaaaacttacgttacgaaaatactaaccttaaacaaaaaatacgaaaaaattatactacgaaaaacgaatccgaacgtaacgactaaataaataaataaacgaataaataaataaataaataaacgaacgaataaataactatacgaacgaacgacaaaaaaaactccgacccgccccaaatacgaaacgacgcgcccgacaaaaatcactacgaacccgcgaacgaaaaaaaacgcaaacgcgcgacgccgaaaccctcccgcgaaaacgaaacgaaaaaaactaaaaataaaattaaaaaaaaaaacgcgaacgaaatccaaacttccgatacctacaaaactcgaaacgacgaaaacaaaaaccgaaactacaccgacaaaaactacgaaacgaacgcgcgaaccgacgcaaccataataaaaattaacttccaacccgccgtaactaacatcaaaaacgacaaaactaacaaaacgtcgacgtcgacccctacgccgacctcgaccaccgaaatcctactaacgccgactaaaataaaaaaatctaaaactcaaacgataaaacgaaaaacccaaactcacgacccaaacgcgccccgtcg

SEQ ID NO: 25731 - DNA, 639 bp, Artificial Sequence
  chemically treated genomic DNA (Homo sapiens) CpG-island No: 25731
gaagttgtatttgtttggtaaatattgggttaataaagatttgcgttgcggggatgttggttttggatagggaatgcgaagggattatgttacggagaacggattcgagcgtgacggttgaatgaatgagtgagcgagtgagtgagtgagtgagtgagcgagcgagtgagtgattgtgcgagcgagcggtagaaggaatttcgattcgttttaggtgcggagcggcgcgttcggtaggggttattgcgggttcgcgggcgggaaggggcgtaggcgcgcggcgtcggggttttttcgcggggacggggcggggagggttgggggtggggttagagagagggacgcgagcgggatttaaattttcggtgtttgtagagttcggagcggcggaggtagagatcgaggttgtatcggtagaggttgcggggcggacgcgcgggtcggcgtagttatggtgaagattagtttttagttcgtcgtggttggtattaagggcgataaggttgataaggcgtcggcgtcggtttttgcgtcggtttcggttatcgagattttgttgacgtcggttagggtgagagggtttggggtttaggcggtggggcgggggatttaggtttacgatttaggcgcgtttcgtcg

SEQ ID NO: 25732 - DNA, 639 bp, Artificial Sequence
  chemically treated genomic DNA (Homo sapiens) CpG-island No: 25732
cgacgaaacgcgcctaaatcgtaaacctaaatcccccgccccaccgcctaaaccccaaaccctctcaccctaaccgacgtcaacaaaatctcgataaccgaaaccgacgcaaaaaccgacgccgacgccttatcaaccttatcgcccttaataccaaccacgacgaactaaaaactaatcttcaccataactacgccgacccgcgcgtccgccccgcaacctctaccgatacaacctcgatctctacctccgccgctccgaactctacaaacaccgaaaatttaaatcccgctcgcgtccctctctctaaccccacccccaaccctccccgccccgtccccgcgaaaaaaccccgacgccgcgcgcctacgccccttcccgcccgcgaacccgcaataacccctaccgaacgcgccgctccgcacctaaaacgaatcgaaattccttctaccgctcgctcgcacaatcactcactcgctcgctcactcactcactcactcactcgctcactcattcattcaaccgtcacgctcgaatccgttctccgtaacataatcccttcgcattccctatccaaaaccaacatccccgcaacgcaaatctttattaacccaatatttaccaaacaaatacaacttc

SEQ ID NO: 25733 - DNA, 634 bp, Artificial Sequence
  chemically treated genomic DNA (Homo sapiens) CpG-island No: 25733
ggtcggcggattagtttcgtttcgggcgtgtagttggagcgttaggggagtttcgttcgtcgtagttttagcgtcgcgcgttttttttttttcgcggattggcggtgtcggcgttcggagtggtttttaaaaggtagtttattgttcggagggggcgggcggggggcgcgatcgggtttgaggttcggttttttttttttttttttttttgttttcgcgtcgtcgttggttagttcgttggttcgttcgttcgttcggcgtacgtttcgttttcgttagttgtttcgttgtcgggtgcgcggcgtggagcggtagtcggtttggacgcgcggtcggggttgggggttgggcgcggcgcgtaagattttttcggcgagagcgtttttgttatcgcgaggttgcgcgcgatggtagagatgggtagtaaaggggtgacggcgggaaagatcgttagtaacgtgtagaagaagtttattcgcgcgtaggagaaggtgagcgagtcggagttttagtagtcgcggagttttagtcgtcgggattcggttatttgtttttttatttttcgatttcggggtttggtttttcgttaggatttggtgttgttatttttagaggagcgttttcgaggggtttt

SEQ ID NO: 25734 - DNA, 634 bp, Artificial Sequence
  chemically treated genomic DNA (Homo sapiens) CpG-island No: 25734
aaaacccctcgaaaacgctcctctaaaaataacaacaccaaatcctaacgaaaaaccaaaccccgaaatcgaaaaataaaaaaacaaataaccgaatcccgacgactaaaactccgcgactactaaaactccgactcgctcaccttctcctacgcgcgaataaacttcttctacacgttactaacgatctttcccgccgtcacccctttactacccatctctaccatcgcgcgcaacctcgcgataacaaaaacgctctcgccgaaaaaatcttacgcgccgcgcccaacccccaaccccgaccgcgcgtccaaaccgactaccgctccacgccgcgcacccgacaacgaaacaactaacgaaaacgaaacgtacgccgaacgaacgaacgaaccaacgaactaaccaacgacgacgcgaaaacaaaaaaaaaaaaaaaaaaaaaaccgaacctcaaacccgatcgcgccccccgcccgccccctccgaacaataaactaccttttaaaaaccactccgaacgccgacaccgccaatccgcgaaaaaaaaaaaacgcgcgacgctaaaactacgacgaacgaaactcccctaacgctccaactacacgcccgaaacgaaactaatccgccgacc

SEQ ID NO: 25735 - DNA, 634 bp, Artificial Sequence
  chemically treated genomic DNA (Homo sapiens) CpG-island No: 25735
gaagtttttcgaaagcgtttttttagaggtgatagtattagattttggcgaaggattaggtttcggggtcggaggatagggggataggtggtcgggtttcggcggttgggatttcgcggttgttggggtttcggttcgtttatttttttttgcgcgcgggtgagttttttttgtacgttgttggcgatttttttcgtcgttatttttttattgtttatttttgttatcgcgcgtagtttcgcggtggtaggggcgttttcgtcggggagattttgcgcgtcgcgtttagtttttagtttcggtcgcgcgtttagatcggttgtcgttttacgtcgcgtattcgatagcggagtaattgacggaggcggagcgtgcgtcggacgggcgagcgagttagcgagttagttagcgacgacgcggggatagagggagggagaggggaggggtcgggttttaggttcggtcgcgtttttcgttcgtttttttcggataataagttgttttttaaaggttatttcgggcgtcggtatcgttagttcgcgaggagggaggggcgcgcggcgttggggttgcggcgagcgggatttttttgacgttttagttgtacgttcggggcgggattaattcgtcggtt

SEQ ID NO: 25736 - DNA, 634 bp, Artificial Sequence
  chemically treated genomic DNA (Homo sapiens) CpG-island No: 25736
aaccgacgaattaatcccgccccgaacgtacaactaaaacgtcaaaaaaatcccgctcgccgcaaccccaacgccgcgcgcccctccctcctcgcgaactaacgataccgacgcccgaaataacctttaaaaaacaacttattatccgaaaaaaacgaacgaaaaacgcgaccgaacctaaaacccgacccctcccctctccctccctctatccccgcgtcgtcgctaactaactcgctaactcgctcgcccgtccgacgcacgctccgcctccgtcaattactccgctatcgaatacgcgacgtaaaacgacaaccgatctaaacgcgcgaccgaaactaaaaactaaacgcgacgcgcaaaatctccccgacgaaaacgcccctaccaccgcgaaactacgcgcgataacaaaaataaacaataaaaaaataacgacgaaaaaaatcgccaacaacgtacaaaaaaaactcacccgcgcgcaaaaaaaaataaacgaaccgaaaccccaacaaccgcgaaatcccaaccgccgaaacccgaccacctatccccctatcctccgaccccgaaacctaatccttcgccaaaatctaatactatcacctctaaaaaaacgctttcgaaaaacttc

SEQ ID NO: 25737 - DNA, 659 bp, Artificial Sequence
  chemically treated genomic DNA (Homo sapiens) CpG-island No: 25737
ggcgagtatttcgtcgcggttgagacgtcgcgttggggtttcggatttcgggcgtcgttagggattgtttcggggtcggtgatttttcggggtcgttcgttatcgtgtatcgcggcgtttcgggtttttagcgcgtttgggaggggtttcggggagcggtttcgtttcggttggaaatttggttaacgcggttagggttcggggttcgtttgcgtttcgggcgttgggaaggggtcgggcgttcggggtcggggagggttaggatcggttttcgacgttcgtttttcggttcgtagggaatgggaaggcgcgggcggagtgcgtgcgtaggttatagtttttcgggaagtcgcgtcgggagcggttattattcgggtaagaatagcgtagagcgttgcggcggcgggaaggagagcgggggaaggtttcgtagattgcgggggagttttatttggagtcggggtagtcgtgaattatcgaggaggaggcggaggagacggcggttgttttagaggagggagtcgttataatcggttattgtcgtttatcggaaatttcgggcgcgggagttgggttagggggcgttaaggagtagttgggatattttggttagtcggcgtcgtgggcgggttcgggtttcgtagaggtaggatcgggat

SEQ ID NO: 25738 - DNA, 659 bp, Artificial Sequence
  chemically treated genomic DNA (Homo sapiens) CpG-island No: 25738
atcccgatcctacctctacgaaacccgaacccgcccacgacgccgactaaccaaaatatcccaactactccttaacgccccctaacccaactcccgcgcccgaaatttccgataaacgacaataaccgattataacgactccctcctctaaaacaaccgccgtctcctccgcctcctcctcgataattcacgactaccccgactccaaataaaactcccccgcaatctacgaaaccttcccccgctctccttcccgccgccgcaacgctctacgctattcttacccgaataataaccgctcccgacgcgacttcccgaaaaactataacctacgcacgcactccgcccgcgccttcccattccctacgaaccgaaaaacgaacgtcgaaaaccgatcctaaccctccccgaccccgaacgcccgaccccttcccaacgcccgaaacgcaaacgaaccccgaaccctaaccgcgttaaccaaatttccaaccgaaacgaaaccgctccccgaaacccctcccaaacgcgctaaaaacccgaaacgccgcgatacacgataacgaacgaccccgaaaaatcaccgaccccgaaacaatccctaacgacgcccgaaatccgaaaccccaacgcgacgtctcaaccgcgacgaaatactcgcc

SEQ ID NO: 25739 - DNA, 659 bp, Artificial Sequence
  chemically treated genomic DNA (Homo sapiens) CpG-island No: 25739
gtttcggttttgtttttgcggggttcgagttcgtttacggcgtcggttggttaaggtgttttagttgttttttggcgttttttggtttagttttcgcgttcgaggttttcggtgagcggtagtagtcggttatgacgatttttttttttggaatagtcgtcgtttttttcgtttttttttcggtagtttacggttgtttcggttttaggtgggattttttcgtaatttgcggagttttttttcgttttttttttcgtcgtcgtagcgttttgcgttgtttttgttcgggtggtagtcgttttcggcgcggtttttcggagggttatagtttacgtacgtatttcgttcgcgtttttttattttttgcgggtcgggaggcgggcgtcggaagtcgattttggtttttttcggtttcgggcgttcggtttttttttagcgttcggagcgtaggcgggtttcgggttttagtcgcgttgattaggtttttagtcggggcggagtcgtttttcggggttttttttaggcgcgttggggattcggggcgtcgcggtgtacggtggcgggcggtttcgggagattatcgatttcgaagtaatttttggcggcgttcggggttcggaattttagcgcggcgttttagtcgcggcggggtgttcgtt

SEQ ID NO: 25740 - DNA, 659 bp, Artificial Sequence
  chemically treated genomic DNA (Homo sapiens) CpG-island No: 25740
aacgaacaccccgccgcgactaaaacgccgcgctaaaattccgaaccccgaacgccgccaaaaattacttcgaaatcgataatctcccgaaaccgcccgccaccgtacaccgcgacgccccgaatccccaacgcgcctaaaaaaaaccccgaaaaacgactccgccccgactaaaaacctaatcaacgcgactaaaacccgaaacccgcctacgctccgaacgctaaaaaaaaaccgaacgcccgaaaccgaaaaaaaccaaaatcgacttccgacgcccgcctcccgacccgcaaaaaataaaaaaacgcgaacgaaatacgtacgtaaactataaccctccgaaaaaccgcgccgaaaacgactaccacccgaacaaaaacaacgcaaaacgctacgacgacgaaaaaaaaaacgaaaaaaaactccgcaaattacgaaaaaatcccacctaaaaccgaaacaaccgtaaactaccgaaaaaaaaacgaaaaaaacgacgactattccaaaaaaaaaaatcgtcataaccgactactaccgctcaccgaaaacctcgaacgcgaaaactaaaccaaaaaacgccaaaaaacaactaaaacaccttaaccaaccgacgccgtaaacgaactcgaaccccgcaaaaacaaaaccgaaac

SEQ ID NO: 25741 - DNA, 685 bp, Artificial Sequence
  chemically treated genomic DNA (Homo sapiens) CpG-island No: 25741
gtttcgttatcgtttcggttggcggtcgcggggtgtatttcgggaaagtgcgggttcgcgggggcgtggtgcgaggcggtgtcggtcgtatatcgtttattttttcgcgcggatttggcgcgtttttcgttgcggggtcgttcggttttcggaacgacgtttttcgttcgggcggcggttagagagggcgttacggggttgtttttgcgttcggttcggtttacgtagtatcgcggtttttacgttttagtcgaaagcgaaagatcggaaaacggttttcgggttttagggcgtagtgattgtacgggaggttcggaggttgcgtcgggaggaggtcggcgatattttcggtcgttttcggatgcggggttaggggcgtcggaaaggttatcgcggtagttcggcgcgttttagcggggttgttttgagggtgttgcgaggttgttttacgtgcgggatttcgcgggcgggtagtttgttttggagaggaaaggaaggcgtattcggttcggagtttagttttgttgcgcgtcgttcgttttttgcgtaatttgtagtttcgggaggcggggcgcgttttggttttcgcggggttatatggagtagcgggcgttgtaatttagggaggttttggggatataacgttagggaagttagttattcgtgtgtgttcgttggtttattg

SEQ ID NO: 25742 - DNA, 685 bp, Artificial Sequence
  chemically treated genomic DNA (Homo sapiens) CpG-island No: 25742
caataaaccaacgaacacacacgaataactaacttccctaacgttatatccccaaaacctccctaaattacaacgcccgctactccatataaccccgcgaaaaccaaaacgcgccccgcctcccgaaactacaaattacgcaaaaaacgaacgacgcgcaacaaaactaaactccgaaccgaatacgccttcctttcctctccaaaacaaactacccgcccgcgaaatcccgcacgtaaaacaacctcgcaacaccctcaaaacaaccccgctaaaacgcgccgaactaccgcgataacctttccgacgcccctaaccccgcatccgaaaacgaccgaaaatatcgccgacctcctcccgacgcaacctccgaacctcccgtacaatcactacgccctaaaacccgaaaaccgttttccgatctttcgctttcgactaaaacgtaaaaaccgcgatactacgtaaaccgaaccgaacgcaaaaacaaccccgtaacgccctctctaaccgccgcccgaacgaaaaacgtcgttccgaaaaccgaacgaccccgcaacgaaaaacgcgccaaatccgcgcgaaaaaataaacgatatacgaccgacaccgcctcgcaccacgcccccgcgaacccgcactttcccgaaatacaccccgcgaccgccaaccgaaacgataacgaaac

SEQ ID NO: 25743 - DNA, 685 bp, Artificial Sequence
  chemically treated genomic DNA (Homo sapiens) CpG-island No: 25743
tagtgggttagcggatatatacgggtagttgatttttttaacgttgtgtttttaaagtttttttggattatagcgttcgttgttttatgtgatttcgcgggagttaggacgcgtttcgtttttcggggttgtaagttgcgtagggagcgagcgacgcgtagtagagttgggtttcgagtcggatgcgttttttttttttttttagagtaggttgttcgttcgcggaatttcgtacgtagagtaatttcgtagtatttttagaatagtttcgttggggcgcgtcgggttgtcgcggtgattttttcgacgtttttgatttcgtattcggaggcggtcggaagtgtcgtcggttttttttcggcgtagttttcgggtttttcgtgtaattattacgttttggggttcggaaatcgtttttcggtttttcgttttcggttggggcgtggaggtcgcggtgttgcgtaggtcgggtcgggcgtaggaatagtttcgtggcgttttttttggtcgtcgttcgggcgggaaacgtcgtttcggggatcgggcgatttcgtagcggggagcgcgttaggttcgcgcggggaagtgggcggtgtgcggtcggtatcgtttcgtattacgttttcgcgggttcgtattttttcggagtgtatttcgcggtcgttagtcggggcgatggcggggt

SEQ ID NO: 25744 - DNA, 685 bp, Artificial Sequence
  chemically treated genomic DNA (Homo sapiens) CpG-island No: 25744
accccgccatcgccccgactaacgaccgcgaaatacactccgaaaaaatacgaacccgcgaaaacgtaatacgaaacgataccgaccgcacaccgcccacttccccgcgcgaacctaacgcgctccccgctacgaaatcgcccgatccccgaaacgacgtttcccgcccgaacgacgaccaaaaaaaacgccacgaaactattcctacgcccgacccgacctacgcaacaccgcgacctccacgccccaaccgaaaacgaaaaaccgaaaaacgatttccgaaccccaaaacgtaataattacacgaaaaacccgaaaactacgccgaaaaaaaaccgacgacacttccgaccgcctccgaatacgaaatcaaaaacgtcgaaaaaatcaccgcgacaacccgacgcgccccaacgaaactattctaaaaatactacgaaattactctacgtacgaaattccgcgaacgaacaacctactctaaaaaaaaaaaaaaaacgcatccgactcgaaacccaactctactacgcgtcgctcgctccctacgcaacttacaaccccgaaaaacgaaacgcgtcctaactcccgcgaaatcacataaaacaacgaacgctataatccaaaaaaactttaaaaacacaacgttaaaaaaatcaactacccgtatatatccgctaacccacta

SEQ ID NO: 25745 - DNA, 707 bp, Artificial Sequence
  chemically treated genomic DNA (Homo sapiens) CpG-island No: 25745
tttttttcggtcgtcgttaataggagtaattcgttgttgcgttgcggatcggttttaggtacggtggaaagttgtaggtattgacggcggcgtatttcggtcgagagggagtatcgcgcgtcgtcgttgtcgttcgggtttatggttttggtttgagagtaggacgaggcgttttcgatttcgagttgcggtagtaggagtagtaacggcggcgatcgtaggagtttgaatttttatatgggtcgtcgtcgcgagagcggttcggaggtggagggtggcggaggggtttttgagggagggattttagtaggcggtttagtcggcggtttaacggtcggcggtcgcggttcggtcgggagtcggcgttgaggcgacgacgttagaggtcgacgttcgcgcgtagcgtgcgtaaggaaaggaagggaggggtgtgggcgaaatcggttttgggatttcggagaagacggtgggcgtggtttgaggaagggcgtttgtgattggtgggttttgtcgcggtcgggaagttcgaatagaagtttggggaagagtcggcgaagagtaaagagataatatagtatttttagttatagtaagcggtagttatggagtatgcgtagtagtaggggcggtcgtaggtcgtcgtttaataatacgtaatgtatagatttttgagtatacgaagttttttgtttttttaggtttatttg

SEQ ID NO: 25746 - DNA, 707 bp, Artificial Sequence
  chemically treated genomic DNA (Homo sapiens) CpG-island No: 25746
caaataaacctaaaaaaacaaaaaacttcgtatactcaaaaatctatacattacgtattattaaacgacgacctacgaccgcccctactactacgcatactccataactaccgcttactataactaaaaatactatattatctctttactcttcgccgactcttccccaaacttctattcgaacttcccgaccgcgacaaaacccaccaatcacaaacgcccttcctcaaaccacgcccaccgtcttctccgaaatcccaaaaccgatttcgcccacacccctcccttcctttccttacgcacgctacgcgcgaacgtcgacctctaacgtcgtcgcctcaacgccgactcccgaccgaaccgcgaccgccgaccgttaaaccgccgactaaaccgcctactaaaatccctccctcaaaaacccctccgccaccctccacctccgaaccgctctcgcgacgacgacccatataaaaattcaaactcctacgatcgccgccgttactactcctactaccgcaactcgaaatcgaaaacgcctcgtcctactctcaaaccaaaaccataaacccgaacgacaacgacgacgcgcgatactccctctcgaccgaaatacgccgccgtcaatacctacaactttccaccgtacctaaaaccgatccgcaacgcaacaacgaattactcctattaacgacgaccgaaaaaaa

SEQ ID NO: 25747 - DNA, 707 bp, Artificial Sequence
  chemically treated genomic DNA (Homo sapiens) CpG-island No: 25747
taggtgaatttagagaaatagggagtttcgtatatttaaaagtttatatattacgtattattgaacggcgatttgcggtcgtttttgttgttgcgtatgttttataattgtcgtttgttatagttgggagtattgtattatttttttgtttttcgtcggtttttttttagatttttgttcgaatttttcggtcgcggtagaatttattaattataaacgtttttttttaagttacgtttatcgtttttttcgggattttaagatcgatttcgtttatatttttttttttttttttttacgtacgttgcgcgcggacgtcggtttttgacgtcgtcgttttagcgtcggttttcggtcgggtcgcggtcgtcgatcgttgagtcgtcggttgagtcgtttgttgaagttttttttttaggaattttttcgttattttttattttcgaatcgttttcgcggcggcgatttatgtgggggtttaggtttttgcggtcgtcgtcgttgttgtttttgttgtcgtagttcggaatcggaaacgtttcgttttgtttttaggttagaattatgaattcgggcggtagcggcggcgcgcgatgttttttttcggtcgaggtgcgtcgtcgttagtgtttgtagttttttatcgtgtttggagtcgattcgtagcgtagtaacgaattgtttttgttggcggcggtcggggaggg

SEQ ID NO: 25748 - DNA, 707 bp, Artificial Sequence
  chemically treated genomic DNA (Homo sapiens) CpG-island No: 25748
ccctccccgaccgccgccaacaaaaacaattcgttactacgctacgaatcgactccaaacacgataaaaaactacaaacactaacgacgacgcacctcgaccgaaaaaaaacatcgcgcgccgccgctaccgcccgaattcataattctaacctaaaaacaaaacgaaacgtttccgattccgaactacgacaacaaaaacaacaacgacgacgaccgcaaaaacctaaacccccacataaatcgccgccgcgaaaacgattcgaaaataaaaaataacgaaaaaattcctaaaaaaaaaacttcaacaaacgactcaaccgacgactcaacgatcgacgaccgcgacccgaccgaaaaccgacgctaaaacgacgacgtcaaaaaccgacgtccgcgcgcaacgtacgtaaaaaaaaaaaaaaaaaaatataaacgaaatcgatcttaaaatcccgaaaaaaacgataaacgtaacttaaaaaaaaacgtttataattaataaattctaccgcgaccgaaaaattcgaacaaaaatctaaaaaaaaaccgacgaaaaacaaaaaaataatacaatactcccaactataacaaacgacaattataaaacatacgcaacaacaaaaacgaccgcaaatcgccgttcaataatacgtaatatataaacttttaaatatacgaaactccctatttctctaaattcaccta

SEQ ID NO: 25749 - DNA, 703 bp, Artificial Sequence
  chemically treated genomic DNA (Homo sapiens) CpG-island No: 25749
tttgaattcgtcgtttgagtggtcggggtttttatcgttggtcgagagttcgtcgtcggggtttaacggcgatattaagttgtcggggtcgtttgcgtcggcgtttttgttgttttcgttgagtagggacgaattggagtcggattttagcgattggtaggagggcgggtcgtgcggaggttttgcgtcgtcgtcgtcgtcgttatcgtcgtcgttcgtcgcgtagtcgtatttgaagtcgagcgtaggcggtttcgacggttttagcgggagtagcgttgtttcgggttcggttttcgggtcgcgttcgcgttttttacgttttaggttttcgtcgttattttcggcgtacggttcgcggtagtaatttttgtcgttttttacgcgcgttagttcgtacgtgcggtcgaagggagggttgagagatattgggttgtcgaggtagggttgcgggtagttattgtacggtttcgtcgacggttaggatagggagtatacgttgtcgcggcgtgggtaggatagcgaaggtagttcgggaagttgcgtttcggacgcgcggaagttggggaagtagaaggtgtttttcgtgtggatgtttattagcggttttataaattcgggatttaggagattatgttcgtttattttcgcggggttcgatcggtagtttttattttattgttatttgatattaaatatagtt

SEQ ID NO: 25750 - DNA, 703 bp, Artificial Sequence
  chemically treated genomic DNA (Homo sapiens) CpG-island No: 25750
aactatatttaatatcaaataacaataaaataaaaactaccgatcgaaccccgcgaaaataaacgaacataatctcctaaatcccgaatttataaaaccgctaataaacatccacacgaaaaacaccttctacttccccaacttccgcgcgtccgaaacgcaacttcccgaactaccttcgctatcctacccacgccgcgacaacgtatactccctatcctaaccgtcgacgaaaccgtacaataactacccgcaaccctacctcgacaacccaatatctctcaaccctcccttcgaccgcacgtacgaactaacgcgcgtaaaaaacgacaaaaattactaccgcgaaccgtacgccgaaaataacgacgaaaacctaaaacgtaaaaaacgcgaacgcgacccgaaaaccgaacccgaaacaacgctactcccgctaaaaccgtcgaaaccgcctacgctcgacttcaaatacgactacgcgacgaacgacgacgataacgacgacgacgacgacgcaaaacctccgcacgacccgccctcctaccaatcgctaaaatccgactccaattcgtccctactcaacgaaaacaacaaaaacgccgacgcaaacgaccccgacaacttaatatcgccgttaaaccccgacgacgaactctcgaccaacgataaaaaccccgaccactcaaacgacgaattcaaa

SEQ ID NO: 25751 - DNA, 703 bp, Artificial Sequence
  chemically treated genomic DNA (Homo sapiens) CpG-island No: 25751
aattatgtttaatgttagatagtaataaagtagaagttgtcggtcgggtttcgcggaaatgggcgagtataattttttgaatttcgggtttgtggggtcgttggtaaatatttatacgggagatattttttatttttttaattttcgcgcgttcggggcgtagtttttcgggttgttttcgttgttttatttacgtcgcgataacgtgtgttttttgttttggtcgtcggcggagtcgtgtaatggttattcgtagttttatttcggtagtttagtgttttttaatttttttttcggtcgtacgtgcgagttggcgcgcgtggaggacggtaagggttattatcgcgagtcgtgcgtcgagggtggcggcgggggtttgaagcgtgaggagcgcgggcgcgattcgggagtcgggttcggggtagcgttgttttcgttggagtcgtcggggtcgtttgcgttcggttttaagtacgattacgcggcgggcggcggcggtggcgacggcggcggcggcgtaggattttcgtacgattcgtttttttgttagtcgttggaattcgattttagttcgtttttgtttaacgagggtaataagggcgtcggcgtaggcgatttcggtagtttggtatcgtcgttgaatttcggcggcgggttttcggttagcggtaaggatttcggttatttaagcggcggatttaaa

SEQ ID NO: 25752 - DNA, 703 bp, Artificial Sequence
  chemically treated genomic DNA (Homo sapiens) CpG-island No: 25752
tttaaatccgccgcttaaataaccgaaatccttaccgctaaccgaaaacccgccgccgaaattcaacgacgataccaaactaccgaaatcgcctacgccgacgcccttattaccctcgttaaacaaaaacgaactaaaatcgaattccaacgactaacaaaaaaacgaatcgtacgaaaatcctacgccgccgccgccgtcgccaccgccgccgcccgccgcgtaatcgtacttaaaaccgaacgcaaacgaccccgacgactccaacgaaaacaacgctaccccgaacccgactcccgaatcgcgcccgcgctcctcacgcttcaaacccccgccgccaccctcgacgcacgactcgcgataataacccttaccgtcctccacgcgcgccaactcgcacgtacgaccgaaaaaaaaattaaaaaacactaaactaccgaaataaaactacgaataaccattacacgactccgccgacgaccaaaacaaaaaacacacgttatcgcgacgtaaataaaacaacgaaaacaacccgaaaaactacgccccgaacgcgcgaaaattaaaaaaataaaaaatatctcccgtataaatatttaccaacgaccccacaaacccgaaattcaaaaaattatactcgcccatttccgcgaaacccgaccgacaacttctactttattactatctaacattaaacataatt

SEQ ID NO: 25753 - DNA, 660 bp, Artificial Sequence
  chemically treated genomic DNA (Homo sapiens) CpG-island No: 25753
agcgtttaggttttcggttatcggggtttatttcgtcgtcgttagatttagcggtttggtgtcggattgtagcgatttttcgttttgtagtttcgcgtttaagtcggtagtgtttagtacgtcgtgggcgttcgtgtttttttagtcgttcgtggtatattattcgtacggtttttagttttatttcggcgtcgatacgcgttatatgcggatttggttcgagtcgttgttcggcgtcgtttttttttttagtttttcggtcgggggtcgttattacgtttttaagtcggacgtttatttcgggcgtcgcgcggattgcggtttaggggagggtcgtagttattcggattatatgtacggttcgttcggggagttgcgcgatcgcgtttcgtagatattgttttcgttcgaggcggacgcgttcgtcggtagtaagtataaagaggagaaggtcgatttggattttagtaagttgggagtaatttttttttataatcggcgcgggaggggaggggaggacgggcgggggtagtcgaattatagttttttcgaatcgtgtagggagcgcgggagaggggcgagggggcgaggatttaataaaagcgaattattttggggagtttttaggggtaggaggtttgagaatggggtttagggaga

SEQ ID NO: 25754 - DNA, 660 bp, Artificial Sequence
  chemically treated genomic DNA (Homo sapiens) CpG-island No: 25754
tctccctaaaccccattctcaaacctcctacccctaaaaactccccaaaataattcgcttttattaaatcctcgccccctcgcccctctcccgcgctccctacacgattcgaaaaaactataattcgactacccccgcccgtcctcccctcccctcccgcgccgattataaaaaaaaattactcccaacttactaaaatccaaatcgaccttctcctctttatacttactaccgacgaacgcgtccgcctcgaacgaaaacaatatctacgaaacgcgatcgcgcaactccccgaacgaaccgtacatataatccgaataactacgaccctcccctaaaccgcaatccgcgcgacgcccgaaataaacgtccgacttaaaaacgtaataacgacccccgaccgaaaaactaaaaaaaaaaacgacgccgaacaacgactcgaaccaaatccgcatataacgcgtatcgacgccgaaataaaactaaaaaccgtacgaataatataccacgaacgactaaaaaaacacgaacgcccacgacgtactaaacactaccgacttaaacgcgaaactacaaaacgaaaaatcgctacaatccgacaccaaaccgctaaatctaacgacgacgaaataaaccccgataaccgaaaacctaaacgct

SEQ ID NO: 25755 - DNA, 660 bp, Artificial Sequence
  chemically treated genomic DNA (Homo sapiens) CpG-island No: 25755
tttttttgggttttatttttagattttttgtttttgaaagttttttaaggtaattcgtttttattgagttttcgttttttcgtttttttttcgcgttttttgtacggttcgggagggttgtaattcggttgttttcgttcgttttttttttttttttcgcgtcggttgtaaaggaaaattgtttttaatttattggggtttaggtcggtttttttttttttgtgtttgttgtcggcgagcgcgttcgtttcgggcgagggtagtgtttgcggggcgcggtcgcgtagtttttcgggcgagtcgtatatgtagttcgggtagttgcggtttttttttgggtcgtagttcgcgcggcgttcggggtaggcgttcggtttgagggcgtagtgacggttttcggtcgggaagttggggaaggagacggcgtcggatagcggttcgagttaagttcgtatgtagcgcgtgtcggcgtcgaggtggggttgggggtcgtacgggtgatatattacggacgattgagagggtacgggcgtttacgacgtgttgaatattgtcggtttgggcgcgaagttataggacggaaaatcgttatagttcggtattaaatcgttgggtttggcggcggcgggatgagtttcggtggtcggaaatttggacgtt

SEQ ID NO: 25756 - DNA, 660 bp, Artificial Sequence
  chemically treated genomic DNA (Homo sapiens) CpG-island No: 25756
aacgtccaaatttccgaccaccgaaactcatcccgccgccgccaaacccaacgatttaataccgaactataacgattttccgtcctataacttcgcgcccaaaccgacaatattcaacacgtcgtaaacgcccgtaccctctcaatcgtccgtaatatatcacccgtacgacccccaaccccacctcgacgccgacacgcgctacatacgaacttaactcgaaccgctatccgacgccgtctccttccccaacttcccgaccgaaaaccgtcactacgccctcaaaccgaacgcctaccccgaacgccgcgcgaactacgacccaaaaaaaaaccgcaactacccgaactacatatacgactcgcccgaaaaactacgcgaccgcgccccgcaaacactaccctcgcccgaaacgaacgcgctcgccgacaacaaacacaaaaaaaaaaaaaccgacctaaaccccaataaattaaaaacaattttcctttacaaccgacgcgaaaaaaaaaaaaaaaacgaacgaaaacaaccgaattacaaccctcccgaaccgtacaaaaaacgcgaaaaaaaaacgaaaaaacgaaaactcaataaaaacgaattaccttaaaaaactttcaaaaacaaaaaatctaaaaataaaacccaaaaaaa

SEQ ID NO: 25757 - DNA, 2308 bp, Artificial Sequence
  chemically treated genomic DNA (Homo sapiens) CpG-island No: 25757
ttttcgtttcgtttatcgttttttttttttgttatagcgcgttcgtttcgcggtcgttaattagtcgcgcgtttcggtcgcgcgtttcgtttcgttttcggtgggtgtgcgcgcggttaatgggcggtgcgcgggggtcgggtcgcggcggggcggggtagcggggcggtcgttaatcgtcgtggtgttgttgaaattgaaaatattatattatgttaatcgcggtcgggttcgcgcgtacgggggtggggttcgcgcgtataaagggggcgtaggcgggttgggcgttttataggttaagtgcgttgtgttcgaggggtgtcggttaggtttgagcgagcgagttagttagtaggtatcgagggggcgcggttgtcgttcggacgagataggcgaattcgacgtagaagagtttattatcggatagttaggtagtcgtcgcgtttttcgtatacgtagagtcgggcggcgcggggttttttttgcgttcggttttcgttttttttttttttttttttttttttttttcgttgtttttttttttttcgttgttcgcgtttgcgtagtttcgggttatgttcgacgcgttttttcgtagtatatttacgatggagcgttttgtcgttcgtgggatttttttagtattagtgcgtattagcgtttgtcgtagttttttcgggtcggtggattacgaggagttgagtcgcgagttgtaggttcgtttggtcgagttgaacgtcgaggattagaatcgttgggattacgatttttagtaggatatgtcgttgcggggttttggacgtttgtagtggatcgaagtggatagcgattcggtgttcgcgttttatcgcgagacggtgtaggtggggcgttgtcgtttgttgttggcgtcgcggttcgtcgcggtcgcggtggttgttagttcgtttttcgagtcggtcgttgagtttttcgacggtttcgaggaggcgtcggagtagttgtttagtgtttcggtttcggtttcggcgtttatttcgtttttagtttcggttttggttttagtttcggtttcggtttcggtttcggtcgcggtttcggtcgcggtttcggtcgcggtcgcggttttggtttcggtttcggtttcggtttcggtttcggtttcggtttcggttttagtcgcggtttcggttttagtttcggtttcggtttcggtttcggttttcgtttcggtttcggtttcggacgcggcgttttaagagagcgtcgagtagggcgcgaattaggggtagcgcggttaggagtttttcgttgattagttgtattcggggatttcgggacgtttcgcggtcggtatcgcggtcgttagcgttaacggcgcggcgattaagaagttgttcgggtttttgattttcggtgagtttcgtacggtttcgtttcggttcggttcggtttcgttttgttcggtcggtcggtttttttagttttcgggggtttcgttgggttttcgttttttttcgtggtattaaagggttcgtagcgtttagggcgcggttgcgtttttattttttttttcgtttcgttgttgtgttttttagcggtttcgcgcgggcggggtgggaggttgaatttcggtcgcgatttttcgggagcgtagttttcgttttcggtcgcgggagttttttttcgggcgcggtcgggcgtcgtgagtacggcgtggagggggttaagcgcggcggcggtttcggggggtttggtcgcgggataaggggaaatgtttatatagtatattgcgcggcgacgtaaataaagatgattcgtcgcggatttcggcgcgggcggggacggcgtttttatttcggtcggttcgcgtttcgcgttttttttcggttttttttcgggttttcgggtcggtttcgttttgatcggtcgcgcgcgttgtcgttcgtagattttttcgttaagcgtaagagattagcgtttgagaagtcgtcgggcgatgttttcgcgtcgtgtttttttttaagcgtcgtttttggcgtgggttcggtggagtagatttcgcgtaagaggttgcggtgagttaagtgagtatagcgtatttgggggggcgcggagggtcgattcgtcgggttttcgtcggttttgttgatcgttttttttttcgtagtttagagtttaaagagtttcgagggaatttgtcggggtagcggacgttggaagggcgttgggtttcggttgggatcgtttatgtagtagtaatcggcggcggttgtcgtagagtagcgttcggttttgtttttaaattttgaaaattgtgtaatgtatt

SEQ ID NO: 25758 - DNA, 2308 bp, Artificial Sequence
  chemically treated genomic DNA (Homo sapiens) CpG-island No: 25758
aatacattacacaattttcaaaatttaaaaacaaaaccgaacgctactctacgacaaccgccgccgattactactacataaacgatcccaaccgaaacccaacgcccttccaacgtccgctaccccgacaaattccctcgaaactctttaaactctaaactacgaaaaaaaaaacgatcaacaaaaccgacgaaaacccgacgaatcgaccctccgcgcccccccaaatacgctatactcacttaactcaccgcaacctcttacgcgaaatctactccaccgaacccacgccaaaaacgacgcttaaaaaaaaacacgacgcgaaaacatcgcccgacgacttctcaaacgctaatctcttacgcttaacgaaaaaatctacgaacgacaacgcgcgcgaccgatcaaaacgaaaccgacccgaaaacccgaaaaaaaaccgaaaaaaaacgcgaaacgcgaaccgaccgaaataaaaacgccgtccccgcccgcgccgaaatccgcgacgaatcatctttatttacgtcgccgcgcaatatactatataaacatttccccttatcccgcgaccaaaccccccgaaaccgccgccgcgcttaaccccctccacgccgtactcacgacgcccgaccgcgcccgaaaaaaaactcccgcgaccgaaaacgaaaactacgctcccgaaaaatcgcgaccgaaattcaacctcccaccccgcccgcgcgaaaccgctaaaaaacacaacaacgaaacgaaaaaaaaaataaaaacgcaaccgcgccctaaacgctacgaaccctttaataccacgaaaaaaaacgaaaacccaacgaaacccccgaaaactaaaaaaaccgaccgaccgaacaaaacgaaaccgaaccgaaccgaaacgaaaccgtacgaaactcaccgaaaatcaaaaacccgaacaacttcttaatcgccgcgccgttaacgctaacgaccgcgataccgaccgcgaaacgtcccgaaatccccgaatacaactaatcaacgaaaaactcctaaccgcgctacccctaattcgcgccctactcgacgctctcttaaaacgccgcgtccgaaaccgaaaccgaaacgaaaaccgaaaccgaaaccgaaaccgaaactaaaaccgaaaccgcgactaaaaccgaaaccgaaaccgaaaccgaaaccgaaaccgaaaccgaaaccaaaaccgcgaccgcgaccgaaaccgcgaccgaaaccgcgaccgaaaccgaaaccgaaaccgaaactaaaaccaaaaccgaaactaaaaacgaaataaacgccgaaaccgaaaccgaaacactaaacaactactccgacgcctcctcgaaaccgtcgaaaaactcaacgaccgactcgaaaaacgaactaacaaccaccgcgaccgcgacgaaccgcgacgccaacaacaaacgacaacgccccacctacaccgtctcgcgataaaacgcgaacaccgaatcgctatccacttcgatccactacaaacgtccaaaaccccgcaacgacatatcctactaaaaatcgtaatcccaacgattctaatcctcgacgttcaactcgaccaaacgaacctacaactcgcgactcaactcctcgtaatccaccgacccgaaaaaactacgacaaacgctaatacgcactaatactaaaaaaatcccacgaacgacaaaacgctccatcgtaaatatactacgaaaaaacgcgtcgaacataacccgaaactacgcaaacgcgaacaacgaaaaaaaaaaaaacaacgaaaaaaaaaaaaaaaaaaaaaaaaaaaaaacgaaaaccgaacgcaaaaaaaaccccgcgccgcccgactctacgtatacgaaaaacgcgacgactacctaactatccgataataaactcttctacgtcgaattcgcctatctcgtccgaacgacaaccgcgccccctcgatacctactaactaactcgctcgctcaaacctaaccgacacccctcgaacacaacgcacttaacctataaaacgcccaacccgcctacgccccctttatacgcgcgaaccccacccccgtacgcgcgaacccgaccgcgattaacataatataatattttcaatttcaacaacaccacgacgattaacgaccgccccgctaccccgccccgccgcgacccgacccccgcgcaccgcccattaaccgcgcgcacacccaccgaaaacgaaacgaaacgcgcgaccgaaacgcgcgactaattaacgaccgcgaaacgaacgcgctataacaaaaaaaaaaaacgataaacgaaacgaaaa

SEQ ID NO: 25759 - DNA, 2308 bp, Artificial Sequence
  chemically treated genomic DNA (Homo sapiens) CpG-island No: 25759
aatatattgtatagtttttaaaatttaaaaataaaatcgaacgttgttttgcggtagtcgtcgtcggttgttgttatatgaacggttttagtcgaggtttagcgtttttttaacgttcgttgtttcggtaggttttttcggggttttttgggttttaaattgcgaggagaggggcggttagtaaagtcggcggggattcggcgggtcggtttttcgcgtttttttaggtgcgttgtatttatttggtttatcgtagttttttgcgcggggtttgttttatcgagtttacgttaggggcggcgtttggagagggatacggcgcggggatatcgttcgacgattttttaggcgttgattttttgcgtttggcgaagaaatttgcgggcgatagcgcgcgcggtcggttagggcggggtcggttcggagattcgagagggggtcgggagagggcgcggggcgcgggtcggtcggggtgggggcgtcgttttcgttcgcgtcgaggttcgcggcgggttatttttgtttacgtcgtcgcgtaatgtgttgtgtaagtatttttttttgtttcgcggttaagtttttcggggtcgtcgtcgcgtttaattttttttacgtcgtgtttacggcgttcggtcgcgttcggggaggggttttcgcggtcgggggcgaaaattgcgttttcggggggtcgcggtcgggatttagttttttatttcgttcgcgcgaagtcgttggagggtataataacggggcggggaggggggtaagggcgtagtcgcgttttgagcgttgcgggttttttaatgttacgggaggaggcgggaatttagcgaggttttcgagggttggggggatcggtcggtcggataaagcggggtcgggtcgggtcggggcggggtcgtgcggggtttatcggagattagaggttcggatagttttttgatcgtcgcgtcgttggcgttggcggtcgcggtgtcggtcgcgggacgtttcgaaattttcgagtgtagttggttagcgagaggtttttggtcgcgttgtttttggttcgcgttttgttcggcgtttttttgaggcgtcgcgttcggggtcggggtcggggcgggggtcggggtcggggtcggggtcggggttggggtcggggtcgcgattggagtcggggtcggagtcggagtcggagtcggggtcggggtcggggttaggatcgcgatcgcgatcggagtcgcgatcggagtcgcgatcggagtcggagtcggggtcggggttggagttaggatcgggattgggggcggggtggacgtcggggtcgggatcgggatattaggtagttgtttcggcgttttttcgaggtcgtcgagggatttagcggtcggttcgaggggcgggttgatagttatcgcgatcgcgacgggtcgcggcgttagtagtaggcggtagcgttttatttgtatcgtttcgcggtagaacgcgggtatcgagtcgttgtttatttcggtttattgtaggcgtttagggtttcgtagcggtatgttttgttggaagtcgtaattttagcggttttggttttcggcgtttagttcggttaggcgggtttgtagttcgcggtttagtttttcgtggtttatcggttcgaagaggttgcggtaggcgttggtgcgtattagtattgggaaggttttacgggcgataagacgttttatcgtggatgtgttgcggagggacgcgtcggatatggttcggggttgcgtaaacgcgggtagcgagagaggagaggatagcgagaagaaggggaaaggagaggaggagagggcggaggtcgggcgtaagggagatttcgcgtcgttcgattttgcgtgtgcgagggacgcggcggttatttggttgttcggtggtggatttttttgcgtcgggttcgtttgtttcgttcggacggtagtcgcgttttttcgatgtttgttggttagttcgttcgtttaggtttggtcggtatttttcgagtatagcgtatttggtttgtggaacgtttagttcgtttgcgttttttttatacgcgcgggttttattttcgtgcgcgcgggttcggtcgcgattagtataatgtagtatttttagttttaataatattacggcgattggcggtcgtttcgttgtttcgtttcgtcgcggttcggttttcgcgtatcgtttattggtcgcgcgtatatttatcgggggcggggcggggcgcgcggtcggggcgcgcggttgattggcggtcgcggggcgagcgcgttgtagtaggggaagggggcggtgagcggggcggggg

SEQ ID NO: 25760 - DNA, 2308 bp, Artificial Sequence
  chemically treated genomic DNA (Homo sapiens) CpG-island No: 25760
cccccgccccgctcaccgcccccttcccctactacaacgcgctcgccccgcgaccgccaatcaaccgcgcgccccgaccgcgcgccccgccccgcccccgataaatatacgcgcgaccaataaacgatacgcgaaaaccgaaccgcgacgaaacgaaacaacgaaacgaccgccaatcgccgtaatattattaaaactaaaaatactacattatactaatcgcgaccgaacccgcgcgcacgaaaataaaacccgcgcgtataaaaaaaacgcaaacgaactaaacgttccacaaaccaaatacgctatactcgaaaaataccgaccaaacctaaacgaacgaactaaccaacaaacatcgaaaaaacgcgactaccgtccgaacgaaacaaacgaacccgacgcaaaaaaatccaccaccgaacaaccaaataaccgccgcgtccctcgcacacgcaaaatcgaacgacgcgaaatctcccttacgcccgacctccgccctctcctcctctcctttccccttcttctcgctatcctctcctctctcgctacccgcgtttacgcaaccccgaaccatatccgacgcgtccctccgcaacacatccacgataaaacgtcttatcgcccgtaaaaccttcccaatactaatacgcaccaacgcctaccgcaacctcttcgaaccgataaaccacgaaaaactaaaccgcgaactacaaacccgcctaaccgaactaaacgccgaaaaccaaaaccgctaaaattacgacttccaacaaaacataccgctacgaaaccctaaacgcctacaataaaccgaaataaacaacgactcgatacccgcgttctaccgcgaaacgatacaaataaaacgctaccgcctactactaacgccgcgacccgtcgcgatcgcgataactatcaacccgcccctcgaaccgaccgctaaatccctcgacgacctcgaaaaaacgccgaaacaactacctaatatcccgatcccgaccccgacgtccaccccgcccccaatcccgatcctaactccaaccccgaccccgactccgactccgatcgcgactccgatcgcgactccgatcgcgatcgcgatcctaaccccgaccccgaccccgactccgactccgactccgaccccgactccaatcgcgaccccgaccccaaccccgaccccgaccccgaccccgacccccgccccgaccccgaccccgaacgcgacgcctcaaaaaaacgccgaacaaaacgcgaaccaaaaacaacgcgaccaaaaacctctcgctaaccaactacactcgaaaatttcgaaacgtcccgcgaccgacaccgcgaccgccaacgccaacgacgcgacgatcaaaaaactatccgaacctctaatctccgataaaccccgcacgaccccgccccgacccgacccgaccccgctttatccgaccgaccgatccccccaaccctcgaaaacctcgctaaattcccgcctcctcccgtaacattaaaaaacccgcaacgctcaaaacgcgactacgcccttacccccctccccgccccgttattataccctccaacgacttcgcgcgaacgaaataaaaaactaaatcccgaccgcgaccccccgaaaacgcaattttcgcccccgaccgcgaaaacccctccccgaacgcgaccgaacgccgtaaacacgacgtaaaaaaaattaaacgcgacgacgaccccgaaaaacttaaccgcgaaacaaaaaaaaatacttacacaacacattacgcgacgacgtaaacaaaaataacccgccgcgaacctcgacgcgaacgaaaacgacgcccccaccccgaccgacccgcgccccgcgccctctcccgaccccctctcgaatctccgaaccgaccccgccctaaccgaccgcgcgcgctatcgcccgcaaatttcttcgccaaacgcaaaaaatcaacgcctaaaaaatcgtcgaacgatatccccgcgccgtatccctctccaaacgccgcccctaacgtaaactcgataaaacaaaccccgcgcaaaaaactacgataaaccaaataaatacaacgcacctaaaaaaacgcgaaaaaccgacccgccgaatccccgccgactttactaaccgcccctctcctcgcaatttaaaacccaaaaaaccccgaaaaaacctaccgaaacaacgaacgttaaaaaaacgctaaacctcgactaaaaccgttcatataacaacaaccgacgacgactaccgcaaaacaacgttcgattttatttttaaattttaaaaactatacaatatatt

SEQ ID NO: 25761 - DNA, 1106 bp, Artificial Sequence
  chemically treated genomic DNA (Homo sapiens) CpG-island No: 25761
tttcggcgtgagttatcgcgggtagggttggttgtagcgtattttttcgcggggtcggtttgcgagacggtgcgggcgagcgttcgggcggggcgggatttcgagttattttacggggtcggatagttggggtacggggggtaagaggagcgcgggtttttgagatgggaggggacggtcggggatcgattagagcgcggacgcgacggtgcgggttcggacggttgggtttggggagggtatggttcggggcgcgcggggtttaggcgggcggggtggttcgagggtcggggcggggcggggaggggcggggcggggaggggtagttataaaggtcgcgtcggggttacgaggagtagagtcggcgtcgttatcgttcgtattgtcgtttttagtttcgcgttcggtacgatatgaaatttttcgacgaggtgttacgcgagggcgagttggagaagcgtagcgatagttttttttagttatggaagaagaagcgcggggtgtttattttcgatcgtttgagtttgtttttcgttagttttcgcgcgcgttttaaggagttgcgtttttattttatttttaaggtggattgcgtggagcgtacgggtaagtacgtgtattttattatcgttattatcgattataaggagatcgattttcgttgcgcgggcgagagttgttggaacgcggttatcgcgttggcgtttatcgatttttagaatcgtcgcgttttgtaggattttcgtagtcgttaggaacgtatcgtattcgtcgtattcgtcgaggacgtcgtggttgtcgcggtcgtcgtatttttcgagttttcggagttttttaggttattttcgtagtttaaatttcgtacgttatgagttcgtcgcggtgagtgattgttcgcgtttcggcgagttttgcgttttaatagtcgggatcggggtttttgggaaaaattattttaattttagacggcggggcgggggcgttgtatttttttgggggattcggcgtttcgtaatcgcgttggttttttcgcgttagggtttcggggttttttaggttggattcggatcggttttggtatagttttttgatttagtttttttttt

SEQ ID NO: 25762 - DNA, 1106 bp, Artificial Sequence
  chemically treated genomic DNA (Homo sapiens) CpG-island No: 25762
aaaaaaaaaactaaatcaaaaaactataccaaaaccgatccgaatccaacctaaaaaaccccgaaaccctaacgcgaaaaaaccaacgcgattacgaaacgccgaatcccccaaaaaaatacaacgcccccgccccgccgtctaaaattaaaataatttttcccaaaaaccccgatcccgactattaaaacgcaaaactcgccgaaacgcgaacaatcactcaccgcgacgaactcataacgtacgaaatttaaactacgaaaataacctaaaaaactccgaaaactcgaaaaatacgacgaccgcgacaaccacgacgtcctcgacgaatacgacgaatacgatacgttcctaacgactacgaaaatcctacaaaacgcgacgattctaaaaatcgataaacgccaacgcgataaccgcgttccaacaactctcgcccgcgcaacgaaaatcgatctccttataatcgataataacgataataaaatacacgtacttacccgtacgctccacgcaatccaccttaaaaataaaataaaaacgcaactccttaaaacgcgcgcgaaaactaacgaaaaacaaactcaaacgatcgaaaataaacaccccgcgcttcttcttccataactaaaaaaaactatcgctacgcttctccaactcgccctcgcgtaacacctcgtcgaaaaatttcatatcgtaccgaacgcgaaactaaaaacgacaatacgaacgataacgacgccgactctactcctcgtaaccccgacgcgacctttataactacccctccccgccccgcccctccccgccccgccccgaccctcgaaccaccccgcccgcctaaaccccgcgcgccccgaaccataccctccccaaacccaaccgtccgaacccgcaccgtcgcgtccgcgctctaatcgatccccgaccgtcccctcccatctcaaaaacccgcgctcctcttaccccccgtaccccaactatccgaccccgtaaaataactcgaaatcccgccccgcccgaacgctcgcccgcaccgtctcgcaaaccgaccccgcgaaaaaatacgctacaaccaaccctacccgcgataactcacgccgaaa

SEQ ID NO: 25763 - DNA, 1106 bp, Artificial Sequence
  chemically treated genomic DNA (Homo sapiens) CpG-island No: 25763
ggggaaaggattgggttagagagttgtgttagggtcggttcgggtttagtttgaggggtttcgagattttgacgcgagggggttagcgcgattgcggggcgtcgggttttttaaggaggtgtagcgttttcgtttcgtcgtttggggttgaagtggttttttttaaaggtttcggtttcggttgttagggcgtagggttcgtcgggacgcgggtagttatttatcgcggcgggtttatggcgtgcggggtttgggttgcggggatggtttggagggtttcgagggttcggagggtgcggcggtcgcggtagttacggcgttttcggcgggtgcggcgggtgcggtgcgtttttggcggttgcgaaagttttgtagggcgcggcggttttggaaatcgatgagcgttagcgcgatggtcgcgttttagtagttttcgttcgcgtagcggaagtcgatttttttgtggtcggtggtgacgatggtgaagtatacgtatttgttcgtgcgttttacgtagtttattttgaggatggagtggaagcgtagttttttggggcgcgcgcgggggttggcggggaataggtttaggcggtcggaggtgagtatttcgcgtttttttttttatagttggaagaggttgtcgttgcgtttttttaattcgttttcgcgtagtatttcgtcgggggattttatgtcgtgtcgagcgcgggattgggagcggtaatgcgggcggtgacggcgtcggttttgtttttcgtggtttcggcgcggtttttatagttgttttttttcgtttcgttttttttcgtttcgtttcggttttcgggttatttcgttcgtttgagtttcgcgcgtttcgggttatattttttttaagtttagtcgttcgggttcgtatcgtcgcgttcgcgttttggtcggttttcggtcgtttttttttattttagaagttcgcgttttttttgtttttcgtgttttagttgttcggtttcgtggggtgattcgaggtttcgtttcgttcgggcgttcgttcgtatcgtttcgtaggtcggtttcgcggaagaatgcgttgtagttagttttgttcgcgatgatttacgtcgggg

SEQ ID NO: 25764 - DNA, 1106 bp, Artificial Sequence
  chemically treated genomic DNA (Homo sapiens) CpG-island No: 25764
ccccgacgtaaatcatcgcgaacaaaactaactacaacgcattcttccgcgaaaccgacctacgaaacgatacgaacgaacgcccgaacgaaacgaaacctcgaatcaccccacgaaaccgaacaactaaaacacgaaaaacaaaaaaaacgcgaacttctaaaataaaaaaaaacgaccgaaaaccgaccaaaacgcgaacgcgacgatacgaacccgaacgactaaacttaaaaaaaatataacccgaaacgcgcgaaactcaaacgaacgaaataacccgaaaaccgaaacgaaacgaaaaaaaacgaaacgaaaaaaaacaactataaaaaccgcgccgaaaccacgaaaaacaaaaccgacgccgtcaccgcccgcattaccgctcccaatcccgcgctcgacacgacataaaatcccccgacgaaatactacgcgaaaacgaattaaaaaaacgcaacgacaacctcttccaactataaaaaaaaaaacgcgaaatactcacctccgaccgcctaaacctattccccgccaacccccgcgcgcgccccaaaaaactacgcttccactccatcctcaaaataaactacgtaaaacgcacgaacaaatacgtatacttcaccatcgtcaccaccgaccacaaaaaaatcgacttccgctacgcgaacgaaaactactaaaacgcgaccatcgcgctaacgctcatcgatttccaaaaccgccgcgccctacaaaactttcgcaaccgccaaaaacgcaccgcacccgccgcacccgccgaaaacgccgtaactaccgcgaccgccgcaccctccgaaccctcgaaaccctccaaaccatccccgcaacccaaaccccgcacgccataaacccgccgcgataaataactacccgcgtcccgacgaaccctacgccctaacaaccgaaaccgaaacctttaaaaaaaaccacttcaaccccaaacgacgaaacgaaaacgctacacctccttaaaaaacccgacgccccgcaatcgcgctaaccccctcgcgtcaaaatctcgaaacccctcaaactaaacccgaaccgaccctaacacaactctctaacccaatcctttcccc

SEQ ID NO: 25765 - DNA, 741 bp, Artificial Sequence
  chemically treated genomic DNA (Homo sapiens) CpG-island No: 25765
ggggcgtgcgggtagttgcgtttaggcgggagggagcgcgcggcggtggtttaggcggttttgttcgattgtcggatcgagtttttttttttcggtcgcggtcgcgtttttcgttagcgggttcgcggggaggggcgggaaggtagttggacgcggcggcgatttatgggttttttaggcgagtaggtgttttttcgggtcgtttattgtttcgtcggttttataatggggttgttgtagtcgtagagtcggtttcgtcgttgttcgcggtttgtacgggtacgacggtttcgggacggcgggagagtttgcggtcggcgtatttgttcgcgcgttcgtcggtgcgttcgtcggtgtatcggttttgttgtttttcgcgcgtttgtttacgggaacgggttttgggcgtttagcgtttatttttgcgcgtagtacggtttcgttggttttcggggttttcgcgtttcgacggtgcgttcgcgttcgttgcgttcgttcgttttgcgttcgttcgttttgcgtcgtcgggtattcggtttcgttcggttggtacggttcgcgtcgttgcgtttcggtcgtatatataggggtttattttttttggtttcgcgtaattatatggtaaattcgcgtcgatatagtagttttcgtttatttaggcgtagaatgtttcgtaatagggaataattacgattttgttcgcgtttattatggatgcgaacggggcgagaaaaaaaatta

SEQ ID NO: 25766 - DNA, 741 bp, Artificial Sequence
  chemically treated genomic DNA (Homo sapiens) CpG-island No: 25766
taattttttttctcgccccgttcgcatccataataaacgcgaacaaaatcgtaattattccctattacgaaacattctacgcctaaataaacgaaaactactatatcgacgcgaatttaccatataattacgcgaaaccaaaaaaaataaacccctatatatacgaccgaaacgcaacgacgcgaaccgtaccaaccgaacgaaaccgaatacccgacgacgcaaaacgaacgaacgcaaaacgaacgaacgcaacgaacgcgaacgcaccgtcgaaacgcgaaaaccccgaaaaccaacgaaaccgtactacgcgcaaaaataaacgctaaacgcccaaaacccgttcccgtaaacaaacgcgcgaaaaacaacaaaaccgatacaccgacgaacgcaccgacgaacgcgcgaacaaatacgccgaccgcaaactctcccgccgtcccgaaaccgtcgtacccgtacaaaccgcgaacaacgacgaaaccgactctacgactacaacaaccccattataaaaccgacgaaacaataaacgacccgaaaaaacacctactcgcctaaaaaacccataaatcgccgccgcgtccaactaccttcccgcccctccccgcgaacccgctaacgaaaaacgcgaccgcgaccgaaaaaaaaaaactcgatccgacaatcgaacaaaaccgcctaaaccaccgccgcgcgctccctcccgcctaaacgcaactacccgcacgcccc

SEQ ID NO: 25767 - DNA, 741 bp, Artificial Sequence
  chemically treated genomic DNA (Homo sapiens) CpG-island No: 25767
tgattttttttttcgtttcgttcgtatttataatagacgcgaatagagtcgtgattgttttttgttgcgggatattttgcgtttgaatgagcgggggttgttgtgtcgacgcggatttgttatatggttgcgcggagttaggaagaatgggtttttgtgtgtgcgatcgggacgtagcggcgcgggtcgtgttagtcgggcggagtcgggtgttcgacggcgtaggacgagcgggcgtaggacgagcgagcgtagcgggcgcgggcgtatcgtcggggcgcggggatttcgagggttagcggagtcgtgttgcgcgtagggatggacgttgggcgtttaaggttcgttttcgtggataggcgcgcggagggtagtaggatcgatgtatcgacggacgtatcgacggacgcgcggatagatgcgtcgatcgtaggttttttcgtcgtttcggggtcgtcgtgttcgtgtaggtcgcgagtagcggcggggtcggttttgcggttgtagtagttttattgtgaggtcggcgagataatgggcggttcgaggaggtatttgttcgtttgaaaggtttataaatcgtcgtcgcgtttagttgttttttcgttttttttcgcggattcgttagcgggaagcgcggtcgcggtcgggagggggaggttcggttcgatagtcgggtagggtcgtttgggttatcgtcgcgcgttttttttcgtttgggcgtagttgttcgtacgtttt

SEQ ID NO: 25768 - DNA, 741 bp, Artificial Sequence
  chemically treated genomic DNA (Homo sapiens) CpG-island No: 25768
aaaacgtacgaacaactacgcccaaacgaaaaaaaacgcgcgacgataacccaaacgaccctacccgactatcgaaccgaacctccccctcccgaccgcgaccgcgcttcccgctaacgaatccgcgaaaaaaaacgaaaaaacaactaaacgcgacgacgatttataaacctttcaaacgaacaaatacctcctcgaaccgcccattatctcgccgacctcacaataaaactactacaaccgcaaaaccgaccccgccgctactcgcgacctacacgaacacgacgaccccgaaacgacgaaaaaacctacgatcgacgcatctatccgcgcgtccgtcgatacgtccgtcgatacatcgatcctactaccctccgcgcgcctatccacgaaaacgaaccttaaacgcccaacgtccatccctacgcgcaacacgactccgctaaccctcgaaatccccgcgccccgacgatacgcccgcgcccgctacgctcgctcgtcctacgcccgctcgtcctacgccgtcgaacacccgactccgcccgactaacacgacccgcgccgctacgtcccgatcgcacacacaaaaacccattcttcctaactccgcgcaaccatataacaaatccgcgtcgacacaacaacccccgctcattcaaacgcaaaatatcccgcaacaaaaaacaatcacgactctattcgcgtctattataaatacgaacgaaacgaaaaaaaaaatca

SEQ ID NO: 25769 - DNA, 517 bp, Artificial Sequence
  chemically treated genomic DNA (Homo sapiens) CpG-island No: 25769
gttgggtgttcgttcgtgttcggcggcgcgtcgagtggagggatagcggttttttttttgttttcggttttagtacgttcggtcgcggttttcggaggttcgaggaaggcggcgaggtcgcgtttatttgtatgaagcgtatattcgcggtttatttgtaaaggcgtaattaaacgcgggggtgggggggtaggggcgttcgaaattagtattttcgcggttatttggcgcgaggagcgggcgcggtcggataaagggcgtcgggcgaggggagaggcgagtgtgtcgcggtattgatttgtaaatgaggttttgtgcgcgtattaaagttcgtcggattttcgatttcggttttcgtttcgttcgttaggttcgcggtttttagcggtttaggttcggattgggtatttcgaaggtttgggggtcgggtcgggtagtgtcgcgattgggtagggggtcgggtcgggtcgggtttggtcgggttaggataggttgtggagcgtcggagttttttatt

SEQ ID NO: 25770 - DNA, 517 bp, Artificial Sequence
  chemically treated genomic DNA (Homo sapiens) CpG-island No: 25770
aataaaaaactccgacgctccacaacctatcctaacccgaccaaacccgacccgacccgaccccctacccaatcgcgacactacccgacccgacccccaaaccttcgaaatacccaatccgaacctaaaccgctaaaaaccgcgaacctaacgaacgaaacgaaaaccgaaatcgaaaatccgacgaactttaatacgcgcacaaaacctcatttacaaatcaataccgcgacacactcgcctctcccctcgcccgacgccctttatccgaccgcgcccgctcctcgcgccaaataaccgcgaaaatactaatttcgaacgcccctacccccccacccccgcgtttaattacgcctttacaaataaaccgcgaatatacgcttcatacaaataaacgcgacctcgccgccttcctcgaacctccgaaaaccgcgaccgaacgtactaaaaccgaaaacaaaaaaaaaaccgctatccctccactcgacgcgccgccgaacacgaacgaacacccaac

SEQ ID NO: 25771 - DNA, 517 bp, Artificial Sequence
  chemically treated genomic DNA (Homo sapiens) CpG-island No: 25771
ggtggggggtttcgacgttttatagtttgttttggttcggttaggttcggttcggttcggttttttgtttagtcgcggtattgttcggttcgatttttagattttcggggtgtttagttcgagtttgggtcgttaggggtcgcgggtttggcgggcggggcgggggtcggggtcgggggttcggcgagttttaatgcgcgtataaagttttatttgtaggttaatgtcgcggtatattcgttttttttttcgttcggcgttttttgttcggtcgcgttcgtttttcgcgttagatggtcgcggaaatgttaatttcgggcgtttttgtttttttattttcgcgtttaattgcgtttttgtagatgggtcgcgagtgtgcgttttatgtagatgagcgcggtttcgtcgtttttttcggattttcgggagtcgcggtcgggcgtgttggggtcgagggtagggagggggtcgttgtttttttattcgacgcgtcgtcgggtacgggcgggtatttagt

SEQ ID NO: 25772 - DNA, 517 bp, Artificial Sequence
  chemically treated genomic DNA (Homo sapiens) CpG-island No: 25772
actaaatacccgcccgtacccgacgacgcgtcgaataaaaaaacaacgaccccctccctaccctcgaccccaacacgcccgaccgcgactcccgaaaatccgaaaaaaacgacgaaaccgcgctcatctacataaaacgcacactcgcgacccatctacaaaaacgcaattaaacgcgaaaataaaaaaacaaaaacgcccgaaattaacatttccgcgaccatctaacgcgaaaaacgaacgcgaccgaacaaaaaacgccgaacgaaaaaaaaaacgaatataccgcgacattaacctacaaataaaactttatacgcgcattaaaactcgccgaacccccgaccccgacccccgccccgcccgccaaacccgcgacccctaacgacccaaactcgaactaaacaccccgaaaatctaaaaatcgaaccgaacaataccgcgactaaacaaaaaaccgaaccgaaccgaacctaaccgaaccaaaacaaactataaaacgtcgaaaccccccacc

SEQ ID NO: 25773 - DNA, 839 bp, Artificial Sequence
  chemically treated genomic DNA (Homo sapiens) CpG-island No: 25773
cgcgtatttttttttcgttttttcgcgtatttgatatatatacgcgcgaaatttcgcgtagttcgagcgtttttcgatttgtagaggtcggttttcgagttcggattttttttcgcgtcgattaaataagtatatcgttttgtggtcgacgttttcgttattttttttagtttttatagaggttttattaggttcgtcgtcgttcgtcgttgttatattggggaaaaggagaaaagatagcgacgtttgtcgtcgtcgggtttagggttgaggtgcgcgtttcgcgcggcgtttttagttttagttttcggggcggttcgaggtttcggttcggcgcgttgtagtttttcgttagcggcggcggtcgagtagcggtaggcgcgaggattattcgggaatcgatttaaacgcgtttttgttcgtgtattacgttattttcgcggttcgttatttttgaggagaaggggacgcgcggcgcgttttttatcgggttcgggtttagcgtttatcgtcgtttacgcgagttttacggtgcgattcgcgattagcgtcgtcgtcgggattgtggcgtaggaggaagagcggtggcgggtggcgggcggcgggcgatagcgaggggcggggcgaatttagtaggtcgcgcgggtaggggcggggtttcgtcgcgcgcgcgttcggggttcgttttttcggttttcgcgaagttggaaggaggttgagtttttcgcggttgtttgcgttttgcgggtagtttttagaggtcgaggcgggagagtagggttcgggggtagcgggggaatttttcgaagagttgtgttttttttgtggaaagggtttcg

SEQ ID NO: 25774 - DNA, 839 bp, Artificial Sequence
  chemically treated genomic DNA (Homo sapiens) CpG-island No: 25774
cgaaaccctttccacaaaaaaaacacaactcttcgaaaaattcccccgctacccccgaaccctactctcccgcctcgacctctaaaaactacccgcaaaacgcaaacaaccgcgaaaaactcaacctccttccaacttcgcgaaaaccgaaaaaacgaaccccgaacgcgcgcgcgacgaaaccccgcccctacccgcgcgacctactaaattcgccccgcccctcgctatcgcccgccgcccgccacccgccaccgctcttcctcctacgccacaatcccgacgacgacgctaatcgcgaatcgcaccgtaaaactcgcgtaaacgacgataaacgctaaacccgaacccgataaaaaacgcgccgcgcgtccccttctcctcaaaaataacgaaccgcgaaaataacgtaatacacgaacaaaaacgcgtttaaatcgattcccgaataatcctcgcgcctaccgctactcgaccgccgccgctaacgaaaaactacaacgcgccgaaccgaaacctcgaaccgccccgaaaactaaaactaaaaacgccgcgcgaaacgcgcacctcaaccctaaacccgacgacgacaaacgtcgctatcttttctccttttccccaatataacaacgacgaacgacgacgaacctaataaaacctctataaaaactaaaaaaaataacgaaaacgtcgaccacaaaacgatatacttatttaatcgacgcgaaaaaaaatccgaactcgaaaaccgacctctacaaatcgaaaaacgctcgaactacgcgaaatttcgcgcgtatatatatcaaatacgcgaaaaaacgaaaaaaaaatacgcg

SEQ ID NO: 25775 - DNA, 839 bp, Artificial Sequence
  chemically treated genomic DNA (Homo sapiens) CpG-island No: 25775
cggggttttttttatagagagaatatagtttttcgggagattttttcgttgttttcgagttttgttttttcgtttcggtttttgaggattattcgtagggcgtaggtagtcgcgaaagatttagtttttttttaatttcgcgagggtcgagggggcgggtttcgggcgcgcgcgcggcgaagtttcgtttttgttcgcgcggtttgttggattcgtttcgtttttcgttgtcgttcgtcgttcgttattcgttatcgtttttttttttgcgttatagtttcggcggcggcgttggtcgcgggtcgtatcgtgaggttcgcgtgggcggcgataggcgttgggttcgggttcggtgaggagcgcgtcgcgcgtttttttttttttaggagtggcgggtcgcggaagtgacgtggtgtacgggtaggagcgcgtttgaatcggttttcgggtgattttcgcgtttgtcgttgttcggtcgtcgtcgttgacgaggagttgtagcgcgtcgggtcgaggtttcgagtcgtttcgggagttggagttgaaggcgtcgcgcggagcgcgtattttagttttgagttcggcggcggtaggcgtcgttgttttttttttttttttttaatatggtagcggcggacggcggcgggtttggtggggtttttgtggggattgaggaggatggcggaggcgtcggttataggacggtgtatttgtttgatcggcgcgaaaaggagttcgagttcggggatcggtttttgtaggtcggggagcgttcggattacgcgggatttcgcgcgtgtgtgtgttaggtacgcgaaggggcgaggaagggatgcgcg

SEQ ID NO: 25776 - DNA, 839 bp, Artificial Sequence
  chemically treated genomic DNA (Homo sapiens) CpG-island No: 25776
cgcgcatcccttcctcgccccttcgcgtacctaacacacacacgcgcgaaatcccgcgtaatccgaacgctccccgacctacaaaaaccgatccccgaactcgaactccttttcgcgccgatcaaacaaatacaccgtcctataaccgacgcctccgccatcctcctcaatccccacaaaaaccccaccaaacccgccgccgtccgccgctaccatattaaaaaaaaaaaaaaaaaacaacgacgcctaccgccgccgaactcaaaactaaaatacgcgctccgcgcgacgccttcaactccaactcccgaaacgactcgaaacctcgacccgacgcgctacaactcctcgtcaacgacgacgaccgaacaacgacaaacgcgaaaatcacccgaaaaccgattcaaacgcgctcctacccgtacaccacgtcacttccgcgacccgccactcctaaaaaaaaaaaaacgcgcgacgcgctcctcaccgaacccgaacccaacgcctatcgccgcccacgcgaacctcacgatacgacccgcgaccaacgccgccgccgaaactataacgcaaaaaaaaaaacgataacgaataacgaacgacgaacgacaacgaaaaacgaaacgaatccaacaaaccgcgcgaacaaaaacgaaacttcgccgcgcgcgcgcccgaaacccgccccctcgaccctcgcgaaattaaaaaaaaactaaatctttcgcgactacctacgccctacgaataatcctcaaaaaccgaaacgaaaaaacaaaactcgaaaacaacgaaaaaatctcccgaaaaactatattctctctataaaaaaaaccccg

SEQ ID NO: 25777 - DNA, 687 bp, Artificial Sequence
  chemically treated genomic DNA (Homo sapiens) CpG-island No: 25777
gtgtttgtgatcgagtttaagcgttcgtttttagcgtttacgttttagttcgggtttacgtatttcgtaggagaagagtcggttacgggatgtagttgtatcgttagtttttcgagtttcgtgaaggcggcgtcggtcgtcgagaagattttttcgatttgggggcggggtagcgttacggggggtcggcgttcgtttttttcgtttcgttcggagtttttagttttattttaggttcggttttcgttcgtttttcgttcggggcggaagagtcgcgagttaagtggggggttcgttttttcgtggtcgttagggagcgttgttcgcgagggaggtcgaatttttgtggacgttgacgttatggtttcgcgcgtttttttacggagacgtcgtcgtcgtcgttatacgcgagtcgggattacggagagtagggagattgagcggttcgggttttcgcgtaggaagtttcgtttttttcgtagcggataggtttaattcggcggtttttcgttttattagacgtagtcgtttagatcgttcggcgcgtttagtcgatggggaaagttttcgttttattttcgcgttatatttcgttttattttcgtttagagatcgggattttttaggtagaggtcgatttttagttttagtttcgtgttcgtttttatttaagtatagatatagggt

SEQ ID NO: 25778 - DNA, 687 bp, Artificial Sequence
  chemically treated genomic DNA (Homo sapiens) CpG-island No: 25778
accctatatctatacttaaataaaaacgaacacgaaactaaaactaaaaatcgacctctacctaaaaaatcccgatctctaaacgaaaataaaacgaaatataacgcgaaaataaaacgaaaactttccccatcgactaaacgcgccgaacgatctaaacgactacgtctaataaaacgaaaaaccgccgaattaaacctatccgctacgaaaaaaacgaaacttcctacgcgaaaacccgaaccgctcaatctccctactctccgtaatcccgactcgcgtataacgacgacgacgacgtctccgtaaaaaaacgcgcgaaaccataacgtcaacgtccacaaaaattcgacctccctcgcgaacaacgctccctaacgaccacgaaaaaacgaaccccccacttaactcgcgactcttccgccccgaacgaaaaacgaacgaaaaccgaacctaaaataaaactaaaaactccgaacgaaacgaaaaaaacgaacgccgaccccccgtaacgctaccccgcccccaaatcgaaaaaatcttctcgacgaccgacgccgccttcacgaaactcgaaaaactaacgatacaactacatcccgtaaccgactcttctcctacgaaatacgtaaacccgaactaaaacgtaaacgctaaaaacgaacgcttaaactcgatcacaaacac

SEQ ID NO: 25779 - DNA, 687 bp, Artificial Sequence
  chemically treated genomic DNA (Homo sapiens) CpG-island No: 25779
gttttgtgtttgtgtttgagtgggggcgagtacggggttgagattagaggtcggtttttgtttggaaagtttcgatttttgagcggaagtggagcgaagtgtggcgcggaagtgaggcgaaggttttttttatcgattgggcgcgtcgagcggtttaagcgattgcgtttgatggggcggggagtcgtcgggttgagtttattcgttgcggggagggcgggattttttgcgcgggggttcgagtcgtttagtttttttgtttttcgtggtttcggttcgcgtgtagcggcggcggcggcgttttcgtgaggaggcgcgcggggttatgacgttagcgtttataaaggttcgatttttttcgcggatagcgttttttggcggttacgggagggcgggttttttatttggttcgcggttttttcgtttcgggcggggggcgggcgggagtcgagtttggggtggggttaggggtttcgggcgggacggggagggcgggcgtcggtttttcgtgacgttgtttcgtttttaggtcggagagattttttcggcggtcggcgtcgtttttacgaagttcggggagttgacgatgtagttgtatttcgtggtcgattttttttttgcggggtacgtgagttcggattgggacgtggacgttgagagcgggcgtttggattcggttatagatat

SEQ ID NO: 25780 - DNA, 687 bp, Artificial Sequence
  chemically treated genomic DNA (Homo sapiens) CpG-island No: 25780
atatctataaccgaatccaaacgcccgctctcaacgtccacgtcccaatccgaactcacgtaccccgcaaaaaaaaaatcgaccacgaaatacaactacatcgtcaactccccgaacttcgtaaaaacgacgccgaccgccgaaaaaatctctccgacctaaaaacgaaacaacgtcacgaaaaaccgacgcccgccctccccgtcccgcccgaaacccctaaccccaccccaaactcgactcccgcccgccccccgcccgaaacgaaaaaaccgcgaaccaaataaaaaacccgccctcccgtaaccgccaaaaaacgctatccgcgaaaaaaatcgaacctttataaacgctaacgtcataaccccgcgcgcctcctcacgaaaacgccgccgccgccgctacacgcgaaccgaaaccacgaaaaacaaaaaaactaaacgactcgaacccccgcgcaaaaaatcccgccctccccgcaacgaataaactcaacccgacgactccccgccccatcaaacgcaatcgcttaaaccgctcgacgcgcccaatcgataaaaaaaaccttcgcctcacttccgcgccacacttcgctccacttccgctcaaaaatcgaaactttccaaacaaaaaccgacctctaatctcaaccccgtactcgcccccactcaaacacaaacacaaaac

SEQ ID NO: 25781 - DNA, 620 bp, Artificial Sequence
  chemically treated genomic DNA (Homo sapiens) CpG-island No: 25781
tattgcgaggcgtttaattttatcgaggcgttttataatttgttcggtttgttgggtttgtttttgcgttataatagtttttcggagttgcgcgtcggttagtttacggggttaatgtagtttacgtggttttatttggattataattatatttgtttcgtgtagggggacgttttttagaaattgcgtcgagttaaggaatttacgttgagttttaattagattatttaattgtttaatattatttttcggtttatgtttaatttgcgtagcgtggatttttcgtataataagttgtaggcgttcgcgttcgattttttttacgggttgcggaagtttattacgttgtatatgcgggttaacgttatttagtttgtgttcgtgcgtattttttaggattgtcgtagttttaagtttttcgatatcggatataattagtttaagagtttggcgcgtaattttttcgtcggtttgtttaagtttatcgagttgtatttcgagtataacgatttggttaaggtgaatttcgtttatttttcgcgttttatttttttgtattcgttttgtttgcggaggaataaggtggttattgtggttagttcgttggattgggtttggaa

SEQ ID NO: 25782 - DNA, 620 bp, Artificial Sequence
  chemically treated genomic DNA (Homo sapiens) CpG-island No: 25782
ttccaaacccaatccaacgaactaaccacaataaccaccttattcctccgcaaacaaaacgaatacaaaaaaataaaacgcgaaaaataaacgaaattcaccttaaccaaatcgttatactcgaaatacaactcgataaacttaaacaaaccgacgaaaaaattacgcgccaaactcttaaactaattatatccgatatcgaaaaacttaaaactacgacaatcctaaaaaatacgcacgaacacaaactaaataacgttaacccgcatatacaacgtaataaacttccgcaacccgtaaaaaaaatcgaacgcgaacgcctacaacttattatacgaaaaatccacgctacgcaaattaaacataaaccgaaaaataatattaaacaattaaataatctaattaaaactcaacgtaaattccttaactcgacgcaatttctaaaaaacgtccccctacacgaaacaaatataattataatccaaataaaaccacgtaaactacattaaccccgtaaactaaccgacgcgcaactccgaaaaactattataacgcaaaaacaaacccaacaaaccgaacaaattataaaacgcctcgataaaattaaacgcctcgcaata

SEQ ID NO: 25783 - DNA, 620 bp, Artificial Sequence
  chemically treated genomic DNA (Homo sapiens) CpG-island No: 25783
ttttaaatttagtttagcgagttgattataatggttattttgttttttcgtaggtagagcgagtgtagggagatgaggcgcgggaagtgggcgaagtttattttgattaagtcgttgtgttcgaggtgtagttcggtgagtttaaataagtcggcgaaagagttgcgcgttagatttttgagttgattgtattcgatgtcgagaaatttgaggttgcggtagttttggaagatgcgtacgggtataaattggatggcgttggttcgtatatgtagcgtggtgagttttcgtagttcgtggaagaggtcgggcgcgagcgtttgtagtttgttgtacgagaggtttacgttgcgtaggttgggtatgggtcggaaggtggtgttgggtagttgggtgatttggttggaatttagcgtgagttttttaattcggcgtagtttttgaaaggcgtttttttgtacggagtagatgtgattgtgatttagatagagttacgtgagttgtattaatttcgtgaattggtcggcgcgtagtttcgagaggttgttgtagcgtagggataagtttagtaggtcggataggttgtggggcgtttcggtgaggttgagcgtttcgtagta

SEQ ID NO: 25784 - DNA, 620 bp, Artificial Sequence
  chemically treated genomic DNA (Homo sapiens) CpG-island No: 25784
tactacgaaacgctcaacctcaccgaaacgccccacaacctatccgacctactaaacttatccctacgctacaacaacctctcgaaactacgcgccgaccaattcacgaaattaatacaactcacgtaactctatctaaatcacaatcacatctactccgtacaaaaaaacgcctttcaaaaactacgccgaattaaaaaactcacgctaaattccaaccaaatcacccaactacccaacaccaccttccgacccatacccaacctacgcaacgtaaacctctcgtacaacaaactacaaacgctcgcgcccgacctcttccacgaactacgaaaactcaccacgctacatatacgaaccaacgccatccaatttatacccgtacgcatcttccaaaactaccgcaacctcaaatttctcgacatcgaatacaatcaactcaaaaatctaacgcgcaactctttcgccgacttatttaaactcaccgaactacacctcgaacacaacgacttaatcaaaataaacttcgcccacttcccgcgcctcatctccctacactcgctctacctacgaaaaaacaaaataaccattataatcaactcgctaaactaaatttaaaa

SEQ ID NO: 25785 - DNA, 1265 bp, Artificial Sequence
  chemically treated genomic DNA (Homo sapiens) CpG-island No: 25785
cgcgtatacgtcggttttttttgttattttttcgtgggtttttagttatatacgttttcgaatttacgtttacgtcgtattttttgttttttttttatttttaaatttagtttattttgttacgtttattttcgtgtttattttcgttggtatacgcgtttatattcgcgtcggtatatttcgttatttttaggtatattttaggatttttttattcgttcggggagacgtattaggttttgtttcgtttttttatttttcgtttacgcgcgcgtttttttttatatatatagatatatatatacgtatttatatttatatatattttcgcgcgcggagttattttttttcgtacgttttcgttttgggtattttttcgcggcgagatttcgggttttttttttttttttttttattgtttggcggttcggcgtttttcggttcggtttggggtcgttgggttcgcggggatcggaggggagtcgagggcgtagttttgtcgtttttttcggatttttttttttttttcgtttcgtttgcgtcgcgtttttattatttttttttttcgggaaagggatttcgggagaggtagttcgtggtcggtcgggtttcgttcggcgcggcgtcggtagcggcgggggaagggagagagcgagggagttcgcgagttcgcgagcggagcggcgaggcggggaggggacgcgttgtcgagtcggggttggagcggcggaggttgcggtagcggcggcggcggtagtggcggcggtagtggcggcggtagtggcggcgggggagggagggttttacggacggacggacgtacgaatcgatcgagcgagggaggtagcgagcgagattgcgttggcgaggaggagtcgcgcgagcggcggttgttgggcgttttttcgcgttgttgggcgttcggcgttttcgcggtttcggttttcggtcgtagttttttcgcgcgcgcggggcgtcgggcgcggggttcgggttggtttcgcggaaggtaagagggacgcgatcgagttttttggagttaggaagtgcgaggagcgttgtttttacgtttgttgtttcggttgtttacgcggtatttttttattttcgcgttcgggtgggtgggcgttggggcgtcggaaggattgggggtggggttcgtgtcgtgggggagtagatagtcggttcgggggcgtcggttttttcgggttgtggagttattttcgggtagttaggcgttggggttcgggggtggggtgtgaatt

SEQ ID NO: 25786 - DNA, 1265 bp, Artificial Sequence
  chemically treated genomic DNA (Homo sapiens) CpG-island No: 25786
aattcacaccccacccccgaaccccaacgcctaactacccgaaaataactccacaacccgaaaaaaccgacgcccccgaaccgactatctactcccccacgacacgaaccccacccccaatccttccgacgccccaacgcccacccacccgaacgcgaaaataaaaaaataccgcgtaaacaaccgaaacaacaaacgtaaaaacaacgctcctcgcacttcctaactccaaaaaactcgatcgcgtccctcttaccttccgcgaaaccaacccgaaccccgcgcccgacgccccgcgcgcgcgaaaaaactacgaccgaaaaccgaaaccgcgaaaacgccgaacgcccaacaacgcgaaaaaacgcccaacaaccgccgctcgcgcgactcctcctcgccaacgcaatctcgctcgctacctccctcgctcgatcgattcgtacgtccgtccgtccgtaaaaccctccctcccccgccgccactaccgccgccactaccgccgccactaccgccgccgccgctaccgcaacctccgccgctccaaccccgactcgacaacgcgtcccctccccgcctcgccgctccgctcgcgaactcgcgaactccctcgctctctcccttcccccgccgctaccgacgccgcgccgaacgaaacccgaccgaccacgaactacctctcccgaaatccctttcccgaaaaaaaaaaataataaaaacgcgacgcaaacgaaacgaaaaaaaaaaaaaaatccgaaaaaaacgacaaaactacgccctcgactcccctccgatccccgcgaacccaacgaccccaaaccgaaccgaaaaacgccgaaccgccaaacaataaaaaaaaaaaaaaaaaaaacccgaaatctcgccgcgaaaaaatacccaaaacgaaaacgtacgaaaaaaaataactccgcgcgcgaaaatatatataaatataaatacgtatatatatatctatatatataaaaaaaaacgcgcgcgtaaacgaaaaataaaaaaacgaaacaaaacctaatacgtctccccgaacgaataaaaaaatcctaaaatatacctaaaaataacgaaatataccgacgcgaatataaacgcgtataccaacgaaaataaacacgaaaataaacgtaacaaaataaactaaatttaaaaataaaaaaaaaacaaaaaatacgacgtaaacgtaaattcgaaaacgtatataactaaaaacccacgaaaaaataacaaaaaaaaccgacgtatacgcg

SEQ ID NO: 25787 - DNA, 1265 bp, Artificial Sequence
  chemically treated genomic DNA (Homo sapiens) CpG-island No: 25787
ggtttatattttattttcgaattttagcgtttggttgttcggaggtggttttatagttcgagggaatcgacgttttcgggtcggttgtttgtttttttacggtacgggttttatttttaattttttcggcgttttagcgtttatttattcgggcgcgggagtgggagggtgtcgcgtgggtagtcggagtaataggcgtgggagtagcgtttttcgtattttttggttttagaaggttcggtcgcgttttttttatttttcgcgaagttagttcgggtttcgcgttcggcgtttcgcgcgcgcgaggaagttgcggtcgggagtcggggtcgcggaggcgtcgagcgtttagtagcgcggggaagcgtttagtagtcgtcgttcgcgcggttttttttcgttagcgtagtttcgttcgttgtttttttcgttcggtcggttcgtgcgttcgttcgttcgtggggttttttttttttcgtcgttattgtcgtcgttattgtcgtcgttattgtcgtcgtcgtcgttgtcgtagttttcgtcgttttagtttcggttcggtagcgcgtttttttttcgtttcgtcgtttcgttcgcgggttcgcgggttttttcgtttttttttttttttcgtcgttgtcggcgtcgcgtcgagcggagttcggtcggttacgggttgtttttttcgaggtttttttttcgagggggggaggtggtgggggcgcggcgtaggcggggcggggaggagaggagagttcgggggaggcggtaaggttgcgttttcggttttttttcgattttcgcgggtttagcggttttaggtcgggtcggagagcgtcgagtcgttaggtagtggaggaagagaggaggaggattcggagtttcgtcgcgggagggtgtttagggcgagggcgtgcgagggggagtgatttcgcgcgcgagggtgtgtatgagtgtgagtgcgtgtgtgtgtgtttgtgtgtgtggagaggggcgcgcgcgtgagcggggggtggggagacgaggtagagtttagtgcgttttttcgggcgagtggaggaattttagggtgtgtttggaggtggcggagtgtatcgacgcgggtgtgagcgcgtgtgttagcgagggtgggtacgggggtgagcgtggtaaggtgagttgggtttgggggtgggggaggagtagggagtacggcgtgagcgtaagttcgggggcgtgtgtggttggggatttacggagaggtggtagggagggtcggcgtgtgcgcg

SEQ ID NO: 25788 - DNA, 1265 bp, Artificial Sequence
  chemically treated genomic DNA (Homo sapiens) CpG-island No: 25788
cgcgcacacgccgaccctccctaccacctctccgtaaatccccaaccacacacgcccccgaacttacgctcacgccgtactccctactcctcccccacccccaaacccaactcaccttaccacgctcacccccgtacccaccctcgctaacacacgcgctcacacccgcgtcgatacactccgccacctccaaacacaccctaaaattcctccactcgcccgaaaaaacgcactaaactctacctcgtctccccaccccccgctcacgcgcgcgcccctctccacacacacaaacacacacacacgcactcacactcatacacaccctcgcgcgcgaaatcactccccctcgcacgccctcgccctaaacaccctcccgcgacgaaactccgaatcctcctcctctcttcctccactacctaacgactcgacgctctccgacccgacctaaaaccgctaaacccgcgaaaatcgaaaaaaaaccgaaaacgcaaccttaccgcctcccccgaactctcctctcctccccgccccgcctacgccgcgcccccaccacctccccccctcgaaaaaaaaacctcgaaaaaaacaacccgtaaccgaccgaactccgctcgacgcgacgccgacaacgacgaaaaaaaaaaaaaaacgaaaaaacccgcgaacccgcgaacgaaacgacgaaacgaaaaaaaaacgcgctaccgaaccgaaactaaaacgacgaaaactacgacaacgacgacgacgacaataacgacgacaataacgacgacaataacgacgaaaaaaaaaaaaccccacgaacgaacgaacgcacgaaccgaccgaacgaaaaaaacaacgaacgaaactacgctaacgaaaaaaaaccgcgcgaacgacgactactaaacgcttccccgcgctactaaacgctcgacgcctccgcgaccccgactcccgaccgcaacttcctcgcgcgcgcgaaacgccgaacgcgaaacccgaactaacttcgcgaaaaataaaaaaaacgcgaccgaaccttctaaaaccaaaaaatacgaaaaacgctactcccacgcctattactccgactacccacgcgacaccctcccactcccgcgcccgaataaataaacgctaaaacgccgaaaaaattaaaaataaaacccgtaccgtaaaaaaacaaacaaccgacccgaaaacgtcgattccctcgaactataaaaccacctccgaacaaccaaacgctaaaattcgaaaataaaatataaacc

SEQ ID NO: 25789 - DNA, 878 bp, Artificial Sequence
  chemically treated genomic DNA (Homo sapiens) CpG-island No: 25789
cgcgtttttcgttcgatattatatttagtttgattagttgtatcgtgtaagtggttcgtttattggttagtagttttgtgtatttcgttttatattcgtttcgtagtcgagttcgggttacgggtatatagcgagtatgcgtttcggaattttagtagcgtttaggcggggtcggggcgtttgcgttcggggcgtcggtttaggcgaagtgagttaggtttagtcgggaagttttaggacgaagcggcgcgcggattatggttttaggtagatttcgttcgttcgagtagcgtttcgatagtggtcgcgtaggagtcggcgggcgaaggttatgggcgttttagcgacgtcgttttcgtttcgtttcggaaacgaaatttggcgggagttaggcgtcggcgggaaacgaaattcggagggagttaggcgttagcgggaaacgaaagcgaagcgttgcggggaaacgaaagtcggacgtttaggcggggtaggagttttggggttggggcgttttttcggtttttttttttcgtcgcgagatgtgcgcgataaacggtcggcgttcgggagtagacgtttggtttcggggttttaggtgcgcggtttcgcgggtttgcgcggtttttaggcgtcggttttcggggttgatatcgaatgaggtttcgcgtcgtcggttttaaggtagtttcgtgtgcgttttgcgggtggttggcggttcgattttggtttgagttttttttttgcggtttatgtcgggtgtatggaggggggcgggggtgtacgcgcgagggatagagaagttttttttcggtgtaacgggttttttaacgtttatttgtaggcgtattattgtttttggatgattgattaggttttgt

SEQ ID NO: 25790 - DNA, 878 bp, Artificial Sequence
  chemically treated genomic DNA (Homo sapiens) CpG-island No: 25790
acaaaacctaatcaatcatccaaaaacaataatacgcctacaaataaacgttaaaaaacccgttacaccgaaaaaaaacttctctatccctcgcgcgtacacccccgcccccctccatacacccgacataaaccgcaaaaaaaaaactcaaaccaaaatcgaaccgccaaccacccgcaaaacgcacacgaaactaccttaaaaccgacgacgcgaaacctcattcgatatcaaccccgaaaaccgacgcctaaaaaccgcgcaaacccgcgaaaccgcgcacctaaaaccccgaaaccaaacgtctactcccgaacgccgaccgtttatcgcgcacatctcgcgacgaaaaaaaaaaaccgaaaaaacgccccaaccccaaaactcctaccccgcctaaacgtccgactttcgtttccccgcaacgcttcgctttcgtttcccgctaacgcctaactccctccgaatttcgtttcccgccgacgcctaactcccgccaaatttcgtttccgaaacgaaacgaaaacgacgtcgctaaaacgcccataaccttcgcccgccgactcctacgcgaccactatcgaaacgctactcgaacgaacgaaatctacctaaaaccataatccgcgcgccgcttcgtcctaaaacttcccgactaaacctaactcacttcgcctaaaccgacgccccgaacgcaaacgccccgaccccgcctaaacgctactaaaattccgaaacgcatactcgctatatacccgtaacccgaactcgactacgaaacgaatataaaacgaaatacacaaaactactaaccaataaacgaaccacttacacgatacaactaatcaaactaaatataatatcgaacgaaaaacgcg

SEQ ID NO: 25791 - DNA, 878 bp, Artificial Sequence
  chemically treated genomic DNA (Homo sapiens) CpG-island No: 25791
gtagggtttggttagttatttaagggtagtagtgcgtttgtaagtgggcgttgaagagttcgttatatcgggaagggatttttttgtttttcgcgcgtgtattttcgtttttttttatgtattcggtataagtcgtagaggaggaatttaaattagggtcgggtcgttagttattcgtagaacgtatacggagttattttggagtcgacggcgcggggttttattcggtgttagtttcgggagtcggcgtttggggatcgcgtaggttcgcggagtcgcgtatttggggtttcggggttaagcgtttgttttcgagcgtcggtcgtttatcgcgtatatttcgcggcgaggaggagaggtcggaagggcgttttagttttagggtttttgtttcgtttgggcgttcggttttcgttttttcgtaacgtttcgttttcgtttttcgttggcgtttggtttttttcgggtttcgtttttcgtcggcgtttggttttcgttaggtttcgttttcgaggcggggcgagggcggcgtcgttgaggcgtttatggttttcgttcgtcggtttttgcgcggttattgtcggggcgttgttcgggcgggcggggtttgtttggggttatggttcgcgcgtcgtttcgttttggagtttttcgattgaatttggtttatttcgtttaggtcgacgtttcggacgtagacgtttcgatttcgtttgggcgttgttgggatttcggagcgtatattcgttgtgtgttcgtgattcggattcggttgcgggacgggtatggagcgggatgtatagggttgttgattagtggacgggttatttgtacggtgtagttggttaggttggatgtagtgtcgggcgggaggcgcg

SEQ ID NO: 25792 - DNA, 878 bp, Artificial Sequence
  chemically treated genomic DNA (Homo sapiens) CpG-island No: 25792
cgcgcctcccgcccgacactacatccaacctaaccaactacaccgtacaaataacccgtccactaatcaacaaccctatacatcccgctccatacccgtcccgcaaccgaatccgaatcacgaacacacaacgaatatacgctccgaaatcccaacaacgcccaaacgaaatcgaaacgtctacgtccgaaacgtcgacctaaacgaaataaaccaaattcaatcgaaaaactccaaaacgaaacgacgcgcgaaccataaccccaaacaaaccccgcccgcccgaacaacgccccgacaataaccgcgcaaaaaccgacgaacgaaaaccataaacgcctcaacgacgccgccctcgccccgcctcgaaaacgaaacctaacgaaaaccaaacgccgacgaaaaacgaaacccgaaaaaaaccaaacgccaacgaaaaacgaaaacgaaacgttacgaaaaaacgaaaaccgaacgcccaaacgaaacaaaaaccctaaaactaaaacgcccttccgacctctcctcctcgccgcgaaatatacgcgataaacgaccgacgctcgaaaacaaacgcttaaccccgaaaccccaaatacgcgactccgcgaacctacgcgatccccaaacgccgactcccgaaactaacaccgaataaaaccccgcgccgtcgactccaaaataactccgtatacgttctacgaataactaacgacccgaccctaatttaaattcctcctctacgacttataccgaatacataaaaaaaaacgaaaatacacgcgcgaaaaacaaaaaaatcccttcccgatataacgaactcttcaacgcccacttacaaacgcactactacccttaaataactaaccaaaccctac

SEQ ID NO: 25793 - DNA, 535 bp, Artificial Sequence
  chemically treated genomic DNA (Homo sapiens) CpG-island No: 25793
atattttggcgacggtacgagtatgagagtagatattttcgtagtatagcggtataagagagcgattgtatcgcgcgacgtcgtcgattgagatagtaatagtagtgtgcgtttatgttaggatacgatgtgagtaggcgagaggcggtggtgtagagattttgcgggtagattggcgtaagtgtggtttcgattagtatagcgggcgtgagttgggtatttcgcgtcgtgtgagaacgaggtatcgttttagttagacgtgagggtgcggtgtagaggatgtgtaatattatacggtggtatagtagcgaaattaagcgttgagggcgttgcgagagttgggttcggtacgacgtaaagagggtcggcgatgagtcgtcgaatgtgggagtagagcgtacgggcgggagagggtggggagtatagaggcggagtttcgggagcgttgagagtatgtggaacgttacgggtaggttggttagaagtagggtattttggggagggggtgagttggtttgtaaagaatggggtgtat

SEQ ID NO: 25794 - DNA, 535 bp, Artificial Sequence
  chemically treated genomic DNA (Homo sapiens) CpG-island No: 25794
atacaccccattctttacaaaccaactcaccccctccccaaaataccctacttctaaccaacctacccgtaacgttccacatactctcaacgctcccgaaactccgcctctatactccccaccctctcccgcccgtacgctctactcccacattcgacgactcatcgccgaccctctttacgtcgtaccgaacccaactctcgcaacgccctcaacgcttaatttcgctactataccaccgtataatattacacatcctctacaccgcaccctcacgtctaactaaaacgatacctcgttctcacacgacgcgaaatacccaactcacgcccgctatactaatcgaaaccacacttacgccaatctacccgcaaaatctctacaccaccgcctctcgcctactcacatcgtatcctaacataaacgcacactactattactatctcaatcgacgacgtcgcgcgatacaatcgctctcttataccgctatactacgaaaatatctactctcatactcgtaccgtcgccaaaatat

SEQ ID NO: 25795 - DNA, 535 bp, Artificial Sequence
  chemically treated genomic DNA (Homo sapiens) CpG-island No: 25795
atgtattttattttttataagttagtttattttttttttagagtattttatttttggttaatttattcgtagcgttttatatgtttttaacgttttcgaagtttcgtttttgtattttttattttttttcgttcgtgcgttttgtttttatattcgacggtttatcgtcggttttttttgcgtcgtgtcggatttagttttcgtaacgtttttaacgtttgatttcgttgttatgttatcgtgtggtgttatatattttttatatcgtatttttacgtttagttaagacggtatttcgtttttatacggcgcggaatgtttagtttacgttcgttatgttagtcgaggttatatttacgttagtttattcgtagggtttttatattatcgtttttcgtttatttatatcgtattttgatatgggcgtatattattattgttattttaatcgacgacgtcgcgcgatgtagtcgtttttttgtgtcgttatattgcgggagtgtttgtttttatgttcgtgtcgtcgttagggtat

SEQ ID NO: 25796 - DNA, 535 bp, Artificial Sequence
  chemically treated genomic DNA (Homo sapiens) CpG-island No: 25796
ataccctaacgacgacacgaacataaaaacaaacactcccgcaatataacgacacaaaaaaacgactacatcgcgcgacgtcgtcgattaaaataacaataataatatacgcccatatcaaaatacgatataaataaacgaaaaacgataatataaaaaccctacgaataaactaacgtaaatataacctcgactaacataacgaacgtaaactaaacattccgcgccgtataaaaacgaaataccgtcttaactaaacgtaaaaatacgatataaaaaatatataacaccacacgataacataacaacgaaatcaaacgttaaaaacgttacgaaaactaaatccgacacgacgcaaaaaaaaccgacgataaaccgtcgaatataaaaacaaaacgcacgaacgaaaaaaaataaaaaatacaaaaacgaaacttcgaaaacgttaaaaacatataaaacgctacgaataaattaaccaaaaataaaatactctaaaaaaaaaataaactaacttataaaaaataaaatacat

SEQ ID NO: 25797 - DNA, 597 bp, Artificial Sequence
  chemically treated genomic DNA (Homo sapiens) CpG-island No: 25797
gggacgggcgtttatagcggcgcgtggggggggcgcgcggaaggtcggtatgaggtacgagtgagggggagagcgggggcggtgagtaagttgagatagaagggagcgggaggcgggaggggaggcgtacgtggtcggagagtggtagggggacgcgcgttttagcggcggggtgtgatagtagaaaatgggagataagtttgcggcgggggtggttgaggagggagaagggggggggggcggtttcggtagtgcgtacgggggggggggggaggaggagacgagaagacgcggcgcggcgcggggggcgtgtgacgaatgagaaggagggtgtgggatgcgtagttcgcgaatatgttaggttggagacgcgaagagggggtcgtttagttgggaggggttatagagtgtgaagagtgtgggacgaatcgggagggttatatagtagggggggggggtaggcgcgtaagcgaggtgcggggtgtgcgcggggggagtgttcgggtgggggcgttaggggtcgtatggaatgtaaggtatttttttagattgtgagagtcgaatgtaagttatttttttagattgtgagagtcgatg

SEQ ID NO: 25798 - DNA, 597 bp, Artificial Sequence
  chemically treated genomic DNA (Homo sapiens) CpG-island No: 25798
catcgactctcacaatctaaaaaaataacttacattcgactctcacaatctaaaaaaataccttacattccatacgacccctaacgcccccacccgaacactccccccgcgcacaccccgcacctcgcttacgcgcctaccccccccccctactatataaccctcccgattcgtcccacactcttcacactctataacccctcccaactaaacgaccccctcttcgcgtctccaacctaacatattcgcgaactacgcatcccacaccctccttctcattcgtcacacgccccccgcgccgcgccgcgtcttctcgtctcctcctcccccccccccccgtacgcactaccgaaaccgcccccccccccttctccctcctcaaccacccccgccgcaaacttatctcccattttctactatcacaccccgccgctaaaacgcgcgtccccctaccactctccgaccacgtacgcctcccctcccgcctcccgctcccttctatctcaacttactcaccgcccccgctctccccctcactcgtacctcataccgaccttccgcgcgccccccccacgcgccgctataaacgcccgtccc

SEQ ID NO: 25799 - DNA, 597 bp, Artificial Sequence
  chemically treated genomic DNA (Homo sapiens) CpG-island No: 25799
tatcgatttttataatttgaaagaatggtttgtattcgatttttataatttgaaagaatgttttgtattttatgcggtttttaacgtttttattcggatatttttttcgcgtatatttcgtatttcgtttgcgcgtttgttttttttttttattatatggttttttcggttcgttttatattttttatattttataattttttttagttgggcggtttttttttcgcgtttttaatttagtatgttcgcgggttgcgtattttatatttttttttttattcgttatacgtttttcgcgtcgcgtcgcgttttttcgtttttttttttttttttttttcgtacgtattgtcgaagtcgtttttttttttttttttttttttagttattttcgtcgtaggtttattttttattttttgttgttatatttcgtcgttggggcgcgcgtttttttgttatttttcgattacgtgcgttttttttttcgtttttcgtttttttttattttagtttgtttatcgttttcgtttttttttttattcgtattttatatcgatttttcgcgcgttttttttacgcgtcgttatagacgttcgtttt

SEQ ID NO: 25800 - DNA, 597 bp, Artificial Sequence
  chemically treated genomic DNA (Homo sapiens) CpG-island No: 25800
aaaacgaacgtctataacgacgcgtaaaaaaaacgcgcgaaaaatcgatataaaatacgaataaaaaaaaaaacgaaaacgataaacaaactaaaataaaaaaaaacgaaaaacgaaaaaaaaaacgcacgtaatcgaaaaataacaaaaaaacgcgcgccccaacgacgaaatataacaacaaaaaataaaaaataaacctacgacgaaaataactaaaaaaaaaaaaaaaaaaaaaaacgacttcgacaatacgtacgaaaaaaaaaaaaaaaaaaaaacgaaaaaacgcgacgcgacgcgaaaaacgtataacgaataaaaaaaaaaatataaaatacgcaacccgcgaacatactaaattaaaaacgcgaaaaaaaaaccgcccaactaaaaaaaattataaaatataaaaaatataaaacgaaccgaaaaaaccatataataaaaaaaaaaaacaaacgcgcaaacgaaatacgaaatatacgcgaaaaaaatatccgaataaaaacgttaaaaaccgcataaaatacaaaacattctttcaaattataaaaatcgaatacaaaccattctttcaaattataaaaatcgata

SEQ ID NO: 25801 - DNA, 1200 bp, Artificial Sequence
  chemically treated genomic DNA (Homo sapiens) CpG-island No: 25801
  unsure (95, 368, 405, 515, 596, 733, 775, 832, 864, 891, 897, 922)
  unsure (930, 952, 1080, 1134)
gcgcgtcgcggtttttttttcgttttttttttttttttttttcgggtttttttttttttttttcgtttttttttcggttttcgtttttttttttnttttttgttttttttcgtttcgtcgtttttcgtttttttcgtttttttttttcgttttttttttcgcggcgtttttttttttcggttttttttttttttttttttttttttcgcgtcgtttttttttttttttttttttttttttttttttgtttttttttttttcgtggttcgttcgtttttgtttttttttcgcgttttttcgttgttttcgttttcgcgtgcgttttttttttcgttttttttttttttttcgttttttttttttttttntttttttttcgttcgcggtcgttcggttttcgttttntttttttttttttttttttttttttttttttttttttcgcgcgtcgttcggttttttttttttttttttttttttttttttttttttcgttgtgttttcgcgtttttcgntcgttttttttttttttttttttgttttttttttttcgcgtttcgtttttttttttttttttttttttttttttttttttntttttttgtcgttttttttttttcgttttttttttcgtttttttttttttttcgttttttcgttcgtcgtttttttcgtttttttcgtttttttttgcgcgttcgttcgtttttttttttttttttttttttttttntttcgtttttttttcgttttttttcgtttttttttttttttnttttttttttgtttttttttttcgttttttttgcggtcgtttttttttttttttttntttttcgtttgtcgcgtcgttttttttgtttngcgttttttttttcgtttcgtttcgtntttcgncgcggttcgtttttttttttttttnttttgttntttttttgcgttttttttcgtnttggcggcgtttttcgcgcgtcgttcgtttttttttttttttttttttttttttttttttttttttttttgtttcgcgttttttcgttgttttttttttcgttttcgttttttttttttttttttttnttttcgtcggtttcgtttcgttttttcgtgtttttcggtttttttttttttcgnttttcgtttttttttcgttttcgttttttttcgttttttttcgttttcggttgtttcgtttttttt

SEQ ID NO: 25802 - DNA, 1200 bp, Artificial Sequence
  chemically treated genomic DNA (Homo sapiens) CpG-island No: 25802
  unsure (67, 121, 249, 271, 279, 304, 310, 337, 369, 426, 468, 605)
  unsure (686, 796, 833, 1106)
aaaaaaaacgaaacaaccgaaaacgaaaaaaaacgaaaaaaaacgaaaacgaaaaaaaaacgaaaancgaaaaaaaaaaaaaccgaaaaacacgaaaaaacgaaacgaaaccgacgaaaanaaaaaaaaaaaaaaaaaaaacgaaaacgaaaaaaaaaacaacgaaaaaacgcgaaacaaaaaaaaaaaaaaaaaaaaaaaaaaaaaaaaaaaaaaaaaaacgaacgacgcgcgaaaaacgccgccaanacgaaaaaaaacgcaaaaaaanaacaaaanaaaaaaaaaaaaaaacgaaccgcgncgaaanacgaaacgaaacgaaaaaaaaaacgcnaaacaaaaaaaacgacgcgacaaacgaaaaanaaaaaaaaaaaaaaaaacgaccgcaaaaaaaacgaaaaaaaaaaacaaaaaaaaaanaaaaaaaaaaaaaaacgaaaaaaaacgaaaaaaaaacgaaanaaaaaaaaaaaaaaaaaaaaaaaaaaacgaacgaacgcgcaaaaaaaaacgaaaaaaacgaaaaaaacgacgaacgaaaaaacgaaaaaaaaaaaaaaacgaaaaaaaaaacgaaaaaaaaaaaacgacaaaaaaanaaaaaaaaaaaaaaaaaaaaaaaaaaaaaaaaaaacgaaacgcgaaaaaaaaaaaacaaaaaaaaaaaaaaaaaaaacgancgaaaaacgcgaaaacacaacgaaaaaaaaaaaaaaaaaaaaaaaaaaaaaaaaaaaaccgaacgacgcgcgaaaaaaaaaaaaaaaaaaaaaaaaaaaaaaaaaaaaanaaaacgaaaaccgaacgaccgcgaacgaaaaaaaaanaaaaaaaaaaaaaaaacgaaaaaaaaaaaaaaaacgaaaaaaaaaacgcacgcgaaaacgaaaacaacgaaaaaacgcgaaaaaaaaacaaaaacgaacgaaccacgaaaaaaaaaaaaacaaaaaaaaaaaaaaaaaaaaaaaaaaaaaaaaacgacgcgaaaaaaaaaaaaaaaaaaaaaaaaaaccgaaaaaaaaaaacgccgcgaaaaaaaaaacgaaaaaaaaaaacgaaaaaaacgaaaaacgacgaaacgaaaaaaaacaaaaaanaaaaaaaaaaacgaaaaccgaaaaaaaaacgaaaaaaaaaaaaaaaaacccgaaaaaaaaaaaaaaaaaaaacgaaaaaaaaaccgcgacgcgc

SEQ ID NO: 25803 - DNA, 1200 bp, Artificial Sequence
  chemically treated genomic DNA (Homo sapiens) CpG-island No: 25803
  unsure (67, 121, 249, 271, 279, 304, 310, 337, 369, 426, 468, 605)
  unsure (686, 796, 833, 1106)
ggaggaggcggggtagtcgagagcgaggagagacgaggaaaagcgaggacgaaaagagagcgaggancgaggaaggagagagtcgagaagtacgggagggcgaagcggagtcggcgggganggaggggggaggagagggggcggagacggagaaggaggtagcggggggacgcggggtagagggggaagggggggggaggagagagaggagagaagagaagcgagcgacgcgcgggaggcgtcgttagngcgagaggggacgtaggagganggtaggangggagagggagggagcgggtcgcgncggagngcggagcgaggcggggaggaaaacgtnaagtagagagggcggcgcggtaggcgggggangggagaaggagggaggacggtcgtagggagggcgagaggggggggtaggaggaaggngggaggaggggagaacggaggggagcggggggggggcggggngagaaaggaggagaggagagagggaggcggacgggcgcgtagagagaggcgggaaggacgaagagaacggcggacggggaggcggaaggggagggggaacggaagggggagcgggggagggggggcggtaggagggnagggggggaaaaaaggagggggagaagaagagaggcggagcgcggggggggagggataagagaggagaggggggggacgancgggaagcgcggggatatagcggaggaagaggaaggagggggagggaggagagagggatcgagcggcgcgcgaggagggggagagaagggggagagggaggagagaaagnagaacggaggtcgagcggtcgcggacgaggggagagnggggggggaggggggacgagaggaagggggggggcgagggagggggcgtacgcggaggcggagataacgagggagcgcggggggggagtagaggcgggcgggttacgaggaggaggggagtagaaagagagaaagggaaggagaagagaaagggcgacgcgggagaggagggggggagaagagagggtcgagaggggagggcgtcgcgggggaggaggcggaggaagggaacgggaggagcggggagcggcggggcggagggaggtaggagangagagggggggcgggggtcgggggggagacggggggggggggggggagttcggggagaaggggaaagaagggcgggggggggatcgcgacgcgt

SEQ ID NO: 25804 - DNA, 1200 bp, Artificial Sequence
  chemically treated genomic DNA (Homo sapiens) CpG-island No: 25804
  unsure (95, 368, 405, 515, 596, 733, 775, 832, 864, 891, 897, 922)
  unsure (930, 952, 1080, 1134)
acgcgtcgcgatcccccccccgcccttctttccccttctccccgaactccccccccccccccccgtctcccccccgacccccgccccccctctcntctcctacctccctccgccccgccgctccccgctcctcccgttcccttcctccgcctcctcccccgcgacgccctcccctctcgaccctctcttctccccccctcctctcccgcgtcgccctttctcttctccttccctttctctctttctactcccctcctcctcgtaacccgcccgcctctactccccccccgcgctccctcgttatctccgcctccgcgtacgccccctccctcgcccccccccttcctctcgtcccccctccccccccnctctcccctcgtccgcgaccgctcgacctccgttctnctttctctcctccctctcccccttctctccccctcctcgcgcgccgctcgatccctctctcctccctccccctccttcctcttcctccgctatatccccgcgcttcccgntcgtcccccccctctcctctcttatccctccccccccgcgctccgcctctcttcttctccccctccttttttccccccctnccctcctaccgccccccctcccccgctcccccttccgttccccctccccttccgcctccccgtccgccgttctcttcgtccttcccgcctctctctacgcgcccgtccgcctccctctctcctctcctcctttctcnccccgccccccccccgctcccctccgttctcccctcctcccnccttcctcctacccccccctctcgccctccctacgaccgtcctccctccttctcccntcccccgcctaccgcgccgccctctctacttnacgttttcctccccgcctcgctccgcnctccgncgcgacccgctccctccctctcccntcctaccntcctcctacgtcccctctcgcnctaacgacgcctcccgcgcgtcgctcgcttctcttctctcctctctctcctcccccccccttccccctctaccccgcgtccccccgctacctccttctccgtctccgccccctctcctcccccctccntccccgccgactccgcttcgccctcccgtacttctcgactctctccttcctcgntcctcgctctcttttcgtcctcgcttttcctcgtctctcctcgctctcgactaccccgcctcctcc

SEQ ID NO: 25805 - DNA, 526 bp, Artificial Sequence
  chemically treated genomic DNA (Homo sapiens) CpG-island No: 25805
cgggtggcgggggatgtcggtatagagggaggggggggagggttttacgtaggatggaggatggagggcgatgggtaaggttaggaggggcgaagagcgtgatattgtggatcgttcgggggacggaggggtgggtgaggaaggtgtggggtgggcgtaattgaggggaaggaggcgagagtggggttgatgtataggtgacgtgggagtgagatgtatgggtaaggaagggggcgggaggagatttcggagagtgggggtagtgtttgttggaaaaggagaggggggggggggagagggacgaggcggaggatgtgtgagtgtggggtaggcgagaggggggggggatatgatggggagtatggagagagagagggaatcggggggggagtgcggttagtatgtacgtagggggagggggggagggcggatgtaggtaaagggtgggtagagacggcgcggtgtataagagtaggaatagtgagggcggcgggtgtcgtgcgataggtataatggagtggtggcg

SEQ ID NO: 25806 - DNA, 526 bp, Artificial Sequence
  chemically treated genomic DNA (Homo sapiens) CpG-island No: 25806
cgccaccactccattatacctatcgcacgacacccgccgccctcactattcctactcttatacaccgcgccgtctctacccaccctttacctacatccgccctccccccctccccctacgtacatactaaccgcactccccccccgattccctctctctctccatactccccatcatatcccccccccctctcgcctaccccacactcacacatcctccgcctcgtccctctcccccccccccctctccttttccaacaaacactacccccactctccgaaatctcctcccgcccccttccttacccatacatctcactcccacgtcacctatacatcaaccccactctcgcctccttcccctcaattacgcccaccccacaccttcctcacccacccctccgtcccccgaacgatccacaatatcacgctcttcgcccctcctaaccttacccatcgccctccatcctccatcctacgtaaaaccctcccccccctccctctataccgacatcccccgccacccg

SEQ ID NO: 25807 - DNA, 526 bp, Artificial Sequence
  chemically treated genomic DNA (Homo sapiens) CpG-island No: 25807
cgttattattttattatgtttgtcgtacgatattcgtcgtttttattatttttgtttttatatatcgcgtcgtttttgtttattttttatttgtattcgttttttttttttttttttacgtatatattaatcgtatttttttttcggttttttttttttttttatattttttattatattttttttttttttcgtttgttttatatttatatatttttcgtttcgttttttttttttttttttttttttttttttaataaatattatttttatttttcgaagttttttttcgtttttttttttgtttatgtattttatttttacgttatttatgtattagttttattttcgtttttttttttttagttgcgtttattttatattttttttatttattttttcgtttttcgagcgatttataatattacgtttttcgttttttttagttttgtttatcgttttttattttttattttgcgtgaggtttttttttttttttttttatatcggtatttttcgttattcg

SEQ ID NO: 25808 - DNA, 526 bp, Artificial Sequence
  chemically treated genomic DNA (Homo sapiens) CpG-island No: 25808
cgaataacgaaaaataccgatataaaaaaaaaaaaaaaaaaacctcacgcaaaataaaaaataaaaaacgataaacaaaactaaaaaaaacgaaaaacgtaatattataaatcgctcgaaaaacgaaaaaataaataaaaaaaatataaaataaacgcaactaaaaaaaaaaaaacgaaaataaaactaatacataaataacgtaaaaataaaatacataaacaaaaaaaaaaacgaaaaaaaacttcgaaaaataaaaataatatttattaaaaaaaaaaaaaaaaaaaaaaaaaaaaaacgaaacgaaaaatatataaatataaaacaaacgaaaaaaaaaaaaaatataataaaaaatataaaaaaaaaaaaaaaaccgaaaaaaaaatacgattaatatatacgtaaaaaaaaaaaaaaaaaacgaatacaaataaaaaataaacaaaaacgacgcgatatataaaaacaaaaataataaaaacgacgaatatcgtacgacaaacataataaaataataacg

SEQ ID NO: 25809 - DNA, 552 bp, Artificial Sequence
  chemically treated genomic DNA (Homo sapiens) CpG-island No: 25809
  unsure (161, 292, 427)
agaacgggcgtcgtcgcgtatttcgcgatatcgttatgatatgtatttattatatcgatatttttacgtcgcgaacgcggatggcgtatatttatgaatttttcgtttattttcgttttttgatattatttaatatataatcgttttcgttttattagttngtacgttcgcggttttttttttttttttttttgtaatatattaattgatatattttttttcggtatttcgacgttcggagtttcgtttttcgttatttgttttatttacgttattcgttaattatgtttantttgttatagcgttattttttttttttttttttttcgtttttttaattattatttacgagcggtattcgttcgatcgtgttttggttagtttgcgttttttgttttttattattagttacgttttttattcgcgnttttggtcgtatttcgtatgatatttgtttatagaagtattaaaatttttagtattcgttttttttttttttatcgttcgttttttttcgttttataatgtatttaatagtttgcgttattgtcg

SEQ ID NO: 25810 - DNA, 552 bp, Artificial Sequence
  chemically treated genomic DNA (Homo sapiens) CpG-island No: 25810
  unsure (126, 261, 392)
cgacaataacgcaaactattaaatacattataaaacgaaaaaaaacgaacgataaaaaaaaaaaaaacgaatactaaaaattttaatacttctataaacaaatatcatacgaaatacgaccaaaancgcgaataaaaaacgtaactaataataaaaaacaaaaaacgcaaactaaccaaaacacgatcgaacgaataccgctcgtaaataataattaaaaaaacgaaaaaaaaaaaaaaaaaaaataacgctataacaaantaaacataattaacgaataacgtaaataaaacaaataacgaaaaacgaaactccgaacgtcgaaataccgaaaaaaaatatatcaattaatatattacaaaaaaaaaaaaaaaaaaaaccgcgaacgtacnaactaataaaacgaaaacgattatatattaaataatatcaaaaaacgaaaataaacgaaaaattcataaatatacgccatccgcgttcgcgacgtaaaaatatcgatataataaatacatatcataacgatatcgcgaaatacgcgacgacgcccgttct

SEQ ID NO: 25811 - DNA, 552 bp, Artificial Sequence
  chemically treated genomic DNA (Homo sapiens) CpG-island No: 25811
  unsure (126, 261, 392)
cggtagtggcgtaggttgttgagtgtattatggaacgaaagaagacgagcggtgagaggaggagagacgagtgttagaggttttggtgtttttgtgagtaagtgttatgcggggtgcgattagggncgcgagtggggggcgtggttagtggtaggagataggagacgtaggttgattagagtacggtcggacggatgtcgttcgtaagtggtgattaggaaggcggagaggggggggggagggggtagcgttgtgataagntgggtatggttggcgggtagcgtagatggaataggtggcggggggcggggtttcgggcgtcggggtatcggagggaggtgtgttaattggtgtgttgtaaagaaaagaggagagggggtcgcgagcgtatngattggtggggcgggggcgattatgtgttgagtggtattaggaaacgagagtgagcggagagtttatgagtgtgcgttattcgcgttcgcggcgtgagggtgtcggtgtgatggatatatgttatagcgatgtcgcgagatacgcgacggcgttcgtttt

SEQ ID NO: 25812 - DNA, 552 bp, Artificial Sequence
  chemically treated genomic DNA (Homo sapiens) CpG-island No: 25812
  unsure (161, 292, 427)
aaaacgaacgccgtcgcgtatctcgcgacatcgctataacatatatccatcacaccgacaccctcacgccgcgaacgcgaataacgcacactcataaactctccgctcactctcgtttcctaataccactcaacacataatcgcccccgccccaccaatcnatacgctcgcgaccccctctcctcttttctttacaacacaccaattaacacacctccctccgataccccgacgcccgaaaccccgccccccgccacctattccatctacgctacccgccaaccatacccancttatcacaacgctaccccctcccccccccctctccgccttcctaatcaccacttacgaacgacatccgtccgaccgtactctaatcaacctacgtctcctatctcctaccactaaccacgccccccactcgcgnccctaatcgcaccccgcataacacttactcacaaaaacaccaaaacctctaacactcgtctctcctcctctcaccgctcgtcttctttcgttccataatacactcaacaacctacgccactaccg

SEQ ID NO: 25813 - DNA, 564 bp, Artificial Sequence
  chemically treated genomic DNA (Homo sapiens) CpG-island No: 25813
  unsure (218)
tcgtattattaatttttatttatttattttggtttattttttatttattttaatcgtttttattaggatttatatgcgtatattttatcgttattttatatacgtatatacgtttagcgttttttttaaattattttatatcgttcgttttcgtcgtcggatagtcgttatttttatttatatttttgttatcgaatatattttagcgaatttttttngtttttcgcgtttatttatatatttttattttttttattttttacgatttttttaatatttttttcgttttttgattttatttttttttattattaatttatatttatttatttttcgtttatttttcgttcgttattttttttataattatagttgtttttttcgtttcgtcgttattatattttatttatatttatgagacgatgtttggttttttcgtttcgttttacgtcgtttcgtttatatttttttacggttattttttttttttttattttgtatttcgtttttttttgttttttttttatttttattttattttttattttttatttttattttttt

SEQ ID NO: 25814 - DNA, 564 bp, Artificial Sequence
  chemically treated genomic DNA (Homo sapiens) CpG-island No: 25814
  unsure (347)
aaaaaaataaaaataaaaaataaaaaataaaataaaaataaaaaaaaaacaaaaaaaaacgaaatacaaaataaaaaaaaaaaaaataaccgtaaaaaaatataaacgaaacgacgtaaaacgaaacgaaaaaaccaaacatcgtctcataaatataaataaaatataataacgacgaaacgaaaaaaacaactataattataaaaaaaataacgaacgaaaaataaacgaaaaataaataaatataaattaataataaaaaaaaataaaatcaaaaaacgaaaaaaatattaaaaaaatcgtaaaaaataaaaaaaataaaaatatataaataaacgcgaaaaacnaaaaaaattcgctaaaatatattcgataacaaaaatataaataaaaataacgactatccgacgacgaaaacgaacgatataaaataatttaaaaaaaacgctaaacgtatatacgtatataaaataacgataaaatatacgcatataaatcctaataaaaacgattaaaataaataaaaaataaaccaaaataaataaataaaaattaataatacga

SEQ ID NO: 25815 - DNA, 564 bp, Artificial Sequence
  chemically treated genomic DNA (Homo sapiens) CpG-island No: 25815
  unsure (347)
ggaggggtgggggtggagggtggagagtggggtgggagtaaagagaaggtaggggggggcggagtgtaggatgggagaggggggagtgatcgtaggggggtgtgagcggaacggcgtgaggcggagcgagggggttaagtatcgttttatgagtatgggtggggtgtggtgacggcgggacgagaggggtagttgtgattatggaagaaatgacgaacgggggatggacggggagtgagtgagtataggttggtagtggagaggggtggggttagagggcgggggaggtgttgaagaggtcgtggaggatgagaggggtaggggtatgtaggtgggcgcgaagggtnagagagattcgttagaatgtgttcggtgatagaagtgtaggtagaggtggcggttattcgacgacgggggcgaacggtgtgaagtggtttgaaaggggcgttgagcgtgtatgcgtgtgtgggatggcgatagagtgtgcgtatgtaggttttagtaggggcggttaaagtgggtgggaagtgggttaaggtaagtgggtagaagttagtagtgcgg

SEQ ID NO: 25816 - DNA, 564 bp, Artificial Sequence
  chemically treated genomic DNA (Homo sapiens) CpG-island No: 25816
  unsure (218)
ccgcactactaacttctacccacttaccttaacccacttcccacccactttaaccgcccctactaaaacctacatacgcacactctatcgccatcccacacacgcatacacgctcaacgcccctttcaaaccacttcacaccgttcgcccccgtcgtcgaataaccgccacctctacctacacttctatcaccgaacacattctaacgaatctctctnacccttcgcgcccacctacatacccctacccctctcatcctccacgacctcttcaacacctcccccgccctctaaccccacccctctccactaccaacctatactcactcactccccgtccatcccccgttcgtcatttcttccataatcacaactacccctctcgtcccgccgtcaccacaccccacccatactcataaaacgatacttaaccccctcgctccgcctcacgccgttccgctcacacccccctacgatcactcccccctctcccatcctacactccgcccccccctaccttctctttactcccaccccactctccaccctccacccccacccctcc

SEQ ID NO: 25817 - DNA, 603 bp, Artificial Sequence
  chemically treated genomic DNA (Homo sapiens) CpG-island No: 25817
tatttcgtttattatttttacgtttattttttatttgtcgcgttttttttttattattttttttttattatattttgtgcgcgtttttgtgttttatttattttttttttttttttttatatttggtacggcgtttttcgcgtttttgtcggattgtttttcgtaatttatagatttgttacgttttttatttcgttttttacgttattattattttttttaattataatcgttttcgattttttttcgttttggttataattgtttatatttttattatttttattagtttttaatgttttttcgcgttcggtttttttattatttattagtaatttcgttcgcgtatttttattatttcgcgttttacgcggttatttatttatagtttcgcgttttaattttttattttttttatcgtttcgcgtggtgttttttacggtatcgttttttttttttagttttttatattttttttatatttattttgtatattttttttttgcgtttttaattatttttttgttagtgaacgtttaattattcgttacgattttcgcgacgtagcgttcgttatttcgttattatttttgcgcgattttt

SEQ ID NO: 25818 - DNA, 603 bp, Artificial Sequence
  chemically treated genomic DNA (Homo sapiens) CpG-island No: 25818
aaaaatcgcgcaaaaataataacgaaataacgaacgctacgtcgcgaaaatcgtaacgaataattaaacgttcactaacaaaaaaataattaaaaacgcaaaaaaaaaatatacaaaataaatataaaaaaaatataaaaaactaaaaaaaaaaaacgataccgtaaaaaacaccacgcgaaacgataaaaaaaataaaaaattaaaacgcgaaactataaataaataaccgcgtaaaacgcgaaataataaaaatacgcgaacgaaattactaataaataataaaaaaaccgaacgcgaaaaaacattaaaaactaataaaaataataaaaatataaacaattataaccaaaacgaaaaaaaatcgaaaacgattataattaaaaaaaataataataacgtaaaaaacgaaataaaaaacgtaacaaatctataaattacgaaaaacaatccgacaaaaacgcgaaaaacgccgtaccaaatataaaaaaaaaaaaaaaaaataaataaaacacaaaaacgcgcacaaaatataataaaaaaaaaataataaaaaaaaaacgcgacaaataaaaaataaacgtaaaaataataaacgaaata

SEQ ID NO: 25819 - DNA, 603 bp, Artificial Sequence
  chemically treated genomic DNA (Homo sapiens) CpG-island No: 25819
gggagtcgcgtagaggtggtggcgaggtagcggacgttacgtcgcggggatcgtagcgggtggttagacgtttattagtaggaggatagttgaggacgtagagggagagtatgtagggtgggtatgagagaagtatgaaaagttgggagggagaagcgatgtcgtgaaggatattacgcggggcggtagaggaaatagagaattgagacgcggagttgtgagtgagtagtcgcgtgaagcgcggggtggtgaagatacgcggacgagattattagtgagtagtaggagggtcgagcgcgaagggatattaggggttggtaaaggtaatgagagtgtaagtagttgtgattagggcgagggagagtcgaaggcggttatgattagagaagatggtggtggcgtggggagcgggatggagggcgtggtaggtttgtgagttgcgagaggtagttcggtagagacgcgaagagcgtcgtgttaaatatagaggaagagagaggaagtagatagagtataagggcgcgtataaggtgtggtgagaagagggtgataagggaaggacgcgataagtggggaatagacgtgaaagtgataggcggggtg

SEQ ID NO: 25820 - DNA, 603 bp, Artificial Sequence
  chemically treated genomic DNA (Homo sapiens) CpG-island No: 25820
caccccgcctatcactttcacgtctattccccacttatcgcgtccttcccttatcaccctcttctcaccacaccttatacgcgcccttatactctatctacttcctctctcttcctctatatttaacacgacgctcttcgcgtctctaccgaactacctctcgcaactcacaaacctaccacgccctccatcccgctccccacgccaccaccatcttctctaatcataaccgccttcgactctccctcgccctaatcacaactacttacactctcattacctttaccaacccctaatatcccttcgcgctcgaccctcctactactcactaataatctcgtccgcgtatcttcaccaccccgcgcttcacgcgactactcactcacaactccgcgtctcaattctctatttcctctaccgccccgcgtaatatccttcacgacatcgcttctccctcccaacttttcatacttctctcatacccaccctacatactctccctctacgtcctcaactatcctcctactaataaacgtctaaccacccgctacgatccccgcgacgtaacgtccgctacctcgccaccacctctacgcgactccc

SEQ ID NO: 25821 - DNA, 844 bp, Artificial Sequence
  chemically treated genomic DNA (Homo sapiens) CpG-island No: 25821
tttcggcgttcgttttttcgtattttttattcggcgcgtcggttagtacgttttttaatttcgttcgcgttcggcggttattttatttcgatattcgtcgtcgtttttttttttaatcgttttattgtatttttcgttttcgtcgcgtcgcgtcgcgtcgtcgacgttcgatcggttaacgttttttttcgttttattacgtcgtcgtttcgatcgttcgttcgttatttcgtttatcggttcgattcggtcgttgcggtcgtgcgttcggttaggtttgtacgtttttttttttaatacgattcgtttgcgcgtagttcgtcgtttatggtacgcgatttatcgcggttttagtatatcgtatacgttaggtcgcgtcgcggtatttaattcgtatttcgttgtcggattgacgttcggttcgcgtcgttttcgttgcgcgttttcgcgtcgcgatttttagttcgttttgtttttttatttttcgtcgttttatttcgtatcgtttcgtttttttttgcgcggttttcgaaataataataaggtattttgggcgtatcgcgtttttttttttttattttaaaattgtttttatttttttttgtattttcgtttttttcgtttattatttgaaaacgaggtcgggttgttcgttcgtcgattataatttttaacgttcgcggtcgtttcggtagttttgttttattttattataatcgttttcgcgggtcgcgcgtttttcgcgtttttattaatatttaacgttttgttcgttttcggttttgcgtttttttttattcgaaattattagtttcgtcgttttcgcgtcgcggtttttataata

SEQ ID NO: 25822 - DNA, 844 bp, Artificial Sequence
  chemically treated genomic DNA (Homo sapiens) CpG-island No: 25822
tattataaaaaccgcgacgcgaaaacgacgaaactaataatttcgaataaaaaaaaacgcaaaaccgaaaacgaacaaaacgttaaatattaataaaaacgcgaaaaacgcgcgacccgcgaaaacgattataataaaataaaacaaaactaccgaaacgaccgcgaacgttaaaaattataatcgacgaacgaacaacccgacctcgttttcaaataataaacgaaaaaaacgaaaatacaaaaaaaaataaaaacaattttaaaataaaaaaaaaaaaacgcgatacgcccaaaataccttattattatttcgaaaaccgcgcaaaaaaaaacgaaacgatacgaaataaaacgacgaaaaataaaaaaacaaaacgaactaaaaatcgcgacgcgaaaacgcgcaacgaaaacgacgcgaaccgaacgtcaatccgacaacgaaatacgaattaaataccgcgacgcgacctaacgtatacgatatactaaaaccgcgataaatcgcgtaccataaacgacgaactacgcgcaaacgaatcgtattaaaaaaaaaaacgtacaaacctaaccgaacgcacgaccgcaacgaccgaatcgaaccgataaacgaaataacgaacgaacgatcgaaacgacgacgtaataaaacgaaaaaaaacgttaaccgatcgaacgtcgacgacgcgacgcgacgcgacgaaaacgaaaaatacaataaaacgattaaaaaaaaaaacgacgacgaatatcgaaataaaataaccgccgaacgcgaacgaaattaaaaaacgtactaaccgacgcgccgaataaaaaatacgaaaaaacgaacgccgaaa

SEQ ID NO: 25823 - DNA, 844 bp, Artificial Sequence
  chemically treated genomic DNA (Homo sapiens) CpG-island No: 25823
tgttataaggatcgcggcgcgggggcggcgagattggtgatttcggatggggaggggcgtaaggtcgggagcgggtagggcgttgggtgttaatgggggcgcgaggggcgcgcggttcgcgggggcggttgtggtgagatagagtagggttgtcggggcgatcgcggacgttggaggttataatcggcgggcgggtagttcggtttcgtttttaggtggtgagcggagagagcgggggtgtaggggggggtaagggtagttttagggtgggagagaaggggcgcggtgcgtttaggatgttttgttgttgtttcgaaggtcgcgtaggggggggcggggcgatgcgaaatagaacggcggggagtgggggggtagggcgggttggaagtcgcggcgcgggggcgcgtagcggaggcggcgcgggtcggacgttagttcgatagcggggtgcggattgagtgtcgcggcgcggtttgacgtgtacggtgtgttagggtcgcgatgggtcgcgtgttatgggcggcggattgcgcgtaggcggatcgtgttaggaaggaggacgtgtaggtttaatcggacgtacgatcgtaacggtcggatcgagtcggtaagcgagatggcgagcggacggtcgaggcggcggcgtgatgagacgagaggaggcgttggtcgatcgggcgtcggcggcgcggcgcggcgcggcgggggcgagggatgtagtagggcggttggggaggggggcggcggcgggtatcggggtggggtggtcgtcgggcgcgggcggggttggggggcgtgttgatcggcgcgtcgggtgggaggtgcgagaaggcgggcgtcgggg

SEQ ID NO: 25824 - DNA, 844 bp, Artificial Sequence
  chemically treated genomic DNA (Homo sapiens) CpG-island No: 25824
ccccgacgcccgccttctcgcacctcccacccgacgcgccgatcaacacgccccccaaccccgcccgcgcccgacgaccaccccaccccgatacccgccgccgcccccctccccaaccgccctactacatccctcgcccccgccgcgccgcgccgcgccgccgacgcccgatcgaccaacgcctcctctcgtctcatcacgccgccgcctcgaccgtccgctcgccatctcgcttaccgactcgatccgaccgttacgatcgtacgtccgattaaacctacacgtcctccttcctaacacgatccgcctacgcgcaatccgccgcccataacacgcgacccatcgcgaccctaacacaccgtacacgtcaaaccgcgccgcgacactcaatccgcaccccgctatcgaactaacgtccgacccgcgccgcctccgctacgcgcccccgcgccgcgacttccaacccgccctacccccccactccccgccgttctatttcgcatcgccccgcccccccctacgcgaccttcgaaacaacaacaaaacatcctaaacgcaccgcgccccttctctcccaccctaaaactacccttacccccccctacacccccgctctctccgctcaccacctaaaaacgaaaccgaactacccgcccgccgattataacctccaacgtccgcgatcgccccgacaaccctactctatctcaccacaaccgcccccgcgaaccgcgcgcccctcgcgcccccattaacacccaacgccctacccgctcccgaccttacgcccctccccatccgaaatcaccaatctcgccgcccccgcgccgcgatccttataaca

SEQ ID NO: 25825 - DNA, 639 bp, Artificial Sequence
  chemically treated genomic DNA (Homo sapiens) CpG-island No: 25825
aaatatataattttttgtttttttttcgttttatttaaataaatcggggcgggcgttattttttttttttattataaatatttatttcgtcgttttttttttatttatattatataattttttttcggggttttttcgtattttaataaatttttgtcgttttttttttttttattattatatcgcgtcgtcgtttcggggtttcgtattttataataatatttttcgttcgcgttttttttttttatatattatattatacgtcgttcgtttttggttttatttttattaattaaaatatgtttcgcgtgtttttttttttttttttatattatatttatattgattttcggttttgcgtttttttttatattatatttattttttttcggtttttttttttttttttagttaatttaatatatcgttggcggcgtttcgcgtcgagtatttttttatataataattttcgtcggttttttttttttttttttatattcgtatttcgaacgttatacggtcgtttcgttttatgttaataatatattttaatttcgcgggtttgtttgaaatttttatattaataataattagttttttcgttttcgttttttttatttttatttataatcgttttcg

SEQ ID NO: 25826 - DNA, 639 bp, Artificial Sequence
  chemically treated genomic DNA (Homo sapiens) CpG-island No: 25826
cgaaaacgattataaataaaaataaaaaaaacgaaaacgaaaaaactaattattattaatataaaaatttcaaacaaacccgcgaaattaaaatatattattaacataaaacgaaacgaccgtataacgttcgaaatacgaatataaaaaaaaaaaaaaaaaaccgacgaaaattattatataaaaaaatactcgacgcgaaacgccgccaacgatatattaaattaactaaaaaaaaaaaaaaaaaccgaaaaaaaataaatataatataaaaaaaaacgcaaaaccgaaaatcaatataaatataatataaaaaaaaaaaaaaaaacacgcgaaacatattttaattaataaaaataaaaccaaaaacgaacgacgtataatataatatataaaaaaaaaaaacgcgaacgaaaaatattattataaaatacgaaaccccgaaacgacgacgcgatataataataaaaaaaaaaaaaacgacaaaaatttattaaaatacgaaaaaaccccgaaaaaaaattatataatataaataaaaaaaaaacgacgaaataaatatttataataaaaaaaaaaaataacgcccgccccgatttatttaaataaaacgaaaaaaaaacaaaaaattatatattt

SEQ ID NO: 25827 - DNA, 639 bp, Artificial Sequence
  chemically treated genomic DNA (Homo sapiens) CpG-island No: 25827
cgggggcggttgtgggtggagatgaggaaagcgagagcgggggggttggttgttattagtatgggagttttaggtaggttcgcggggttgaggtgtattattaatatggggcggggcggtcgtgtggcgttcgggatacggatgtgaggagagggggggagggtcggcgggggttattatatagggaggtgttcgacgcggggcgtcgttagcggtatattgggttggttgaaggaggggggggggatcggggaggggtggatgtggtatgaaggggagcgtagagtcgggaattaatgtgggtgtgatatagaggggagggagaaggtacgcggggtatgttttggttgatgggagtggaattaagggcgggcggcgtgtggtgtgatatgtagaagaaggagacgcgggcggggagtgttgttatgaagtgcggggtttcgaggcgacggcgcggtgtagtggtagagggggaagggacggtaggggtttgttgaaatgcgagggggtttcgagggggagttgtgtaatatagatgaagggggggcgacggagtgggtatttgtaatgaggggggagggtggcgttcgtttcgatttatttgaataaggcgggggggaggtagggggttgtgtgttt

SEQ ID NO: 25828 - DNA, 639 bp, Artificial Sequence
  chemically treated genomic DNA (Homo sapiens) CpG-island No: 25828
aaacacacaaccccctacctcccccccgccttattcaaataaatcgaaacgaacgccaccctcccccctcattacaaatacccactccgtcgcccccccttcatctatattacacaactccccctcgaaaccccctcgcatttcaacaaacccctaccgtcccttccccctctaccactacaccgcgccgtcgcctcgaaaccccgcacttcataacaacactccccgcccgcgtctccttcttctacatatcacaccacacgccgcccgcccttaattccactcccatcaaccaaaacataccccgcgtaccttctccctcccctctatatcacacccacattaattcccgactctacgctccccttcataccacatccacccctccccgatcccccccccctccttcaaccaacccaatataccgctaacgacgccccgcgtcgaacacctccctatataataacccccgccgaccctccccccctctcctcacatccgtatcccgaacgccacacgaccgccccgccccatattaataatacacctcaaccccgcgaacctacctaaaactcccatactaataacaaccaacccccccgctctcgctttcctcatctccacccacaaccgcccccg

SEQ ID NO: 25829 - DNA, 525 bp, Artificial Sequence
  chemically treated genomic DNA (Homo sapiens) CpG-island No: 25829
  unsure (445)
ttttttttgttttttaagtgagtcgggcgcgcgagaggtaggcggggcggcgcggagcggagtaggtagtttcgcgcgttcgtttatcgttcgtttcgcgtagtttttcgcggtcgttttcgtcgtcgtcgtagcgggcgcgtcggagggagtttagtatggtcgggtcgggttcgtcgcgtcgcgcgtttcggggggtttcggcgtttttcgttgtcgcgtttttttacgtcgcgttgggggacgtggtgcgttcggagtagtagatatcgtttttcgtgtaagtgtcggtttttgcgtcgttcggggaggggattttgtcgtttgcgatttattgtgtttaagtttgggcgtttgtaggtgcggttgggtaggattcgtcgcgggcgtcggtttcgtcgttcgtatttgtttttcgggattcgcgtcgggcggcgaggtcggngtgggatgttttggtttttgttcgtaggttgtcgagtgagatttggagaggtttattttaagtgacggtattaattttgg

SEQ ID NO: 25830 - DNA, 525 bp, Artificial Sequence
  chemically treated genomic DNA (Homo sapiens) CpG-island No: 25830
  unsure (81)
ccaaaattaataccgtcacttaaaataaacctctccaaatctcactcgacaacctacgaacaaaaaccaaaacatcccacnccgacctcgccgcccgacgcgaatcccgaaaaacaaatacgaacgacgaaaccgacgcccgcgacgaatcctacccaaccgcacctacaaacgcccaaacttaaacacaataaatcgcaaacgacaaaatcccctccccgaacgacgcaaaaaccgacacttacacgaaaaacgatatctactactccgaacgcaccacgtcccccaacgcgacgtaaaaaaacgcgacaacgaaaaacgccgaaaccccccgaaacgcgcgacgcgacgaacccgacccgaccatactaaactccctccgacgcgcccgctacgacgacgacgaaaacgaccgcgaaaaactacgcgaaacgaacgataaacgaacgcgcgaaactacctactccgctccgcgccgccccgcctacctctcgcgcgcccgactcacttaaaaaacaaaaaaaa

SEQ ID NO: 25831 - DNA, 525 bp, Artificial Sequence
  chemically treated genomic DNA (Homo sapiens) CpG-island No: 25831
  unsure (81)
ttaaagttggtgtcgttatttgaggtgagtttttttagattttattcggtaatttgcgggtaggggttagagtattttatntcggtttcgtcgttcgacgcgggtttcgaaaggtaggtgcgagcggcgaggtcgacgttcgcggcgggttttgtttagtcgtatttgtaggcgtttaaatttgggtatagtgggtcgtaggcggtaaggtttttttttcgggcggcgtaggagtcggtatttatacggagagcggtatttgttgtttcgagcgtattacgttttttagcgcggcgtagagaagcgcggtagcgagaagcgtcgaggtttttcgggacgcgcggcgcggcgagttcggttcggttatgttgggtttttttcgacgcgttcgttgcggcggcgacgagagcggtcgcggggagttgcgcggagcgggcggtgggcgagcgcgcggggttgtttgtttcgtttcgcgtcgtttcgtttgtttttcgcgcgttcggtttatttggggagtagaaaaag

SEQ ID NO: 25832 - DNA, 525 bp, Artificial Sequence
  chemically treated genomic DNA (Homo sapiens) CpG-island No: 25832
  unsure (445)
ctttttctactccccaaataaaccgaacgcgcgaaaaacaaacgaaacgacgcgaaacgaaacaaacaaccccgcgcgctcgcccaccgcccgctccgcgcaactccccgcgaccgctctcgtcgccgccgcaacgaacgcgtcgaaaaaaacccaacataaccgaaccgaactcgccgcgccgcgcgtcccgaaaaacctcgacgcttctcgctaccgcgcttctctacgccgcgctaaaaaacgtaatacgctcgaaacaacaaataccgctctccgtataaataccgactcctacgccgcccgaaaaaaaaaccttaccgcctacgacccactatacccaaatttaaacgcctacaaatacgactaaacaaaacccgccgcgaacgtcgacctcgccgctcgcacctacctttcgaaacccgcgtcgaacgacgaaaccganataaaatactctaacccctacccgcaaattaccgaataaaatctaaaaaaactcacctcaaataacgacaccaactttaa

SEQ ID NO: 25833 - DNA, 610 bp, Artificial Sequence
  chemically treated genomic DNA (Homo sapiens) CpG-island No: 25833
cgttttattaaagtttttgtatatttttttttacgttgcgtttttgttatttacgtagttgtttttttgagcgtttcgcgtgtataaacgcgttttcggtttttacgcgtcggtggcgttgtttcgttgaggtggcgtcgggggagttcgtagaggcggcgggggagggagtgcggaggagaggattcgtgagttgcggggatttgggttcgtcgagtttttggggaagttgggtttcgtttttttcgggcgtttggggcgcgcgggaaggcgcggaggacgcgtcgtatttattcgttgttgttgtcggttgttgattgttatcgcggcggcggacgcggcgttgtgtcggagttcggtcgtttgtttaggttttaataggtttcgggtgaatttgcgggttcgtttatcggttatcgtcggttacgttaatcgcgtcgcgggttcggggcgcgtttttcgtcggtttttttcgtgttaattttttttatttattcgtcgtttaggaagcggaattcggagtttttttttttttttttttcgtttaattcgtaagaggcgggttttttttttttgtatttttattttttttattttttttttttttttg

SEQ ID NO: 25834 - DNA, 610 bp, Artificial Sequence
  chemically treated genomic DNA (Homo sapiens) CpG-island No: 25834
caaaaaaaaaaaaaaaataaaaaaaataaaaatacaaaaaaaaaaaacccgcctcttacgaattaaacgaaaaaaaaaaaaaaaaaaactccgaattccgcttcctaaacgacgaataaataaaaaaaattaacacgaaaaaaaccgacgaaaaacgcgccccgaacccgcgacgcgattaacgtaaccgacgataaccgataaacgaacccgcaaattcacccgaaacctattaaaacctaaacaaacgaccgaactccgacacaacgccgcgtccgccgccgcgataacaatcaacaaccgacaacaacaacgaataaatacgacgcgtcctccgcgccttcccgcgcgccccaaacgcccgaaaaaaacgaaacccaacttccccaaaaactcgacgaacccaaatccccgcaactcacgaatcctctcctccgcactccctcccccgccgcctctacgaactcccccgacgccacctcaacgaaacaacgccaccgacgcgtaaaaaccgaaaacgcgtttatacacgcgaaacgctcaaaaaaacaactacgtaaataacaaaaacgcaacgtaaaaaaaaatatacaaaaactttaataaaacg

SEQ ID NO: 25835 - DNA, 610 bp, Artificial Sequence
  chemically treated genomic DNA (Homo sapiens) CpG-island No: 25835
tagaggagggaagggggtgggaagagtgggggtgtaagagagaaaaattcgttttttgcgagttgagcgaggaagaggggggggaaggtttcgagtttcgttttttgaacggcgggtggatagagaaggttggtacggggaagatcggcgggaggcgcgtttcgggttcgcggcgcgattggcgtgatcggcgatggtcggtgagcggattcgtaggtttattcggagtttgttgagatttgggtaggcggtcgagtttcggtatagcgtcgcgttcgtcgtcgcggtggtagttagtagtcggtagtagtagcgggtgagtgcggcgcgtttttcgcgttttttcgcgcgttttaggcgttcggggggaacggagtttagtttttttaaaagttcggcgggtttaggttttcgtagtttacgggttttttttttcgtattttttttttcgtcgtttttgcgggttttttcggcgttattttagcgaggtagcgttatcgacgcgtaaggatcgggggcgcgtttgtgtacgcgggacgtttagaggagtagttgcgtgggtagtagaagcgtagcgtgggagaggatgtgtaggggttttaatggggcg

SEQ ID NO: 25836 - DNA, 610 bp, Artificial Sequence
  chemically treated genomic DNA (Homo sapiens) CpG-island No: 25836
cgccccattaaaacccctacacatcctctcccacgctacgcttctactacccacgcaactactcctctaaacgtcccgcgtacacaaacgcgcccccgatccttacgcgtcgataacgctacctcgctaaaataacgccgaaaaaacccgcaaaaacgacgaaaaaaaaaatacgaaaaaaaaaacccgtaaactacgaaaacctaaacccgccgaacttttaaaaaaactaaactccgttccccccgaacgcctaaaacgcgcgaaaaaacgcgaaaaacgcgccgcactcacccgctactactaccgactactaactaccaccgcgacgacgaacgcgacgctataccgaaactcgaccgcctacccaaatctcaacaaactccgaataaacctacgaatccgctcaccgaccatcgccgatcacgccaatcgcgccgcgaacccgaaacgcgcctcccgccgatcttccccgtaccaaccttctctatccacccgccgttcaaaaaacgaaactcgaaaccttcccccccctcttcctcgctcaactcgcaaaaaacgaatttttctctcttacacccccactcttcccacccccttccctcctcta

SEQ ID NO: 25837 - DNA, 1205 bp, Artificial Sequence
  chemically treated genomic DNA (Homo sapiens) CpG-island No: 25837
tttatcgtattttattttgtttcgtttcgtattattttatttttatttgtttcgtttcgtttcgcgtgttacgtttttttcgcgtcgtttcgttttaattattttttttttttcgttttatttttttcgtttgttcggtttcggttcggttttatttatttttttcgtttagttttgttttttttatttgtcgggtttcgttaggacgcgttcgcggtttatttgtaggtttagggcgatacgttgcgtaggttggtgggcggtcggaagcggcggtcggcgggtttgttttttgtcgggtagttcgcgttgcgcgtttgtttacgcggttttagttgtagcgtgtggtggaaggtattgagtacgtcggtcgttaggcgttcgtatagttgttttagtagttttttcggtcggttcgcgtagtttcgcggtcgcgcggggcgtttgttcgttttcggggcgttcgcggtttagttcggcggtagcgttagtaggaagtcggttattagtatttagatttgagggataggttacgtttagcgttcgtacgcgtcggaggagttcgtttgcgtttcgcgttcgtgtttcgttcgcggcgttcggagtcggcgggcgttttttttcgtttcgcggagttagaggtcggttcggaggatgggagtcgcgcgggcgggttttagagcgtttttttcgtttgttcgtcgttcgcggggttttcggggtttagttcggcgtcggttcgcgcgttttcggttttcgtcgtcgtcgtcgtttcgagtcgggggtcgtacggggggcgggtgcggggcgcgcgtgtacgtgtgcgtgtgtttgtcgggttgttgcgtcgcgggttgcgagtgtttgtgattcgtcgtatttttattttcgggcgcgttatttttgtttcgtcgttagcgagggagtttcggagtttaagacgttcggattcgtcgtttcgtagatttatttttgtttttgcgtttcgttattcgttcgttttagttagttcgcgtagggttcgcggttcgttttttcgcgagaagttttttgtggttttttttcgtattcggggattcggatcgagaagtcgattgagcgaggtcgtcgttcggttttacggatatagagcgattttgtatttttcgtttttaggagttgaaaatattttgttatttgtgtagtgtatttattagtgtttttaa

SEQ ID NO: 25838 - DNA, 1205 bp, Artificial Sequence
  chemically treated genomic DNA (Homo sapiens) CpG-island No: 25838
ttaaaaacactaataaatacactacacaaataacaaaatattttcaactcctaaaaacgaaaaatacaaaatcgctctatatccgtaaaaccgaacgacgacctcgctcaatcgacttctcgatccgaatccccgaatacgaaaaaaaaccacaaaaaacttctcgcgaaaaaacgaaccgcgaaccctacgcgaactaactaaaacgaacgaataacgaaacgcaaaaacaaaaataaatctacgaaacgacgaatccgaacgtcttaaactccgaaactccctcgctaacgacgaaacaaaaataacgcgcccgaaaataaaaatacgacgaatcacaaacactcgcaacccgcgacgcaacaacccgacaaacacacgcacacgtacacgcgcgccccgcacccgccccccgtacgacccccgactcgaaacgacgacgacgacgaaaaccgaaaacgcgcgaaccgacgccgaactaaaccccgaaaaccccgcgaacgacgaacaaacgaaaaaaacgctctaaaacccgcccgcgcgactcccatcctccgaaccgacctctaactccgcgaaacgaaaaaaaacgcccgccgactccgaacgccgcgaacgaaacacgaacgcgaaacgcaaacgaactcctccgacgcgtacgaacgctaaacgtaacctatccctcaaatctaaatactaataaccgacttcctactaacgctaccgccgaactaaaccgcgaacgccccgaaaacgaacaaacgccccgcgcgaccgcgaaactacgcgaaccgaccgaaaaaactactaaaacaactatacgaacgcctaacgaccgacgtactcaataccttccaccacacgctacaactaaaaccgcgtaaacaaacgcgcaacgcgaactacccgacaaaaaacaaacccgccgaccgccgcttccgaccgcccaccaacctacgcaacgtatcgccctaaacctacaaataaaccgcgaacgcgtcctaacgaaacccgacaaataaaaaaaacaaaactaaacgaaaaaaataaataaaaccgaaccgaaaccgaacaaacgaaaaaaataaaacgaaaaaaaaaaaataattaaaacgaaacgacgcgaaaaaaacgtaacacgcgaaacgaaacgaaacaaataaaaataaaataatacgaaacgaaacaaaataaaatacgataaa

SEQ ID NO: 25839 - DNA, 1205 bp, Artificial Sequence
  chemically treated genomic DNA (Homo sapiens) CpG-island No: 25839
ttgggggtattggtgagtatattgtataagtgataaaatgtttttagtttttggaggcgaaaggtgtagagtcgttttgtgttcgtgaggtcgggcggcgatttcgtttagtcggtttttcggttcgagttttcgggtacgaggaaagattatagggggtttttcgcggaaaagcgggtcgcggattttgcgcgggttggttggggcgggcggatgacgaggcgtaggggtaagggtgggtttgcgaggcggcgggttcgggcgttttaggtttcggggttttttcgttggcggcggagtagggatggcgcgttcgggggtgagggtgcggcgggttataagtattcgtagttcgcggcgtagtaattcggtaggtatacgtatacgtgtacgcgcgtttcgtattcgtttttcgtgcggttttcggttcggggcggcggcggcggcgggggtcgggggcgcgcgggtcggcgtcgggttgggtttcggggatttcgcgggcggcgggtaggcggggagggcgttttggggttcgttcgcgcggtttttatttttcgggtcggtttttggtttcgcggggcgaggggaggcgttcgtcggtttcgggcgtcgcgggcgggatacgggcgcggggcgtaggcgggttttttcggcgcgtgcggacgttgagcgtggtttgttttttaggtttggatgttggtagtcggttttttgttggcgttgtcgtcgagttgggtcgcgggcgtttcgagggcgggtaggcgtttcgcgcggtcgcggggttgcgcggatcggtcggaggagttattggagtagttgtacgggcgtttggcggtcggcgtgtttagtgttttttattatacgttgtagttggggtcgcgtgagtaggcgcgtaacgcgagttgttcggtagggggtaggttcgtcgatcgtcgttttcggtcgtttattaatttgcgtagcgtgtcgttttgggtttataggtgagtcgcgggcgcgttttggcggggttcggtaggtggggagggtagggttgggcggggagagtgggtggggtcgggtcgaggtcgggtaggcggggagggtggggcggggaaggggaggtggttggggcggggcgacgcggagggggcgtggtacgcggggcgaggcggagtaggtaggggtggggtggtgcggggcgagatagggtagggtacggtagg

SEQ ID NO: 25840 - DNA, 1205 bp, Artificial Sequence
  chemically treated genomic DNA (Homo sapiens) CpG-island No: 25840
cctaccgtaccctaccctatctcgccccgcaccaccccacccctacctactccgcctcgccccgcgtaccacgccccctccgcgtcgccccgccccaaccacctccccttccccgccccaccctccccgcctacccgacctcgacccgaccccacccactctccccgcccaaccctaccctccccacctaccgaaccccgccaaaacgcgcccgcgactcacctataaacccaaaacgacacgctacgcaaattaataaacgaccgaaaacgacgatcgacgaacctaccccctaccgaacaactcgcgttacgcgcctactcacgcgaccccaactacaacgtataataaaaaacactaaacacgccgaccgccaaacgcccgtacaactactccaataactcctccgaccgatccgcgcaaccccgcgaccgcgcgaaacgcctacccgccctcgaaacgcccgcgacccaactcgacgacaacgccaacaaaaaaccgactaccaacatccaaacctaaaaaacaaaccacgctcaacgtccgcacgcgccgaaaaaacccgcctacgccccgcgcccgtatcccgcccgcgacgcccgaaaccgacgaacgcctcccctcgccccgcgaaaccaaaaaccgacccgaaaaataaaaaccgcgcgaacgaaccccaaaacgccctccccgcctacccgccgcccgcgaaatccccgaaacccaacccgacgccgacccgcgcgcccccgacccccgccgccgccgccgccccgaaccgaaaaccgcacgaaaaacgaatacgaaacgcgcgtacacgtatacgtatacctaccgaattactacgccgcgaactacgaatacttataacccgccgcaccctcacccccgaacgcgccatccctactccgccgccaacgaaaaaaccccgaaacctaaaacgcccgaacccgccgcctcgcaaacccacccttacccctacgcctcgtcatccgcccgccccaaccaacccgcgcaaaatccgcgacccgcttttccgcgaaaaaccccctataatctttcctcgtacccgaaaactcgaaccgaaaaaccgactaaacgaaatcgccgcccgacctcacgaacacaaaacgactctacacctttcgcctccaaaaactaaaaacattttatcacttatacaatatactcaccaatacccccaa

SEQ ID NO: 25841 - DNA, 1047 bp, Artificial Sequence
  chemically treated genomic DNA (Homo sapiens) CpG-island No: 25841
tttttttttacgttttttttttttcgtttcggagcgggagcgatggaataggtagggggagtcgcgagggttaggggtggttttttcgttaaatcgttttttttttcgttttttcgaggtttttttttagtcgagggtttttttttaagttcgtaattttcgcggatagtcggagcgagagttatataaatttttttttcggtgtacggagggggcgcgtagatagagcgggcgttcggtcgtcgagggttgcgtttcgggggtcggcgaatttcgagttcgtggggtggatgattagttcgtcggtcgggtcgggtagttgcgggtatgtgggagttttatcgcgcggtttcgggttttgcgtcgtcgtcgttgttttttcggttttttttttttttcgattttttaagagcgagcgaggtattggcgttttttagatacgtatatttatatacgcgtatatacgagcgagtttttgttaaagtaaatcgtgtaattcgcgcgcgcgtatattcgtaggaagaggattaaggtaaaaagagaagaaagaaaggggagggggcgagttataggcggcggtggcggcggtagtagttgtcggagcggaggtaacgagtagttcgagaaaaattagtagtagcggcggcggcggcggcggcggcgtttatttcgattagttgtagtatttgtattttcgtttttgggaattggagcgagcggtgtcgggttagtaggcgaggggggcgacgcgtagatagcgggttagagcgcgggcgcgcggggatcgtgtagtttgcgcgcggggtaggcgtagtcggggtcggagcggaggttagaatgagtagcggtcgggcgggttagcggtaagagtttcgagagtcggggagggggttcgcgttagggaaaggggtggtcggtaaaattcggatatggagtgttcgtgggtttcgcggcgcgggttttatttagtagttcggtaaacgtttggaggtgggaacgggagggttgttattagaggttttttttttagggtttgttagataaagg

SEQ ID NO: 25842 - DNA, 1047 bp, Artificial Sequence
  chemically treated genomic DNA (Homo sapiens) CpG-island No: 25842
cctttatctaacaaaccctaaaaaaaaaacctctaataacaaccctcccgttcccacctccaaacgtttaccgaactactaaataaaacccgcgccgcgaaacccacgaacactccatatccgaattttaccgaccacccctttccctaacgcgaaccccctccccgactctcgaaactcttaccgctaacccgcccgaccgctactcattctaacctccgctccgaccccgactacgcctaccccgcgcgcaaactacacgatccccgcgcgcccgcgctctaacccgctatctacgcgtcgcccccctcgcctactaacccgacaccgctcgctccaattcccaaaaacgaaaatacaaatactacaactaatcgaaataaacgccgccgccgccgccgccgccgctactactaatttttctcgaactactcgttacctccgctccgacaactactaccgccgccaccgccgcctataactcgccccctcccctttctttcttctctttttaccttaatcctcttcctacgaatatacgcgcgcgcgaattacacgatttactttaacaaaaactcgctcgtatatacgcgtatataaatatacgtatctaaaaaacgccaatacctcgctcgctcttaaaaaatcgaaaaaaaaaaaaaaccgaaaaaacaacgacgacgacgcaaaacccgaaaccgcgcgataaaactcccacatacccgcaactacccgacccgaccgacgaactaatcatccaccccacgaactcgaaattcgccgacccccgaaacgcaaccctcgacgaccgaacgcccgctctatctacgcgccccctccgtacaccgaaaaaaaaatttatataactctcgctccgactatccgcgaaaattacgaacttaaaaaaaaaccctcgactaaaaaaaaacctcgaaaaaacgaaaaaaaaaacgatttaacgaaaaaaccacccctaaccctcgcgactccccctacctattccatcgctcccgctccgaaacgaaaaaaaaaaaacgtaaaaaaaaa

SEQ ID NO: 25843 - DNA, 1047 bp, Artificial Sequence
  chemically treated genomic DNA (Homo sapiens) CpG-island No: 25843
tttttgtttgataaattttgaaagggaagtttttagtagtagttttttcgtttttatttttaagcgtttgtcgaattgttaggtggagttcgcgtcgcggagtttacgagtattttatattcgggttttgtcggttatttttttttttggcgcgagtttttttttcggttttcggagtttttgtcgttggttcgttcgatcgttgtttattttggttttcgtttcggtttcggttgcgtttatttcgcgcgtaggttgtacggttttcgcgcgttcgcgttttgattcgttgtttgcgcgtcgtttttttcgtttgttggttcggtatcgttcgttttagtttttaggagcggggatgtagatgttgtagttggtcggggtgggcgtcgtcgtcgtcgtcgtcgtcgttgttgttggtttttttcggattgttcgttgttttcgtttcggtagttgttgtcgtcgttatcgtcgtttgtgattcgttttttttttttttttttttttttttttgttttggttttttttttacgggtgtgcgcgcgcgcgggttgtacggtttgttttggtaggagttcgttcgtgtgtgcgcgtgtgtgagtgtgcgtgtttggagagcgttagtgtttcgttcgtttttggggagtcgaagaagagaaagaatcgaagagatagcggcggcggcgtagagttcggggtcgcgcgatgaagtttttatatgttcgtagttgttcggttcggtcggcgagttaattatttattttacgggttcggggttcgtcggttttcgggacgtagttttcggcggtcgggcgttcgttttgtttgcgcgtttttttcgtgtatcggggaaggagtttgtgtggttttcgtttcggttgttcgcggaggttgcgggtttgagaggggattttcggttgggagagagtttcgggaggacgaagaggaggacggtttggcggagaagttatttttggttttcgcggttttttttatttattttatcgttttcgtttcgaggcggaaaggggaggacgtggaagaaga

SEQ ID NO: 25844 - DNA, 1047 bp, Artificial Sequence
  chemically treated genomic DNA (Homo sapiens) CpG-island No: 25844
tcttcttccacgtcctcccctttccgcctcgaaacgaaaacgataaaataaataaaaaaaaccgcgaaaaccaaaaataacttctccgccaaaccgtcctcctcttcgtcctcccgaaactctctcccaaccgaaaatcccctctcaaacccgcaacctccgcgaacaaccgaaacgaaaaccacacaaactccttccccgatacacgaaaaaaacgcgcaaacaaaacgaacgcccgaccgccgaaaactacgtcccgaaaaccgacgaaccccgaacccgtaaaataaataattaactcgccgaccgaaccgaacaactacgaacatataaaaacttcatcgcgcgaccccgaactctacgccgccgccgctatctcttcgattctttctcttcttcgactccccaaaaacgaacgaaacactaacgctctccaaacacgcacactcacacacgcgcacacacgaacgaactcctaccaaaacaaaccgtacaacccgcgcgcgcgcacacccgtaaaaaaaaaaccaaaacaaaaaaaaaaaaaaaaaaaaaaaaaaaacgaatcacaaacgacgataacgacgacaacaactaccgaaacgaaaacaacgaacaatccgaaaaaaaccaacaacaacgacgacgacgacgacgacgacgcccaccccgaccaactacaacatctacatccccgctcctaaaaactaaaacgaacgataccgaaccaacaaacgaaaaaaacgacgcgcaaacaacgaatcaaaacgcgaacgcgcgaaaaccgtacaacctacgcgcgaaataaacgcaaccgaaaccgaaacgaaaaccaaaataaacaacgatcgaacgaaccaacgacaaaaactccgaaaaccgaaaaaaaaactcgcgccaaaaaaaaaaataaccgacaaaacccgaatataaaatactcgtaaactccgcgacgcgaactccacctaacaattcgacaaacgcttaaaaataaaaacgaaaaaactactactaaaaacttccctttcaaaatttatcaaacaaaaa

SEQ ID NO: 25845 - DNA, 569 bp, Artificial Sequence
  chemically treated genomic DNA (Homo sapiens) CpG-island No: 25845
gtcgtagtttcgttgtttattttttttagcgtcggttgtcgttttcgggtagatatcgtcggttttgattttggggttgatatcgttaaagggtagttagtgttcgtttaggttatttcgggaggtttaggggtacggcgaggggtcggggaaaggcgatcgtttattatagttcgcgcgtttagattgagggaggagtcgggttgtagaatcggcggcggatggagacgggagggaggttgcgaggtcgttcgaggagagattaaggttttagaaacggagaagcgggcgttttgcgggaggcggcggcgttgtcgttggtcgttaagggcgggaagtgttttgggatttttattaggggtcgcgagtttcgagcgttaaattttcgcggcgttcgtttagcgcgttgttgtggcgggcgcggagggcgcgcgtcggtagtgggggttgcggcggcggagggtacgggttttcgtttagcgtttttatttttttggtgtagttgtttttcgcgagtcgagatatttttgttagggaagaggagcgtttcggttgtttttttagagttt

SEQ ID NO: 25846 - DNA, 569 bp, Artificial Sequence
  chemically treated genomic DNA (Homo sapiens) CpG-island No: 25846
aaactctaaaaaaacaaccgaaacgctcctcttccctaacaaaaatatctcgactcgcgaaaaacaactacaccaaaaaaataaaaacgctaaacgaaaacccgtaccctccgccgccgcaacccccactaccgacgcgcgccctccgcgcccgccacaacaacgcgctaaacgaacgccgcgaaaatttaacgctcgaaactcgcgacccctaataaaaatcccaaaacacttcccgcccttaacgaccaacgacaacgccgccgcctcccgcaaaacgcccgcttctccgtttctaaaaccttaatctctcctcgaacgacctcgcaacctccctcccgtctccatccgccgccgattctacaacccgactcctccctcaatctaaacgcgcgaactataataaacgatcgcctttccccgacccctcgccgtacccctaaacctcccgaaataacctaaacgaacactaactaccctttaacgatatcaaccccaaaatcaaaaccgacgatatctacccgaaaacgacaaccgacgctaaaaaaaataaacaacgaaactacgac

SEQ ID NO: 25847 - DNA, 569 bp, Artificial Sequence
  chemically treated genomic DNA (Homo sapiens) CpG-island No: 25847
agattttagggggatagtcggggcgttttttttttttgataggagtgtttcggttcgcgggaggtagttgtattaagaaggtgaggacgttgagcgggggttcgtgtttttcgtcgtcgtagtttttattgtcggcgcgcgtttttcgcgttcgttatagtagcgcgttaggcggacgtcgcgggaatttgacgttcgaggttcgcggtttttaatgagagttttagaatatttttcgtttttgacggttagcggtagcgtcgtcgtttttcgtagagcgttcgttttttcgtttttagagttttagttttttttcgagcgatttcgtagtttttttttcgtttttattcgtcgtcggttttgtagttcggttttttttttagtttaggcgcgcgggttgtagtgggcgatcgttttttttcgatttttcgtcgtgtttttgggtttttcgaagtggtttgggcgagtattgattgttttttggcggtgttagttttaaagttagggtcggcgatgtttgttcgggagcggtagtcggcgttgaagaaggtaggtagcggggttgcggt

SEQ ID NO: 25848 - DNA, 569 bp, Artificial Sequence
  chemically treated genomic DNA (Homo sapiens) CpG-island No: 25848
accgcaaccccgctacctaccttcttcaacgccgactaccgctcccgaacaaacatcgccgaccctaactttaaaactaacaccgccaaaaaacaatcaatactcgcccaaaccacttcgaaaaacccaaaaacacgacgaaaaatcgaaaaaaaacgatcgcccactacaacccgcgcgcctaaactaaaaaaaaaaccgaactacaaaaccgacgacgaataaaaacgaaaaaaaaactacgaaatcgctcgaaaaaaaactaaaactctaaaaacgaaaaaacgaacgctctacgaaaaacgacgacgctaccgctaaccgtcaaaaacgaaaaatattctaaaactctcattaaaaaccgcgaacctcgaacgtcaaattcccgcgacgtccgcctaacgcgctactataacgaacgcgaaaaacgcgcgccgacaataaaaactacgacgacgaaaaacacgaacccccgctcaacgtcctcaccttcttaatacaactacctcccgcgaaccgaaacactcctatcaaaaaaaaaaaacgccccgactatccccctaaaatct

SEQ ID NO: 25849 - DNA, 614 bp, Artificial Sequence
  chemically treated genomic DNA (Homo sapiens) CpG-island No: 25849
gtcggtcggaggggcgaggacgcgcgggcggaggcgcggttgtcgtgtttaggtagggagtcgagtttcgggtgttcgtcgcgcgtttttcgtcggggttatgtattttcgtttgcgttcgatatcgcgggttggaggcgagtgtagcggcgatagttcgttagcgtcgcggttcgtttcgtttcgggttcgtttttttcgtttcgggcgttttgcgtcggggttcgttttcgtagttttttttagtttttttttagtttgggtttttttagtttcgttttagtttgcggcgcgtttggcgggcgtttttttatatatgttagtatatcggttatcggttgattttttcggtttgtgatttcgcgtgggtgtagttcgtaggagtttatcggtttgtgttacgtacgggggtttttagtgtacggatacgcgtttttttcgttatttgtttatttttattagattttattttttttcgcgtcgtgttcgcggcggaaggcgtttttgtagcgcgtgtattcgcggagcggtggcgattttagtttgagtagaggagttgtagtgatttttgtttcgtttttagcggattgcggagggaattttttattttattt

SEQ ID NO: 25850 - DNA, 614 bp, Artificial Sequence
  chemically treated genomic DNA (Homo sapiens) CpG-island No: 25850
aaataaaataaaaaattccctccgcaatccgctaaaaacgaaacaaaaatcactacaactcctctactcaaactaaaatcgccaccgctccgcgaatacacgcgctacaaaaacgccttccgccgcgaacacgacgcgaaaaaaaataaaatctaataaaaataaacaaataacgaaaaaaacgcgtatccgtacactaaaaacccccgtacgtaacacaaaccgataaactcctacgaactacacccacgcgaaatcacaaaccgaaaaaatcaaccgataaccgatatactaacatatataaaaaaacgcccgccaaacgcgccgcaaactaaaacgaaactaaaaaaacccaaactaaaaaaaaactaaaaaaaactacgaaaacgaaccccgacgcaaaacgcccgaaacgaaaaaaacgaacccgaaacgaaacgaaccgcgacgctaacgaactatcgccgctacactcgcctccaacccgcgatatcgaacgcaaacgaaaatacataaccccgacgaaaaacgcgcgacgaacacccgaaactcgactccctacctaaacacgacaaccgcgcctccgcccgcgcgtcctcgcccctccgaccgac

SEQ ID NO: 25851 - DNA, 614 bp, Artificial Sequence
  chemically treated genomic DNA (Homo sapiens) CpG-island No: 25851
gggtggggtgggggatttttttcgtagttcgttgaaagcgaggtaggaattattgtaatttttttgtttaggttgaggtcgttatcgtttcgcggatgtacgcgttgtaggggcgtttttcgtcgcgggtacggcgcgggaagggatggggtttggtgggagtgggtaggtggcgggagaggcgcgtgttcgtgtattagaggttttcgtgcgtgatataggtcgatgagtttttgcgggttgtatttacgcggagttatagatcgaaaaggttagtcggtggtcggtgtgttaatatatatagagagacgttcgttaggcgcgtcgtaggttgggacgaggttaggagggtttaggttggaggagggttgaggagggttgcgggggcgggtttcggcgtagggcgttcggagcggagggggcgggttcgaggcggggcgggtcgcggcgttgacgggttgtcgtcgttgtattcgtttttagttcgcggtgtcgagcgtaggcggaggtatatggtttcgacgggaggcgcgcggcgagtattcggagttcggttttttgtttgagtacggtagtcgcgttttcgttcgcgcgttttcgttttttcggtcggt

SEQ ID NO: 25852 - DNA, 614 bp, Artificial Sequence
  chemically treated genomic DNA (Homo sapiens) CpG-island No: 25852
accgaccgaaaaaacgaaaacgcgcgaacgaaaacgcgactaccgtactcaaacaaaaaaccgaactccgaatactcgccgcgcgcctcccgtcgaaaccatatacctccgcctacgctcgacaccgcgaactaaaaacgaatacaacgacgacaacccgtcaacgccgcgacccgccccgcctcgaacccgccccctccgctccgaacgccctacgccgaaacccgcccccgcaaccctcctcaaccctcctccaacctaaaccctcctaacctcgtcccaacctacgacgcgcctaacgaacgtctctctatatatattaacacaccgaccaccgactaaccttttcgatctataactccgcgtaaatacaacccgcaaaaactcatcgacctatatcacgcacgaaaacctctaatacacgaacacgcgcctctcccgccacctacccactcccaccaaaccccatcccttcccgcgccgtacccgcgacgaaaaacgcccctacaacgcgtacatccgcgaaacgataacgacctcaacctaaacaaaaaaattacaataattcctacctcgctttcaacgaactacgaaaaaaatcccccaccccaccc

SEQ ID NO: 25853 - DNA, 773 bp, Artificial Sequence
  chemically treated genomic DNA (Homo sapiens) CpG-island No: 25853
cggttcggtcgcggggagtttcgttttattttagtgggttacgtggacgatatttagttcgtgaggttcgatagcgacgtcgcgagttcgagagaggagtcgcgggcgtcgtggatagagtaggaggggtcggagtattgggatcggaatatatagatttataaggtttaggtatagattgatcgagagagtttgcggaatttgcgcggttattataattagagcgaggtcggtgagtgatttcggttcggggcgtaggttacgattttttattttttacgtacggttcgggtcgtttcgagttttcgggttcgagattcgtttttttgaggtcgcgggattcgtttagattttcgatcggcgagagttttaggcgcgtttattcggttttatttttagttgaggttaaaattttcgcgggttggtcggggcggggcggggttcgggggattgggttgatcgcggggtcggggttagggttttatattttttagagtatgtacggttgcgacgtggggtcggacgggcgtttttttcgcgggtatgattagtacgtttacgacggtaaggattatatcgttttgaacgaggatttgcgtttttggatcgtcgcggatacggcggtttagattatttagcgtaagtgggaggcggttcgtgaggcggagtagcggagagtttatttggagggcgagtgcgtggagtggtttcgtagatatttggagaacgggaaggataagttggagcgcgttggtattaggggtagtggggag

SEQ ID NO: 25854 - DNA, 773 bp, Artificial Sequence
  chemically treated genomic DNA (Homo sapiens) CpG-island No: 25854
ctccccactacccctaataccaacgcgctccaacttatccttcccgttctccaaatatctacgaaaccactccacgcactcgccctccaaataaactctccgctactccgcctcacgaaccgcctcccacttacgctaaataatctaaaccgccgtatccgcgacgatccaaaaacgcaaatcctcgttcaaaacgatataatccttaccgtcgtaaacgtactaatcatacccgcgaaaaaaacgcccgtccgaccccacgtcgcaaccgtacatactctaaaaaatataaaaccctaaccccgaccccgcgatcaacccaatcccccgaaccccgccccgccccgaccaacccgcgaaaattttaacctcaactaaaaataaaaccgaataaacgcgcctaaaactctcgccgatcgaaaatctaaacgaatcccgcgacctcaaaaaaacgaatctcgaacccgaaaactcgaaacgacccgaaccgtacgtaaaaaataaaaaatcgtaacctacgccccgaaccgaaatcactcaccgacctcgctctaattataataaccgcgcaaattccgcaaactctctcgatcaatctatacctaaaccttataaatctatatattccgatcccaatactccgacccctcctactctatccacgacgcccgcgactcctctctcgaactcgcgacgtcgctatcgaacctcacgaactaaatatcgtccacgtaacccactaaaataaaacgaaactccccgcgaccgaaccg

SEQ ID NO: 25855 - DNA, 773 bp, Artificial Sequence
  chemically treated genomic DNA (Homo sapiens) CpG-island No: 25855
ttttttattgtttttggtattagcgcgttttagtttgtttttttcgttttttaggtatttgcggagttattttacgtattcgttttttaggtaggtttttcgttgtttcgttttacgggtcgttttttatttgcgttgggtgatttgagtcgtcgtgttcgcggcggtttaggagcgtaggttttcgtttagggcgatgtaatttttgtcgtcgtaggcgtattggttatgttcgcggaggaggcgttcgttcggttttacgtcgtagtcgtatatgttttggagggtgtgagattttggtttcggtttcgcggttagtttagtttttcgagtttcgtttcgtttcgattaattcgcggggattttggttttaattgaaaatgaaatcgggtaaacgcgtttggggttttcgtcggtcgagggtttgggcgggtttcgcggttttagggaggcggatttcggattcggagattcggggcgattcgggtcgtacgtgggggatggggagtcgtgatttgcgtttcgggtcggggttatttatcggtttcgttttggttgtagtagtcgcgtaggtttcgtaggttttttcggttagtttgtgtttgggttttgtagatttgtgtgtttcggttttaatatttcggttttttttgttttatttacggcgttcgcggtttttttttcggattcgcggcgtcgttgtcgaattttacgaattgggtgtcgtttacgtagtttattgagatgaagcggggtttttcgcggtcgggtcg

SEQ ID NO: 25856 - DNA, 773 bp, Artificial Sequence
  chemically treated genomic DNA (Homo sapiens) CpG-island No: 25856
cgacccgaccgcgaaaaaccccgcttcatctcaataaactacgtaaacgacacccaattcgtaaaattcgacaacgacgccgcgaatccgaaaaaaaaaccgcgaacgccgtaaataaaacaaaaaaaaccgaaatattaaaaccgaaacacacaaatctacaaaacccaaacacaaactaaccgaaaaaacctacgaaacctacgcgactactacaaccaaaacgaaaccgataaataaccccgacccgaaacgcaaatcacgactccccatcccccacgtacgacccgaatcgccccgaatctccgaatccgaaatccgcctccctaaaaccgcgaaacccgcccaaaccctcgaccgacgaaaaccccaaacgcgtttacccgatttcattttcaattaaaaccaaaatccccgcgaattaatcgaaacgaaacgaaactcgaaaaactaaactaaccgcgaaaccgaaaccaaaatctcacaccctccaaaacatatacgactacgacgtaaaaccgaacgaacgcctcctccgcgaacataaccaatacgcctacgacgacaaaaattacatcgccctaaacgaaaacctacgctcctaaaccgccgcgaacacgacgactcaaatcacccaacgcaaataaaaaacgacccgtaaaacgaaacaacgaaaaacctacctaaaaaacgaatacgtaaaataactccgcaaatacctaaaaaacgaaaaaaacaaactaaaacgcgctaataccaaaaacaataaaaaa

SEQ ID NO: 25857 - DNA, 594 bp, Artificial Sequence
  chemically treated genomic DNA (Homo sapiens) CpG-island No: 25857
cgcgtattttttcgttcgggtcggttttttttcgtttttagatttttattatttttttattattttatatgtcgggtgtatatggtgcggagagttcgggggaagttagaatacgcggcgggagaggtaggtttagggcggttttagttaagtagttcggtttttcggattttcgtcgcgtataggttcgggtcgtttagggtgggattcgaattcgttttttcgtttcgtttaaggaggttatttttggaggtgtttttagaaggatcggcgggtttttcgcggggcgggggcgcgtagggcgggtgtttggaggttggggattcgtaggagaggtcggtgggtgtcgggttttttgtagggggttgtaggtcgaggggcgcgttacgaatttagcgggaatttttgcgtttttcggtatcgtcgggttgaaatcggggtttttagcgttggcggtttcgggttgggatttttttattttcggggtttcgtagggcgcgtacgtggcgttcgggggttatcgttgtagtcgttttttcgaggaggttcggattgaaaatttttttaaaaaaaaaatttaaaaaaaaaatttcg

SEQ ID NO: 25858 - DNA, 594 bp, Artificial Sequence
  chemically treated genomic DNA (Homo sapiens) CpG-island No: 25858
cgaaattttttttttaaattttttttttaaaaaaattttcaatccgaacctcctcgaaaaaacgactacaacgataacccccgaacgccacgtacgcgccctacgaaaccccgaaaataaaaaaatcccaacccgaaaccgccaacgctaaaaaccccgatttcaacccgacgataccgaaaaacgcaaaaattcccgctaaattcgtaacgcgcccctcgacctacaaccccctacaaaaaacccgacacccaccgacctctcctacgaatccccaacctccaaacacccgccctacgcgcccccgccccgcgaaaaacccgccgatccttctaaaaacacctccaaaaataacctccttaaacgaaacgaaaaaacgaattcgaatcccaccctaaacgacccgaacctatacgcgacgaaaatccgaaaaaccgaactacttaactaaaaccgccctaaacctacctctcccgccgcgtattctaacttcccccgaactctccgcaccatatacacccgacatataaaataataaaaaaataataaaaatctaaaaacgaaaaaaaaccgacccgaacgaaaaaatacgcg

SEQ ID NO: 25859 - DNA, 594 bp, Artificial Sequence
  chemically treated genomic DNA (Homo sapiens) CpG-island No: 25859
cggaattttttttttaagttttttttttaaagaagtttttaattcgggttttttcgggaaagcggttgtaacggtgattttcgagcgttacgtgcgcgttttgcggagtttcgggagtggggaggttttagttcgaggtcgttaacgttaggaatttcgattttagttcgacggtgtcgggaagcgtagggattttcgttgggttcgtggcgcgtttttcggtttgtaattttttgtaggaggttcggtatttatcggttttttttgcgagtttttagtttttaaatattcgttttgcgcgttttcgtttcgcgggaaattcgtcggtttttttaggggtatttttaaagatgatttttttgagcggggcgggaaggcgagttcgggttttattttaggcggttcgagtttgtgcgcggcggggattcggaaagtcgggttgtttagttgaggtcgttttgggtttgtttttttcgtcgcgtgttttaatttttttcgggtttttcgtattatatatattcgatatgtggaatagtaggaggatggtgggagtttgagggcggaggggagtcggttcgggcggaggggtgcgcg

SEQ ID NO: 25860 - DNA, 594 bp, Artificial Sequence
  chemically treated genomic DNA (Homo sapiens) CpG-island No: 25860
cgcgcacccctccgcccgaaccgactcccctccgccctcaaactcccaccatcctcctactattccacatatcgaatatatataatacgaaaaacccgaaaaaaattaaaacacgcgacgaaaaaaacaaacccaaaacgacctcaactaaacaacccgactttccgaatccccgccgcgcacaaactcgaaccgcctaaaataaaacccgaactcgccttcccgccccgctcaaaaaaatcatctttaaaaatacccctaaaaaaaccgacgaatttcccgcgaaacgaaaacgcgcaaaacgaatatttaaaaactaaaaactcgcaaaaaaaaccgataaataccgaacctcctacaaaaaattacaaaccgaaaaacgcgccacgaacccaacgaaaatccctacgcttcccgacaccgtcgaactaaaatcgaaattcctaacgttaacgacctcgaactaaaacctccccactcccgaaactccgcaaaacgcgcacgtaacgctcgaaaatcaccgttacaaccgctttcccgaaaaaacccgaattaaaaacttctttaaaaaaaaaacttaaaaaaaaaattccg

SEQ ID NO: 25861 - DNA, 922 bp, Artificial Sequence
  chemically treated genomic DNA (Homo sapiens) CpG-island No: 25861
ggggcgtgtgttcgttttcgttttttttcggcggtattaggtttatggggggcgtgtgttcgttttcgttttttttcggtcgtattaggtttatggggggcgtgtgttcgttttcgttttttttcggcggtattaggtcgatggggggtatgtgttcgttttcgttttttttcggcggtattaggtcgatggggggcgtgtgttcgttttcgttttttttcggcggtattaggtttatggggggcgtgtgttcgttttcgttttttttcggcggtattaggtcgatggggggcgtgtgttcgttttcgttttttttcggcggtattaggtcgatggggggcgtgtgttcgttttcgttttttttcggcggtattaggtttatggggggcgtgtgttcgttttcgttttttttcggtcgtattaggtttatggggggcgtgtgttcgttttcgttttttttcggcggtattaggtcgatggggggcgtgtgttcgttttcgttttttttcggcggtattaggtcgatggggggcgtgtgttcgttttcgttttttttcggcggtattaggtcgatggggggcgtgtgttcgttttcgttttttttcggtcgtattaggtttatggggggcgtgtgttcgttttcgttttttttcggcggtattaggtttatggggggcgtgtgttcgttttcgttttttttcggttatattaggttgatggggggcgtgtgttcgttttcgttttttttattgtttttcgcggtcgttggttgagattaggtggtagcgagttttttcgagaggaattgaaacgcgtgagtcgacgtttgagttttagttatacgttgtttggcgtataggtttggacgcggtttttggtggtcgttttatttcgggtacgttatagggtgggttttttgagg

SEQ ID NO: 25862 - DNA, 922 bp, Artificial Sequence
  chemically treated genomic DNA (Homo sapiens) CpG-island No: 25862
cctcaaaaaacccaccctataacgtacccgaaataaaacgaccaccaaaaaccgcgtccaaacctatacgccaaacaacgtataactaaaactcaaacgtcgactcacgcgtttcaattcctctcgaaaaaactcgctaccacctaatctcaaccaacgaccgcgaaaaacaataaaaaaaacgaaaacgaacacacgccccccatcaacctaatataaccgaaaaaaaacgaaaacgaacacacgccccccataaacctaataccgccgaaaaaaaacgaaaacgaacacacgccccccataaacctaatacgaccgaaaaaaaacgaaaacgaacacacgccccccatcgacctaataccgccgaaaaaaaacgaaaacgaacacacgccccccatcgacctaataccgccgaaaaaaaacgaaaacgaacacacgccccccatcgacctaataccgccgaaaaaaaacgaaaacgaacacacgccccccataaacctaatacgaccgaaaaaaaacgaaaacgaacacacgccccccataaacctaataccgccgaaaaaaaacgaaaacgaacacacgccccccatcgacctaataccgccgaaaaaaaacgaaaacgaacacacgccccccatcgacctaataccgccgaaaaaaaacgaaaacgaacacacgccccccataaacctaataccgccgaaaaaaaacgaaaacgaacacacgccccccatcgacctaataccgccgaaaaaaaacgaaaacgaacacataccccccatcgacctaataccgccgaaaaaaaacgaaaacgaacacacgccccccataaacctaatacgaccgaaaaaaaacgaaaacgaacacacgccccccataaacctaataccgccgaaaaaaaacgaaaacgaacacacgcccc

SEQ ID NO: 25863 - DNA, 922 bp, Artificial Sequence
  chemically treated genomic DNA (Homo sapiens) CpG-island No: 25863
ttttagggagtttattttgtgacgtgttcgaggtgaggcggttattagaggtcgcgtttaaatttgtgcgttaggtagcgtgtggttgaggtttagacgtcgatttacgcgttttagtttttttcgagaaaattcgttgttatttggttttagttagcgatcgcgagggatagtgagaaaggcgagagcgggtatacgttttttattaatttggtgtggtcgggggaaggcgagagcgggtatacgttttttatgaatttggtatcgtcgggggaaggcgagagcgggtatacgttttttatgaatttggtacggtcgggggaaggcgagagcgggtatacgttttttatcgatttggtatcgtcgggggaaggcgagagcgggtatacgttttttatcgatttggtatcgtcgggggaaggcgagagcgggtatacgttttttatcgatttggtatcgtcgggggaaggcgagagcgggtatacgttttttatgaatttggtgcggtcgggggaaggcgagagcgggtatacgttttttatgaatttggtatcgtcgggggaaggcgagagcgggtatacgttttttatcgatttggtatcgtcgggggaaggcgagagcgggtatacgttttttatcgatttggtatcgtcgggggaaggcgagagcgggtatacgttttttatgaatttggtatcgtcgggggaaggcgagagcgggtatacgttttttatcgatttggtatcgtcgggggaaggcgagagcgggtatatgttttttatcgatttggtatcgtcgggggaaggcgagagcgggtatacgttttttatgaatttggtgcggtcgggggaaggcgagagcgggtatacgttttttatgaatttggtatcgtcgggggaaagcgagagcgggtatacgtttt

SEQ ID NO: 25864 - DNA, 922 bp, Artificial Sequence
  chemically treated genomic DNA (Homo sapiens) CpG-island No: 25864
aaaacgtatacccgctctcgctttcccccgacgataccaaattcataaaaaacgtatacccgctctcgccttcccccgaccgcaccaaattcataaaaaacgtatacccgctctcgccttcccccgacgataccaaatcgataaaaaacatatacccgctctcgccttcccccgacgataccaaatcgataaaaaacgtatacccgctctcgccttcccccgacgataccaaattcataaaaaacgtatacccgctctcgccttcccccgacgataccaaatcgataaaaaacgtatacccgctctcgccttcccccgacgataccaaatcgataaaaaacgtatacccgctctcgccttcccccgacgataccaaattcataaaaaacgtatacccgctctcgccttcccccgaccgcaccaaattcataaaaaacgtatacccgctctcgccttcccccgacgataccaaatcgataaaaaacgtatacccgctctcgccttcccccgacgataccaaatcgataaaaaacgtatacccgctctcgccttcccccgacgataccaaatcgataaaaaacgtatacccgctctcgccttcccccgaccgtaccaaattcataaaaaacgtatacccgctctcgccttcccccgacgataccaaattcataaaaaacgtatacccgctctcgccttcccccgaccacaccaaattaataaaaaacgtatacccgctctcgcctttctcactatccctcgcgatcgctaactaaaaccaaataacaacgaattttctcgaaaaaaactaaaacgcgtaaatcgacgtctaaacctcaaccacacgctacctaacgcacaaatttaaacgcgacctctaataaccgcctcacctcgaacacgtcacaaaataaactccctaaaa

SEQ ID NO: 25865 - DNA, 703 bp, Artificial Sequence
  chemically treated genomic DNA (Homo sapiens) CpG-island No: 25865
tacgttttttttaggtttataacgtcgatagtgagcgcgagaatacgttttttttgtaaagttgatagtgagagaatacgttttttttaggtttacgtcgacggtgagcgtgagaatacgttttttttaggtttataacgtcgatagtgagcgcgagaatacgttttttttaggtttataatgtcgatagtgagcgtgagaatacgttttttttaggtttacgtcgatagtgagcgcgagaatacgttttttttaggtttacgtcgatagtgagtatgagaatacgttttttttaggtttacgtcgatagcgagcgtgagaatacgttttttttaggtttataacgtcgatagcgagcgtgagaatacgttttttttaggtttataacgtcgatagtgagcgtgagaatacgttttttttagtttacgttgatagcgagcgtgagaatacgtttttttttaggtttacgtcgatagtgagtgtgaaaacgttttttttcgtaacgtcgatagtgagcgcgagaatacgtttttttttaggtttataatgtcgatagtgagcgtgagaatacgttttttttataacgtcgatagtgagtgtgagtatacgttttttttaggtttataacgttgatagtgagtgtgagaatatattttttttaggtttacgttaatagtgagcgtgagaatacgttttttttagg

SEQ ID NO: 25866 - DNA, 703 bp, Artificial Sequence
  chemically treated genomic DNA (Homo sapiens) CpG-island No: 25866
cctaaaaaaaacgtattctcacgctcactattaacgtaaacctaaaaaaaatatattctcacactcactatcaacgttataaacctaaaaaaaacgtatactcacactcactatcgacgttataaaaaaaacgtattctcacgctcactatcgacattataaacctaaaaaaaaacgtattctcgcgctcactatcgacgttacgaaaaaaaacgttttcacactcactatcgacgtaaacctaaaaaaaaacgtattctcacgctcgctatcaacgtaaactaaaaaaaacgtattctcacgctcactatcgacgttataaacctaaaaaaaacgtattctcacgctcgctatcgacgttataaacctaaaaaaaacgtattctcacgctcgctatcgacgtaaacctaaaaaaaacgtattctcatactcactatcgacgtaaacctaaaaaaaacgtattctcgcgctcactatcgacgtaaacctaaaaaaaacgtattctcacgctcactatcgacattataaacctaaaaaaaacgtattctcgcgctcactatcgacgttataaacctaaaaaaaacgtattctcacgctcaccgtcgacgtaaacctaaaaaaaacgtattctctcactatcaactttacaaaaaaaacgtattctcgcgctcactatcgacgttataaacctaaaaaaaacgta

SEQ ID NO: 25867 - DNA, 703 bp, Artificial Sequence
  chemically treated genomic DNA (Homo sapiens) CpG-island No: 25867
tttgagggaagcgtgtttttacgtttattgttgacgtaaatttgagggaagtgtgtttttatatttattgttaacgttgtaaatttgagggaagcgtgtgtttatatttattgtcgacgttgtgagggaagcgtgtttttacgtttattgtcgatattgtaaatttgaagggaagcgtgttttcgcgtttattgtcgacgttgcgagggaaggcgtttttatatttattgtcgacgtaaatttgagggaaggcgtgtttttacgttcgttgttaacgtaaattgaggaaagcgtgtttttacgtttattgtcgacgttgtaaatttgagggaagcgtgtttttacgttcgttgtcgacgttgtaaatttgagggaagcgtgtttttacgttcgttgtcgacgtaaatttgagggaagcgtgtttttatgtttattgtcgacgtaaatttgagggaagcgtgttttcgcgtttattgtcgacgtaaatttgagggaagcgtgtttttacgtttattgtcgatattgtaaatttgagggaagcgtgttttcgcgtttattgtcgacgttgtaaatttgagggaagcgtgtttttacgtttatcgtcgacgtaaatttgagggaagcgtgtttttttattgttaattttgtaagggaagcgtgttttcgcgtttattgtcgacgttgtaaatttgagggaagcgtg

SEQ ID NO: 25868 - DNA, 703 bp, Artificial Sequence
  chemically treated genomic DNA (Homo sapiens) CpG-island No: 25868
cacgcttccctcaaatttacaacgtcgacaataaacgcgaaaacacgcttcccttacaaaattaacaataaaaaaacacgcttccctcaaatttacgtcgacgataaacgtaaaaacacgcttccctcaaatttacaacgtcgacaataaacgcgaaaacacgcttccctcaaatttacaatatcgacaataaacgtaaaaacacgcttccctcaaatttacgtcgacaataaacgcgaaaacacgcttccctcaaatttacgtcgacaataaacataaaaacacgcttccctcaaatttacgtcgacaacgaacgtaaaaacacgcttccctcaaatttacaacgtcgacaacgaacgtaaaaacacgcttccctcaaatttacaacgtcgacaataaacgtaaaaacacgctttcctcaatttacgttaacaacgaacgtaaaaacacgccttccctcaaatttacgtcgacaataaatataaaaacgccttccctcgcaacgtcgacaataaacgcgaaaacacgcttcccttcaaatttacaatatcgacaataaacgtaaaaacacgcttccctcacaacgtcgacaataaatataaacacacgcttccctcaaatttacaacgttaacaataaatataaaaacacacttccctcaaatttacgtcaacaataaacgtaaaaacacgcttccctcaaa

SEQ ID NO: 25869 - DNA, 799 bp, Artificial Sequence
  chemically treated genomic DNA (Homo sapiens) CpG-island No: 25869
ttcggtcgggtcgtttcgtgtttatgttcgtttggattttcgtattttttatcgttttttcgttgttttcgtcggggcggtttttgtagtcgcggtagggatggcgggggttgcggtttttttaggtaatggtattcggggtatcgggggcgtcggggataagcggtagttggtgtacgtgtttattacgtggcgttttggttcgtcgtttttcggcgagttatttaattagaatttcgaggtgttttttttttacgagttagtgtggtatgtatggtaaaaattgtattcgggggacgtcgtttttttgtagggggtagcgcgggatatgttgagcgttttttatcgttgcgatttttttgttttttagttgtatagtttcgcgggtagcggggggcgtaattttattacgttgggtattttcggcgtagttattaataaggtggtgtgttcgttattattttgtttcgtttatcgtaaggaggtcgtggggttggtggacgatcgcgtgtgtaagaagtgttcgttatagcgtttggcgcgtttcgaggaggagtgtcgtaagtatcgtatattagttataaagggtgtgcgcgttttcgacgtggaggataaggcgttattgttgcgagattcggttttggattttaaggttatttatttggtgcgtgattttcgcgcggtggcgagtttacggattcgttcgcgttacggttttattcgtgagagtttataggtggtgcgtagtcgagattcgcgagtttattatatgttttttttggaggtcgcgggttataag

SEQ ID NO: 25870 - DNA, 799 bp, Artificial Sequence
  chemically treated genomic DNA (Homo sapiens) CpG-island No: 25870
cttataacccgcgacctccaaaaaaaacatataataaactcgcgaatctcgactacgcaccacctataaactctcacgaataaaaccgtaacgcgaacgaatccgtaaactcgccaccgcgcgaaaatcacgcaccaaataaataaccttaaaatccaaaaccgaatctcgcaacaataacgccttatcctccacgtcgaaaacgcgcacaccctttataactaatatacgatacttacgacactcctcctcgaaacgcgccaaacgctataacgaacacttcttacacacgcgatcgtccaccaaccccacgacctccttacgataaacgaaacaaaataataacgaacacaccaccttattaataactacgccgaaaatacccaacgtaataaaattacgccccccgctacccgcgaaactatacaactaaaaaacaaaaaaatcgcaacgataaaaaacgctcaacatatcccgcgctaccccctacaaaaaaacgacgtcccccgaatacaatttttaccatacataccacactaactcgtaaaaaaaaaacacctcgaaattctaattaaataactcgccgaaaaacgacgaaccaaaacgccacgtaataaacacgtacaccaactaccgcttatccccgacgcccccgataccccgaataccattacctaaaaaaaccgcaacccccgccatccctaccgcgactacaaaaaccgccccgacgaaaacaacgaaaaaacgataaaaaatacgaaaatccaaacgaacataaacacgaaacgacccgaccgaa

SEQ ID NO: 25871 - DNA, 799 bp, Artificial Sequence
  chemically treated genomic DNA (Homo sapiens) CpG-island No: 25871
tttgtggttcgcggtttttaagaagggtatgtggtgagttcgcgggtttcggttgcgtattatttgtaggtttttacggatgaggtcgtggcgcgagcggattcgtgaattcgttatcgcgcggggattacgtattaagtggatgattttgaggtttagggtcgggtttcgtagtagtggcgttttgttttttacgtcgaagacgcgtatattttttatgattagtgtgcggtatttgcggtattttttttcgaaacgcgttaggcgttgtggcgggtattttttgtatacgcggtcgtttattaattttacgatttttttgcggtaggcggggtagagtggtgacgagtatattattttgttggtggttgcgtcgaagatgtttagcgtggtgaggttgcgtttttcgttgttcgcggggttatataattggaagatagagaggtcgtagcggtaaagagcgtttagtatgtttcgcgttgttttttgtagggaaacggcgtttttcggatatagtttttgttatatatgttatattggttcgtagagaaagaatatttcgggattttggttgaatagttcgtcgaagaacgacgagttagagcgttacgtggtgaatacgtatattagttgtcgtttgttttcgacgttttcggtgtttcgagtgttattgtttggaggggtcgtaattttcgttatttttgtcgcggttgtaggagtcgtttcgacggaggtagcgggagggcggtaaggagtgcggaggtttaaacgggtatgagtacggggcggttcggtcgga

SEQ ID NO: 25872 - DNA, 799 bp, Artificial Sequence
  chemically treated genomic DNA (Homo sapiens) CpG-island No: 25872
tccgaccgaaccgccccgtactcatacccgtttaaacctccgcactccttaccgccctcccgctacctccgtcgaaacgactcctacaaccgcgacaaaaataacgaaaattacgacccctccaaacaataacactcgaaacaccgaaaacgtcgaaaacaaacgacaactaatatacgtattcaccacgtaacgctctaactcgtcgttcttcgacgaactattcaaccaaaatcccgaaatattctttctctacgaaccaatataacatatataacaaaaactatatccgaaaaacgccgtttccctacaaaaaacaacgcgaaacatactaaacgctctttaccgctacgacctctctatcttccaattatataaccccgcgaacaacgaaaaacgcaacctcaccacgctaaacatcttcgacgcaaccaccaacaaaataatatactcgtcaccactctaccccgcctaccgcaaaaaaatcgtaaaattaataaacgaccgcgtatacaaaaaatacccgccacaacgcctaacgcgtttcgaaaaaaaataccgcaaataccgcacactaatcataaaaaatatacgcgtcttcgacgtaaaaaacaaaacgccactactacgaaacccgaccctaaacctcaaaatcatccacttaatacgtaatccccgcgcgataacgaattcacgaatccgctcgcgccacgacctcatccgtaaaaacctacaaataatacgcaaccgaaacccgcgaactcaccacatacccttcttaaaaaccgcgaaccacaaa

SEQ ID NO: 25873 - DNA, 558 bp, Artificial Sequence
  chemically treated genomic DNA (Homo sapiens) CpG-island No: 25873
cgttgttagagaggtgggaaaattcgtcgtacggaggtcgaaagcgagaggggttgcgtcgttatgtcgggagttgagttttatataagtcgtttttagttatcgtttttagtcggtttcgtttttttgtgcgagataggaagttgcggtttcgagaaagcggaggagacgtcgttggagtcgggaggcgtcgggttcggcggagcgcggagcggggttttgggtcgcgtgaaagttttttttttcgagtcgtagggcgttcgttgttcggaaattgtttagggataagtcggtcgattttttagatttttcgaaggtgcggggatttttagcggaagcgagagggagcgaaatcgaggaacgagtgatagtcggatagttcgtcgggcggtgattcggggtcgttttcgggcgcgttttcggttttaggtgagcggaggaatcgggtagaatcgagggtgggcgttatttaggaggaggaggttgggagggagattggggcgtattcgtttatttcgttttttttcgtaggttttattcggagtcgttgttatggga

SEQ ID NO: 25874 - DNA, 558 bp, Artificial Sequence
  chemically treated genomic DNA (Homo sapiens) CpG-island No: 25874
tcccataacaacgactccgaataaaacctacgaaaaaaaacgaaataaacgaatacgccccaatctccctcccaacctcctcctcctaaataacgcccaccctcgattctacccgattcctccgctcacctaaaaccgaaaacgcgcccgaaaacgaccccgaatcaccgcccgacgaactatccgactatcactcgttcctcgatttcgctccctctcgcttccgctaaaaatccccgcaccttcgaaaaatctaaaaaatcgaccgacttatccctaaacaatttccgaacaacgaacgccctacgactcgaaaaaaaaaactttcacgcgacccaaaaccccgctccgcgctccgccgaacccgacgcctcccgactccaacgacgtctcctccgctttctcgaaaccgcaacttcctatctcgcacaaaaaaacgaaaccgactaaaaacgataactaaaaacgacttatataaaactcaactcccgacataacgacgcaacccctctcgctttcgacctccgtacgacgaattttcccacctctctaacaacg

SEQ ID NO: 25875 - DNA, 558 bp, Artificial Sequence
  chemically treated genomic DNA (Homo sapiens) CpG-island No: 25875
ttttatggtagcggtttcgggtaggatttgcgaggggaagcggagtgagcggatgcgttttaattttttttttagttttttttttttaagtaacgtttattttcggttttgttcggttttttcgtttatttggagtcgagggcgcgttcgggagcggtttcggattatcgttcggcggattgttcggttgttattcgtttttcgatttcgttttttttcgttttcgttgggggttttcgtattttcgaggggtttggggagtcggtcgatttatttttgggtagttttcgggtagcgggcgttttgcggttcgggaagaaaaatttttacgcggtttagagtttcgtttcgcgtttcgtcgaattcggcgtttttcggttttagcgacgtttttttcgttttttcgggatcgtagttttttgtttcgtataggggaacgaagtcggttgggggcgatggttgggggcggtttatatgggatttagttttcggtatagcggcgtagtttttttcgttttcggttttcgtgcggcgaatttttttatttttttggtagcg

SEQ ID NO: 25876 - DNA, 558 bp, Artificial Sequence
  chemically treated genomic DNA (Homo sapiens) CpG-island No: 25876
cgctaccaaaaaaataaaaaaattcgccgcacgaaaaccgaaaacgaaaaaaactacgccgctataccgaaaactaaatcccatataaaccgcccccaaccatcgcccccaaccgacttcgttcccctatacgaaacaaaaaactacgatcccgaaaaaacgaaaaaaacgtcgctaaaaccgaaaaacgccgaattcgacgaaacgcgaaacgaaactctaaaccgcgtaaaaatttttcttcccgaaccgcaaaacgcccgctacccgaaaactacccaaaaataaatcgaccgactccccaaacccctcgaaaatacgaaaacccccaacgaaaacgaaaaaaaacgaaatcgaaaaacgaataacaaccgaacaatccgccgaacgataatccgaaaccgctcccgaacgcgccctcgactccaaataaacgaaaaaaccgaacaaaaccgaaaataaacgttacttaaaaaaaaaaaactaaaaaaaaaattaaaacgcatccgctcactccgcttcccctcgcaaatcctacccgaaaccgctaccataaaa

SEQ ID NO: 25877 - DNA, 641 bp, Artificial Sequence
  chemically treated genomic DNA (Homo sapiens) CpG-island No: 25877
atacgttttaggttgaggattatgggcgaggaacgaaatcgttttaataagaacgtcgttgaacggacgacgttattaatgattattgattaatagttttttcggacggcgcgtaacggttttgtattacgcgcgcgtaatggagcgggtggtagagcgcgaggtttttgcgtgttagattttacgggggttttcgacgaagtgggtcgtatcgaatttcgttttcgcgagtgtgtggtttcgagtatttttttgcgaaaatattttcgtatataaggtaagttcgtttaaaatattacgtgcgtcgcgatggtttcgtaaacgcgttattcgttcgtttttaggggttagggcggtacgtttgtttttagtttaggagttatagggttaggttgggtttcgagggcgaattcgagtattgcgtaaaacgatagaaaatgattcgggtaagagggttttagttgggatttcgggtggtggtaattgatgtacggagaatcgattgatttgggacgtgaagggtagttagatttgagatagttcggcgatattggagttcggtaataagagggaggtttttcgttagatgataaggtatattatttagcgttttagatcgtaggattagtaaagtttatgaa

SEQ ID NO: 25878 - DNA, 641 bp, Artificial Sequence
  chemically treated genomic DNA (Homo sapiens) CpG-island No: 25878
ttcataaactttactaatcctacgatctaaaacgctaaataatataccttatcatctaacgaaaaacctccctcttattaccgaactccaatatcgccgaactatctcaaatctaactacccttcacgtcccaaatcaatcgattctccgtacatcaattaccaccacccgaaatcccaactaaaaccctcttacccgaatcattttctatcgttttacgcaatactcgaattcgccctcgaaacccaacctaaccctataactcctaaactaaaaacaaacgtaccgccctaacccctaaaaacgaacgaataacgcgtttacgaaaccatcgcgacgcacgtaatattttaaacgaacttaccttatatacgaaaatattttcgcaaaaaaatactcgaaaccacacactcgcgaaaacgaaattcgatacgacccacttcgtcgaaaacccccgtaaaatctaacacgcaaaaacctcgcgctctaccacccgctccattacgcgcgcgtaatacaaaaccgttacgcgccgtccgaaaaaactattaatcaataatcattaataacgtcgtccgttcaacgacgttcttattaaaacgatttcgttcctcgcccataatcctcaacctaaaacgtat

SEQ ID NO: 25879 - DNA, 641 bp, Artificial Sequence
  chemically treated genomic DNA (Homo sapiens) CpG-island No: 25879
tttataagttttattagttttacggtttgagacgttggatggtatgttttgttatttagcgaggagttttttttttgttatcgagttttagtgtcgtcgaattattttaagtttagttattttttacgttttaggttaatcgatttttcgtgtattagttattattattcgggattttagttggaatttttttgttcgggttattttttgtcgttttacgtaatgttcgggttcgttttcggggtttaatttgattttgtaatttttgggttgaaagtaggcgtgtcgttttagtttttaaaagcgggcgaataacgcgtttgcgagattatcgcggcgtacgtggtgttttgaacgggtttgttttgtgtgcggaaatattttcgtaggagaatattcggggttatatattcgcggggacggaattcggtgcggtttatttcgtcggaaattttcgtggggtttggtacgtaggggtttcgcgttttgttattcgttttattgcgcgcgcgtggtgtaggatcgttgcgcgtcgttcggaggggttgttggttagtgattattggtagcgtcgttcgtttagcggcgtttttattagagcgatttcgtttttcgtttatgatttttagtttggggcgtgt

SEQ ID NO: 25880 - DNA, 641 bp, Artificial Sequence
  chemically treated genomic DNA (Homo sapiens) CpG-island No: 25880
acacgccccaaactaaaaatcataaacgaaaaacgaaatcgctctaataaaaacgccgctaaacgaacgacgctaccaataatcactaaccaacaacccctccgaacgacgcgcaacgatcctacaccacgcgcgcgcaataaaacgaataacaaaacgcgaaacccctacgtaccaaaccccacgaaaatttccgacgaaataaaccgcaccgaattccgtccccgcgaatatataaccccgaatattctcctacgaaaatatttccgcacacaaaacaaacccgttcaaaacaccacgtacgccgcgataatctcgcaaacgcgttattcgcccgcttttaaaaactaaaacgacacgcctactttcaacccaaaaattacaaaatcaaattaaaccccgaaaacgaacccgaacattacgtaaaacgacaaaaaataacccgaacaaaaaaattccaactaaaatcccgaataataataactaatacacgaaaaatcgattaacctaaaacgtaaaaaataactaaacttaaaataattcgacgacactaaaactcgataacaaaaaaaaaactcctcgctaaataacaaaacataccatccaacgtctcaaaccgtaaaactaataaaacttataaa

SEQ ID NO: 25881 - DNA, 556 bp, Artificial Sequence
  chemically treated genomic DNA (Homo sapiens) CpG-island No: 25881
  unsure (91)
ttcggtagtagtatgcggttgagttagttgtggattacgtcgtcgttcgggcgtagcgagacgtcgttattggtggagatgaatttcggtngggtgtggtgggttttgacgtttatcggttttcggtaggtcgcggtgaggtagaataattagtattattacgtcggtcgataagtttaagtaggttagggtttttagttcgttacgggttattagatcggtggtgttttgcgagtttattaaggttattttcggttcgtagtaagtgttcgggcgtatgtttttggttttcgttaggttataggcgtaggttattattttttgtgttagcgagtagtttttggtcggattcggtcggttgtatttggtaggtcggaataagtcggtgatcggtaagtttaaggttttacgtttttttgcggttaagttacggtcgatgattagcggaatgcggtcgttcgggcgtatttttgtagaatagttcgtaagattttattttcgaatttcgggattattatttcggatatttatcggttttgttttaatacgggatcgt

SEQ ID NO: 25882 - DNA, 556 bp, Artificial Sequence
  chemically treated genomic DNA (Homo sapiens) CpG-island No: 25882
  unsure (466)
acgatcccgtattaaaacaaaaccgataaatatccgaaataataatcccgaaattcgaaaataaaatcttacgaactattctacaaaaatacgcccgaacgaccgcattccgctaatcatcgaccgtaacttaaccgcaaaaaaacgtaaaaccttaaacttaccgatcaccgacttattccgacctaccaaatacaaccgaccgaatccgaccaaaaactactcgctaacacaaaaaataataacctacgcctataacctaacgaaaaccaaaaacatacgcccgaacacttactacgaaccgaaaataaccttaataaactcgcaaaacaccaccgatctaataacccgtaacgaactaaaaaccctaacctacttaaacttatcgaccgacgtaataatactaattattctacctcaccgcgacctaccgaaaaccgataaacgtcaaaacccaccacacccnaccgaaattcatctccaccaataacgacgtctcgctacgcccgaacgacgacgtaatccacaactaactcaaccgcatactactaccgaa

SEQ ID NO: 25883 - DNA, 556 bp, Artificial Sequence
  chemically treated genomic DNA (Homo sapiens) CpG-island No: 25883
  unsure (466)
gcggtttcgtattaaggtaaggtcggtaaatattcgggatagtgatttcgaagttcgaaagtaaagttttacgagttgttttatagaagtgcgttcgggcggtcgtatttcgttgattatcggtcgtggtttgatcgtaaaggagcgtgaagttttgggtttgtcggttatcgatttgtttcgatttgttaggtgtagtcggtcgaattcggttaagggttattcgttggtatagaagatggtggtttgcgtttgtggtttggcggaagttaagggtatgcgttcgggtatttattgcgagtcgaagatgattttggtgggttcgtaggatattatcggtttgatgattcgtgacgagttgaaggttttggtttgtttgggtttatcggtcgacgtggtgatgttagttgttttgttttatcgcggtttatcggaagtcggtggacgttaagatttattatatttngtcggagtttatttttattagtggcggcgtttcgttgcgttcgggcgacggcgtgatttatagttggtttaatcgtatgttgttgtcgga

SEQ ID NO: 25884 - DNA, 556 bp, Artificial Sequence
  chemically treated genomic DNA (Homo sapiens) CpG-island No: 25884
  unsure (91)
tccgacaacaacatacgattaaaccaactataaatcacgccgtcgcccgaacgcaacgaaacgccgccactaataaaaataaactccgacnaaatataataaatcttaacgtccaccgacttccgataaaccgcgataaaacaaaacaactaacatcaccacgtcgaccgataaacccaaacaaaccaaaaccttcaactcgtcacgaatcatcaaaccgataatatcctacgaacccaccaaaatcatcttcgactcgcaataaatacccgaacgcatacccttaacttccgccaaaccacaaacgcaaaccaccatcttctataccaacgaataacccttaaccgaattcgaccgactacacctaacaaatcgaaacaaatcgataaccgacaaacccaaaacttcacgctcctttacgatcaaaccacgaccgataatcaacgaaatacgaccgcccgaacgcacttctataaaacaactcgtaaaactttactttcgaacttcgaaatcactatcccgaatatttaccgaccttaccttaatacgaaaccgc

SEQ ID NO: 25885 - DNA, 573 bp, Artificial Sequence
  chemically treated genomic DNA (Homo sapiens) CpG-island No: 25885
gggcggtttttaggagtcgggttagcgagtttgggttttgagcgagcggcgtcggttcggtttttttttcggcgggtcggtcgagatttcgtttcggaggcggaggcggagttaggggagggggtcgggggtcggttggtttcgtttttcgcgttttcgtttcgtttcgcgcgtatatagttaggggtcgttcgggttttcgacgcgtcgacggtcgggcggacggacggacggacgtcgagcgtagtgtttcgcggtgagtgtacgcggtttttttcgttcggatttattttcgtcggttcgcgtttcgtagtttaggattcgggggcgttcggacgtatcgacggttcggcggattttcggacgcgtttcgcgggttgttcgcgtttttattcgcgtcgtcggttcgatcgggtttcgttttttcggttttagcgcggggacggttcgcgagcgtcgcgatttagtgtatagatgcgggtatagaggtcggcgcggggtggggggttaggggttcgcgggcgggtttttttattttaggttcgtagtttttttcgttttgggttttatttt

SEQ ID NO: 25886 - DNA, 573 bp, Artificial Sequence
  chemically treated genomic DNA (Homo sapiens) CpG-island No: 25886
aaaataaaacccaaaacgaaaaaaactacgaacctaaaataaaaaaacccgcccgcgaacccctaaccccccaccccgcgccgacctctatacccgcatctatacactaaatcgcgacgctcgcgaaccgtccccgcgctaaaaccgaaaaaacgaaacccgatcgaaccgacgacgcgaataaaaacgcgaacaacccgcgaaacgcgtccgaaaatccgccgaaccgtcgatacgtccgaacgcccccgaatcctaaactacgaaacgcgaaccgacgaaaataaatccgaacgaaaaaaaccgcgtacactcaccgcgaaacactacgctcgacgtccgtccgtccgtccgcccgaccgtcgacgcgtcgaaaacccgaacgacccctaactatatacgcgcgaaacgaaacgaaaacgcgaaaaacgaaaccaaccgacccccgaccccctcccctaactccgcctccgcctccgaaacgaaatctcgaccgacccgccgaaaaaaaaaccgaaccgacgccgctcgctcaaaacccaaactcgctaacccgactcctaaaaaccgccc

SEQ ID NO: 25887 - DNA, 573 bp, Artificial Sequence
  chemically treated genomic DNA (Homo sapiens) CpG-island No: 25887
gaagtgaaatttagagcggaggaagttgcggatttggggtgggggaattcgttcgcggatttttggttttttatttcgcgtcggtttttgtgttcgtatttgtatattgggtcgcggcgttcgcgggtcgttttcgcgttgggatcgggagagcgagattcggtcggatcggcggcgcgggtggaggcgcgggtagttcgcgaggcgcgttcgagggttcgtcgagtcgtcggtgcgttcgagcgttttcgagttttgagttgcgaggcgcggatcgacggggatgagttcgggcgggaggggtcgcgtgtatttatcgcggggtattgcgttcggcgttcgttcgttcgttcgttcggtcgtcggcgcgtcgagagttcgggcggtttttggttgtgtgcgcgcggggcggggcggaggcgcgagaggcgggattagtcggttttcggtttttttttttgatttcgttttcgttttcggggcggggtttcggtcggttcgtcggagagggggtcgggtcggcgtcgttcgtttagagtttagattcgttgattcggtttttagaggtcgttt

SEQ ID NO: 25888 - DNA, 573 bp, Artificial Sequence
  chemically treated genomic DNA (Homo sapiens) CpG-island No: 25888
aaacgacctctaaaaaccgaatcaacgaatctaaactctaaacgaacgacgccgacccgaccccctctccgacgaaccgaccgaaaccccgccccgaaaacgaaaacgaaatcaaaaaaaaaaaccgaaaaccgactaatcccgcctctcgcgcctccgccccgccccgcgcgcacacaaccaaaaaccgcccgaactctcgacgcgccgacgaccgaacgaacgaacgaacgaacgccgaacgcaataccccgcgataaatacacgcgacccctcccgcccgaactcatccccgtcgatccgcgcctcgcaactcaaaactcgaaaacgctcgaacgcaccgacgactcgacgaaccctcgaacgcgcctcgcgaactacccgcgcctccacccgcgccgccgatccgaccgaatctcgctctcccgatcccaacgcgaaaacgacccgcgaacgccgcgacccaatatacaaatacgaacacaaaaaccgacgcgaaataaaaaaccaaaaatccgcgaacgaattcccccaccccaaatccgcaacttcctccgctctaaatttcacttc

SEQ ID NO: 25889 - DNA, 503 bp, Artificial Sequence
  chemically treated genomic DNA (Homo sapiens) CpG-island No: 25889
tcgtttttcgcggttcggttttattagtcgtagtatttttacgtggttttttatattgaagtagaaggggcgatgttttattttcggttgtacgttatttatcgcgtttgtagatttagtagtagtatttttttttaattttttttagttggttgtttgagtaggttttgcgaagcgatagtaatcgttatcgcggcggagtatcgtttttttttatttttcgtttagttcggtttttcgtttttttgcgcgtatgcgtacggcgtcgcgttcgttttcgcgtatgcgttttaacgggatttcgcggtcgttcgttttggtttgtgttgttttttagttatcgcgtagtatattagcggatttagagttgggtatatattagcggatttagaggtgggtacgtaggttagcgttttgttagttcgtcgtgttttggtttggcgttaatgacggtagtattttagtttttttgaggagtttttttgtcgggaaatttttttagg

SEQ ID NO: 25890 - DNA, 503 bp, Artificial Sequence
  chemically treated genomic DNA (Homo sapiens) CpG-island No: 25890
cctaaaaaaatttcccgacaaaaaaactcctcaaaaaaactaaaatactaccgtcattaacgccaaaccaaaacacgacgaactaacaaaacgctaacctacgtacccacctctaaatccgctaatatatacccaactctaaatccgctaatatactacgcgataactaaaaaacaacacaaaccaaaacgaacgaccgcgaaatcccgttaaaacgcatacgcgaaaacgaacgcgacgccgtacgcatacgcgcaaaaaaacgaaaaaccgaactaaacgaaaaataaaaaaaaacgatactccgccgcgataacgattactatcgcttcgcaaaacctactcaaacaaccaactaaaaaaaattaaaaaaaaatactactactaaatctacaaacgcgataaataacgtacaaccgaaaataaaacatcgccccttctacttcaatataaaaaaccacgtaaaaatactacgactaataaaaccgaaccgcgaaaaacga

SEQ ID NO: 25891 - DNA, 503 bp, Artificial Sequence
  chemically treated genomic DNA (Homo sapiens) CpG-island No: 25891
tttgggaggatttttcgataggaagattttttaggagagttggagtgttgtcgttattaacgttaggttagaatacggcgggttaatagggcgttggtttgcgtgtttatttttaggttcgttaatatgtgtttagttttaggttcgttaatgtgttacgcgataattgaaagatagtataagttagagcggacggtcgcgggatttcgttggggcgtatgcgcgagagcgaacgcggcgtcgtgcgtatgcgcgtaagagagcgggaagtcgagttgggcgagaagtaggggagggcggtgtttcgtcgcggtggcggttgttatcgtttcgtagaatttatttaggtagttagttgagaagagttgagggaaagtgttgttgttgggtttgtagacgcgatggataacgtgtagtcgaaaataaaatatcgttttttttgttttagtgtgaaaggttacgtgaagatgttgcggttggtgaggtcgggtcgcggagggcgg

SEQ ID NO: 25892 - DNA, 503 bp, Artificial Sequence
  chemically treated genomic DNA (Homo sapiens) CpG-island No: 25892
ccgccctccgcgacccgacctcaccaaccgcaacatcttcacgtaacctttcacactaaaacaaaaaaaacgatattttattttcgactacacgttatccatcgcgtctacaaacccaacaacaacactttccctcaactcttctcaactaactacctaaataaattctacgaaacgataacaaccgccaccgcgacgaaacaccgccctcccctacttctcgcccaactcgacttcccgctctcttacgcgcatacgcacgacgccgcgttcgctctcgcgcatacgccccaacgaaatcccgcgaccgtccgctctaacttatactatctttcaattatcgcgtaacacattaacgaacctaaaactaaacacatattaacgaacctaaaaataaacacgcaaaccaacgccctattaacccgccgtattctaacctaacgttaataacgacaacactccaactctcctaaaaaatcttcctatcgaaaaatcctcccaaa

SEQ ID NO: 25893 - DNA, 836 bp, Artificial Sequence
  chemically treated genomic DNA (Homo sapiens) CpG-island No: 25893
gcgtgtcgggatcgttagcgtttattagcggttttcgtttcggttttaggcgtaggtgggggcggggttagggcggggtttgaggagtcggcgtttcgtttcgtttcgttttttttcgaggttcgcggcgtcgtcgtttttatttcgttcgagtcgcggagcgttttcgagcggtcggttgcggtttggtttcgtttttttcggttcggcgcgttcgttttcgttttttttttttttttggtttttattttttttttttttcgttgtcgaggcggcgggagtcgagttcgagcggatcgagtcgtagtcgtagtcgggcggcgggcgagaggcggcggcggcgggcgggtcgcgggtagttagtcgggcggcggcggcggcggcggcggcgatgcggcggtttcgttgagttcgttcgtttttggcgtcgggagttagtcgcgcgaggcggttcgggtcgggcggtagtatgcggagcggcgaggagttggacggtttcgagggcgaggtttcgagtatttttatgatttcgggcgttagtagttcgtattagtttattatcgagtcggtgagttagcgtcgcgggttggtcggtttgcgttgcgatttcgattatttgcgcggcgcgttcggtcgttttaaggtcgtttaagtggtaggtgtcgggcggggttttaggtgttcgagggcggtttagtcgtacgttttttttttcgtttcgttgcggggttttcgtcgcgtattcgtttgtttaggtcggagttcgttgttcgcgttttttttgtttggtgggggtttcgggattattttgtagttttgtttggggattttcgttt

SEQ ID NO: 25894 - DNA, 836 bp, Artificial Sequence
  chemically treated genomic DNA (Homo sapiens) CpG-island No: 25894
aaacgaaaatccccaaacaaaactacaaaataatcccgaaacccccaccaaacaaaaaaaacgcgaacaacgaactccgacctaaacaaacgaatacgcgacgaaaaccccgcaacgaaacgaaaaaaaaaacgtacgactaaaccgccctcgaacacctaaaaccccgcccgacacctaccacttaaacgaccttaaaacgaccgaacgcgccgcgcaaataatcgaaatcgcaacgcaaaccgaccaacccgcgacgctaactcaccgactcgataataaactaatacgaactactaacgcccgaaatcataaaaatactcgaaacctcgccctcgaaaccgtccaactcctcgccgctccgcatactaccgcccgacccgaaccgcctcgcgcgactaactcccgacgccaaaaacgaacgaactcaacgaaaccgccgcatcgccgccgccgccgccgccgccgcccgactaactacccgcgacccgcccgccgccgccgcctctcgcccgccgcccgactacgactacgactcgatccgctcgaactcgactcccgccgcctcgacaacgaaaaaaaaaaaaaataaaaaccaaaaaaaaaaaaaaaacgaaaacgaacgcgccgaaccgaaaaaaacgaaaccaaaccgcaaccgaccgctcgaaaacgctccgcgactcgaacgaaataaaaacgacgacgccgcgaacctcgaaaaaaaacgaaacgaaacgaaacgccgactcctcaaaccccgccctaaccccgcccccacctacgcctaaaaccgaaacgaaaaccgctaataaacgctaacgatcccgacacgc

SEQ ID NO: 25895 - DNA, 836 bp, Artificial Sequence
  chemically treated genomic DNA (Homo sapiens) CpG-island No: 25895
aagcgggggtttttagataaggttgtagagtggtttcgggatttttattaggtagagggggcgcgagtagcgggtttcggtttgggtaagcgggtacgcggcggaggtttcgtagcggggcggggaggaaggcgtgcggttaggtcgttttcgggtatttggggtttcgttcggtatttattatttgggcgattttgaggcggtcgagcgcgtcgcgtaggtagtcggggtcgtagcgtaggtcggttagttcgcggcgttggtttatcggttcggtggtgggttggtacgggttgttggcgttcgagattatggaggtgttcgaggtttcgttttcgaagtcgtttagtttttcgtcgtttcgtatgttgtcgttcggttcgggtcgtttcgcgcggttggttttcggcgttaggagcgggcggatttagcggggtcgtcgtatcgtcgtcgtcgtcgtcgtcgtcgttcgattgattgttcgcggttcgttcgtcgtcgtcgtttttcgttcgtcgttcggttgcggttgcggttcggttcgttcgggttcggttttcgtcgtttcggtagcggaaagggagggaggtgggagttaggagagggaaggaggcgggagcgggcgcgtcgggtcgggagaggcggagttaggtcgtagtcggtcgttcggaggcgtttcgcggttcgagcgaggtggaggcggcggcgtcgcgggtttcggggaggggcggggcgaggcggggcgtcggttttttaggtttcgttttggtttcgtttttatttgcgtttagagtcggggcgggagtcgttggtgggcgttggcgatttcggtacgt

SEQ ID NO: 25896 - DNA, 836 bp, Artificial Sequence
  chemically treated genomic DNA (Homo sapiens) CpG-island No: 25896
acgtaccgaaatcgccaacgcccaccaacgactcccgccccgactctaaacgcaaataaaaacgaaaccaaaacgaaacctaaaaaaccgacgccccgcctcgccccgcccctccccgaaacccgcgacgccgccgcctccacctcgctcgaaccgcgaaacgcctccgaacgaccgactacgacctaactccgcctctcccgacccgacgcgcccgctcccgcctccttccctctcctaactcccacctccctccctttccgctaccgaaacgacgaaaaccgaacccgaacgaaccgaaccgcaaccgcaaccgaacgacgaacgaaaaacgacgacgacgaacgaaccgcgaacaatcaatcgaacgacgacgacgacgacgacgacgatacgacgaccccgctaaatccgcccgctcctaacgccgaaaaccaaccgcgcgaaacgacccgaaccgaacgacaacatacgaaacgacgaaaaactaaacgacttcgaaaacgaaacctcgaacacctccataatctcgaacgccaacaacccgtaccaacccaccaccgaaccgataaaccaacgccgcgaactaaccgacctacgctacgaccccgactacctacgcgacgcgctcgaccgcctcaaaatcgcccaaataataaataccgaacgaaaccccaaatacccgaaaacgacctaaccgcacgccttcctccccgccccgctacgaaacctccgccgcgtacccgcttacccaaaccgaaacccgctactcgcgccccctctacctaataaaaatcccgaaaccactctacaaccttatctaaaaacccccgctt

SEQ ID NO: 25897 - DNA, 567 bp, Artificial Sequence
  chemically treated genomic DNA (Homo sapiens) CpG-island No: 25897
gagcgatgcgagttttgggagatagcgacgtcgtttttcgttagagatttgtttttcggttcggttttttgtttaattttgtttagcgcgcgggggtcggcgaaggcgtcgcggacgtatcgacggttgaagagcggcgatgtatatgtattagtagtattttttaatttattttttttatatttcgcgtcgtcgtcgtcgttttttttattttttttttcgtcgtcgtcgtttttttttttttcggtagtcgcggtagtaggatttattttgttttttattttattttttgtcggtttcggttgcggttttagtttcgattattattttatttattttgggtcgtgtataagttttagtgtttgtagttcgcgttttttcggttcgcgggcgtttttttttttggtttcggagttttagatttcggttattttcgattcgataattttagatttttgttagttgtcgcgagttttcgttgttggaattttgttagcggttgtttttttggagggttttggtttttcgatatttttgtttttagtttaggagaggatatcgtgattt

SEQ ID NO: 25898 - DNA, 567 bp, Artificial Sequence
  chemically treated genomic DNA (Homo sapiens) CpG-island No: 25898
aaatcacgatatcctctcctaaactaaaaacaaaaatatcgaaaaaccaaaaccctccaaaaaaacaaccgctaacaaaattccaacaacgaaaactcgcgacaactaacaaaaatctaaaattatcgaatcgaaaataaccgaaatctaaaactccgaaaccaaaaaaaaaaacgcccgcgaaccgaaaaaacgcgaactacaaacactaaaacttatacacgacccaaaataaataaaataataatcgaaactaaaaccgcaaccgaaaccgacaaaaaataaaataaaaaacaaaataaatcctactaccgcgactaccgaaaaaaaaaaaaacgacgacgacgaaaaaaaaaataaaaaaaacgacgacgacgacgcgaaatataaaaaaaataaattaaaaaatactactaatacatatacatcgccgctcttcaaccgtcgatacgtccgcgacgccttcgccgacccccgcgcgctaaacaaaattaaacaaaaaaccgaaccgaaaaacaaatctctaacgaaaaacgacgtcgctatctcccaaaactcgcatcgctc

SEQ ID NO: 25899 - DNA, 567 bp, Artificial Sequence
  chemically treated genomic DNA (Homo sapiens) CpG-island No: 25899
aaattacgatatttttttttgggttggaaataaaaatgtcgggaaattagaattttttaaaaagatagtcgttaataagattttagtagcggagattcgcggtagttggtaggggtttggggttgtcgaatcgagggtggtcggggtttggggtttcggagttaagggaggaggcgttcgcgggtcgaggaggcgcggattgtaggtattgaggtttgtgtacgatttaaaataaataaaataatagtcgaggttggagtcgtagtcggagtcgatagagggtggggtagggggtagggtgggttttgttgtcgcggttgtcggaggaggaggaggcggcggcggcggaggaggaggtggaggaggcggcggcggcggcgcgggatgtggagggagtgagttagggggtgttgttagtgtatgtgtatcgtcgttttttagtcgtcggtgcgttcgcggcgttttcgtcgattttcgcgcgttgggtagggttgggtagggggtcgggtcgaggggtaggtttttagcgggaggcggcgtcgttgttttttagagttcgtatcgttt

SEQ ID NO: 25900 - DNA, 567 bp, Artificial Sequence
  chemically treated genomic DNA (Homo sapiens) CpG-island No: 25900
aaacgatacgaactctaaaaaacaacgacgccgcctcccgctaaaaacctacccctcgacccgaccccctacccaaccctacccaacgcgcgaaaatcgacgaaaacgccgcgaacgcaccgacgactaaaaaacgacgatacacatacactaacaacaccccctaactcactccctccacatcccgcgccgccgccgccgcctcctccacctcctcctccgccgccgccgcctcctcctcctccgacaaccgcgacaacaaaacccaccctaccccctaccccaccctctatcgactccgactacgactccaacctcgactattattttatttattttaaatcgtacacaaacctcaatacctacaatccgcgcctcctcgacccgcgaacgcctcctcccttaactccgaaaccccaaaccccgaccaccctcgattcgacaaccccaaacccctaccaactaccgcgaatctccgctactaaaatcttattaacgactatctttttaaaaaattctaatttcccgacatttttatttccaacccaaaaaaaaatatcgtaattt

SEQ ID NO: 25901 - DNA, 588 bp, Artificial Sequence
  chemically treated genomic DNA (Homo sapiens) CpG-island No: 25901
ggtttgacgagagttatgaaggcggggtttcgggcgggagtggtttagtgttcgtcgggtcgaggttaggggtgataggttcggttatcggttaaattttttttatcgtttgttcggagttttatatttattaagattcgtttgaagagcgtattttttttgggcgggaggtttacggtcggtatcgtttcggttgttttcgttgttttcgttattattcggttcggttagttagtttgttcgatcgtcgtcgttgtcgtttcgtagttgttttagttttgaatatttcgattcgtcgttattattaggtttcgggtgtcgtcgcgttgttttattcggatatttttttttttttcgttgttttttttttttttttatttaacgttgtcgtcgttttttttattacgggttttcgtcggcggtttacgtggtaattgaatagatcgatagaggtagttaaaatggcggacgcggagggtttttttattcgggttacgttttttaatacgtaggcgcggtgattttttttttttattttttttgggtttcggagtttgtcgggaaatttggaggttggtttgtttgtgg

SEQ ID NO: 25902 - DNA, 588 bp, Artificial Sequence
  chemically treated genomic DNA (Homo sapiens) CpG-island No: 25902
ccacaaacaaaccaacctccaaatttcccgacaaactccgaaacccaaaaaaaataaaaaaaaaaaatcaccgcgcctacgtattaaaaaacgtaacccgaataaaaaaaccctccgcgtccgccattttaactacctctatcgatctattcaattaccacgtaaaccgccgacgaaaacccgtaataaaaaaaacgacgacaacgttaaataaaaaaaaaaaaaaaacaacgaaaaaaaaaaaaatatccgaataaaacaacgcgacgacacccgaaacctaataataacgacgaatcgaaatattcaaaactaaaacaactacgaaacgacaacgacgacgatcgaacaaactaactaaccgaaccgaataataacgaaaacaacgaaaacaaccgaaacgataccgaccgtaaacctcccgcccaaaaaaaatacgctcttcaaacgaatcttaataaatataaaactccgaacaaacgataaaaaaaatttaaccgataaccgaacctatcacccctaacctcgacccgacgaacactaaaccactcccgcccgaaaccccgccttcataactctcgtcaaacc

SEQ ID NO: 25903 - DNA, 588 bp, Artificial Sequence
  chemically treated genomic DNA (Homo sapiens) CpG-island No: 25903
ttataggtaggttagtttttaggtttttcggtaagtttcgaaatttagaggaggtggggaaaggaggttatcgcgtttgcgtgttaggaagcgtgattcgggtgggaaaatttttcgcgttcgttattttggttgtttttgtcggtttgtttagttattacgtgaatcgtcgacggagattcgtagtgggggaggcggcggtagcgttaagtgagaaaggaaaaaagataacgaggaaaaaggaggtgttcgggtagggtaacgcggcgatattcgaggtttggtggtggcggcggatcgagatatttaaggttgaagtagttacggaacggtagcggcggcggtcggataaattgattgatcgagtcgggtggtggcgggagtagcgggagtagtcggaacgatgtcggtcgtgagtttttcgtttaaggagaatgcgttttttaagcggattttggtaagtgtgaggtttcgggtaagcggtggggaggatttagtcggtaatcgggtttgttatttttaatttcggttcggcgggtattgagttattttcgttcgggatttcgtttttatagttttcgttaggtt

SEQ ID NO: 25904 - DNA, 588 bp, Artificial Sequence
  chemically treated genomic DNA (Homo sapiens) CpG-island No: 25904
aacctaacgaaaactataaaaacgaaatcccgaacgaaaataactcaatacccgccgaaccgaaattaaaaataacaaacccgattaccgactaaatcctccccaccgcttacccgaaacctcacacttaccaaaatccgcttaaaaaacgcattctccttaaacgaaaaactcacgaccgacatcgttccgactactcccgctactcccgccaccacccgactcgatcaatcaatttatccgaccgccgccgctaccgttccgtaactacttcaaccttaaatatctcgatccgccgccaccaccaaacctcgaatatcgccgcgttaccctacccgaacacctcctttttcctcgttatcttttttcctttctcacttaacgctaccgccgcctcccccactacgaatctccgtcgacgattcacgtaataactaaacaaaccgacaaaaacaaccaaaataacgaacgcgaaaaattttcccacccgaatcacgcttcctaacacgcaaacgcgataacctcctttccccacctcctctaaatttcgaaacttaccgaaaaacctaaaaactaacctacctataa

SEQ ID NO: 25905 - DNA, 793 bp, Artificial Sequence
  chemically treated genomic DNA (Homo sapiens) CpG-island No: 25905
tcggtcgagtttagagatagttagtttttttttcgtcgcgtcgggtcgcgttgtcgttcgtttttcggtcgtggcgttttcgggttagacgcgttgtagtttttagttcgcggtaagcggggcggtcgcgttattttcggtttcgcgttagtagtttttcgtcgcgcgtttagcgttttcggttagtagtttttttatacgtaggttttgttgggtcgtttcgtcgcgttttttattttgaatttaagttatcgtggagtttcgtcgtttcgaaatttttatcgcgagcgggtgagttttttgcgcgagtttaggggtgggcgcgggtacgcgggtagtgggtgtaggggtcgcggttgtgttattagtcggagtttcgggcgtagggtagattcggggtcgggggtatcggcgcggttcgcggcggttttttggtcgtatcgtttttgggtttcggcggcgaaggtttttagatgtttttagtcgacgggtgatcgggttcgggggagttagggcgcggggattgaggtttcgtaggtgttcgtcgcggagtcgcgtaggggagcggtgggaggtgcgggcgcgggggcgggtttatcgcgtgtttttttcggtgagggttcgagggtcggttgttgtttttgtttcggtcgtttttcgtatatagtggggaagtcgttgtttttgcggagcgggcgcgcggcggggatattggagaggatttttcggattgtgtaatttgattttttttttggattttgggttttttggtagtgggagatggggttcggtt

SEQ ID NO: 25906 - DNA, 793 bp, Artificial Sequence
  chemically treated genomic DNA (Homo sapiens) CpG-island No: 25906
aaccgaaccccatctcccactaccaaaaaacccaaaatccaaaaaaaaaatcaaattacacaatccgaaaaatcctctccaatatccccgccgcgcgcccgctccgcaaaaacaacgacttccccactatatacgaaaaacgaccgaaacaaaaacaacaaccgaccctcgaaccctcaccgaaaaaaacacgcgataaacccgcccccgcgcccgcacctcccaccgctcccctacgcgactccgcgacgaacacctacgaaacctcaatccccgcgccctaactcccccgaacccgatcacccgtcgactaaaaacatctaaaaaccttcgccgccgaaacccaaaaacgatacgaccaaaaaaccgccgcgaaccgcgccgatacccccgaccccgaatctaccctacgcccgaaactccgactaataacacaaccgcgacccctacacccactacccgcgtacccgcgcccacccctaaactcgcgcaaaaaactcacccgctcgcgataaaaatttcgaaacgacgaaactccacgataacttaaattcaaaataaaaaacgcgacgaaacgacccaacaaaacctacgtataaaaaaactactaaccgaaaacgctaaacgcgcgacgaaaaactactaacgcgaaaccgaaaataacgcgaccgccccgcttaccgcgaactaaaaactacaacgcgtctaacccgaaaacgccacgaccgaaaaacgaacgacaacgcgacccgacgcgacgaaaaaaaaactaactatctctaaactcgaccga

SEQ ID NO: 25907 - DNA, 793 bp, Artificial Sequence
  chemically treated genomic DNA (Homo sapiens) CpG-island No: 25907
ggtcgagttttattttttattgttaggagatttagggtttagaggggagattagattgtataattcgaggagttttttttagtattttcgtcgcgcgttcgtttcgtaagggtagcggtttttttattgtgtgcgagaagcggtcggagtagggatagtagtcggttttcgggtttttatcgggaaggatacgcggtgagttcgttttcgcgttcgtattttttatcgtttttttgcgcggtttcgcggcggatatttgcggagttttagttttcgcgttttggttttttcgggttcggttattcgtcggttgaagatatttaagagttttcgtcgtcggagtttagaggcggtgcggttaggaagtcgtcgcgggtcgcgtcgatgttttcggtttcgagtttattttgcgttcgggatttcggttggtggtatagtcgcggtttttgtatttattgttcgcgtgttcgcgtttatttttgggttcgcgtagaggatttattcgttcgcggtgaaagtttcggggcggcggagttttacggtgatttgagtttagagtggggggcgcgacggggcggtttagtaggatttgcgtatggggaggttgttggtcgggaacgttggacgcgcggcgaggggttgttggcgcggggtcgggggtggcgcggtcgtttcgtttgtcgcgggttggaggttgtagcgcgtttggttcggaggcgttacggtcggggagcgagcggtagcgcggttcggcgcggcgggagaggaattggttgtttttgggttcggtcga

SEQ ID NO: 25908 - DNA, 793 bp, Artificial Sequence
  chemically treated genomic DNA (Homo sapiens) CpG-island No: 25908
tcgaccgaacccaaaaacaaccaattcctctcccgccgcgccgaaccgcgctaccgctcgctccccgaccgtaacgcctccgaaccaaacgcgctacaacctccaacccgcgacaaacgaaacgaccgcgccacccccgaccccgcgccaacaacccctcgccgcgcgtccaacgttcccgaccaacaacctccccatacgcaaatcctactaaaccgccccgtcgcgccccccactctaaactcaaatcaccgtaaaactccgccgccccgaaactttcaccgcgaacgaataaatcctctacgcgaacccaaaaataaacgcgaacacgcgaacaataaatacaaaaaccgcgactataccaccaaccgaaatcccgaacgcaaaataaactcgaaaccgaaaacatcgacgcgacccgcgacgacttcctaaccgcaccgcctctaaactccgacgacgaaaactcttaaatatcttcaaccgacgaataaccgaacccgaaaaaaccaaaacgcgaaaactaaaactccgcaaatatccgccgcgaaaccgcgcaaaaaaacgataaaaaatacgaacgcgaaaacgaactcaccgcgtatccttcccgataaaaacccgaaaaccgactactatccctactccgaccgcttctcgcacacaataaaaaaaccgctacccttacgaaacgaacgcgcgacgaaaatactaaaaaaaactcctcgaattatacaatctaatctcccctctaaaccctaaatctcctaacaataaaaaataaaactcgacc

SEQ ID NO: 25909 - DNA, 707 bp, Artificial Sequence
  chemically treated genomic DNA (Homo sapiens) CpG-island No: 25909
attttgtgcggtttcggtttgggaggcgttaattaaattattgtcgatgaatagttgtaaacgttcggttttgagggttagtaggtgagttgggaaatcgcgtatcgttggtagtttgaatttaatgcgaaattggttagcgttacgtcggatgtgttgcggtaaattaaaacgttagaggaggtggagaaaattcgtttcgtttgtgggattgttgatcgcggtgtagagtatattcgtcgttttatttaggcggggatgagcgagcgcgagatagtcgttgaattggagtggtttatgcgttatatgggttatgaaaaagttttttttgatattattgtcgttagtggttggcgtggggcgttgtcgtacggtaaagttagcgataagattgttgtagcgggcgagtttgttattttcgatttcggtgcgttgtattagggttattgttttgatatgacgcgtattttgttggtgaatggcgaaggggtgagcgtcgaattttatttgttgtttaacgtttattaaattgttttgtaggtatagttcgtagtaattttcgcgattcgtttcggcgtgcgttgttagtaggttgacgatgtcgcgcgtcgggttattatagaagtaggttatggcgattatttcggttataatatcggttacgttatcggtattgaagtttatgaagattcgcgttttttatcgcg

SEQ ID NO: 25910 - DNA, 707 bp, Artificial Sequence
  chemically treated genomic DNA (Homo sapiens) CpG-island No: 25910
cgcgataaaaaacgcgaatcttcataaacttcaataccgataacgtaaccgatattataaccgaaataatcgccataacctacttctataataacccgacgcgcgacatcgtcaacctactaacaacgcacgccgaaacgaatcgcgaaaattactacgaactatacctacaaaacaatttaataaacgttaaacaacaaataaaattcgacgctcaccccttcgccattcaccaacaaaatacgcgtcatatcaaaacaataaccctaatacaacgcaccgaaatcgaaaataacaaactcgcccgctacaacaatcttatcgctaactttaccgtacgacaacgccccacgccaaccactaacgacaataatatcaaaaaaaactttttcataacccatataacgcataaaccactccaattcaacgactatctcgcgctcgctcatccccgcctaaataaaacgacgaatatactctacaccgcgatcaacaatcccacaaacgaaacgaattttctccacctcctctaacgttttaatttaccgcaacacatccgacgtaacgctaaccaatttcgcattaaattcaaactaccaacgatacgcgatttcccaactcacctactaaccctcaaaaccgaacgtttacaactattcatcgacaataatttaattaacgcctcccaaaccgaaaccgcacaaaat

SEQ ID NO: 25911 - DNA, 707 bp, Artificial Sequence
  chemically treated genomic DNA (Homo sapiens) CpG-island No: 25911
cgcggtgaaaaacgcggatttttatgaattttaatgtcgatagcgtgatcggtgttatgatcgaaatagtcgttataatttgtttttgtaatgattcggcgcgcggtatcgttaatttgttggtagcgtacgtcggggcgaatcgcggagattgttgcgagttgtgtttgtaggataatttgatagacgttaaatagtaggtgagattcggcgtttattttttcgttatttattagtaaggtgcgcgttatattagagtagtagttttgatatagcgtatcgaaatcgagagtgataaattcgttcgttgtaataattttgtcgttggttttgtcgtgcggtagcgttttacgttagttattggcgataatggtgttaaaagaggtttttttatggtttatgtggcgtataaattattttagtttagcggttatttcgcgttcgtttattttcgtttgaataaagcggcgaatatgttttgtatcgcgattagtaattttataggcgaggcggattttttttattttttttggcgttttgatttgtcgtagtatattcggcgtggcgttaattagtttcgtattgagtttagattgttagcggtgcgcggttttttaatttatttgttggtttttaaaatcgagcgtttgtaattgtttatcggtaatgatttgattgacgttttttagatcgaaatcgtataaaat

SEQ ID NO: 25912 - DNA, 707 bp, Artificial Sequence
  chemically treated genomic DNA (Homo sapiens) CpG-island No: 25912
attttatacgatttcgatctaaaaaacgtcaatcaaatcattaccgataaacaattacaaacgctcgattttaaaaaccaacaaataaattaaaaaaccgcgcaccgctaacaatctaaactcaatacgaaactaattaacgccacgccgaatatactacgacaaatcaaaacgccaaaaaaaataaaaaaaatccgcctcgcctataaaattactaatcgcgatacaaaacatattcgccgctttattcaaacgaaaataaacgaacgcgaaataaccgctaaactaaaataatttatacgccacataaaccataaaaaaacctcttttaacaccattatcgccaataactaacgtaaaacgctaccgcacgacaaaaccaacgacaaaattattacaacgaacgaatttatcactctcgatttcgatacgctatatcaaaactactactctaatataacgcgcaccttactaataaataacgaaaaaataaacgccgaatctcacctactatttaacgtctatcaaattatcctacaaacacaactcgcaacaatctccgcgattcgccccgacgtacgctaccaacaaattaacgataccgcgcgccgaatcattacaaaaacaaattataacgactatttcgatcataacaccgatcacgctatcgacattaaaattcataaaaatccgcgtttttcaccgcg

SEQ ID NO: 25913 - DNA, 661 bp, Artificial Sequence
  chemically treated genomic DNA (Homo sapiens) CpG-island No: 25913
ggttttggtttcggcgtaggtggtgttttaatttttggtttaggcggttttatcggtttcggtttcggtggggcgatcggtgtaggtttcggtttaaattcggtgttattggttgtaatagtggtcggatcgagttttggtgttgcggtattatttgttcgtatttttttcgttgcgtttttcggcggttgcgtcggtaacgtttgggtggcggttggtattatattaggtttattacgatcgttcgttttcggtattagcgggatagtcgcgaatttattttgataatgttttttttgttcgtttagtagttttggaagtataattatttttagcgttattagtacgatcgtgtttattaatcgattttgaaatttatttgttatcgttttttttcgcgttaattatttttatgatatgtgcgatcgtgtggaaagaatatatattagtacggtgtttttcgttttagcgttcgttattgcggtattttatgtttgcgtaacggtattaaatgatttgtcgttatttaaaatttttagtagttgttttttcgtggtacgcgcggtttttttagttgcggatatattagttataattacgttttttaataaggtagagttcgggaatatttttattatggagtatatcgtaatcggtagaa

SEQ ID NO: 25914 - DNA, 661 bp, Artificial Sequence
  chemically treated genomic DNA (Homo sapiens) CpG-island No: 25914
ttctaccgattacgatatactccataataaaaatattcccgaactctaccttattaaaaaacgtaattataactaatatatccgcaactaaaaaaaccgcgcgtaccacgaaaaaacaactactaaaaattttaaataacgacaaatcatttaataccgttacgcaaacataaaataccgcaataacgaacgctaaaacgaaaaacaccgtactaatatatattctttccacacgatcgcacatatcataaaaataattaacgcgaaaaaaaacgataacaaataaatttcaaaatcgattaataaacacgatcgtactaataacgctaaaaataattatacttccaaaactactaaacgaacaaaaaaaacattatcaaaataaattcgcgactatcccgctaataccgaaaacgaacgatcgtaataaacctaatataataccaaccgccacccaaacgttaccgacgcaaccgccgaaaaacgcaacgaaaaaaatacgaacaaataataccgcaacaccaaaactcgatccgaccactattacaaccaataacaccgaatttaaaccgaaacctacaccgatcgccccaccgaaaccgaaaccgataaaaccgcctaaaccaaaaattaaaacaccacctacgccgaaaccaaaacc

SEQ ID NO: 25915 - DNA, 661 bp, Artificial Sequence
  chemically treated genomic DNA (Homo sapiens) CpG-island No: 25915
ttttgtcggttacggtatgttttatgataaagatattttcgaattttgttttgttgaaaagcgtggttatgattggtatgttcgtaattggaagggtcgcgcgtgttacggaagaataattgttgaagattttgggtaacggtaaattatttgatatcgttgcgtaggtatgggatgtcgtaatggcggacgttaaagcggaagatatcgtgttggtgtgtgttttttttatacggtcgtatatgttatggaagtgattgacgcgaggagaagcggtggtaagtaagttttagaatcggttagtgggtacgatcgtgttggtggcgttgggggtgattgtatttttagggttgttggacgggtagaaaaaatattattaggatgagttcgcggttatttcgttggtgtcgaaagcgggcgatcgtgatgagtttgatatgatgttagtcgttatttaggcgttatcgacgtagtcgtcggaaggcgtagcggaagaggtgcgggtaggtgatgtcgtagtattaaagttcgattcggttattattgtagttaataatatcgagtttgaatcggaatttgtatcggtcgttttatcgaagtcgaaatcggtggagtcgtttaaattaaaggttgaagtattatttgcgtcgaagttagaatt

SEQ ID NO: 25916 - DNA, 661 bp, Artificial Sequence
  chemically treated genomic DNA (Homo sapiens) CpG-island No: 25916
aattctaacttcgacgcaaataatacttcaacctttaatttaaacgactccaccgatttcgacttcgataaaacgaccgatacaaattccgattcaaactcgatattattaactacaataataaccgaatcgaactttaatactacgacatcacctacccgcacctcttccgctacgccttccgacgactacgtcgataacgcctaaataacgactaacatcatatcaaactcatcacgatcgcccgctttcgacaccaacgaaataaccgcgaactcatcctaataatattttttctacccgtccaacaaccctaaaaatacaatcacccccaacgccaccaacacgatcgtacccactaaccgattctaaaacttacttaccaccgcttctcctcgcgtcaatcacttccataacatatacgaccgtataaaaaaaacacacaccaacacgatatcttccgctttaacgtccgccattacgacatcccatacctacgcaacgatatcaaataatttaccgttacccaaaatcttcaacaattattcttccgtaacacgcgcgacccttccaattacgaacataccaatcataaccacgcttttcaacaaaacaaaattcgaaaatatctttatcataaaacataccgtaaccgacaaaa

SEQ ID NO: 25917 - DNA, 756 bp, Artificial Sequence
  chemically treated genomic DNA (Homo sapiens) CpG-island No: 25917
  unsure (708)
cgtcgttattgtttcggacggtagtagaaacgggatatagtacgatgcgtggggaaaggtcgttcgtattacgtagggcgggttgacgcgtagtatggaatacgatgttgtcggacgggttattcgtttgattagtgaaaacggtagttatattatttttcgttacgatgtatttgatcggttgatataggaaatcggttttgacggtcgtatatagcgttattattacgatttgatcggtaaatttattcgtagcgaggatgagggtttggttatttattggtattatgacgaagtagatcgttttacgtatcgtatcgtgaagggtgaaacgtagagcggtggtagtatgacgaacgtggttggttgatagatattagttatattagtgaaggttatcgcgtgtcggtttattacggttatgacgataaaggtcggttgatcggtgagcgttagacggtgtattattcgtagacggaagtattgttttggtattatgagatcggatatgcgtataacgaataggggttggtaaatcgcgttacgtcggatagtttgttcgtcggtggagtggttgatttacggtagcggttattttgcgggtatgaaattcggcgatatatcgttgttggagtttacgcgcgatcgtttgtatcgtgagacggtgcgtattttcggtagtatggtaggtagtaatgtcgtatatanattgattagtatatatattttcgtaagttagttatagagttagtattt

SEQ ID NO: 25918 - DNA, 756 bp, Artificial Sequence
  chemically treated genomic DNA (Homo sapiens) CpG-island No: 25918
  unsure (49)
aaatactaactctataactaacttacgaaaatatatatactaatcaatntatatacgacattactacctaccatactaccgaaaatacgcaccgtctcacgatacaaacgatcgcgcgtaaactccaacaacgatatatcgccgaatttcatacccgcaaaataaccgctaccgtaaatcaaccactccaccgacgaacaaactatccgacgtaacgcgatttaccaacccctattcgttatacgcatatccgatctcataataccaaaacaatacttccgtctacgaataatacaccgtctaacgctcaccgatcaaccgacctttatcgtcataaccgtaataaaccgacacgcgataaccttcactaatataactaatatctatcaaccaaccacgttcgtcatactaccaccgctctacgtttcacccttcacgatacgatacgtaaaacgatctacttcgtcataataccaataaataaccaaaccctcatcctcgctacgaataaatttaccgatcaaatcgtaataataacgctatatacgaccgtcaaaaccgatttcctatatcaaccgatcaaatacatcgtaacgaaaaataatataactaccgttttcactaatcaaacgaataacccgtccgacaacatcgtattccatactacgcgtcaacccgccctacgtaatacgaacgacctttccccacgcatcgtactatatcccgtttctactaccgtccgaaacaataacgacg

SEQ ID NO: 25919 - DNA, 756 bp, Artificial Sequence
  chemically treated genomic DNA (Homo sapiens) CpG-island No: 25919
  unsure (49)
aggtgttggttttgtaattggtttgcgggggtgtatgtgttggttagtntatatgcggtattattgtttgttatgttgtcgaaagtgcgtatcgttttacggtgtaggcggtcgcgcgtgaattttagtagcggtgtgtcgtcgagttttatgttcgtaagatagtcgttgtcgtaggttagttattttatcggcgggtagattgttcggcgtgacgcggtttgttagtttttgttcgttgtacgtatgttcggttttatggtgttagagtagtgttttcgtttgcgggtgatgtatcgtttgacgtttatcggttagtcggtttttatcgttatagtcgtagtggatcgatacgcggtggtttttattggtatggttgatgtttgttagttagttacgttcgttatattgttatcgttttgcgttttattttttacggtgcggtgcgtgaggcggtttgtttcgttatagtgttagtgggtgattagatttttattttcgttgcggataagtttgtcggttaggtcgtggtgataacgttgtgtgcggtcgttaaagtcggttttttgtattagtcggttaagtatatcgtaacggaaggtggtgtggttgtcgtttttattggttaggcggatgattcgttcggtagtatcgtattttatattgcgcgttagttcgttttgcgtggtacggacggtttttttttacgtatcgtattgtgtttcgtttttgttgtcgttcggggtaatgacggcg

SEQ ID NO: 25920 - DNA, 756 bp, Artificial Sequence
  chemically treated genomic DNA (Homo sapiens) CpG-island No: 25920
  unsure (708)
cgccgtcattaccccgaacgacaacaaaaacgaaacacaatacgatacgtaaaaaaaaaccgtccgtaccacgcaaaacgaactaacgcgcaatataaaatacgatactaccgaacgaatcatccgcctaaccaataaaaacgacaaccacaccaccttccgttacgatatacttaaccgactaatacaaaaaaccgactttaacgaccgcacacaacgttatcaccacgacctaaccgacaaacttatccgcaacgaaaataaaaatctaatcacccactaacactataacgaaacaaaccgcctcacgcaccgcaccgtaaaaaataaaacgcaaaacgataacaatataacgaacgtaactaactaacaaacatcaaccataccaataaaaaccaccgcgtatcgatccactacgactataacgataaaaaccgactaaccgataaacgtcaaacgatacatcacccgcaaacgaaaacactactctaacaccataaaaccgaacatacgtacaacgaacaaaaactaacaaaccgcgtcacgccgaacaatctacccgccgataaaataactaacctacgacaacgactatcttacgaacataaaactcgacgacacaccgctactaaaattcacgcgcgaccgcctacaccgtaaaacgatacgcactttcgacaacataacaaacaataataccgcatatanactaaccaacacatacacccccgcaaaccaattacaaaaccaacacct

SEQ ID NO: 25921 - DNA, 522 bp, Artificial Sequence
  chemically treated genomic DNA (Homo sapiens) CpG-island No: 25921
cgcggaatgtttttttagaagtcgtcgtcggttaggtgcgtaatggtatgtatatcgatttttttaattaattttagtattgattttacgtaaatgcgggtcggtgttagtagatgatcggttaatggtttattattaagttcggtggtttgcggattataatcgttgattttaagaattttgcgtattagcgaatagtcgttcgagtgtggatcgttggaatcgagtgtaattagtatatcgtcgtcgttgattttagagtcgtcgatgatttttgatttttttattacgttaacgtagaaattcgcgatatcgtaatttttatcgtgatatattttcggtatttttgtcgtttcgttatttattagtgaatagtttgattgtagataatttttcgtaatgtcgttgattatcgttgaagcggtattaatatttagtttttcggttgcgtaatagtcgaggaaaaatagcggttttgtattttgtattattaggttattaacgtatatggcgattagatta

SEQ ID NO: 25922 - DNA, 522 bp, Artificial Sequence
  chemically treated genomic DNA (Homo sapiens) CpG-island No: 25922
taatctaatcgccatatacgttaataacctaataatacaaaatacaaaaccgctatttttcctcgactattacgcaaccgaaaaactaaatattaataccgcttcaacgataatcaacgacattacgaaaaattatctacaatcaaactattcactaataaataacgaaacgacaaaaataccgaaaatatatcacgataaaaattacgatatcgcgaatttctacgttaacgtaataaaaaaatcaaaaatcatcgacgactctaaaatcaacgacgacgatatactaattacactcgattccaacgatccacactcgaacgactattcgctaatacgcaaaattcttaaaatcaacgattataatccgcaaaccaccgaacttaataataaaccattaaccgatcatctactaacaccgacccgcatttacgtaaaatcaatactaaaattaattaaaaaaatcgatatacataccattacgcacctaaccgacgacgacttctaaaaaaacattccgcg

SEQ ID NO: 25923 - DNA, 522 bp, Artificial Sequence
  chemically treated genomic DNA (Homo sapiens) CpG-island No: 25923
tgatttggtcgttatgtgcgttaatgatttggtggtgtaaggtgtagagtcgttgttttttttcgattattacgtaatcggaaaattggatgttgatatcgttttagcggtgattagcggtattgcggaaggttgtttgtaattaggttgtttattggtgggtggcgaaacggtagaaatgtcggggatgtattacggtgaggattacgatgtcgcgggtttttgcgttggcgtggtagaaaaattagaaattatcgacggttttaaagttagcgacggcgatgtgttgattgtattcggttttagcggtttatattcgaacggttattcgttggtgcgtaaaatttttgaagttagcggttgtgattcgtaaattatcgaatttgatggtaagttattagtcgattatttgttggtatcgattcgtatttacgtgaagttagtgttggagttgattgaaaaggtcgatgtgtatgttattgcgtatttgatcggcggcggtttttgggaaaatatttcgcg

SEQ ID NO: 25924 - DNA, 522 bp, Artificial Sequence
  chemically treated genomic DNA (Homo sapiens) CpG-island No: 25924
cgcgaaatattttcccaaaaaccgccgccgatcaaatacgcaataacatacacatcgaccttttcaatcaactccaacactaacttcacgtaaatacgaatcgataccaacaaataatcgactaataacttaccatcaaattcgataatttacgaatcacaaccgctaacttcaaaaattttacgcaccaacgaataaccgttcgaatataaaccgctaaaaccgaatacaatcaacacatcgccgtcgctaactttaaaaccgtcgataatttctaatttttctaccacgccaacgcaaaaacccgcgacatcgtaatcctcaccgtaatacatccccgacatttctaccgtttcgccacccaccaataaacaacctaattacaaacaaccttccgcaataccgctaatcaccgctaaaacgatatcaacatccaattttccgattacgtaataatcgaaaaaaaacaacgactctacaccttacaccaccaaatcattaacgcacataacgaccaaatca

SEQ ID NO: 25925 - DNA, 678 bp, Artificial Sequence
  chemically treated genomic DNA (Homo sapiens) CpG-island No: 25925
tgaatggttttcgtcgcgtacgtcgttttttgcgttatcgtttgcggtaatgttattttcgtagattagtcgtaaaggaattcggtaatgaacgaattttcggtatttatggtgtcgataatcgttatcggtttaggagtttgacgttagaattgcgcgttattttaggtaatgttgtcgtttttatttagcgtgataattattgtttttgcgttacgggtaataatcgtttttatttttagacgtagcgtttcgtttttttgcggtgcggaggtaaaggtaaaatcgagatgcggtattagtgtttgttagagcgggttgttttatttgtcggagaagtcgaaagcggtaagtttgttcgtagcgtgtagttgtgggaatgcgtttttcgtatgtttttagattgtcgcgtgtataatgttatattgcgttatttagatacgtattcgggatattagtacgtgaaagattcggttaatcgcgagaaattcgttaaagtttggggcgtggaaagtttgttagcgtatatcggttatcgtattagcgagttgtcgtatcgcgtagttatggcgaagtgcgtgtcgcgtatattatgggcgaagattcgttataaattgacgcggagttgtcggtagtacgtaaagtttttgaagatttggaattggttatcgtttagga

SEQ ID NO: 25926 - DNA, 678 bp, Artificial Sequence
  chemically treated genomic DNA (Homo sapiens) CpG-island No: 25926
tcctaaacgataaccaattccaaatcttcaaaaactttacgtactaccgacaactccgcgtcaatttataacgaatcttcgcccataatatacgcgacacgcacttcgccataactacgcgatacgacaactcgctaatacgataaccgatatacgctaacaaactttccacgccccaaactttaacgaatttctcgcgattaaccgaatctttcacgtactaatatcccgaatacgtatctaaataacgcaatataacattatacacgcgacaatctaaaaacatacgaaaaacgcattcccacaactacacgctacgaacaaacttaccgctttcgacttctccgacaaataaaacaacccgctctaacaaacactaataccgcatctcgattttacctttacctccgcaccgcaaaaaaacgaaacgctacgtctaaaaataaaaacgattattacccgtaacgcaaaaacaataattatcacgctaaataaaaacgacaacattacctaaaataacgcgcaattctaacgtcaaactcctaaaccgataacgattatcgacaccataaataccgaaaattcgttcattaccgaattcctttacgactaatctacgaaaataacattaccgcaaacgataacgcaaaaaacgacgtacgcgacgaaaaccattca

SEQ ID NO: 25927 - DNA, 678 bp, Artificial Sequence
  chemically treated genomic DNA (Homo sapiens) CpG-island No: 25927
ttttgaacgataattagttttagatttttaaaggttttacgtattgtcgatagtttcgcgttagtttgtagcggattttcgtttataatgtacgcggtacgtatttcgttatgattgcgcggtgcggtagttcgttgatgcgatagtcggtatgcgttggtaggttttttacgttttaggttttggcgaatttttcgcggttagtcggattttttacgtattggtatttcggatacgtatttgagtggcgtagtatgatattgtgtacgcggtaatttggggatatgcggaagacgtatttttatagttgtacgttgcgggtaaatttatcgttttcgattttttcgataagtgggatagttcgttttggtagatattggtgtcgtatttcgattttgtttttgttttcgtatcgtaagaagacgaaacgttgcgtttgaagatgaaagcgattgttgttcgtggcgtaggaatagtgattgttacgttgagtgaaaacggtagtattgtttgggatggcgcgtagttttggcgttaggtttttgaatcggtgacggttatcgatattatgggtgtcggagattcgtttattgtcggatttttttgcggttggtttgcggggatgatattatcgtaggcgatagcgtagggaacggcgtgcgcggcgaaaattattta

SEQ ID NO: 25928 - DNA, 678 bp, Artificial Sequence
  chemically treated genomic DNA (Homo sapiens) CpG-island No: 25928
taaataattttcgccgcgcacgccgttccctacgctatcgcctacgataatatcatccccgcaaaccaaccgcaaaaaaatccgacaataaacgaatctccgacacccataatatcgataaccgtcaccgattcaaaaacctaacgccaaaactacgcgccatcccaaacaatactaccgttttcactcaacgtaacaatcactattcctacgccacgaacaacaatcgctttcatcttcaaacgcaacgtttcgtcttcttacgatacgaaaacaaaaacaaaatcgaaatacgacaccaatatctaccaaaacgaactatcccacttatcgaaaaaatcgaaaacgataaatttacccgcaacgtacaactataaaaatacgtcttccgcatatccccaaattaccgcgtacacaatatcatactacgccactcaaatacgtatccgaaataccaatacgtaaaaaatccgactaaccgcgaaaaattcgccaaaacctaaaacgtaaaaaacctaccaacgcataccgactatcgcatcaacgaactaccgcaccgcgcaatcataacgaaatacgtaccgcgtacattataaacgaaaatccgctacaaactaacgcgaaactatcgacaatacgtaaaacctttaaaaatctaaaactaattatcgttcaaaa

SEQ ID NO: 25929 - DNA, 820 bp, Artificial Sequence
  chemically treated genomic DNA (Homo sapiens) CpG-island No: 25929
  unsure (567)
atattgtttagggtttagtcggggtacgtatcggtgtttttatcggcgtggtttgttcggtgtgtttcggcggggtgacgttcggttattcggttaattcgttgttcggtgtaaaggtttttttcggtgaaatcgatatcgttttgttcggttcgttgtcgtttattttttttcgtatttatagtagttatcggataaaaacgttcgcgtcggtggggagtttcggtttcggttggaaaatgtttgcggatattcgtttatagttgcgcgataatatattgatatttagtgataacggcggtagaagtttgtattttgagtatttgtttttcggtgaggacggttatagtcgtagcgagttattgtggttggtgcgcggcggcgtggcgaaattggatgaaggttatcggttggtcgtattttggtaggcgttgtcggaagaatttcgtttaagttcgtatcgttatttggcgataaatagttcgtagggtcgtggtggttgttcggttggtgtgagcgggtgtcggaagcggatgaggtgttgtttgcggcgttgtcgtcgtattnggtattgattcgggttgtggatcgttttcggcgtatatagacgtttttacgcgaaacgttcggtgaatttagcggcgaaatttacggcgtgacggaatgtttcggcgttatttcggtttgtattgaatagtaagcgtacgggtagaagaagcgggtagtaagtatttttggcgggacgaatcgttcgtttttttgatatttgtaggttaaacgaatattgtcgggataacgaatcgtttttttttttgtgcgt

SEQ ID NO: 25930 - DNA, 820 bp, Artificial Sequence
  chemically treated genomic DNA (Homo sapiens) CpG-island No: 25930
  unsure (254)
acgcacaaaaaaaaaaacgattcgttatcccgacaatattcgtttaacctacaaatatcaaaaaaacgaacgattcgtcccgccaaaaatacttactacccgcttcttctacccgtacgcttactattcaatacaaaccgaaataacgccgaaacattccgtcacgccgtaaatttcgccgctaaattcaccgaacgtttcgcgtaaaaacgtctatatacgccgaaaacgatccacaacccgaatcaataccnaatacgacgacaacgccgcaaacaacacctcatccgcttccgacacccgctcacaccaaccgaacaaccaccacgaccctacgaactatttatcgccaaataacgatacgaacttaaacgaaattcttccgacaacgcctaccaaaatacgaccaaccgataaccttcatccaatttcgccacgccgccgcgcaccaaccacaataactcgctacgactataaccgtcctcaccgaaaaacaaatactcaaaatacaaacttctaccgccgttatcactaaatatcaatatattatcgcgcaactataaacgaatatccgcaaacattttccaaccgaaaccgaaactccccaccgacgcgaacgtttttatccgataactactataaatacgaaaaaaaataaacgacaacgaaccgaacaaaacgatatcgatttcaccgaaaaaaacctttacaccgaacaacgaattaaccgaataaccgaacgtcaccccgccgaaacacaccgaacaaaccacgccgataaaaacaccgatacgtaccccgactaaaccctaaacaatat

SEQ ID NO: 25931 - DNA, 820 bp, Artificial Sequence
  chemically treated genomic DNA (Homo sapiens) CpG-island No: 25931
  unsure (254)
acgtatagggagaaagacgattcgttgtttcggtaatattcgtttaatttgtaggtattagaaaaacggacggttcgtttcgttagaaatgtttgttgttcgttttttttgttcgtgcgtttgttgtttagtataagtcgaagtgacgtcgggatatttcgttacgtcgtgaatttcgtcgttgaatttatcgggcgtttcgcgtggaaacgtttgtgtgcgtcgaaagcggtttatagttcgggttagtattnggtacggcggtagcgtcgtaggtagtattttattcgttttcggtattcgtttatattagtcgagtagttattacggttttgcggattgtttgtcgttagataacgatgcggatttaagcggagttttttcggtagcgtttgttagagtgcggttagtcggtgatttttatttagtttcgttacgtcgtcgcgtattagttatagtgattcgttgcggttgtaatcgtttttatcgggaaataggtgtttaaaatataggtttttgtcgtcgttattattgagtattagtgtgttatcgcgtagttgtaagcggatattcgtaggtattttttagtcggggtcgaggttttttatcggcgcgggcgtttttgttcggtaattgttgtaggtgcgggagagaatgaacggtagcgggtcgggtagggcgatgtcggttttatcgggaaggatttttgtatcgagtagcggattgatcggatggtcggacgttatttcgtcggggtatatcgaataggttacgtcggtgggggtatcgatgcgtatttcggttgaattttggataatgt

SEQ ID NO: 25932 - DNA, 820 bp, Artificial Sequence
  chemically treated genomic DNA (Homo sapiens) CpG-island No: 25932
  unsure (567)
acattatccaaaattcaaccgaaatacgcatcgatacccccaccgacgtaacctattcgatataccccgacgaaataacgtccgaccatccgatcaatccgctactcgatacaaaaatccttcccgataaaaccgacatcgccctacccgacccgctaccgttcattctctcccgcacctacaacaattaccgaacaaaaacgcccgcgccgataaaaaacctcgaccccgactaaaaaatacctacgaatatccgcttacaactacgcgataacacactaatactcaataataacgacgacaaaaacctatattttaaacacctatttcccgataaaaacgattacaaccgcaacgaatcactataactaatacgcgacgacgtaacgaaactaaataaaaatcaccgactaaccgcactctaacaaacgctaccgaaaaaactccgcttaaatccgcatcgttatctaacgacaaacaatccgcaaaaccgtaataactactcgactaatataaacgaataccgaaaacgaataaaatactacctacgacgctaccgccgtaccnaatactaacccgaactataaaccgctttcgacgcacacaaacgtttccacgcgaaacgcccgataaattcaacgacgaaattcacgacgtaacgaaatatcccgacgtcacttcgacttatactaaacaacaaacgcacgaacaaaaaaaacgaacaacaaacatttctaacgaaacgaaccgtccgtttttctaatacctacaaattaaacgaatattaccgaaacaacgaatcgtctttctccctatacgt

SEQ ID NO: 25933 - DNA, 860 bp, Artificial Sequence
  chemically treated genomic DNA (Homo sapiens) CpG-island No: 25933
  unsure (722)
cggttgtcgttggagaacgatattattaaagatgggcggattgttgatgcgtatagttggttaaaacgttgttatcgtggagtcgcgaattgtcgtagcgttattatattatgttggcgtttttcgttagtcgtatattatagcggttattttcgcgttcgtcgatgttttttggtgagcgggagtaaacggtttggttgttagggacgatggttcgcgagttggatatggattcggattttttgcgtttcgattatagcgaagatttatttagtttcgtttataacgtgattgtcgcgtaaagtaaagagttggtaacgttgtttattttggtagaaaggttgcgtgtttatgtgagcgcgattatttcggatgttagtgtattatagcgatttttgttttttttatttttttattagtaatgtttggtttggcgtgataacgaatagtggttgtgggcgacgcgttatagttgggggcgtaaattggcggtggggatgattagcgcgaaggagttggcggtagcgttattcgttgatttcgaaagcgtcgcgatatgtggcgaaggcggatttgattttggtgagcgtttttgttcgttagtagcgttattgtcgttagtggagattttgtatcgcgttgggttttgcgtttggaagcgattgatgatttgtaattaatttgattcgtggcgatataacgtcggatcgtttttttgcgtntttggttgtttgatgtcgttgcgtttttgcgcgtagaattttagcgcgagtacgtacgtttttggtgtttgatcgagttttggtgagttgtttaacgtgcgttattttttgcgagttggcgtttatttgagtcgtcgt

SEQ ID NO: 25934 - DNA, 860 bp, Artificial Sequence
  chemically treated genomic DNA (Homo sapiens) CpG-island No: 25934
  unsure (139)
acgacgactcaaataaacgccaactcgcaaaaaataacgcacgttaaacaactcaccaaaactcgatcaaacaccaaaaacgtacgtactcgcgctaaaattctacgcgcaaaaacgcaacgacatcaaacaaccaaanacgcaaaaaaacgatccgacgttatatcgccacgaatcaaattaattacaaatcatcaatcgcttccaaacgcaaaacccaacgcgatacaaaatctccactaacgacaataacgctactaacgaacaaaaacgctcaccaaaatcaaatccgccttcgccacatatcgcgacgctttcgaaatcaacgaataacgctaccgccaactccttcgcgctaatcatccccaccgccaatttacgcccccaactataacgcgtcgcccacaaccactattcgttatcacgccaaaccaaacattactaataaaaaaataaaaaaaacaaaaatcgctataatacactaacatccgaaataatcgcgctcacataaacacgcaacctttctaccaaaataaacaacgttaccaactctttactttacgcgacaatcacgttataaacgaaactaaataaatcttcgctataatcgaaacgcaaaaaatccgaatccatatccaactcgcgaaccatcgtccctaacaaccaaaccgtttactcccgctcaccaaaaaacatcgacgaacgcgaaaataaccgctataatatacgactaacgaaaaacgccaacataatataataacgctacgacaattcgcgactccacgataacaacgttttaaccaactatacgcatcaacaatccgcccatctttaataatatcgttctccaacgacaaccg

SEQ ID NO: 25935 - DNA, 860 bp, Artificial Sequence
  chemically treated genomic DNA (Homo sapiens) CpG-island No: 25935
  unsure (139)
acgacgatttagataagcgttaattcgtaaaaaatagcgtacgttaaataatttattaaggttcgattaagtattagagacgtacgtattcgcgttgaggttttgcgcgtagaggcgtaacgatattaagtaattaganacgtagaaaagcggttcggcgttgtgtcgttacggattaaattaattgtaggttattagtcgtttttaagcgtaaagtttagcgcgatgtaaagtttttattggcgatagtagcgttgttgacgaatagaaacgtttattaggattaaattcgttttcgttatatatcgcgacgttttcgggattaacggataacgttgtcgttagttttttcgcgttagttatttttatcgttagtttgcgtttttagttatagcgcgtcgtttatagttattgttcgttattacgttaggttagatattgttgatgagaaggtaaaaaaggtaggaatcgttgtaatgtattggtattcggggtgatcgcgtttatatgaatacgtaatttttttgttagagtaagtagcgttgttagttttttgttttgcgcggtagttacgttataggcgggattgagtgagttttcgttgtaatcgaagcgtagggagttcggatttatatttagttcgcgggttatcgtttttgatagttaggtcgtttgttttcgtttattaagggatatcgacgggcgcggaaatgatcgttgtaatgtgcgattggcgggaaacgttaatataatgtgatgacgttgcggtagttcgcgattttacggtaataacgttttagttagttgtgcgtattaataattcgtttatttttgataatgtcgttttttagcggtaatcg

SEQ ID NO: 25936 - DNA, 860 bp, Artificial Sequence
  chemically treated genomic DNA (Homo sapiens) CpG-island No: 25936
  unsure (722)
cgattaccgctaaaaaacgacattatcaaaaataaacgaattattaatacgcacaactaactaaaacgttattaccgtaaaatcgcgaactaccgcaacgtcatcacattatattaacgtttcccgccaatcgcacattacaacgatcatttccgcgcccgtcgatatcccttaataaacgaaaacaaacgacctaactatcaaaaacgataacccgcgaactaaatataaatccgaactccctacgcttcgattacaacgaaaactcactcaatcccgcctataacgtaactaccgcgcaaaacaaaaaactaacaacgctacttactctaacaaaaaaattacgtattcatataaacgcgatcaccccgaataccaatacattacaacgattcctaccttttttaccttctcatcaacaatatctaacctaacgtaataacgaacaataactataaacgacgcgctataactaaaaacgcaaactaacgataaaaataactaacgcgaaaaaactaacgacaacgttatccgttaatcccgaaaacgtcgcgatatataacgaaaacgaatttaatcctaataaacgtttctattcgtcaacaacgctactatcgccaataaaaactttacatcgcgctaaactttacgcttaaaaacgactaataacctacaattaatttaatccgtaacgacacaacgccgaaccgcttttctacgtntctaattacttaatatcgttacgcctctacgcgcaaaacctcaacgcgaatacgtacgtctctaatacttaatcgaaccttaataaattatttaacgtacgctattttttacgaattaacgcttatctaaatcgtcgt

SEQ ID NO: 25937 - DNA, 620 bp, Artificial Sequence
  chemically treated genomic DNA (Homo sapiens) CpG-island No: 25937
tattgcgcgtgggtgattatatcgtagcgattggtaattcgtttggtttgggcgagacggtaattttcgggattgtttttgcgttggggcgtacggtttgaatgtcgaaaattacgaaaattttatttagatcgatgtagcgattaatcgtggtaatttcggtggtgcgttggttaatttgaacggcgaattgatcggtattaatatcgcgattttcgtatcggacggcggtaatatcggtatcggttttgttatttcgagtaatatggtgaaaaatttgatttcgtagatggtggaatacggttaggtgaaacgcggtgagttgggtattatggggattgagttgaatttcgaattggcgaaagcgatgaaagttgacgtttagcgcggtgttttcgtaagttaggttttgtttaattttttcgttgtaaaagcgggtattaaagcgggtgatgtgattattttattgaacggtaagtcgattagtagttttgtcgtattgcgtgtttagtgtgggtattatgtcggtagtaggtaaattgattttgggtttattgcgcgacggtaagtaggttaacgtgaatttggaattgtagtagagtagttagaattaggttgat

SEQ ID NO: 25938 - DNA, 620 bp, Artificial Sequence
  chemically treated genomic DNA (Homo sapiens) CpG-island No: 25938
atcaacctaattctaactactctactacaattccaaattcacgttaacctacttaccgtcgcgcaataaacccaaaatcaatttacctactaccgacataatacccacactaaacacgcaatacgacaaaactactaatcgacttaccgttcaataaaataatcacatcacccgctttaatacccgcttttacaacgaaaaaattaaacaaaacctaacttacgaaaacaccgcgctaaacgtcaactttcatcgctttcgccaattcgaaattcaactcaatccccataatacccaactcaccgcgtttcacctaaccgtattccaccatctacgaaatcaaatttttcaccatattactcgaaataacaaaaccgataccgatattaccgccgtccgatacgaaaatcgcgatattaataccgatcaattcgccgttcaaattaaccaacgcaccaccgaaattaccacgattaatcgctacatcgatctaaataaaattttcgtaattttcgacattcaaaccgtacgccccaacgcaaaaacaatcccgaaaattaccgtctcgcccaaaccaaacgaattaccaatcgctacgatataatcacccacgcgcaata

SEQ ID NO: 25939 - DNA, 620 bp, Artificial Sequence
  chemically treated genomic DNA (Homo sapiens) CpG-island No: 25939
attaatttgattttggttgttttgttgtagttttaggtttacgttaatttgtttatcgtcgcgtagtaagtttagggttagtttgtttgttatcggtatagtatttatattgagtacgtagtgcggtaaagttgttgatcggtttatcgtttagtgaggtgattatattattcgttttaatgttcgtttttgtagcggaggaattaggtagaatttggtttacgaaagtatcgcgttgggcgttaatttttatcgttttcgttagttcggagtttagtttagtttttataatatttagtttatcgcgttttatttggtcgtattttattatttgcgaggttaggttttttattatgttattcgggatagtaaaatcgatatcgatgttgtcgtcgttcggtgcgaggatcgcggtgttgatatcgattagttcgtcgtttaggttaattagcgtattatcggagttattacggttgatcgttgtatcggtttggatgaagttttcgtagttttcggtatttaggtcgtacgttttagcgtagagataatttcggaagttatcgtttcgtttagattaaacgggttattaatcgttacggtgtaattatttacgcgtagtg

SEQ ID NO: 25940 - DNA, 620 bp, Artificial Sequence
  chemically treated genomic DNA (Homo sapiens) CpG-island No: 25940
cactacgcgtaaataattacaccgtaacgattaataacccgtttaatctaaacgaaacgataacttccgaaattatctctacgctaaaacgtacgacctaaataccgaaaactacgaaaacttcatccaaaccgatacaacgatcaaccgtaataactccgataatacgctaattaacctaaacgacgaactaatcgatatcaacaccgcgatcctcgcaccgaacgacgacaacatcgatatcgattttactatcccgaataacataataaaaaacctaacctcgcaaataataaaatacgaccaaataaaacgcgataaactaaatattataaaaactaaactaaactccgaactaacgaaaacgataaaaattaacgcccaacgcgatactttcgtaaaccaaattctacctaattcctccgctacaaaaacgaacattaaaacgaataatataatcacctcactaaacgataaaccgatcaacaactttaccgcactacgtactcaatataaatactataccgataacaaacaaactaaccctaaacttactacgcgacgataaacaaattaacgtaaacctaaaactacaacaaaacaaccaaaatcaaattaat

SEQ ID NO: 25941 - DNA, 546 bp, Artificial Sequence
  chemically treated genomic DNA (Homo sapiens) CpG-island No: 25941
tgttcgtcgcgcggcgattatttcgtcgttggttggtagggtagaatgtatcgatgttttttcgcgacgcgttggtgaggatttggtaggaagtaggcgtggcgcgggaagatgttttattttgtttacgtttgggcgcgtttgaaattcgacgttattagtcgtaattgtggtggattaaattcgttatcgggtaaagcgaaaatattgtgtcgtggtagacgtggttttaatcgttggaattatcggcggggttgggaagtgtatagtttaatgcgggaggcgatattcgtttttcgcgtgtagacgaagcggttagcgtgcgttttaaagcgttaggattgttgtatattgtcgggcgtaacggcggacgtaagttaaagaaaatttggtaagagttgggcgtgtcgtcgtggttacgtgatattacgttattgttgttttatggcgaaacgttgattgcggcggtaggggtatttgtgacgtaagaaggtgtggttgaaggtgagaatggcgtaagttttgtttggtagaaaacgtttagtt

SEQ ID NO: 25942 - DNA, 546 bp, Artificial Sequence
  chemically treated genomic DNA (Homo sapiens) CpG-island No: 25942
aactaaacgttttctaccaaacaaaacttacgccattctcaccttcaaccacaccttcttacgtcacaaatacccctaccgccgcaatcaacgtttcgccataaaacaacaataacgtaatatcacgtaaccacgacgacacgcccaactcttaccaaattttctttaacttacgtccgccgttacgcccgacaatatacaacaatcctaacgctttaaaacgcacgctaaccgcttcgtctacacgcgaaaaacgaatatcgcctcccgcattaaactatacacttcccaaccccgccgataattccaacgattaaaaccacgtctaccacgacacaatattttcgctttacccgataacgaatttaatccaccacaattacgactaataacgtcgaatttcaaacgcgcccaaacgtaaacaaaataaaacatcttcccgcgccacgcctacttcctaccaaatcctcaccaacgcgtcgcgaaaaaacatcgatacattctaccctaccaaccaacgacgaaataatcgccgcgcgacgaaca

SEQ ID NO: 25943 - DNA, 546 bp, Artificial Sequence
  chemically treated genomic DNA (Homo sapiens) CpG-island No: 25943
aattaagcgttttttgttagataaaatttacgttatttttatttttagttatatttttttgcgttataaatatttttgtcgtcgtaattagcgtttcgttataaaatagtagtggcgtggtgttacgtagttacggcggtacgtttagtttttgttagattttttttagtttacgttcgtcgttacgttcgataatatgtagtaattttggcgttttgaaacgtacgttgatcgtttcgtttgtacgcggagggcgaatatcgtttttcgtattaagttgtatattttttagtttcgtcggtaattttagcggttgaagttacgtttgttacggtataatgttttcgttttgttcggtgacggatttaatttattatagttgcgattgatagcgtcggattttaaacgcgtttaaacgtaaatagggtgaggtattttttcgcgttacgtttattttttgttagatttttattaacgcgtcgcgggaaggtatcggtgtattttgttttgttagttagcggcgggataatcgtcgcgcggcgggta

SEQ ID NO: 25944 - DNA, 546 bp, Artificial Sequence
  chemically treated genomic DNA (Homo sapiens) CpG-island No: 25944
tacccgccgcgcgacgattatcccgccgctaactaacaaaacaaaatacaccgataccttcccgcgacgcgttaataaaaatctaacaaaaaataaacgtaacgcgaaaaaatacctcaccctatttacgtttaaacgcgtttaaaatccgacgctatcaatcgcaactataataaattaaatccgtcaccgaacaaaacgaaaacattataccgtaacaaacgtaacttcaaccgctaaaattaccgacgaaactaaaaaatatacaacttaatacgaaaaacgatattcgccctccgcgtacaaacgaaacgatcaacgtacgtttcaaaacgccaaaattactacatattatcgaacgtaacgacgaacgtaaactaaaaaaaatctaacaaaaactaaacgtaccgccgtaactacgtaacaccacgccactactattttataacgaaacgctaattacgacgacaaaaatatttataacgcaaaaaaatataactaaaaataaaaataacgtaaattttatctaacaaaaaacgcttaatt

SEQ ID NO: 25945 - DNA, 743 bp, Artificial Sequence
  chemically treated genomic DNA (Homo sapiens) CpG-island No: 25945
agcgaaggcgtagagatttatttttttgcggatagtcgtttgacgttttttgttcgggagttgttggaaagtcgttatttgcgtattaagtttattgacgagtagggtcgtttgtttgttgacgatgaatagtagtagtcgtagttcgtttatgggttgattagtagcgatgaatattcgtaggcgtgttgcgaattgtgtcgttagtcggtggtaaaaaagtcggatacgttgatttatttgtcggcggaaaaaatggtcgttaaaagcgattcgcgtttgggttttcgcgcggttttcgatagtattattgcgttggtagtgtggttgtaaattgaattggcggaatcgtggtagtcgtggttggcggatattcgttcgcgttttggtaatattatgtcgtcgatgcgttgggggaatcgttgggttgttaggcgattgtcgggttttttgacgaagatttgtatcggtttttttattatgattgcgttatttcgattacgattatttggtgtcggaagttagttacgggcgcgatgttgcgttgtttagatttcgtattattaaagtgcgggaaatcgaaatcgtagcggcgtaggtttttattattcgtagcgtagaagttttcgcgtattaggatagttttcggcggtgtggtgagagaagtaagacgagaggtgtacgcggttataagcgatgcgcggttttttatagaaaacggtaatattaaagttggtcgtatt

SEQ ID NO: 25946 - DNA, 743 bp, Artificial Sequence
  chemically treated genomic DNA (Homo sapiens) CpG-island No: 25946
aatacgaccaactttaatattaccgttttctataaaaaaccgcgcatcgcttataaccgcgtacacctctcgtcttacttctctcaccacaccgccgaaaactatcctaatacgcgaaaacttctacgctacgaataataaaaacctacgccgctacgatttcgatttcccgcactttaataatacgaaatctaaacaacgcaacatcgcgcccgtaactaacttccgacaccaaataatcgtaatcgaaataacgcaatcataataaaaaaaccgatacaaatcttcgtcaaaaaacccgacaatcgcctaacaacccaacgattcccccaacgcatcgacgacataatattaccaaaacgcgaacgaatatccgccaaccacgactaccacgattccgccaattcaatttacaaccacactaccaacgcaataatactatcgaaaaccgcgcgaaaacccaaacgcgaatcgcttttaacgaccattttttccgccgacaaataaatcaacgtatccgacttttttaccaccgactaacgacacaattcgcaacacgcctacgaatattcatcgctactaatcaacccataaacgaactacgactactactattcatcgtcaacaaacaaacgaccctactcgtcaataaacttaatacgcaaataacgactttccaacaactcccgaacaaaaaacgtcaaacgactatccgcaaaaaaataaatctctacgccttcgct

SEQ ID NO: 25947 - DNA, 743 bp, Artificial Sequence
  chemically treated genomic DNA (Homo sapiens) CpG-island No: 25947
gatgcggttaattttgatattatcgttttttgtgaagaatcgcgtatcgtttatgatcgcgtatatttttcgttttattttttttattatatcgtcgaagattgttttggtgcgcgaaggtttttacgttgcgggtgataaagatttgcgtcgttacggtttcggtttttcgtattttggtggtacgagatttgagtaacgtagtatcgcgttcgtggttggttttcggtattagatgatcgtggtcgagatagcgtagttatgatgagaaagtcgatgtagattttcgttagaaagttcgataatcgtttggtagtttagcggtttttttagcgtatcggcggtataatgttgttaagacgcgaacggatattcgttagttacggttgttacggtttcgttagtttaatttgtagttatattgttagcgtaatggtgttgtcgagaatcgcgcgaaaatttagacgcggatcgtttttggcgattatttttttcgtcgataggtgagttagcgtattcggtttttttgttatcggttggcgatatagttcgtagtacgtttgcggatgtttatcgttattggttagtttatgaacgggttgcggttgttgttgtttatcgttaataaataggcggttttgttcgttaataaatttgatgcgtagatggcggttttttagtaattttcgggtagagggcgttaggcgattgttcgtagggagatggatttttgcgttttcgtt

SEQ ID NO: 25948 - DNA, 743 bp, Artificial Sequence
  chemically treated genomic DNA (Homo sapiens) CpG-island No: 25948
aacgaaaacgcaaaaatccatctccctacgaacaatcgcctaacgccctctacccgaaaattactaaaaaaccgccatctacgcatcaaatttattaacgaacaaaaccgcctatttattaacgataaacaacaacaaccgcaacccgttcataaactaaccaataacgataaacatccgcaaacgtactacgaactatatcgccaaccgataacaaaaaaaccgaatacgctaactcacctatcgacgaaaaaaataatcgccaaaaacgatccgcgtctaaattttcgcgcgattctcgacaacaccattacgctaacaatataactacaaattaaactaacgaaaccgtaacaaccgtaactaacgaatatccgttcgcgtcttaacaacattataccgccgatacgctaaaaaaaccgctaaactaccaaacgattatcgaactttctaacgaaaatctacatcgactttctcatcataactacgctatctcgaccacgatcatctaataccgaaaaccaaccacgaacgcgatactacgttactcaaatctcgtaccaccaaaatacgaaaaaccgaaaccgtaacgacgcaaatctttatcacccgcaacgtaaaaaccttcgcgcaccaaaacaatcttcgacgatataataaaaaaaataaaacgaaaaatatacgcgatcataaacgatacgcgattcttcacaaaaaacgataatatcaaaattaaccgcatc

SEQ ID NO: 25949 - DNA, 581 bp, Artificial Sequence
  chemically treated genomic DNA (Homo sapiens) CpG-island No: 25949
ggcgtattacgttgttgtgaatttagtgggcgttgttgtattttttttttaaatatttggcgttgttttggtgatgcggattgaatattttacgcgttgcgattttttcgttgttggttttgcgggttagtttgtattttttcgcgaatcgtttggcgttgtttaggcgaggcggattgaaatttttacgcgttgttttttttcgttgttggattttcgggttagtttgtattttttcgcgaattgtttggcgttgtttaggcgaggcggattgataacgttgacgagcggcgtttttttgttgttgggttagtggttggcgacggttgaagtcgtggaagtcgttatagtttttatagtgtttagttttattaaatcgttgtgtcgttgtttgacgttgggtatttcgtgtaatgattggtgcggcgtgtgttcgttgttgaaattgatttgttgtcgtttgacgttggttgtcgcgcgttggggtaggtaattgcgtggcgtttatttcgtcgttgatatcggtttgatgaaatcgttttgttatattttgattatgatagggtatattattacggtag

SEQ ID NO: 25950 - DNA, 581 bp, Artificial Sequence
  chemically treated genomic DNA (Homo sapiens) CpG-island No: 25950
ctaccgtaataatataccctatcataatcaaaatataacaaaacgatttcatcaaaccgatatcaacgacgaaataaacgccacgcaattacctaccccaacgcgcgacaaccaacgtcaaacgacaacaaatcaatttcaacaacgaacacacgccgcaccaatcattacacgaaatacccaacgtcaaacaacgacacaacgatttaataaaactaaacactataaaaactataacgacttccacgacttcaaccgtcgccaaccactaacccaacaacaaaaaaacgccgctcgtcaacgttatcaatccgcctcgcctaaacaacgccaaacaattcgcgaaaaaatacaaactaacccgaaaatccaacaacgaaaaaaaacaacgcgtaaaaatttcaatccgcctcgcctaaacaacgccaaacgattcgcgaaaaaatacaaactaacccgcaaaaccaacaacgaaaaaatcgcaacgcgtaaaatattcaatccgcatcaccaaaacaacgccaaatatttaaaaaaaaaatacaacaacgcccactaaattcacaacaacgtaatacgcc

SEQ ID NO: 25951 - DNA, 581 bp, Artificial Sequence
  chemically treated genomic DNA (Homo sapiens) CpG-island No: 25951
ttatcgtaatggtgtgttttattatgattaggatatggtaaagcggttttattaaatcgatgttaacggcggaatgagcgttacgtaattatttgttttaacgcgcgatagttagcgttaggcggtagtaaattagttttagtaacgaatatacgtcgtattagttattatacgagatatttaacgttaggtagcggtatagcggtttaatgaagttgaatattatgggagttatgacgatttttacgattttagtcgtcgttaattattgatttagtaataaaaggacgtcgttcgttagcgttattagttcgtttcgtttgagtagcgttaggtagttcgcgagagaatgtagattaattcgaagatttagtagcgaagagaggtagcgcgtgaggattttagttcgtttcgtttgagtagcgttaggcggttcgcgagaaaatgtagattaattcgtagaattagtagcgaagagatcgtagcgcgtgaggtatttagttcgtattattagagtagcgttaggtgtttaaggaaaaagtatagtagcgtttattgaatttatagtaacgtgatacgtt

SEQ ID NO: 25952 - DNA, 581 bp, Artificial Sequence
  chemically treated genomic DNA (Homo sapiens) CpG-island No: 25952
aacgtatcacgttactataaattcaataaacgctactatactttttccttaaacacctaacgctactctaataatacgaactaaatacctcacgcgctacgatctcttcgctactaattctacgaattaatctacattttctcgcgaaccgcctaacgctactcaaacgaaacgaactaaaatcctcacgcgctacctctcttcgctactaaatcttcgaattaatctacattctctcgcgaactacctaacgctactcaaacgaaacgaactaataacgctaacgaacgacgtccttttattactaaatcaataattaacgacgactaaaatcgtaaaaatcgtcataactcccataatattcaacttcattaaaccgctataccgctacctaacgttaaatatctcgtataataactaatacgacgtatattcgttactaaaactaatttactaccgcctaacgctaactatcgcgcgttaaaacaaataattacgtaacgctcattccgccgttaacatcgatttaataaaaccgctttaccatatcctaatcataataaaacacaccattacgataa

SEQ ID NO: 25953 - DNA, 723 bp, Artificial Sequence
  chemically treated genomic DNA (Homo sapiens) CpG-island No: 25953
  unsure (721)
tgatcgttttgtagaatatgttagattttggtgtaggttagacgcgcgtgagagtttattatcgtttcgtagaatttgtagttcgttagcggtttttcgacgaaatcgttatttcgtatattatatataggcggtttatttgcgggttgagcgaatataggtcgttagagagtattttcggtagtatcgggataatttgcgaagggaagtatatcgacgtgttacggttacgcgtttttttgtttagcggcgttgacggacgtatatagtagttgacgtcggtaatcgcgatttataaacgttagtcgtcgtcgcgttttttttcgtagtaaattgtatcgttaaagttacgggcgttttcgttattaatggtgattagcggtaaatcgcgtagattaatacggttcgtttttgtttttttcggtatttttttttttagttcggtaatttgttgtttaatagtttgcggttagatgtacggaattttatgggtacgtagagcgatattaatcgttatgtcggtgtttatattgtcgtttagtatttcgacgattttatttatcgttttggtgcggcgagtcggacgttgagttagttcgattacgattataaagtttattcgcgcgtttatgatttgatcgggcgggattaaaatatcgaaatttagacggttgtcgttaggaaatataaaattcgaggtcgtttcgggtaaagtagtagnta

SEQ ID NO: 25954 - DNA, 723 bp, Artificial Sequence
  chemically treated genomic DNA (Homo sapiens) CpG-island No: 25954
  unsure (3)
tanctactactttacccgaaacgacctcgaattttatatttcctaacgacaaccgtctaaatttcgatattttaatcccgcccgatcaaatcataaacgcgcgaataaactttataatcgtaatcgaactaactcaacgtccgactcgccgcaccaaaacgataaataaaatcgtcgaaatactaaacgacaatataaacaccgacataacgattaatatcgctctacgtacccataaaattccgtacatctaaccgcaaactattaaacaacaaattaccgaactaaaaaaaaaaataccgaaaaaaacaaaaacgaaccgtattaatctacgcgatttaccgctaatcaccattaataacgaaaacgcccgtaactttaacgatacaatttactacgaaaaaaaacgcgacgacgactaacgtttataaatcgcgattaccgacgtcaactactatatacgtccgtcaacgccgctaaacaaaaaaacgcgtaaccgtaacacgtcgatatacttcccttcgcaaattatcccgatactaccgaaaatactctctaacgacctatattcgctcaacccgcaaataaaccgcctatatataatatacgaaataacgatttcgtcgaaaaaccgctaacgaactacaaattctacgaaacgataataaactctcacgcgcgtctaacctacaccaaaatctaacatattctacaaaacgatca

SEQ ID NO: 25955 - DNA, 723 bp, Artificial Sequence
  chemically treated genomic DNA (Homo sapiens) CpG-island No: 25955
  unsure (3)
tgnttgttattttattcgaagcggtttcgggttttgtgttttttgacgatagtcgtttgagtttcgatattttaatttcgttcgattagattatgagcgcgcggatgggttttgtggtcgtagtcgaattgatttagcgttcgattcgtcgtattaaagcggtgggtaaaatcgtcgaagtgttgggcgataatatgggtatcggtatggcggttgatatcgttttgcgtatttatgaaatttcgtatatttggtcgtaggttgttgagtaataggttgtcgggttgaaagaagaagtgtcggaagaagtaaaagcgggtcgtgttgatttgcgcgatttatcgttggttattattgatggcgaagacgttcgtgattttgacgatgtagtttattgcgagaaaaaacgcggcggcggttggcgtttatgggtcgcgattgtcgacgttagttattatgtgcgttcgttaacgtcgttggatagagaagcgcgtaatcgtggtacgtcggtgtattttttttcgtaggttatttcgatgttgtcggaagtgttttttaacggtttgtgttcgtttaattcgtaggtagatcgtttgtgtatggtgtgcgagatgacggtttcgtcgaaaggtcgttgacgggttataaattttacgaagcggtgatgagtttttacgcgcgtttgatttatattaaagtttggtatattttgtagggcgatta

SEQ ID NO: 25956 - DNA, 723 bp, Artificial Sequence
  chemically treated genomic DNA (Homo sapiens) CpG-island No: 25956
  unsure (721)
taatcgccctacaaaatataccaaactttaatataaatcaaacgcgcgtaaaaactcatcaccgcttcgtaaaatttataacccgtcaacgacctttcgacgaaaccgtcatctcgcacaccatacacaaacgatctacctacgaattaaacgaacacaaaccgttaaaaaacacttccgacaacatcgaaataacctacgaaaaaaaatacaccgacgtaccacgattacgcgcttctctatccaacgacgttaacgaacgcacataataactaacgtcgacaatcgcgacccataaacgccaaccgccgccgcgttttttctcgcaataaactacatcgtcaaaatcacgaacgtcttcgccatcaataataaccaacgataaatcgcgcaaatcaacacgacccgcttttacttcttccgacacttcttctttcaacccgacaacctattactcaacaacctacgaccaaatatacgaaatttcataaatacgcaaaacgatatcaaccgccataccgatacccatattatcgcccaacacttcgacgattttacccaccgctttaatacgacgaatcgaacgctaaatcaattcgactacgaccacaaaacccatccgcgcgctcataatctaatcgaacgaaattaaaatatcgaaactcaaacgactatcgtcaaaaaacacaaaacccgaaaccgcttcgaataaaataacaanca

SEQ ID NO: 25957 - DNA, 630 bp, Artificial Sequence
  chemically treated genomic DNA (Homo sapiens) CpG-island No: 25957
tcgatacggcgttggtggtgttattcgcgttttggttaattatttttagtacgtcgttttcgttaattacgttggcggtaagttgaatgtcgtcggttttttagtcgtacggatcggtatttcgcgttcgttaaacggtatttgataatcggggatcgttatcgtttttaagatggcgcggcggattatgcgtttggtttgttcgtcgaggtaggtaaagttgtagtcgtttagattagttatggttttgtttttgttgtagacgtttgagtagttttagttcggtttggaaatcgacgtagtgggggagtttgaggtgtgagataaagtttgcggtttcgacgttgtcggtatgtgttagtacgaattttttattttgcgtcgggtttgtcgcgtgttcgtcgtatttcggggtttgtagagcgcggtcgattagcgttatcgttatcgttttgcgttcgtttatgtcgaatattagttcgtagtcgcgcgtgaagtgcggcggtttattcggcgggtcgataaaatcgttaattattttatatttagttattagtagttcgtcgacgtttatcgtaaattatagttttttcggtataatcgatacgttagtttgaataaatacggaga

SEQ ID NO: 25958 - DNA, 630 bp, Artificial Sequence
  chemically treated genomic DNA (Homo sapiens) CpG-island No: 25958
tctccgtatttattcaaactaacgtatcgattataccgaaaaaactataatttacgataaacgtcgacgaactactaataactaaatataaaataattaacgattttatcgacccgccgaataaaccgccgcacttcacgcgcgactacgaactaatattcgacataaacgaacgcaaaacgataacgataacgctaatcgaccgcgctctacaaaccccgaaatacgacgaacacgcgacaaacccgacgcaaaataaaaaattcgtactaacacataccgacaacgtcgaaaccgcaaactttatctcacacctcaaactcccccactacgtcgatttccaaaccgaactaaaactactcaaacgtctacaacaaaaacaaaaccataactaatctaaacgactacaactttacctacctcgacgaacaaaccaaacgcataatccgccgcgccatcttaaaaacgataacgatccccgattatcaaataccgtttaacgaacgcgaaataccgatccgtacgactaaaaaaccgacgacattcaacttaccgccaacgtaattaacgaaaacgacgtactaaaaataattaaccaaaacgcgaataacaccaccaacgccgtatcga

SEQ ID NO: 25959 - DNA, 630 bp, Artificial Sequence
  chemically treated genomic DNA (Homo sapiens) CpG-island No: 25959
ttttcgtatttatttaggttggcgtgtcgattgtgtcggaagagttgtgatttgcggtgaacgtcggcgaattgttgatgattgagtgtgaaatggttaacggttttatcgattcgtcgggtgagtcgtcgtattttacgcgcggttacgggttggtgttcggtatgagcgagcgtaaagcgatggcgatggcgttggtcgatcgcgttttgtaagtttcggagtacggcgagtacgcgataggttcggcgtaggatgaagagttcgtgttggtatatgtcgataacgtcgaagtcgtaggttttgttttatattttaaatttttttattacgtcgatttttaggtcgaattggagttatttaaacgtttgtaataggagtagaattatggttaatttgagcggttataattttgtttatttcgacgagtagattaaacgtatgattcgtcgcgttattttaaaagcggtggcgattttcggttattaggtgtcgtttggcgggcgcgagatgtcgattcgtacggttggggaatcggcggtatttagtttatcgttagcgtgattggcgaaagcgacgtgttgaaggtgattgattagggcgcggatgatattattaacgtcgtgtcga

SEQ ID NO: 25960 - DNA, 630 bp, Artificial Sequence
  chemically treated genomic DNA (Homo sapiens) CpG-island No: 25960
tcgacacgacgttaataatatcatccgcgccctaatcaatcaccttcaacacgtcgctttcgccaatcacgctaacgataaactaaataccgccgattccccaaccgtacgaatcgacatctcgcgcccgccaaacgacacctaataaccgaaaatcgccaccgcttttaaaataacgcgacgaatcatacgtttaatctactcgtcgaaataaacaaaattataaccgctcaaattaaccataattctactcctattacaaacgtttaaataactccaattcgacctaaaaatcgacgtaataaaaaaatttaaaatataaaacaaaacctacgacttcgacgttatcgacatataccaacacgaactcttcatcctacgccgaacctatcgcgtactcgccgtactccgaaacttacaaaacgcgatcgaccaacgccatcgccatcgctttacgctcgctcataccgaacaccaacccgtaaccgcgcgtaaaatacgacgactcacccgacgaatcgataaaaccgttaaccatttcacactcaatcatcaacaattcgccgacgttcaccgcaaatcacaactcttccgacacaatcgacacgccaacctaaataaatacgaaaa

SEQ ID NO: 25961 - DNA, 618 bp, Artificial Sequence
  chemically treated genomic DNA (Homo sapiens) CpG-island No: 25961
tgttggcgttgtcgttgtcgtagtaacgtttggttggacgtgaaggttcggttcgtgtgttggtagtgggtggtttttagggcgtacgtatttttaattagataatgtcgtaggttgttgcgaaattgggtgatttagttattatttggtattagagcggtaaaggttcgtaataattcgttgaataggcgtatgtcgaagcggggtaatcgtagtataaagtgacggaatttattgatgatatggcggcggcgtatgcgtgggcggatgtcgtcgtttgtcgtttcggtgcgttaacggtgagtgaaatcgtcgcggtaggattatcggcgttgtttgtgtcgttttaatataaagatcgttagtaatattggaatgcgttatcgttggaaaaagcgggcgtagttaaaattatcgagtagttatagtttagcgtggatgttgtcgttaatattttggtcgggtggtcgcgagaaattttattaattatggtagaacgcgttcgcgttgtatttatttcggatgttatcgagcgagtggtaaatgaagtgagtcgggttgttcgggcgtaattgtagcgatgttttttgtatcgtatgaatttaagaagttaatggt

SEQ ID NO: 25962 - DNA, 618 bp, Artificial Sequence
  chemically treated genomic DNA (Homo sapiens) CpG-island No: 25962
accattaacttcttaaattcatacgatacaaaaaacatcgctacaattacgcccgaacaacccgactcacttcatttaccactcgctcgataacatccgaaataaatacaacgcgaacgcgttctaccataattaataaaatttctcgcgaccacccgaccaaaatattaacgacaacatccacgctaaactataactactcgataattttaactacgcccgctttttccaacgataacgcattccaatattactaacgatctttatattaaaacgacacaaacaacgccgataatcctaccgcgacgatttcactcaccgttaacgcaccgaaacgacaaacgacgacatccgcccacgcatacgccgccgccatatcatcaataaattccgtcactttatactacgattaccccgcttcgacatacgcctattcaacgaattattacgaacctttaccgctctaataccaaataataactaaatcacccaatttcgcaacaacctacgacattatctaattaaaaatacgtacgccctaaaaaccacccactaccaacacacgaaccgaaccttcacgtccaaccaaacgttactacgacaacgacaacgccaaca

SEQ ID NO: 25963 - DNA, 618 bp, Artificial Sequence
  chemically treated genomic DNA (Homo sapiens) CpG-island No: 25963
gttattaattttttaaatttatacgatgtaaaaggtatcgttataattacgttcgggtaattcggtttattttatttgttattcgttcggtggtattcggaatggatgtagcgcgggcgcgttttgttatggttaataaggtttttcgcgattattcggttagggtgttggcgatagtatttacgttaagttgtggttgttcgataattttggttgcgttcgttttttttagcggtagcgtattttagtattgttggcggtttttatgttgaaacggtataaataacgtcggtagttttgtcgcggcgattttatttatcgttaacgtatcggagcggtaaacgacgatattcgtttacgtatacgtcgtcgttatattattaataaatttcgttattttatgttgcggttgtttcgtttcggtatacgtttgtttaacggattgttgcgaatttttgtcgttttgatgttagatagtgattgaattatttagtttcgtagtaatttgcggtattgtttggttaagaatgcgtgcgttttgagaattatttattattagtatacgaatcggatttttacgtttagttaaacgttgttgcggtaacggtagcgttaata

SEQ ID NO: 25964 - DNA, 618 bp, Artificial Sequence
  chemically treated genomic DNA (Homo sapiens) CpG-island No: 25964
tattaacgctaccgttaccgcaacaacgtttaactaaacgtaaaaatccgattcgtatactaataataaataattctcaaaacgcacgcattcttaaccaaacaataccgcaaattactacgaaactaaataattcaatcactatctaacatcaaaacgacaaaaattcgcaacaatccgttaaacaaacgtataccgaaacgaaacaaccgcaacataaaataacgaaatttattaataatataacgacgacgtatacgtaaacgaatatcgtcgtttaccgctccgatacgttaacgataaataaaatcgccgcgacaaaactaccgacgttatttataccgtttcaacataaaaaccgccaacaatactaaaatacgctaccgctaaaaaaaacgaacgcaaccaaaattatcgaacaaccacaacttaacgtaaatactatcgccaacaccctaaccgaataatcgcgaaaaaccttattaaccataacaaaacgcgcccgcgctacatccattccgaataccaccgaacgaataacaaataaaataaaccgaattacccgaacgtaattataacgataccttttacatcgtataaatttaaaaaattaataac

SEQ ID NO: 25965 - DNA, 506 bp, Artificial Sequence
  chemically treated genomic DNA (Homo sapiens) CpG-island No: 25965
  unsure (52, 198)
taaattgtcgtgaagtgcggtatttcgtaggttagataaggcggttacgcgntattcgatatttaacgttcgagtcggttgtttgatgcgacgttggcgcgttttattaggtttatatcgttgtgaagtgcggtatttcgtaggttagataaggcggttacgcgtaattcgatatttaacgcgcgagtcggttgtttnattcgacgttggcgcgttttattagggttatatcgttgtgaggttttttaatcggtagtttggattaagcgggtaagcgtaattcggatattaaaggtttagtcggttgtttaatgtatagttgcgcgttttattaagtttatacggttttaaaagttttatttcgtaggttggataagtcggttatcgttattcggatatttaaagttcgattcggttgtttatatcgagcgtggcggtttttattaggtttaattcgttgtaaagtcgtttattcgttaagtttgagtaagttgtttattttaatt

SEQ ID NO: 25966 - DNA, 506 bp, Artificial Sequence
  chemically treated genomic DNA (Homo sapiens) CpG-island No: 25966
  unsure (309, 455)
aattaaaataaacaacttactcaaacttaacgaataaacgactttacaacgaattaaacctaataaaaaccgccacgctcgatataaacaaccgaatcgaactttaaatatccgaataacgataaccgacttatccaacctacgaaataaaacttttaaaaccgtataaacttaataaaacgcgcaactatacattaaacaaccgactaaacctttaatatccgaattacgcttacccgcttaatccaaactaccgattaaaaaacctcacaacgatataaccctaataaaacgcgccaacgtcgaatnaaacaaccgactcgcgcgttaaatatcgaattacgcgtaaccgccttatctaacctacgaaataccgcacttcacaacgatataaacctaataaaacgcgccaacgtcgcatcaaacaaccgactcgaacgttaaatatcgaatancgcgtaaccgccttatctaacctacgaaataccgcacttcacgacaattta

SEQ ID NO: 25967 - DNA, 506 bp, Artificial Sequence
  chemically treated genomic DNA (Homo sapiens) CpG-island No: 25967
  unsure (309, 455)
gattggggtaaataatttatttaggtttaacgggtagacgattttatagcgggttaggtttgataagaatcgttacgttcgatataagtaatcgggtcggattttgaatgttcgaatggcggtaatcggtttatttaatttacggggtgagatttttaaagtcgtgtaggtttgataagacgcgtagttgtgtattaggtaatcggttgggtttttgatgttcggattgcgtttattcgtttaatttagattatcggttggagaattttatagcggtgtagttttgataagacgcgttagcgtcgaatnaggtaatcggttcgcgcgttagatgtcggattgcgcgtgatcgttttgtttgatttacggggtgtcgtattttatagcggtgtaggtttgataagacgcgttagcgtcgtattaggtaatcggttcgggcgttggatgtcggatgncgcgtgatcgttttgtttgatttacggggtgtcgtattttacggtagttta

SEQ ID NO: 25968 - DNA, 506 bp, Artificial Sequence
  chemically treated genomic DNA (Homo sapiens) CpG-island No: 25968
  unsure (52, 198)
taaactaccgtaaaatacgacaccccgtaaatcaaacaaaacgatcacgcgncatccgacatccaacgcccgaaccgattacctaatacgacgctaacgcgtcttatcaaacctacaccgctataaaatacgacaccccgtaaatcaaacaaaacgatcacgcgcaatccgacatctaacgcgcgaaccgattacctnattcgacgctaacgcgtcttatcaaaactacaccgctataaaattctccaaccgataatctaaattaaacgaataaacgcaatccgaacatcaaaaacccaaccgattacctaatacacaactacgcgtcttatcaaacctacacgactttaaaaatctcaccccgtaaattaaataaaccgattaccgccattcgaacattcaaaatccgacccgattacttatatcgaacgtaacgattcttatcaaacctaacccgctataaaatcgtctacccgttaaacctaaataaattatttaccccaatc

SEQ ID NO: 25969 - DNA, 586 bp, Artificial Sequence
  chemically treated genomic DNA (Homo sapiens) CpG-island No: 25969
  unsure (253)
tatttttttcgtttttttttcgatttttattttattcgttttaattcgttcgttcgggttttcgttattttatcgggttttttttttcgtattcgttacgtttcgttttaattattttgttttttcgatgtttcgttcgttttaaattttatttttttattttcgtattattttttttcggtcgtttattttttttttttttattttgtcggattttttttcgtatcgtatttttaacgttgttatttatttntttttacgtttttcgttttatttacgttttatttatttttgttttttttcgtggttcgtatttattttcgttttattcgttttgtttcgtattttgtttttcggtttttttcgttttattttttcggcgttttcgttttatataacgcgtcgcgtttatatttttcgtatcgtatttatcgtatttttcgtggttattcgtttttttatttcgcgtagcgtcgttttatttttttcgttgtttcgttgttcgcgaagtattattttttgaacggatcgaagttaaggttagtattggttagtttgtcgatggagaaacgtggttcgattttta

SEQ ID NO: 25970 - DNA, 586 bp, Artificial Sequence
  chemically treated genomic DNA (Homo sapiens) CpG-island No: 25970
  unsure (334)
taaaaatcgaaccacgtttctccatcgacaaactaaccaatactaaccttaacttcgatccgttcaaaaaataatacttcgcgaacaacgaaacaacgaaaaaaataaaacgacgctacgcgaaataaaaaaacgaataaccacgaaaaatacgataaatacgatacgaaaaatataaacgcgacgcgttatataaaacgaaaacgccgaaaaaataaaacgaaaaaaaccgaaaaacaaaatacgaaacaaaacgaataaaacgaaaataaatacgaaccacgaaaaaaaacaaaaataaataaaacgtaaataaaacgaaaaacgtaaaaanaaataaataacaacgttaaaaatacgatacgaaaaaaaatccgacaaaataaaaaaaaaaaaaataaacgaccgaaaaaaaataatacgaaaataaaaaaataaaatttaaaacgaacgaaacatcgaaaaaacaaaataattaaaacgaaacgtaacgaatacgaaaaaaaaaacccgataaaataacgaaaacccgaacgaacgaattaaaacgaataaaataaaaatcgaaaaaaaaacgaaaaaaata

SEQ ID NO: 25971 - DNA, 586 bp, Artificial Sequence
  chemically treated genomic DNA (Homo sapiens) CpG-island No: 25971
  unsure (334)
tggaaatcgaattacgtttttttatcgataagttgattaatattgattttagtttcggttcgtttaaagagtggtatttcgcgaataacggggtagcgaggaaggtggagcgacgttgcgcgagatggggaggcgggtggttacgaaaagtacggtaagtgcggtacggagggtgtgagcgcggcgcgttatatgaagcgggaacgtcggagagataaagcgagaggggtcgaggaatagagtacgaggtagagcgagtgaaacgagaataagtgcgggttacggagggggataagggtggatggagcgtggatgaagcgagaggcgtaggagngggtgggtagtagcgttgaaagtgcggtgcgaaggggagttcggtaaggtggggaagaggaaagtaggcggtcggggaagagtgatgcgggggtaggaaggtgggatttgaagcgggcgaagtatcgggggagtaaagtagttgaggcgaagcgtggcgggtgcggagagaggaattcgatgaagtagcgggagttcgaacgggcgagttggagcgggtgaaatggaagtcgagagaagggcgaggaaggtg

SEQ ID NO: 25972 - DNA, 586 bp, Artificial Sequence
  chemically treated genomic DNA (Homo sapiens) CpG-island No: 25972
  unsure (253)
caccttcctcgcccttctctcgacttccatttcacccgctccaactcgcccgttcgaactcccgctacttcatcgaattcctctctccgcacccgccacgcttcgcctcaactactttactcccccgatacttcgcccgcttcaaatcccaccttcctacccccgcatcactcttccccgaccgcctactttcctcttccccaccttaccgaactccccttcgcaccgcactttcaacgctactacccacccnctcctacgcctctcgcttcatccacgctccatccacccttatccccctccgtaacccgcacttattctcgtttcactcgctctacctcgtactctattcctcgacccctctcgctttatctctccgacgttcccgcttcatataacgcgccgcgctcacaccctccgtaccgcacttaccgtacttttcgtaaccacccgcctccccatctcgcgcaacgtcgctccaccttcctcgctaccccgttattcgcgaaataccactctttaaacgaaccgaaactaaaatcaatattaatcaacttatcgataaaaaaacgtaattcgatttcca

SEQ ID NO: 25973 - DNA, 550 bp, Artificial Sequence
  chemically treated genomic DNA (Homo sapiens) CpG-island No: 25973
  unsure (357)
cgtttcggcgtttttggtttgttatttggcgaacgataaagcgttgttcggtatttagtcgggtcgaggatttttcggcgcggtggtgttggggttggcgattggttatttcgttttttggtttcgtaaagtgcgttttggtaaagtattataatcgttgttcggtttaatgttgatttcgttcgttattttgttggttttcggcgtgtttatttattacgttatcgggtcggtgatgttcgattttatgggcgggttgttttattttttgaatattatttttttattaatgaagtttgcggtacgttttttggtcggtgcgatgttggcgttcgataatgggcggtttattaatanaattcgttggtttttttgttttttattgttggaaaaatatatgtatgattggtacgttatcgtcggcgttgtcgcgttgatgtagttcgtcgtagcgggttttgcgacgtttatttgcgtttaaattgtttatttgattagaaaataaggaatagttatattagcgacgttttagcgttgttgtagattggta

SEQ ID NO: 25974 - DNA, 550 bp, Artificial Sequence
  chemically treated genomic DNA (Homo sapiens) CpG-island No: 25974
  unsure (194)
taccaatctacaacaacgctaaaacgtcgctaatataactattccttattttctaatcaaataaacaatttaaacgcaaataaacgtcgcaaaacccgctacgacgaactacatcaacgcgacaacgccgacgataacgtaccaatcatacatatatttttccaacaataaaaaacaaaaaaaccaacgaattntattaataaaccgcccattatcgaacgccaacatcgcaccgaccaaaaaacgtaccgcaaacttcattaataaaaaaataatattcaaaaaataaaacaacccgcccataaaatcgaacatcaccgacccgataacgtaataaataaacacgccgaaaaccaacaaaataacgaacgaaatcaacattaaaccgaacaacgattataatactttaccaaaacgcactttacgaaaccaaaaaacgaaataaccaatcgccaaccccaacaccaccgcgccgaaaaatcctcgacccgactaaataccgaacaacgctttatcgttcgccaaataacaaaccaaaaacgccgaaacg

SEQ ID NO: 25975 - DNA, 550 bp, Artificial Sequence
  chemically treated genomic DNA (Homo sapiens) CpG-island No: 25975
  unsure (194)
tgttagtttgtaataacgttggagcgtcgttgatatggttgttttttattttttggttaggtaaatagtttgggcgtaaatgaacgtcgtaagattcgttgcgacgggttgtattagcgcgataacgtcgacgatggcgtattagttatatatgtgtttttttagtagtgagaagtagaagaattagcgggttntattgatgggtcgtttattatcgaacgttagtatcgtatcgattagaaaacgtgtcgtaaattttattgatggaggaatggtatttaggaagtggagtagttcgtttatgaggtcggatattatcggttcgataacgtagtaagtgagtacgtcgaaaattagtagagtaacgaacgggattagtattgaatcgagtagcggttgtaatgttttgttaaggcgtattttgcggaattagaagacgaaatagttaatcgttagttttagtattatcgcgtcgaggaattttcgattcgattgggtgtcgagtagcgttttgtcgttcgttagatagtaaattagaaacgtcggagcg

SEQ ID NO: 25976 - DNA, 550 bp, Artificial Sequence
  chemically treated genomic DNA (Homo sapiens) CpG-island No: 25976
  unsure (357)
cgctccgacgtttctaatttactatctaacgaacgacaaaacgctactcgacacccaatcgaatcgaaaattcctcgacgcgataatactaaaactaacgattaactatttcgtcttctaattccgcaaaatacgccttaacaaaacattacaaccgctactcgattcaatactaatcccgttcgttactctactaattttcgacgtactcacttactacgttatcgaaccgataatatccgacctcataaacgaactactccacttcctaaataccattcctccatcaataaaatttacgacacgttttctaatcgatacgatactaacgttcgataataaacgacccatcaatanaacccgctaattcttctacttctcactactaaaaaaacacatatataactaatacgccatcgtcgacgttatcgcgctaatacaacccgtcgcaacgaatcttacgacgttcatttacgcccaaactatttacctaaccaaaaaataaaaaacaaccatatcaacgacgctccaacgttattacaaactaaca

SEQ ID NO: 25977 - DNA, 509 bp, Artificial Sequence
  chemically treated genomic DNA (Homo sapiens) CpG-island No: 25977
tagtgcggcgtttttttttggttcgagaataattgagtcgattacgttcgtgtttattatcgttgaatttttatcgttggtaatgatgtgtatattgtcgtcgttgttggtaattttggcgtttgcgttaaagttggcgatttgtattaggttattattattggcgatatgatatcgtttatttaatgtataaacgcgtattcgtatttcggtattcgtaattcgattgttatttttagcgttgtttattcgcgaagaattatcggttatagtaattcgtgcgcgtttatcggagttgttaatgtgattgttaaagtcgatatttttaattcgtacgttataatttatattggtaatttgcgcggtatatttagcggttgcgattttggcgttatttacggataatgttgcggttagttattggagtttattttaagagacgtttagcgattcgaatatcgttatcgtattaatagtaataatgatgtagttaaggatggtagtaatgg

SEQ ID NO: 25978 - DNA, 509 bp, Artificial Sequence
  chemically treated genomic DNA (Homo sapiens) CpG-island No: 25978
ccattactaccatccttaactacatcattattactattaatacgataacgatattcgaatcgctaaacgtctcttaaaataaactccaataactaaccgcaacattatccgtaaataacgccaaaatcgcaaccgctaaatataccgcgcaaattaccaatataaattataacgtacgaattaaaaatatcgactttaacaatcacattaacaactccgataaacgcgcacgaattactataaccgataattcttcgcgaataaacaacgctaaaaataacaatcgaattacgaataccgaaatacgaatacgcgtttatacattaaataaacgatatcatatcgccaataataataacctaatacaaatcgccaactttaacgcaaacgccaaaattaccaacaacgacgacaatatacacatcattaccaacgataaaaattcaacgataataaacacgaacgtaatcgactcaattattctcgaaccaaaaaaaaacgccgcacta

SEQ ID NO: 25979 - DNA, 509 bp, Artificial Sequence
  chemically treated genomic DNA (Homo sapiens) CpG-island No: 25979
ttattattattatttttaattatattattattgttgttggtgcgatgacggtgttcggatcgttgggcgttttttgggataaattttagtggttggtcgtagtattattcgtagataacgttagaatcgtaatcgttgggtatgtcgcgtaaattgttagtatgggttatagcgtgcggattggaagtgtcggttttaatagttatattggtagtttcggtgaacgcgtacgggttgttgtaatcggtaatttttcgcggataagtagcgttggagatagtagtcggattgcgaatatcggaatgcgagtacgcgtttgtatattgggtgaacggtgttatgtcgttagtaatggtgatttggtgtaaatcgttagttttggcgtaaacgttagaattgttaatagcggcgataatgtatatattattgttagcggtgaaaatttaacggtagtgagtacgggcgtggtcgatttaattattttcgggttaggaggaagcgtcgtattg

SEQ ID NO: 25980 - DNA, 509 bp, Artificial Sequence
  chemically treated genomic DNA (Homo sapiens) CpG-island No: 25980
caatacgacgcttcctcctaacccgaaaataattaaatcgaccacgcccgtactcactaccgttaaattttcaccgctaacaataatatatacattatcgccgctattaacaattctaacgtttacgccaaaactaacgatttacaccaaatcaccattactaacgacataacaccgttcacccaatatacaaacgcgtactcgcattccgatattcgcaatccgactactatctccaacgctacttatccgcgaaaaattaccgattacaacaacccgtacgcgttcaccgaaactaccaatataactattaaaaccgacacttccaatccgcacgctataacccatactaacaatttacgcgacatacccaacgattacgattctaacgttatctacgaataatactacgaccaaccactaaaatttatcccaaaaaacgcccaacgatccgaacaccgtcatcgcaccaacaacaataataatataattaaaaataataataataa

SEQ ID NO: 25981 - DNA, 1096 bp, Artificial Sequence
  chemically treated genomic DNA (Homo sapiens) CpG-island No: 25981
  unsure (749)
atcgttattttttttggagtgaaatttacgaaacggtgttggcgtggtatatcgtattatcgacgttggtggcgttgattaattcgtataaaggtaaatttaacgttatcgttaaaggtggattggtggaagaagagtacgtcgattgggtgatttcgcggttttatattttttttgttttgtttaatttggtgggcgttgcggtaggtatttggcgttatttttatggttcgttaatcgagatgtttatcgtggtcgttagtatggtgtgggtgttttataatttgattgtttttggcggcgtagttgcggtatcggtagaaagtaaataggtacgtcgatcgtatcgcgtggagatgacgatgttcgcggtaattgttcgcgaagatggttattttttttcgtgtatcgtttaggattttttcgacggtggtttggggattaagattaacggttaggcgtagattttggaagggtagaaagtgaatttgttgtttaaacgcggttagtaggaatacgttttttcgatttaggtggcgcgcgtgatgggtaatgaagttgggttgaaattaatgtcgtttattatttagtaatatatcgattttgtgtagtgtacgtttgttcgtgcggatatatgggcgttttggtaggatagttattcggaagataagtcgttggaaagtttgttggatattttgaagttcggttttcgtggttaacgttatttggtcgagtttgcgttttttttngtgaaggtatatttcgtgtgttgaatttttttggtttttgggttgtatcgttatttcgttcgtttttcggtacgttgatgttggtaagttgtatcgagatggtgatttttcgcgttttgtatttggcgcgtcgtattattacgtcgttggtttttggcgttgtggtgatgattatcggtttgtcgttaatttaggttgggttaacgtttattggcggcggttattagttatgagcgataatattttcggcgtatcgaaaaatttgttgttggtaggcgtggttttagttttaattattttgtttaatcgttaacgtaatttttatttacgcgtggttttattggtaa

SEQ ID NO: 25982 - DNA, 1096 bp, Artificial Sequence
  chemically treated genomic DNA (Homo sapiens) CpG-island No: 25982
  unsure (348)
ttaccaataaaaccacgcgtaaataaaaattacgttaacgattaaacaaaataattaaaactaaaaccacgcctaccaacaacaaatttttcgatacgccgaaaatattatcgctcataactaataaccgccgccaataaacgttaacccaacctaaattaacgacaaaccgataatcatcaccacaacgccaaaaaccaacgacgtaataatacgacgcgccaaatacaaaacgcgaaaaatcaccatctcgatacaacttaccaacatcaacgtaccgaaaaacgaacgaaataacgatacaacccaaaaaccaaaaaaattcaacacacgaaatataccttcacnaaaaaaaacgcaaactcgaccaaataacgttaaccacgaaaaccgaacttcaaaatatccaacaaactttccaacgacttatcttccgaataactatcctaccaaaacgcccatatatccgcacgaacaaacgtacactacacaaaatcgatatattactaaataataaacgacattaatttcaacccaacttcattacccatcacgcgcgccacctaaatcgaaaaaacgtattcctactaaccgcgtttaaacaacaaattcactttctacccttccaaaatctacgcctaaccgttaatcttaatccccaaaccaccgtcgaaaaaatcctaaacgatacacgaaaaaaaataaccatcttcgcgaacaattaccgcgaacatcgtcatctccacgcgatacgatcgacgtacctatttactttctaccgataccgcaactacgccgccaaaaacaatcaaattataaaacacccacaccatactaacgaccacgataaacatctcgattaacgaaccataaaaataacgccaaatacctaccgcaacgcccaccaaattaaacaaaacaaaaaaaatataaaaccgcgaaatcacccaatcgacgtactcttcttccaccaatccacctttaacgataacgttaaatttacctttatacgaattaatcaacgccaccaacgtcgataatacgatataccacgccaacaccgtttcgtaaatttcactccaaaaaaaataacgat

SEQ ID NO: 25983 - DNA, 1096 bp, Artificial Sequence
  chemically treated genomic DNA (Homo sapiens) CpG-island No: 25983
  unsure (348)
ttattagtgaggttacgcgtaagtaagggttacgttgacggttaagtaggataattaaggttaagattacgtttgttagtagtagatttttcggtgcgtcgaaggtgttatcgtttatggttggtaatcgtcgttaatggacgttaatttaatttgaattagcgataggtcgataattattattataacgttagaaattagcggcgtaataatgcggcgcgttagatgtagaacgcgggagattattatttcggtgtaatttgttagtattaacgtgtcgaaaggcgggcggaataacgatataatttaagaattagaagaatttagtatacggaatatgtttttatngaagaaggcgtaaattcggttagatggcgttagttacggaagtcgagttttagaatatttagtagattttttagcggtttatttttcgggtagttgttttgttagagcgtttatgtattcgtacgggtaaacgtatattgtataaaatcgatatgttgttgggtggtgagcggtattaattttagtttaattttattatttattacgcgcgttatttgggtcgggaagacgtatttttgttgatcgcgtttaagtaatagatttattttttgtttttttagaatttgcgtttgatcgttgattttgatttttaaattatcgtcggagaaattttgaacggtatacgagaagaggtgattattttcgcgggtaattgtcgcgggtatcgttatttttacgcggtgcgatcggcgtatttgtttgttttttatcgatatcgtaattgcgtcgttaagaataattaggttgtagaatatttatattatattgacgattacggtgagtatttcggttggcgggttatagaagtagcgttagatgtttatcgtaacgtttattaggttgagtaggataaggaagatgtagggtcgcgagattatttagtcgacgtattttttttttattagtttatttttggcggtgacgttaaatttgtttttgtgcgggttaattagcgttattagcgtcggtggtgcgatatattacgttagtatcgtttcgtagattttattttagaaagagtggcgat

SEQ ID NO: 25984 - DNA, 1096 bp, Artificial Sequence
  chemically treated genomic DNA (Homo sapiens) CpG-island No: 25984
  unsure (749)
atcgccactctttctaaaataaaatctacgaaacgatactaacgtaatatatcgcaccaccgacgctaataacgctaattaacccgcacaaaaacaaatttaacgtcaccgccaaaaataaactaataaaaaaaaaatacgtcgactaaataatctcgcgaccctacatcttccttatcctactcaacctaataaacgttacgataaacatctaacgctacttctataacccgccaaccgaaatactcaccgtaatcgtcaatataatataaatattctacaacctaattattcttaacgacgcaattacgatatcgataaaaaacaaacaaatacgccgatcgcaccgcgtaaaaataacgatacccgcgacaattacccgcgaaaataatcacctcttctcgtataccgttcaaaatttctccgacgataatttaaaaatcaaaatcaacgatcaaacgcaaattctaaaaaaacaaaaaataaatctattacttaaacgcgatcaacaaaaatacgtcttcccgacccaaataacgcgcgtaataaataataaaattaaactaaaattaataccgctcaccacccaacaacatatcgattttatacaatatacgtttacccgtacgaatacataaacgctctaacaaaacaactacccgaaaaataaaccgctaaaaaatctactaaatattctaaaactcgacttccgtaactaacgccatctaaccgaatttacgccttcttcnataaaaacatattccgtatactaaattcttctaattcttaaattatatcgttattccgcccgcctttcgacacgttaatactaacaaattacaccgaaataataatctcccgcgttctacatctaacgcgccgcattattacgccgctaatttctaacgttataataataattatcgacctatcgctaattcaaattaaattaacgtccattaacgacgattaccaaccataaacgataacaccttcgacgcaccgaaaaatctactactaacaaacgtaatcttaaccttaattatcctacttaaccgtcaacgtaacccttacttacgcgtaacctcactaataa

SEQ ID NO: 25985 - DNA, 611 bp, Artificial Sequence
  chemically treated genomic DNA (Homo sapiens) CpG-island No: 25985
gttgaatcggaagcgtatcgcgattcgttcgttatgtagtaattttttgtcgaatatggcgtaacgattacgtattttgttcgtcgatgttggcggtatttgttgtttcgttgacgtcgtaaatcgttcgttagagttgcgcgacgttgaaataggttttttgtagtggtgaggttttatcggttgatttatgtcgcgaatggtaatagttaattggcgcgtcgttgtataatttatatggttcgacggaagcggcggtagatgttagttggtattcggtttttggcgaggaattggtataggtgcgcggtagtagtgtgtcgattggttattcggtatggaatacgggtttgcgtatttttgatgcgatgatgtattcggtgtcgtcgggtgtggcgggtgatttttattttattggtatttaattggcgtagggttatttcggacgtttcgatttgatcgttagtcgttttattgtcgatttttttgttttaggtgaacggatgtatcgtatcggagacgttgttcgttggttggataacggcgcggtggagtatttcgggcgtagtgatgattagttaaaaattcgcgggtaggtttttttttgtatt

SEQ ID NO: 25986 - DNA, 611 bp, Artificial Sequence
  chemically treated genomic DNA (Homo sapiens) CpG-island No: 25986
aatacaaaaaaaaacctacccgcgaatttttaactaatcatcactacgcccgaaatactccaccgcgccgttatccaaccaacgaacaacgtctccgatacgatacatccgttcacctaaaacaaaaaaatcgacaataaaacgactaacgatcaaatcgaaacgtccgaaataaccctacgccaattaaataccaataaaataaaaatcacccgccacacccgacgacaccgaatacatcatcgcatcaaaaatacgcaaacccgtattccataccgaataaccaatcgacacactactaccgcgcacctataccaattcctcgccaaaaaccgaataccaactaacatctaccgccgcttccgtcgaaccatataaattatacaacgacgcgccaattaactattaccattcgcgacataaatcaaccgataaaacctcaccactacaaaaaacctatttcaacgtcgcgcaactctaacgaacgatttacgacgtcaacgaaacaacaaataccgccaacatcgacgaacaaaatacgtaatcgttacgccatattcgacaaaaaattactacataacgaacgaatcgcgatacgcttccgattcaac

SEQ ID NO: 25987 - DNA, 611 bp, Artificial Sequence
  chemically treated genomic DNA (Homo sapiens) CpG-island No: 25987
aatataaaaaagaatttgttcgcgaatttttagttgattattattgcgttcgaggtattttatcgcgtcgttatttagttagcgggtaacgttttcggtacggtatattcgtttatttggggtaaaaggatcggtaataaagcggttggcggttagatcggggcgttcgagatagttttgcgttagttgaatgttagtgagatagagattattcgttatattcggcggtatcggatgtattatcgtattaagaatacgtagattcgtattttatatcggataattaatcggtatattgttgtcgcgtatttgtgttagtttttcgttaaaagtcggatattagttgatatttatcgtcgttttcgtcgggttatatagattatgtaacggcgcgttagttaattgttgttattcgcggtataaattagtcggtaaggttttattattatagaaaatttgttttaacgtcgcgtaattttggcgagcggtttgcggcgttagcgaggtaataaatgtcgttagtatcgacggataaagtgcgtggtcgttacgttatattcggtaaagaattgttgtatagcgagcgggtcgcggtgcgttttcggtttagt

SEQ ID NO: 25988 - DNA, 611 bp, Artificial Sequence
  chemically treated genomic DNA (Homo sapiens) CpG-island No: 25988
actaaaccgaaaacgcaccgcgacccgctcgctatacaacaattctttaccgaatataacgtaacgaccacgcactttatccgtcgatactaacgacatttattacctcgctaacgccgcaaaccgctcgccaaaattacgcgacgttaaaacaaattttctataataataaaaccttaccgactaatttataccgcgaataacaacaattaactaacgcgccgttacataatctatataacccgacgaaaacgacgataaatatcaactaatatccgacttttaacgaaaaactaacacaaatacgcgacaacaatataccgattaattatccgatataaaatacgaatctacgtattcttaatacgataatacatccgataccgccgaatataacgaataatctctatctcactaacattcaactaacgcaaaactatctcgaacgccccgatctaaccgccaaccgctttattaccgatccttttaccccaaataaacgaatataccgtaccgaaaacgttacccgctaactaaataacgacgcgataaaatacctcgaacgcaataataatcaactaaaaattcgcgaacaaattcttttttatatt

SEQ ID NO: 25989 - DNA, 630 bp, Artificial Sequence
  chemically treated genomic DNA (Homo sapiens) CpG-island No: 25989
tgaatttgtatcggtagaagaagtgaaattagcgtcggaataattagtcgagttataatagtttgtttttatagtgttttcggtgtcgacgatttcgtagtagttaggtttaattgagtacgaagattaaattgtatcgtttgcgtcgtatattcgttattatgattggaatggcgtaatgtagtcgatggttagtaagatgtttggggttgacggggtgattgcgggtagcgttttgttggttgatagcgttaataatcgtattaacggttcgttgaatgtcgtagaagcgatcgaaacgttgcgaaatgcgttggttaataacgggaaatttattttggttttcgtttagtaattgtcgatggcgaataatagttaggtttgtcgtcgtaggatagtttaggtattcgtagtaaagttataggtattgttcgtaatgtcggcgtttattacgtgttgtatttacgttggcgtatgattggttagaacgttttgcggatttaaaggtgttgtttttggtaatttttcgtattcgtggtaatttttagatcggtacgtttgttatcgatttggatgatgattattttgatatgttgtaggaggagttttgtagcgttgtggaggttttcg

SEQ ID NO: 25990 - DNA, 630 bp, Artificial Sequence
  chemically treated genomic DNA (Homo sapiens) CpG-island No: 25990
cgaaaacctccacaacgctacaaaactcctcctacaacatatcaaaataatcatcatccaaatcgataacaaacgtaccgatctaaaaattaccacgaatacgaaaaattaccaaaaacaacacctttaaatccgcaaaacgttctaaccaatcatacgccaacgtaaatacaacacgtaataaacgccgacattacgaacaatacctataactttactacgaatacctaaactatcctacgacgacaaacctaactattattcgccatcgacaattactaaacgaaaaccaaaataaatttcccgttattaaccaacgcatttcgcaacgtttcgatcgcttctacgacattcaacgaaccgttaatacgattattaacgctatcaaccaacaaaacgctacccgcaatcaccccgtcaaccccaaacatcttactaaccatcgactacattacgccattccaatcataataacgaatatacgacgcaaacgatacaatttaatcttcgtactcaattaaacctaactactacgaaatcgtcgacaccgaaaacactataaaaacaaactattataactcgactaattattccgacgctaatttcacttcttctaccgatacaaattca

SEQ ID NO: 25991 - DNA, 630 bp, Artificial Sequence
  chemically treated genomic DNA (Homo sapiens) CpG-island No: 25991
cggaggtttttataacgttgtaaagttttttttgtaatatgttaaagtagttattatttagatcggtggtaggcgtgtcggtttgggggttattacgggtacgggggattattaaaggtagtatttttaagttcgtaagacgttttgattagttatgcgttagcgtgagtatagtacgtaatgagcgtcgatattgcgggtaatgtttatggttttattacgggtgtttaaattgttttgcggcgataaatttaattgttgttcgttatcgatagttgttgggcggaaattagggtaaatttttcgttattagttagcgtatttcgtagcgtttcggtcgtttttgcggtatttagcgaatcgttagtacggttgttaacgttattaattagtaggacgttattcgtagttatttcgttagttttaagtattttattgattatcggttgtattgcgttattttagttataatggcgaatatgcggcgtaggcggtgtagtttgattttcgtgtttaattgggtttggttgttgcgggatcgtcggtatcgagggtattgtggggataggttgttgtggttcggttggttgtttcggcgttggttttattttttttatcggtgtaggttta

SEQ ID NO: 25992 - DNA, 630 bp, Artificial Sequence
  chemically treated genomic DNA (Homo sapiens) CpG-island No: 25992
taaacctacaccgataaaaaaaataaaaccaacgccgaaacaaccaaccgaaccacaacaacctatccccacaataccctcgataccgacgatcccgcaacaaccaaacccaattaaacacgaaaatcaaactacaccgcctacgccgcatattcgccattataactaaaataacgcaatacaaccgataatcaataaaatacttaaaactaacgaaataactacgaataacgtcctactaattaataacgttaacaaccgtactaacgattcgctaaataccgcaaaaacgaccgaaacgctacgaaatacgctaactaataacgaaaaatttaccctaatttccgcccaacaactatcgataacgaacaacaattaaatttatcgccgcaaaacaatttaaacacccgtaataaaaccataaacattacccgcaatatcgacgctcattacgtactatactcacgctaacgcataactaatcaaaacgtcttacgaacttaaaaatactacctttaataatcccccgtacccgtaataacccccaaaccgacacgcctaccaccgatctaaataataactactttaacatattacaaaaaaaactttacaacgttataaaaacctccg

SEQ ID NO: 25993 - DNA, 757 bp, Artificial Sequence
  chemically treated genomic DNA (Homo sapiens) CpG-island No: 25993
gtattttgtgcgtttgtattagatttagcgtgttaagttttggaatgtagattagcgttaattaggcggtaattcgcgttagttgcgttaagtataagttcgatttaatggaagaattgattatcgtcgttagttttaagcgcgtgcgtcgtttgtatttgttcgcgtattttttttagattgttcgtgagcgtgggtttgataattatcgcgcgtacgttttttttagttataaaggtaaaattcggatcgcgtaggtttttattttaggtaatggtaatgtcggttttacgggtaaacgttcgcgaattatcgcgggttttgtacggtttttcgagaaacgcgatgcggtcgcgataattcgggttaacgtatttggtaaattgttgattttttagcggtgtttaggcgcgatttgcgttaagacgtaaatgtagattcggaattgtttttagtaatagatttattattatgtcgtcgcgtatcgtttcgtataattttattttgattttcgttattttttcgtttggtatatttgtaagtttgaggattagatcgttcggatcgttattatatagcggtgtcgtacggtagttggttgtttgcggtaacgtatttgttagttttgttaatgtatagtttacgttaaaggttacggaaggtatttgcggtagttcgtaatcgtttgttagttagttatttatttaggtaagtagtatattttgcgtttttttttaggttttttgattgaagttcg

SEQ ID NO: 25994 - DNA, 757 bp, Artificial Sequence
  chemically treated genomic DNA (Homo sapiens) CpG-island No: 25994
cgaacttcaatcaaaaaacctaaaaaaaaacgcaaaatatactacttacctaaataaataactaactaacaaacgattacgaactaccgcaaataccttccgtaacctttaacgtaaactatacattaacaaaactaacaaatacgttaccgcaaacaaccaactaccgtacgacaccgctatataataacgatccgaacgatctaatcctcaaacttacaaatataccaaacgaaaaaataacgaaaatcaaaataaaattatacgaaacgatacgcgacgacataataataaatctattactaaaaacaattccgaatctacatttacgtcttaacgcaaatcgcgcctaaacaccgctaaaaaatcaacaatttaccaaatacgttaacccgaattatcgcgaccgcatcgcgtttctcgaaaaaccgtacaaaacccgcgataattcgcgaacgtttacccgtaaaaccgacattaccattacctaaaataaaaacctacgcgatccgaattttacctttataactaaaaaaaacgtacgcgcgataattatcaaacccacgctcacgaacaatctaaaaaaaatacgcgaacaaatacaaacgacgcacgcgcttaaaactaacgacgataatcaattcttccattaaatcgaacttatacttaacgcaactaacgcgaattaccgcctaattaacgctaatctacattccaaaacttaacacgctaaatctaatacaaacgcacaaaatac

SEQ ID NO: 25995 - DNA, 757 bp, Artificial Sequence
  chemically treated genomic DNA (Homo sapiens) CpG-island No: 25995
cgggttttagttaggaaatttgggaagaggcgtaaagtgtgttgtttgtttgggtaaataattggttggtaggcgattgcgagttatcgtagatgtttttcgtggtttttggcgtaagttgtgtattggtagaattgatagatacgttgtcgtaagtagttaattatcgtgcggtatcgttgtgtaatggcgattcggacgatttgatttttaaatttgtagatatgttaggcgagaaagtggcgaaggttaaagtgggattgtacgaagcggtgcgcgacggtatggtggtgaatttgttgttggaggtaatttcggatttgtatttgcgttttgacgtaaatcgcgtttggatatcgttgaaaggttagtagtttgttaaatacgttaattcggattatcgcgatcgtatcgcgtttttcgaagagtcgtgtaaaattcgcgatgattcgcgagcgtttgttcgtgaaatcggtattgttattgtttgggatgaaagtttgcgcgattcggattttgtttttgtggttgaagagggcgtgcgcgcggtagttattaaatttacgtttacgggtagtttggaaaaagtacgcgagtaggtataggcggcgtacgcgtttggggttgacggcggtgattagtttttttattgaatcgagtttatgtttaacgtaattggcgcggattgtcgtttggttaacgttggtttatattttagggtttgatacgttggatttgatgtaggcgtataaggtat

SEQ ID NO: 25996 - DNA, 757 bp, Artificial Sequence
  chemically treated genomic DNA (Homo sapiens) CpG-island No: 25996
ataccttatacgcctacatcaaatccaacgtatcaaaccctaaaatataaaccaacgttaaccaaacgacaatccgcgccaattacgttaaacataaactcgattcaataaaaaaactaatcaccgccgtcaaccccaaacgcgtacgccgcctatacctactcgcgtactttttccaaactacccgtaaacgtaaatttaataactaccgcgcgcacgccctcttcaaccacaaaaacaaaatccgaatcgcgcaaactttcatcccaaacaataacaataccgatttcacgaacaaacgctcgcgaatcatcgcgaattttacacgactcttcgaaaaacgcgatacgatcgcgataatccgaattaacgtatttaacaaactactaacctttcaacgatatccaaacgcgatttacgtcaaaacgcaaatacaaatccgaaattacctccaacaacaaattcaccaccataccgtcgcgcaccgcttcgtacaatcccactttaaccttcgccactttctcgcctaacatatctacaaatttaaaaatcaaatcgtccgaatcgccattacacaacgataccgcacgataattaactacttacgacaacgtatctatcaattctaccaatacacaacttacgccaaaaaccacgaaaaacatctacgataactcgcaatcgcctaccaaccaattatttacccaaacaaacaacacactttacgcctcttcccaaatttcctaactaaaacccg

SEQ ID NO: 25997 - DNA, 837 bp, Artificial Sequence
  chemically treated genomic DNA (Homo sapiens) CpG-island No: 25997
  unsure (369, 487..488, 547, 549)
gcgtgatcggttttcgttagggtaaagttcgtcgtcgatatttgtttacggaattgacgcgcgttcgtttatagacggttacgtagttcgttgttcgtttcgattatttttagtattttgatggacgcggtaataatcgtttggatcgggtttggaatttttgagcggtcgcgagtttttcgcgttagggataaatcgcgaatcgcgtatattttgcgcgtcgtcgtttgcggagtttttcgcgttattgataaatcgttagttttataaattcggagatacggaaattagagtttttcgcgttagtaggataaatcggatttatttcgaaagagattgttagttagtttgagtttttcgcgttagganttaaatcgttgttggagttggttgtaaggtaagtcgtttagagtttttcgcgttacgggataaatcggggggcgtatgatcgtaaatattatttttcgggagtttttcgcgttaggannntaaatcgggagtttagatataggtggaatgatggattacgagtttttcgcgttaggantnataatcgttcggtagttaggtttgtaacgtttgaatcgagagtttttcgcgttataggggataaatcggtaacgacggtgagattttacgtttgacgttggtgtttttcgtattagcgggagtaaatcgggcgtattggatgcgatgatggatattatttggagttttttcgtttttgcggtagaatttttagtttttatttttaaatttattaagacgttttcgttaatttttttattagaggtagtattattcgtataacgttacggtagcgacgttttatttttt

SEQ ID NO: 25998 - DNA, 837 bp, Artificial Sequence
  chemically treated genomic DNA (Homo sapiens) CpG-island No: 25998
  unsure (289, 291, 349..350, 469)
aaaaaataaaacgtcgctaccgtaacgttatacgaataatactacctctaataaaaaaattaacgaaaacgtcttaataaatttaaaaataaaaactaaaaattctaccgcaaaaacgaaaaaactccaaataatatccatcatcgcatccaatacgcccgatttactcccgctaatacgaaaaacaccaacgtcaaacgtaaaatctcaccgtcgttaccgatttatcccctataacgcgaaaaactctcgattcaaacgttacaaacctaactaccgaacgattatnantcctaacgcgaaaaactcgtaatccatcattccacctatatctaaactcccgatttannntcctaacgcgaaaaactcccgaaaaataatatttacgatcatacgccccccgatttatcccgtaacgcgaaaaactctaaacgacttaccttacaaccaactccaacaacgatttaantcctaacgcgaaaaactcaaactaactaacaatctctttcgaaataaatccgatttatcctactaacgcgaaaaactctaatttccgtatctccgaatttataaaactaacgatttatcaataacgcgaaaaactccgcaaacgacgacgcgcaaaatatacgcgattcgcgatttatccctaacgcgaaaaactcgcgaccgctcaaaaattccaaacccgatccaaacgattattaccgcgtccatcaaaatactaaaaataatcgaaacgaacaacgaactacgtaaccgtctataaacgaacgcgcgtcaattccgtaaacaaatatcgacgacgaactttaccctaacgaaaaccgatcacgc

SEQ ID NO: 25999 - DNA, 837 bp, Artificial Sequence
  chemically treated genomic DNA (Homo sapiens) CpG-island No: 25999
  unsure (289, 291, 349..350, 469)
aaagaatagaacgtcgttgtcgtgacgttatgcggataatgttatttttggtgaaggagttggcgaaggcgttttgatgggtttgaaaatgggagttgggagttttatcgtagaggcgggggaattttaagtgatatttattatcgtatttagtgcgttcggtttattttcgttgatgcggggaatattagcgttaggcgtgaaattttatcgtcgttgtcggtttattttttgtggcgcggggaattttcggtttaggcgttgtaaatttggttatcgggcggttatnanttttaacgcggggaattcgtagtttattattttatttatgtttgaattttcggtttannnttttggcgcggggaattttcgggggataatgtttacggttatgcgtttttcggtttatttcgtggcgcggggaattttgggcggtttgttttgtagttagttttagtagcggtttganttttggcgcggggaatttaagttggttggtaatttttttcggggtgagttcggtttattttattggcgcggggaattttagttttcgtattttcggatttataaagttgacggtttattagtggcgcggggaatttcgtaggcggcgacgcgtagggtatgcgcgattcgcggtttatttttggcgcggggaattcgcgatcgtttagaaattttagattcgatttaaacggttattatcgcgtttattaaagtattggagatggtcgaagcgggtagcgaattgcgtgatcgtttgtgggcgaacgcgcgttagtttcgtgagtaaatgtcggcggcgggttttattttggcgggagtcgattacgt

SEQ ID NO: 26000 - DNA, 837 bp, Artificial Sequence
  chemically treated genomic DNA (Homo sapiens) CpG-island No: 26000
  unsure (369, 487..488, 547, 549)
acgtaatcgactcccgccaaaataaaacccgccgccgacatttactcacgaaactaacgcgcgttcgcccacaaacgatcacgcaattcgctacccgcttcgaccatctccaatactttaataaacgcgataataaccgtttaaatcgaatctaaaatttctaaacgatcgcgaattccccgcgccaaaaataaaccgcgaatcgcgcataccctacgcgtcgccgcctacgaaattccccgcgccactaataaaccgtcaactttataaatccgaaaatacgaaaactaaaattccccgcgccaataaaataaaccgaactcaccccgaaaaaaattaccaaccaacttaaattccccgcgccaaaantcaaaccgctactaaaactaactacaaaacaaaccgcccaaaattccccgcgccacgaaataaaccgaaaaacgcataaccgtaaacattatcccccgaaaattccccgcgccaaaannntaaaccgaaaattcaaacataaataaaataataaactacgaattccccgcgttaaaantnataaccgcccgataaccaaatttacaacgcctaaaccgaaaattccccgcgccacaaaaaataaaccgacaacgacgataaaatttcacgcctaacgctaatattccccgcatcaacgaaaataaaccgaacgcactaaatacgataataaatatcacttaaaattcccccgcctctacgataaaactcccaactcccattttcaaacccatcaaaacgccttcgccaactccttcaccaaaaataacattatccgcataacgtcacgacaacgacgttctattcttt

SEQ ID NO: 26001 - DNA, 557 bp, Artificial Sequence
  chemically treated genomic DNA (Homo sapiens) CpG-island No: 26001
cgtacgcgtatttttttagatagcgtcgatttgcgtatggaaatcgttagttatttgcgtcggatttgtcgcgtttgttagtgttcgttcggtaataaacgtttttacgcggatatttttaaatagcggtaggttagtaggggtaatttcgttagtaatggaaagtttaaggtcgatatttgaaagcgtttttatgcgtgttagatcggtttcgttttattgttgttcgttggtttgtgtattacgatcgcgatgataaatggtttgtcgtacgttaatacgatgttagtcgcgggcgtcgtttagcgtttagttatcgaatagttttatttgaattttattttcgtagcgttgtgttattgcgtggtttttttttatcgtcgcgagcggcgcggcgtagatgatggttatttagttagcgtttgcgttaaacgtatgttgcgcgagcgttttattagcgtcggcgattttttagttagtaacgatgattttgttcgggtattgttcgcgtaaggtttttaggtagtttaagaaggaattgaatatgttattatcga

SEQ ID NO: 26002 - DNA, 557 bp, Artificial Sequence
  chemically treated genomic DNA (Homo sapiens) CpG-island No: 26002
tcgataataacatattcaattccttcttaaactacctaaaaaccttacgcgaacaatacccgaacaaaatcatcgttactaactaaaaaatcgccgacgctaataaaacgctcgcgcaacatacgtttaacgcaaacgctaactaaataaccatcatctacgccgcgccgctcgcgacgataaaaaaaaaccacgcaataacacaacgctacgaaaataaaattcaaataaaactattcgataactaaacgctaaacgacgcccgcgactaacatcgtattaacgtacgacaaaccatttatcatcgcgatcgtaatacacaaaccaacgaacaacaataaaacgaaaccgatctaacacgcataaaaacgctttcaaatatcgaccttaaactttccattactaacgaaattacccctactaacctaccgctatttaaaaatatccgcgtaaaaacgtttattaccgaacgaacactaacaaacgcgacaaatccgacgcaaataactaacgatttccatacgcaaatcgacgctatctaaaaaaatacgcgtacg

SEQ ID NO: 26003 - DNA, 557 bp, Artificial Sequence
  chemically treated genomic DNA (Homo sapiens) CpG-island No: 26003
tcggtaatgatatgtttaatttttttttaagttgtttgaaagttttgcgcgaatagtgttcggataaaattatcgttgttgattggaaggtcgtcgacgttggtgaaacgttcgcgtaatatgcgtttggcgtaggcgttaattggatgattattatttgcgtcgcgtcgttcgcgacggtagaaaaaggttacgtaatggtataacgttgcgggggtgaaatttagatagagttgttcggtaattggacgttggacgacgttcgcgattggtatcgtattggcgtgcggtaggttatttattatcgcggtcgtgatgtataggttagcgggtaatagtggggcgaagtcgatttggtacgtatgaaggcgtttttagatatcggttttgagttttttattattggcgggattatttttgttgatttgtcgttgtttaaagatattcgcgtgaaagcgtttattgtcgggcgggtattggtaggcgcggtaaattcggcgtaagtggttggcgatttttatgcgtaaatcgacgttatttggggaggtgcgcgtgcg

SEQ ID NO: 26004 - DNA, 557 bp, Artificial Sequence
  chemically treated genomic DNA (Homo sapiens) CpG-island No: 26004
cgcacgcgcacctccccaaataacgtcgatttacgcataaaaatcgccaaccacttacgccgaatttaccgcgcctaccaatacccgcccgacaataaacgctttcacgcgaatatctttaaacaacgacaaatcaacaaaaataatcccgccaataataaaaaactcaaaaccgatatctaaaaacgccttcatacgtaccaaatcgacttcgccccactattacccgctaacctatacatcacgaccgcgataataaataacctaccgcacgccaatacgataccaatcgcgaacgtcgtccaacgtccaattaccgaacaactctatctaaatttcacccccgcaacgttataccattacgtaacctttttctaccgtcgcgaacgacgcgacgcaaataataatcatccaattaacgcctacgccaaacgcatattacgcgaacgtttcaccaacgtcgacgaccttccaatcaacaacgataattttatccgaacactattcgcgcaaaactttcaaacaacttaaaaaaaaattaaacatatcattaccga

SEQ ID NO: 26005 - DNA, 600 bp, Artificial Sequence
  chemically treated genomic DNA (Homo sapiens) CpG-island No: 26005
cgaagtgggtattattttgtgcgtgggcgaaggcgtgcgtgcggttcgtgatttgaaagcgttttattcgtataaaatcgtattggtagacgttaaaattgtcgatgtaggtaaaattttttcgcgtatgtgtttcgaagttaacgttgattgggtgacggtaatttgttgtgcggatattaatatcgttaaaggcgcgttggacgtggtaaaagagtttaacggcgacgtgtagatcgaattgatcggttattggatttgggaataggcgtaatagtggcgcgatgtaggtattgggtaggtggtttattatcgtagtcgtgacgcgtaggtcgtacggtgagcgtggggcgaacgggatattatcgcgattaaacgttttttcgatatgggttttaaagttatcgttatcggaggtttggcgttggaagatttgtcgttgtttaagggtatttcgatttacgtttttatcgcgggtcgtagtattcgtgatgtcgtttttttcggtggaagtcgtacgttagtttaaacgttttatcgttgaattgtggggttaaagagcggatatgttgtttaaaataaatttcgtttggtatttat

SEQ ID NO: 26006 - DNA, 600 bp, Artificial Sequence
  chemically treated genomic DNA (Homo sapiens) CpG-island No: 26006
ataaataccaaacgaaatttattttaaacaacatatccgctctttaaccccacaattcaacgataaaacgtttaaactaacgtacgacttccaccgaaaaaaacgacatcacgaatactacgacccgcgataaaaacgtaaatcgaaatacccttaaacaacgacaaatcttccaacgccaaacctccgataacgataactttaaaacccatatcgaaaaaacgtttaatcgcgataatatcccgttcgccccacgctcaccgtacgacctacgcgtcacgactacgataataaaccacctacccaatacctacatcgcgccactattacgcctattcccaaatccaataaccgatcaattcgatctacacgtcgccgttaaactcttttaccacgtccaacgcgcctttaacgatattaatatccgcacaacaaattaccgtcacccaatcaacgttaacttcgaaacacatacgcgaaaaaattttacctacatcgacaattttaacgtctaccaatacgattttatacgaataaaacgctttcaaatcacgaaccgcacgcacgccttcgcccacgcacaaaataatacccacttcg

SEQ ID NO: 26007 - DNA, 600 bp, Artificial Sequence
  chemically treated genomic DNA (Homo sapiens) CpG-island No: 26007
atagatgttaagcgggatttgttttggataatatattcgttttttagttttatagtttagcgatggaacgtttgaattgacgtgcggtttttatcgggagaagcggtattacggatattacggttcgcgataaagacgtgaatcggaatatttttgaatagcggtagattttttagcgttaggttttcggtgacggtgattttgaagtttatatcggaaagacgtttgatcgcggtgatgtttcgttcgttttacgtttatcgtgcggtttgcgcgttacggttgcggtgataaattatttgtttaatgtttgtatcgcgttattgttgcgtttgtttttaggtttagtaatcggttagttcgatttgtacgtcgtcgttaaatttttttgttacgtttagcgcgtttttggcggtgttgatattcgtatagtaaattatcgttatttagttagcgttggtttcgaagtatatacgcgaaaggattttgtttgtatcggtaattttggcgtttgttagtacgattttgtgcgggtagagcgtttttaggttacgaatcgtacgtacgttttcgtttacgtatagaatggtgtttatttcg

SEQ ID NO: 26008 - DNA, 600 bp, Artificial Sequence
  chemically treated genomic DNA (Homo sapiens) CpG-island No: 26008
cgaaataaacaccattctatacgtaaacgaaaacgtacgtacgattcgtaacctaaaaacgctctacccgcacaaaatcgtactaacaaacgccaaaattaccgatacaaacaaaatcctttcgcgtatatacttcgaaaccaacgctaactaaataacgataatttactatacgaatatcaacaccgccaaaaacgcgctaaacgtaacaaaaaaatttaacgacgacgtacaaatcgaactaaccgattactaaacctaaaaacaaacgcaacaataacgcgatacaaacattaaacaaataatttatcaccgcaaccgtaacgcgcaaaccgcacgataaacgtaaaacgaacgaaacatcaccgcgatcaaacgtctttccgatataaacttcaaaatcaccgtcaccgaaaacctaacgctaaaaaatctaccgctattcaaaaatattccgattcacgtctttatcgcgaaccgtaatatccgtaataccgcttctcccgataaaaaccgcacgtcaattcaaacgttccatcgctaaactataaaactaaaaaacgaatatattatccaaaacaaatcccgcttaacatctat

SEQ ID NO: 26009 - DNA, 524 bp, Artificial Sequence
  chemically treated genomic DNA (Homo sapiens) CpG-island No: 26009
atcgtcgggattacgtttggcgattcgatggcgtatttggtggtatcgtcgttggaagcgatttatggtattgatgtagttttgaagtttgtcgacgtatagttggcgatttatgtttcgttatcgtttgaaattaattattcggtagtatttttaatcggtagttaggtagcgtgtaaagtagtttgtaacgtttttatcgatgtagtgttggaaatcgcgcgtaatttaatttagcgtgcgtaacggaggttgtcgatgattaatgtattgggattgttggaagtggacggtatggtcgtcgcgatagatgtagcggatgttatgtttaaagtagttaagagattaaaaagggatgtttaacgagttggatgaagaatcgttatcgcgtcgtcgtattcgtcgtttacgtaaacgcgtattacgtcgtgagggtatcgtatgatagtggcgtatattgttataggtagtaatttggttttttcgttggagtaggttaatgttgttttgaaagtattaggcga

SEQ ID NO: 26010 - DNA, 524 bp, Artificial Sequence
  chemically treated genomic DNA (Homo sapiens) CpG-island No: 26010
tcgcctaatactttcaaaacaacattaacctactccaacgaaaaaaccaaattactacctataacaatatacgccactatcatacgataccctcacgacgtaatacgcgtttacgtaaacgacgaatacgacgacgcgataacgattcttcatccaactcgttaaacatccctttttaatctcttaactactttaaacataacatccgctacatctatcgcgacgaccataccgtccacttccaacaatcccaatacattaatcatcgacaacctccgttacgcacgctaaattaaattacgcgcgatttccaacactacatcgataaaaacgttacaaactactttacacgctacctaactaccgattaaaaatactaccgaataattaatttcaaacgataacgaaacataaatcgccaactatacgtcgacaaacttcaaaactacatcaataccataaatcgcttccaacgacgataccaccaaatacgccatcgaatcgccaaacgtaatcccgacgat

SEQ ID NO: 26011 - DNA, 524 bp, Artificial Sequence
  chemically treated genomic DNA (Homo sapiens) CpG-island No: 26011
tcgtttaatgtttttagggtagtattgatttgttttagcggagaggttagattgttgtttatggtaatatacgttattgttatgcggtatttttacgacgtggtgcgcgtttgcgtggacgacgagtacgacgacgcggtgacggttttttatttagttcgttgagtatttttttttggttttttagttgttttgagtatggtattcgttgtatttatcgcggcgattatgtcgtttatttttagtaattttagtgtattgattatcggtaattttcgttacgtacgttggattggattacgcgcgatttttagtattgtatcggtaaaggcgttataggttgttttatacgttgtttggttatcggttaaaaatgttgtcgagtagttggttttagacggtggcgggatataggtcgttagttgtacgtcggtagattttagggttgtattaatgttataggtcgtttttagcggcggtgttattagatacgttatcggatcgttaagcgtgatttcggcggt

SEQ ID NO: 26012 - DNA, 524 bp, Artificial Sequence
  chemically treated genomic DNA (Homo sapiens) CpG-island No: 26012
accgccgaaatcacgcttaacgatccgataacgtatctaataacaccgccgctaaaaacgacctataacattaatacaaccctaaaatctaccgacgtacaactaacgacctatatcccgccaccgtctaaaaccaactactcgacaacatttttaaccgataaccaaacaacgtataaaacaacctataacgcctttaccgatacaatactaaaaatcgcgcgtaatccaatccaacgtacgtaacgaaaattaccgataatcaatacactaaaattactaaaaataaacgacataatcgccgcgataaatacaacgaataccatactcaaaacaactaaaaaaccaaaaaaaaatactcaacgaactaaataaaaaaccgtcaccgcgtcgtcgtactcgtcgtccacgcaaacgcgcaccacgtcgtaaaaataccgcataacaataacgtatattaccataaacaacaatctaacctctccgctaaaacaaatcaatactaccctaaaaacattaaacga

SEQ ID NO: 26013 - DNA, 807 bp, Artificial Sequence
  chemically treated genomic DNA (Homo sapiens) CpG-island No: 26013
tagtcgcgtattggtaggcgaatcgcgtatcgacggtcgtgaaaaagatatgattcgtggtttggatgtgcgtattggcgtgtgtcgcgtatttacggttttgcgttgtttattcgtggtgaaacgtaggcgttggttatcgtaacgttgggtattgttcgtgacgcgtaggtttttgatgaattgatgggcgaacgtatcgatatttttttgttttattataattttttttcgtatttcgtaggcgaaatcggtatggtcggtttttcgaagcgtcgtgaaattgggtacggtcgtttggcgaagcgcggcgtgttggtagttatgtcggatatggataaattttcgtatatcgtacgttttgtgtttgatattattgaatttaacggttttttttttatggttttcgtgtgtagcgcgtttttggcgttgatggacgtaggtgtgtcgattaaagttgtcgttattggtatcgtaatgggtttggtgaaacgaggcgataattacgatgtacggtttgatattttgggcgatgaagattatttgggcgatatggagtttatagtggtaggttttcgcgacggtatcgttgtattgtagatggatatcgaaatggtaggtattattaaagagattatgtaggttgcgttgaattaggttaaaggtgcgcgtttgtatattttgggcgtaatggaataggcgattaacgcgtcgcgtggcgatatttttgagttcgtatcgcgtatttatattattaagattaattcggataagattaaagatgttatcggtaaaggcggttttgta

SEQ ID NO: 26014 - DNA, 807 bp, Artificial Sequence
  chemically treated genomic DNA (Homo sapiens) CpG-island No: 26014
tacaaaaccgcctttaccgataacatctttaatcttatccgaattaatcttaataatataaatacgcgatacgaactcaaaaatatcgccacgcgacgcgttaatcgcctattccattacgcccaaaatatacaaacgcgcacctttaacctaattcaacgcaacctacataatctctttaataatacctaccatttcgatatccatctacaatacaacgataccgtcgcgaaaacctaccactataaactccatatcgcccaaataatcttcatcgcccaaaatatcaaaccgtacatcgtaattatcgcctcgtttcaccaaacccattacgataccaataacgacaactttaatcgacacacctacgtccatcaacgccaaaaacgcgctacacacgaaaaccataaaaaaaaaaccgttaaattcaataatatcaaacacaaaacgtacgatatacgaaaatttatccatatccgacataactaccaacacgccgcgcttcgccaaacgaccgtacccaatttcacgacgcttcgaaaaaccgaccataccgatttcgcctacgaaatacgaaaaaaaattataataaaacaaaaaaatatcgatacgttcgcccatcaattcatcaaaaacctacgcgtcacgaacaatacccaacgttacgataaccaacgcctacgtttcaccacgaataaacaacgcaaaaccgtaaatacgcgacacacgccaatacgcacatccaaaccacgaatcatatctttttcacgaccgtcgatacgcgattcgcctaccaatacgcgacta

SEQ ID NO: 26015 - DNA, 807 bp, Artificial Sequence
  chemically treated genomic DNA (Homo sapiens) CpG-island No: 26015
tatagaatcgtttttatcgataatatttttgattttgttcgggttgattttgatggtatggatacgcggtgcgaatttagagatatcgttacgcggcgcgttgatcgtttgttttattacgtttaggatatgtagacgcgtatttttagtttggtttagcgtaatttgtatgatttttttggtgatatttattatttcgatatttatttgtagtgtagcgatatcgtcgcgggaatttgttattgtgaattttatatcgtttaggtgatttttatcgtttaaaatgttagatcgtatatcgtagttgtcgtttcgttttattagatttattgcgatattagtaacggtagttttgatcggtatatttgcgtttattagcgttagagacgcgttgtatacggaagttatagaagaggaatcgttggatttagtgatattagatataagacgtacggtgtacgggaatttgtttatattcggtatgattgttagtacgtcgcgtttcgttagacgatcgtgtttaattttacgacgtttcggagaatcgattatgtcggtttcgtttacggagtacggagggaagttgtagtggaataggaaggtatcggtacgttcgtttattagtttattaagaatttgcgcgttacgagtagtatttagcgttgcggtaattagcgtttgcgttttattacgggtgaatagcgtagaatcgtgagtacgcggtatacgttagtacgtatatttagattacggattatattttttttacgatcgtcgatacgcggttcgtttgttagtacgcggtta

SEQ ID NO: 26016 - DNA, 807 bp, Artificial Sequence
  chemically treated genomic DNA (Homo sapiens) CpG-island No: 26016
taaccgcgtactaacaaacgaaccgcgtatcgacgatcgtaaaaaaaatataatccgtaatctaaatatacgtactaacgtataccgcgtactcacgattctacgctattcacccgtaataaaacgcaaacgctaattaccgcaacgctaaatactactcgtaacgcgcaaattcttaataaactaataaacgaacgtaccgataccttcctattccactacaacttccctccgtactccgtaaacgaaaccgacataatcgattctccgaaacgtcgtaaaattaaacacgatcgtctaacgaaacgcgacgtactaacaatcataccgaatataaacaaattcccgtacaccgtacgtcttatatctaatatcactaaatccaacgattcctcttctataacttccgtatacaacgcgtctctaacgctaataaacgcaaatataccgatcaaaactaccgttactaatatcgcaataaatctaataaaacgaaacgacaactacgatatacgatctaacattttaaacgataaaaatcacctaaacgatataaaattcacaataacaaattcccgcgacgatatcgctacactacaaataaatatcgaaataataaatatcaccaaaaaaatcatacaaattacgctaaaccaaactaaaaatacgcgtctacatatcctaaacgtaataaaacaaacgatcaacgcgccgcgtaacgatatctctaaattcgcaccgcgtatccataccatcaaaatcaacccgaacaaaatcaaaaatattatcgataaaaacgattctata

SEQ ID NO: 26017 - DNA, 591 bp, Artificial Sequence
  chemically treated genomic DNA (Homo sapiens) CpG-island No: 26017
  unsure (119, 461)
gtttttgaggaattaggtttttaggcgcgggcgttgggggtcgatgtcgtcgtcggtattgatatcgattacgaaacggtcgggtaaaacggtagtatgttgatggttagcgttacggntacggcggtgaaaacgcgtcgatgagaagatttttttggttggtcgttgtcgttttgttattggtagggtgtgtaggcgaaaaaggtattgtcgagaaagagggatattagtttgatattcgacgttaggcgtaggcggcgtattcgcgtattaaagtgttggtgatttattatatcgtagatgattttgatagttcgttggcgatattgatcgataagtaggttagttcgtattatttggtttttgcggtattatcgcgatataacggtaaatcgcgtatttggtaattggtgtcggaataagaattggtttggtatgcggggattagcgtttggcgcggnggtaacgcgttttaacgatatttttattggtattgagttggaaaatcgtggttggtaaaaatcggtcggagtgaaatattttgtttcgtttgaatcggtatagatttaggcgtttattttattggcgaaa

SEQ ID NO: 26018 - DNA, 591 bp, Artificial Sequence
  chemically treated genomic DNA (Homo sapiens) CpG-island No: 26018
  unsure (131, 473)
tttcgccaataaaataaacgcctaaatctataccgattcaaacgaaacaaaatatttcactccgaccgatttttaccaaccacgattttccaactcaataccaataaaaatatcgttaaaacgcgttaccnccgcgccaaacgctaatccccgcataccaaaccaattcttattccgacaccaattaccaaatacgcgatttaccgttatatcgcgataataccgcaaaaaccaaataatacgaactaacctacttatcgatcaatatcgccaacgaactatcaaaatcatctacgatataataaatcaccaacactttaatacgcgaatacgccgcctacgcctaacgtcgaatatcaaactaatatccctctttctcgacaatacctttttcgcctacacaccctaccaataacaaaacgacaacgaccaaccaaaaaaatcttctcatcgacgcgttttcaccgccgtanccgtaacgctaaccatcaacatactaccgttttacccgaccgtttcgtaatcgatatcaataccgacgacgacatcgacccccaacgcccgcgcctaaaaacctaattcctcaaaaac

SEQ ID NO: 26019 - DNA, 591 bp, Artificial Sequence
  chemically treated genomic DNA (Homo sapiens) CpG-island No: 26019
  unsure (131, 473)
tttcgttagtggaataagcgtttgaatttgtgtcggtttaaacggggtaaaatattttatttcggtcgatttttgttagttacggttttttagtttaatgttaatagaggtgtcgttaaggcgcgttgttntcgcgttaggcgttaattttcgtatgttaggttagtttttgtttcggtattagttgttagatgcgcggtttatcgttgtatcgcggtggtatcgtagggattagataatgcgagttgatttgtttatcggttagtgtcgttagcgagttattaaaattatttgcggtgtagtggattattagtattttaatgcgcggatacgtcgtttgcgtttggcgtcgggtattaagttgatatttttttttttcgataatgtttttttcgtttgtatattttgttaataatagagcggtagcgattagttagaagaatttttttatcgacgcgtttttatcgtcgtantcgtgacgttaattattagtatattgtcgttttgttcgatcgtttcgtagtcgatattaatatcgacgacggtatcggtttttagcgttcgcgtttgggagtttaattttttaaaggt

SEQ ID NO: 26020 - DNA, 591 bp, Artificial Sequence
  chemically treated genomic DNA (Homo sapiens) CpG-island No: 26020
  unsure (119, 461)
acctttaaaaaattaaactcccaaacgcgaacgctaaaaaccgataccgtcgtcgatattaatatcgactacgaaacgatcgaacaaaacgacaatatactaataattaacgtcacgantacgacgataaaaacgcgtcgataaaaaaattcttctaactaatcgctaccgctctattattaacaaaatatacaaacgaaaaaaacattatcgaaaaaaaaaaatatcaacttaatacccgacgccaaacgcaaacgacgtatccgcgcattaaaatactaataatccactacaccgcaaataattttaataactcgctaacgacactaaccgataaacaaatcaactcgcattatctaatccctacgataccaccgcgatacaacgataaaccgcgcatctaacaactaataccgaaacaaaaactaacctaacatacgaaaattaacgcctaacgcganaacaacgcgccttaacgacacctctattaacattaaactaaaaaaccgtaactaacaaaaatcgaccgaaataaaatattttaccccgtttaaaccgacacaaattcaaacgcttattccactaacgaaa

SEQ ID NO: 26021 - DNA, 564 bp, Artificial Sequence
  chemically treated genomic DNA (Homo sapiens) CpG-island No: 26021
ggtttcgaggtgcgttattgtattatcgaaacgtttacgcgtggcgttaagttgtgcgcgtagggtttttgttaaacgatattttagttgttgaatgcgcgtttgcgcgcgatgaattttcggttgtggattttgttgatttagtcgttgtgttaatcgttgttgttgttgttcggtacgtttaagttgattttttagcgtaaagtttattcgtttttgtaggcgtttaagtatggtttgttggcgtgttagtcggagttgcggatgttgttgttgtaatcggtgatgaatttgcgtaaagcgacgtgtgcggttggcgagataataatttatcgttatttttagtcgttgacgggtcgattgtatttggcgtagtaatttttgttgattacggtttattattttagcggcggtagacggcgttggcgtacgtagatcggtaataaaatcggtaatggttatattcgttttatgttcgacggcgttgataatcggaatgcggttggtaaaaatcgttcgtgacgcgttcgtcgttaaaattttataaattttttagatgtttaa

SEQ ID NO: 26022 - DNA, 564 bp, Artificial Sequence
  chemically treated genomic DNA (Homo sapiens) CpG-island No: 26022
ttaaacatctaaaaaatttataaaattttaacgacgaacgcgtcacgaacgatttttaccaaccgcattccgattatcaacgccgtcgaacataaaacgaatataaccattaccgattttattaccgatctacgtacgccaacgccgtctaccgccgctaaaataataaaccgtaatcaacaaaaattactacgccaaatacaatcgacccgtcaacgactaaaaataacgataaattattatctcgccaaccgcacacgtcgctttacgcaaattcatcaccgattacaacaacaacatccgcaactccgactaacacgccaacaaaccatacttaaacgcctacaaaaacgaataaactttacgctaaaaaatcaacttaaacgtaccgaacaacaacaacaacgattaacacaacgactaaatcaacaaaatccacaaccgaaaattcatcgcgcgcaaacgcgcattcaacaactaaaatatcgtttaacaaaaaccctacgcgcacaacttaacgccacgcgtaaacgtttcgataatacaataacgcacctcgaaacc

SEQ ID NO: 26023 - DNA, 564 bp, Artificial Sequence
  chemically treated genomic DNA (Homo sapiens) CpG-island No: 26023
ttaaatatttggaagatttatggagttttaacgacgaacgcgttacgggcgatttttattagtcgtatttcggttgttagcgtcgtcgggtatgagacggatgtgattattgtcgattttgttgtcgatttgcgtgcgttaacgtcgtttgtcgtcgttgaagtagtgagtcgtaattagtaagagttattgcgttaggtgtaatcgattcgttaacggttggagatggcgatggattattatttcgttaatcgtatacgtcgttttacgtaaatttattatcgattatagtaatagtattcgtagtttcggttggtacgttagtaaattatgtttgagcgtttgtaaaagcgaatgagttttgcgttggaaaattaatttaagcgtatcgggtaatagtagtagcggttaatatagcggttgaattagtaaaatttatagtcgaagatttatcgcgcgtaaacgcgtatttagtaattggaatatcgtttagtagaaattttgcgcgtatagtttagcgttacgcgtgaacgtttcggtaatgtagtaacgtatttcgaagtt

SEQ ID NO: 26024 - DNA, 564 bp, Artificial Sequence
  chemically treated genomic DNA (Homo sapiens) CpG-island No: 26024
aacttcgaaatacgttactacattaccgaaacgttcacgcgtaacgctaaactatacgcgcaaaatttctactaaacgatattccaattactaaatacgcgtttacgcgcgataaatcttcgactataaattttactaattcaaccgctatattaaccgctactactattacccgatacgcttaaattaattttccaacgcaaaactcattcgcttttacaaacgctcaaacataatttactaacgtaccaaccgaaactacgaatactattactataatcgataataaatttacgtaaaacgacgtatacgattaacgaaataataatccatcgccatctccaaccgttaacgaatcgattacacctaacgcaataactcttactaattacgactcactacttcaacgacgacaaacgacgttaacgcacgcaaatcgacaacaaaatcgacaataatcacatccgtctcatacccgacgacgctaacaaccgaaatacgactaataaaaatcgcccgtaacgcgttcgtcgttaaaactccataaatcttccaaatatttaa

SEQ ID NO: 26025 - DNA, 603 bp, Artificial Sequence
  chemically treated genomic DNA (Homo sapiens) CpG-island No: 26025
aatacggttgtttagttcgcgtttaaagtcgtttatcgcgtttaagtcgacgattaatatcgttacgtcgagggtaatgttaatggtagaaataacggagattagcgatattatgtcgtcgcgtcgtcgttcgcgattaaaacgtaggttaattaataacgataaaggtatcgttattatttcgtttttattaggtttagtttcgtcgttagacgattattacgtatttttaattggcggtttatacgtttcgttagttgtaggtcgtgagtaattattaggaaggcggtgttttgtaagcgatttaattttttaagtaattggaagatgttgtcggcgttacgcgtatcgaggttatcggtaggtttattcgttagtattaggcgcgggttatttattagcgtacgggtaatcgttatacgttggcgttcgtcgttagaaagtttagatgggcggtgattcgtacgatgatttagttttatcgtttttaatattttaagtgtacggttgttgattttagcgggtttttttttgttaattagtagcggtatagttacgttttttagggcggtaaaattcggtagtaggtggtgaaattgataa

SEQ ID NO: 26026 - DNA, 603 bp, Artificial Sequence
  chemically treated genomic DNA (Homo sapiens) CpG-island No: 26026
ttatcaatttcaccacctactaccgaattttaccgccctaaaaaacgtaactataccgctactaattaacaaaaaaaaacccgctaaaatcaacaaccgtacacttaaaatattaaaaacgataaaactaaatcatcgtacgaatcaccgcccatctaaactttctaacgacgaacgccaacgtataacgattacccgtacgctaataaataacccgcgcctaatactaacgaataaacctaccgataacctcgatacgcgtaacgccgacaacatcttccaattacttaaaaaattaaatcgcttacaaaacaccgccttcctaataattactcacgacctacaactaacgaaacgtataaaccgccaattaaaaatacgtaataatcgtctaacgacgaaactaaacctaataaaaacgaaataataacgatacctttatcgttattaattaacctacgttttaatcgcgaacgacgacgcgacgacataatatcgctaatctccgttatttctaccattaacattaccctcgacgtaacgatattaatcgtcgacttaaacgcgataaacgactttaaacgcgaactaaacaaccgtatt

SEQ ID NO: 26027 - DNA, 603 bp, Artificial Sequence
  chemically treated genomic DNA (Homo sapiens) CpG-island No: 26027
ttattagttttattatttgttgtcggattttatcgttttggaaaacgtggttatgtcgttgttgattggtaagaaaaagttcgttgaaattaatagtcgtgtatttgagatgttaaaagcggtggggttggattatcgtgcgaattatcgtttatttgaattttttggcggcgaacgttagcgtgtggcgattgttcgtgcgttggtgaataattcgcgtttggtattggcggatgaatttatcggtaatttcgatgcgcgtaacgtcgatagtattttttagttgtttggggaattgaatcgtttgtagggtatcgtttttttggtggttatttacgatttgtaattggcgaaacgtatgagtcgttagttagaaatgcgtgatggtcgtttgacggcggaattgagtttgatgggggcggagtaatggcgatgtttttatcgttattaattggtttgcgttttagtcgcggacggcggcgcggcggtatggtgtcgttgattttcgttatttttattattggtattgttttcggcgtggcggtattgatcgtcggtttaagcgcgatgaacggttttgaacgcgaattgaataatcgtatt

SEQ ID NO: 26028 - DNA, 603 bp, Artificial Sequence
  chemically treated genomic DNA (Homo sapiens) CpG-island No: 26028
aatacgattattcaattcgcgttcaaaaccgttcatcgcgcttaaaccgacgatcaataccgccacgccgaaaacaataccaataataaaaataacgaaaatcaacgacaccataccgccgcgccgccgtccgcgactaaaacgcaaaccaattaataacgataaaaacatcgccattactccgcccccatcaaactcaattccgccgtcaaacgaccatcacgcatttctaactaacgactcatacgtttcgccaattacaaatcgtaaataaccaccaaaaaaacgataccctacaaacgattcaattccccaaacaactaaaaaatactatcgacgttacgcgcatcgaaattaccgataaattcatccgccaataccaaacgcgaattattcaccaacgcacgaacaatcgccacacgctaacgttcgccgccaaaaaattcaaataaacgataattcgcacgataatccaaccccaccgcttttaacatctcaaatacacgactattaatttcaacgaactttttcttaccaatcaacaacgacataaccacgttttccaaaacgataaaatccgacaacaaataataaaactaataa

SEQ ID NO: 26029 - DNA, 555 bp, Artificial Sequence
  chemically treated genomic DNA (Homo sapiens) CpG-island No: 26029
taaggtttgttatcgtcgtatttgttcggtaacgtgtcgggtattgttattgtaaaatcgtattattatgatatttacgtttaatagataattttttattttacgttagattttggtggtttttagcggcgggtttgattttatcgttttgttgtattagttggtgtagtggcggacggaaaattcgggtgtcgttttgcgcgttatttatgtgtattacggtttaagtgttaatgtcgatgtttggggtacgtattgcgaaaacgttttttatcgtggagaatttcgttcgtttgatcgatatagttttcgtaagtttcgataatcgtttgatgttcgaggtaaatgttaataatgggtagtttgttacgtaagcggcgtgaggagtttcggtatataatcggtttcgttcggtatatcggggttaggagaaagtattagtatcggattgtttatggtcgttaggcgtttaattaaggtttgcgtcggaatatggttgcggtaaattattacgttatgtttattgttgcgtaattgatttgttaggttgtacgt

SEQ ID NO: 26030 - DNA, 555 bp, Artificial Sequence
  chemically treated genomic DNA (Homo sapiens) CpG-island No: 26030
acgtacaacctaacaaatcaattacgcaacaataaacataacgtaataatttaccgcaaccatattccgacgcaaaccttaattaaacgcctaacgaccataaacaatccgatactaatactttctcctaaccccgatataccgaacgaaaccgattatataccgaaactcctcacgccgcttacgtaacaaactacccattattaacatttacctcgaacatcaaacgattatcgaaacttacgaaaactatatcgatcaaacgaacgaaattctccacgataaaaaacgttttcgcaatacgtaccccaaacatcgacattaacacttaaaccgtaatacacataaataacgcgcaaaacgacacccgaattttccgtccgccactacaccaactaatacaacaaaacgataaaatcaaacccgccgctaaaaaccaccaaaatctaacgtaaaataaaaaattatctattaaacgtaaatatcataataatacgattttacaataacaatacccgacacgttaccgaacaaatacgacgataacaaacctta

SEQ ID NO: 26031 - DNA, 555 bp, Artificial Sequence
  chemically treated genomic DNA (Homo sapiens) CpG-island No: 26031
acgtataatttggtagattagttgcgtagtaatgggtataacgtggtgatttatcgtaattatatttcggcgtaaattttaattgaacgtttggcgattatgagtaattcggtgttgatgtttttttttggtttcggtgtgtcgagcgaagtcggttgtatgtcggaattttttacgtcgtttgcgtggtaagttgtttattattggtatttgtttcggatattaggcgattgtcgaagtttacgggggttatgtcggttaggcgggcgaaattttttacggtaaaggacgttttcgtaatgcgtattttaggtatcggtattggtatttaaatcgtgatgtatatgaatagcgcgtagagcgatattcggatttttcgttcgttattgtattaattgatgtagtagaacggtggagttaagttcgtcgttaaaggttattagaatttggcgtgaggtgagaagttgtttattgagcgtgagtgttatgatggtgcgattttatagtagtaatgttcggtacgttatcgggtaaatgcggcgatgataagtttta

SEQ ID NO: 26032 - DNA, 555 bp, Artificial Sequence
  chemically treated genomic DNA (Homo sapiens) CpG-island No: 26032
taaaacttatcatcgccgcatttacccgataacgtaccgaacattactactataaaatcgcaccatcataacactcacgctcaataaacaacttctcacctcacgccaaattctaataacctttaacgacgaacttaactccaccgttctactacatcaattaatacaataacgaacgaaaaatccgaatatcgctctacgcgctattcatatacatcacgatttaaataccaataccgatacctaaaatacgcattacgaaaacgtcctttaccgtaaaaaatttcgcccgcctaaccgacataacccccgtaaacttcgacaatcgcctaatatccgaaacaaataccaataataaacaacttaccacgcaaacgacgtaaaaaattccgacatacaaccgacttcgctcgacacaccgaaaccaaaaaaaaacatcaacaccgaattactcataatcgccaaacgttcaattaaaatttacgccgaaatataattacgataaatcaccacgttatacccattactacgcaactaatctaccaaattatacgt

SEQ ID NO: 26033 - DNA, 585 bp, Artificial Sequence
  chemically treated genomic DNA (Homo sapiens) CpG-island No: 26033
gggacggcggtattgcgttagttcgagatgttggggagttattcgtttaatgagtcggtcgttattgttcgggcgcgtgataaattgcgttttatgtaattgttggcgcgttagggtatcgatttgtttgttacgggtattgcgtattcgtcggatgatattagcgatttaatcgatatggtcggtggtgcgtcgttggtggttaagttggttgaaggtacgtagggaattggcgtcgtgttggcggagacgcgttaggcggcggaaagcgtgattgacgttttcgcggtttgaacgcgtatattttggtgtaggagtatattaaagaggcgtaagggtgcgatattcgttgtttggttgttggcgatgaagtggtcgttgcgattgtacggcgggcgatagagggcgattttcgttttatttgtatcgtgtcgcgcggtatcgtcgtagtgattatatattagagcgtgaatcgcgataatagcgcgcgaacgaatgttttggacgttgttgttgtggatatttttcgtgttattgtcggttcgtgtgtgatagtacgtgaatttgtggttgcggtttgagaga

SEQ ID NO: 26034 - DNA, 585 bp, Artificial Sequence
  chemically treated genomic DNA (Homo sapiens) CpG-island No: 26034
tctctcaaaccgcaaccacaaattcacgtactatcacacacgaaccgacaataacacgaaaaatatccacaacaacaacgtccaaaacattcgttcgcgcgctattatcgcgattcacgctctaatatataatcactacgacgataccgcgcgacacgatacaaataaaacgaaaatcgccctctatcgcccgccgtacaatcgcaacgaccacttcatcgccaacaaccaaacaacgaatatcgcacccttacgcctctttaatatactcctacaccaaaatatacgcgttcaaaccgcgaaaacgtcaatcacgctttccgccgcctaacgcgtctccgccaacacgacgccaattccctacgtaccttcaaccaacttaaccaccaacgacgcaccaccgaccatatcgattaaatcgctaatatcatccgacgaatacgcaatacccgtaacaaacaaatcgataccctaacgcgccaacaattacataaaacgcaatttatcacgcgcccgaacaataacgaccgactcattaaacgaataactccccaacatctcgaactaacgcaataccgccgtccc

SEQ ID NO: 26035 - DNA, 585 bp, Artificial Sequence
  chemically treated genomic DNA (Homo sapiens) CpG-island No: 26035
ttttttaagtcgtagttatagatttacgtgttattatatacggatcgataatagtacgaagaatatttataatagtaacgtttagagtattcgttcgcgcgttattatcgcgatttacgttttgatgtgtgattattgcgacgatgtcgcgcgatacgatgtaaatggaacgaaaatcgttttttatcgttcgtcgtataatcgtagcgattattttatcgttaataattagatagcggatatcgtatttttgcgtttttttgatatatttttgtattagaatatgcgcgtttagatcgcgaaagcgttaattacgtttttcgtcgtttgacgcgttttcgttagtacgacgttaattttttgcgtgtttttaattaatttgattattagcggcgtattatcgattatgtcgattaaatcgttggtattattcggcgaatgcgtaatgttcgtgataggtaggtcgatgttttgacgcgttagtagttgtatggaacgtaatttgttacgcgttcgggtaatggcgatcgatttattgagcggatagttttttagtatttcgaattggcgtagtgtcgtcgtttt

SEQ ID NO: 26036 - DNA, 585 bp, Artificial Sequence
  chemically treated genomic DNA (Homo sapiens) CpG-island No: 26036
aaaacgacgacactacgccaattcgaaatactaaaaaactatccgctcaataaatcgatcgccattacccgaacgcgtaacaaattacgttccatacaactactaacgcgtcaaaacatcgacctacctatcacgaacattacgcattcgccgaataataccaacgatttaatcgacataatcgataatacgccgctaataatcaaattaattaaaaacacgcaaaaaattaacgtcgtactaacgaaaacgcgtcaaacgacgaaaaacgtaattaacgctttcgcgatctaaacgcgcatattctaatacaaaaatatatcaaaaaaacgcaaaaatacgatatccgctatctaattattaacgataaaataatcgctacgattatacgacgaacgataaaaaacgattttcgttccatttacatcgtatcgcgcgacatcgtcgcaataatcacacatcaaaacgtaaatcgcgataataacgcgcgaacgaatactctaaacgttactattataaatattcttcgtactattatcgatccgtatataataacacgtaaatctataactacgacttaaaaaa

SEQ ID NO: 26037 - DNA, 1108 bp, Artificial Sequence
  chemically treated genomic DNA (Homo sapiens) CpG-island No: 26037
ggttagcgcgtagagtatattttttttttgttagatacgtatattatttaggcggttagtgcgatgttgggtacgtttgacgacgattaggcgttgtcgttggttgaagcgatggtcgaggttaacggcgagcgcgtaatggcgttgattaatgaagtcgttgttcgtggtatcgagtgggaagcgttgttggtggaaatgttcggtttgttgtatcgtattgcgatggtataattttcgtttgttgtatttggtaacgatatggtcgttatcgagttgcggatgcgtgaattggcgcgtattatatcgtcgacggatatttagttttattattagacgttgttgattggtcgtaaagaattatcgtatgcgtcggatcgtcgtatgggcgttgagatgacgttgttgcgcgcgttggtattttattcgcgtatgtcgttgtttgagttagaagtgttacgatagttttttgtattcgtcgcgttaacggtagtaatgacgttaatttaggtgtcgtcgtaatcgtaattagcgtcgtagtaggtatcgattgtatcgttttcggaaattattagttaggtgttggcggcgcgttagtagttgtagcgcgtgtagggagtaattaaagtaaaaaagagtgaatcggtagtcgttattcgcgcgcggtcggtgaataacgttgcgttggaaagattggtttcggttatcgatcgcgtttaggcgcgttcggtgttatcggcgttggaaaaagcgttagttaaaaaagaagcgtatcgttggaaggcgattatttcggtgatgtagtaaaaagaagtggtcgttacgtcgaacgtatgaaaaaagcgttggaatatgaaaaaacgtcggaattggcggcgaattgagcggtagaagttattgagcgcgattcgtgggcggtataggtgagttaattttcgttattaaaattggtcgaataggtggcgttaaatgtttggaaagaggagagcgataacgtagtatgtttgtatttgcgttttttttagcggtatttgaataatcgcggtgtatagtaaaaattggttgaagcgttgagtatgttaaataggttaacggttgaattgattat

SEQ ID NO: 26038 - DNA, 1108 bp, Artificial Sequence
  chemically treated genomic DNA (Homo sapiens) CpG-island No: 26038
ataatcaattcaaccgttaacctatttaacatactcaacgcttcaaccaatttttactatacaccgcgattattcaaataccgctaaaaaaaacgcaaatacaaacatactacgttatcgctctcctctttccaaacatttaacgccacctattcgaccaattttaataacgaaaattaactcacctataccgcccacgaatcgcgctcaataacttctaccgctcaattcgccgccaattccgacgttttttcatattccaacgcttttttcatacgttcgacgtaacgaccacttctttttactacatcaccgaaataatcgccttccaacgatacgcttcttttttaactaacgctttttccaacgccgataacaccgaacgcgcctaaacgcgatcgataaccgaaaccaatctttccaacgcaacgttattcaccgaccgcgcgcgaataacgactaccgattcactcttttttactttaattactccctacacgcgctacaactactaacgcgccgccaacacctaactaataatttccgaaaacgatacaatcgatacctactacgacgctaattacgattacgacgacacctaaattaacgtcattactaccgttaacgcgacgaatacaaaaaactatcgtaacacttctaactcaaacaacgacatacgcgaataaaataccaacgcgcgcaacaacgtcatctcaacgcccatacgacgatccgacgcatacgataattctttacgaccaatcaacaacgtctaataataaaactaaatatccgtcgacgatataatacgcgccaattcacgcatccgcaactcgataacgaccatatcgttaccaaatacaacaaacgaaaattataccatcgcaatacgatacaacaaaccgaacatttccaccaacaacgcttcccactcgataccacgaacaacgacttcattaatcaacgccattacgcgctcgccgttaacctcgaccatcgcttcaaccaacgacaacgcctaatcgtcgtcaaacgtacccaacatcgcactaaccgcctaaataatatacgtatctaacaaaaaaaaaatatactctacgcgctaacc

SEQ ID NO: 26039 - DNA, 1108 bp, Artificial Sequence
  chemically treated genomic DNA (Homo sapiens) CpG-island No: 26039
atagttagtttaatcgttgatttgtttaatatgtttaacgttttagttagtttttgttgtgtatcgcggttgtttaaatgtcgttgagaggagcgtaaatgtagatatattgcgttgtcgtttttttttttttaggtatttaacgttatttgttcgattagttttggtagcgaaagttggtttatttgtgtcgtttacgggtcgcgtttaatggtttttgtcgtttagttcgtcgttagtttcggcgtttttttatgttttagcgttttttttatgcgttcggcgtggcgattatttttttttgttgtattatcggagtggtcgttttttagcgatacgttttttttttggttggcgttttttttagcgtcgatggtatcggacgcgtttgaacgcgatcggtgatcgaagttagtttttttagcgtagcgttatttatcggtcgcgcgcgggtagcggttgtcggtttatttttttttgttttggttgttttttgtacgcgttgtaattgttggcgcgtcgttagtatttggttggtggttttcgggagcggtatagtcggtgtttgttgcggcgttgattgcggttgcggcggtatttgggttggcgttattattgtcgttggcgcgacgggtgtaaaggattgtcgtggtatttttggtttaggtagcggtatacgcggatggaatgttagcgcgcgtagtagcgttattttaacgtttatgcgacggttcggcgtatacggtaattttttgcgattaattaatagcgtttgatagtaaagttgaatattcgtcggcggtatggtgcgcgttagtttacgtattcgtagttcgatggcggttatgtcgttgttaagtgtagtaggcgaaagttgtattatcgtaatacgatgtaataggtcgagtatttttattagtaacgttttttattcgatattacgggtagcggttttattaattagcgttattacgcgttcgtcgttggtttcgattatcgttttaattagcgatagcgtttgatcgtcgttaagcgtatttagtatcgtattgatcgtttggatgatatacgtgtttggtaggaagaagatgtgttttacgcgttgatt

SEQ ID NO: 26040 - DNA, 1108 bp, Artificial Sequence
  chemically treated genomic DNA (Homo sapiens) CpG-island No: 26040
aatcaacgcgtaaaacacatcttcttcctaccaaacacgtatatcatccaaacgatcaatacgatactaaatacgcttaacgacgatcaaacgctatcgctaattaaaacgataatcgaaaccaacgacgaacgcgtaataacgctaattaataaaaccgctacccgtaatatcgaataaaaaacgttactaataaaaatactcgacctattacatcgtattacgataatacaactttcgcctactacacttaacaacgacataaccgccatcgaactacgaatacgtaaactaacgcgcaccataccgccgacgaatattcaactttactatcaaacgctattaattaatcgcaaaaaattaccgtatacgccgaaccgtcgcataaacgttaaaataacgctactacgcgcgctaacattccatccgcgtataccgctacctaaaccaaaaataccacgacaatcctttacacccgtcgcgccaacgacaataataacgccaacccaaataccgccgcaaccgcaatcaacgccgcaacaaacaccgactataccgctcccgaaaaccaccaaccaaatactaacgacgcgccaacaattacaacgcgtacaaaaaacaaccaaaacaaaaaaaaataaaccgacaaccgctacccgcgcgcgaccgataaataacgctacgctaaaaaaactaacttcgatcaccgatcgcgttcaaacgcgtccgataccatcgacgctaaaaaaaacgccaaccaaaaaaaaaacgtatcgctaaaaaacgaccactccgataatacaacaaaaaaaaataatcgccacgccgaacgcataaaaaaaacgctaaaacataaaaaaacgccgaaactaacgacgaactaaacgacaaaaaccattaaacgcgacccgtaaacgacacaaataaaccaactttcgctaccaaaactaatcgaacaaataacgttaaatacctaaaaaaaaaaaaacgacaacgcaatatatctacatttacgctcctctcaacgacatttaaacaaccgcgatacacaacaaaaactaactaaaacgttaaacatattaaacaaatcaacgattaaactaactat

SEQ ID NO: 26041 - DNA, 1296 bp, Artificial Sequence
  chemically treated genomic DNA (Homo sapiens) CpG-island No: 26041
atttgcgtcgtggcgataaagtgaaagtggtttttcgtcgtggcgaagtgatttcgattgttgaaacgcgcggtcgtaatcgttcgttatagggtttggtgtatatgtcgtttttcgacgtcgtatagttggttaataaattgacgttggatgcgatcgattcgttttcgaaagagacggattttaagaagtgcgcggttaaattggagaaggtgtaagttattatgtttcggttagcgaaattttaaaatggtcgtcgtcgttttttgcgcgatgtcgttcgtatagtaggcgggttggttgtcgtgggtgtggcgttggggttataatagtaaatcgtacgcgtatttggcgtgcggttgcgttcgttcggagttataaacgagaacgtttttgttagtgtttgtgtgcgttgcggttagtgtgtttaggtttgtttttacgatattttaaaattggcgacgttggtttttggtttgtcggcgggtacgttatattttgtcgtacgggatattttttgcgaaatgtgtgaggatatttcgtgcgttaaagtgtgtttaagcggtgcgttggatcgtgagattgaatcgatcgacgacgcgcggattgggttggcggtattggtggattagggaaaattgttttaattttttaggggttgcgttgcgatgtttgtatcgcgaatgttcgaaaattgatgaggttattattttggagttggagcgtaatacgcgtatcggtaagtacgttcgttttttgtcgacggtttatagcgacgtttgtatcggttgcggtaagtgcgaaaaagtatgcgtgttggaataatcggtaattaaggtgttatcgttgttattggcgaaaggggagttaggttattattatcgtttcggttggttggaggggaataatggtaaatcgtaaacgtgacgtcgggcgcgaggcgttggagaaaaaaggttggtggcgtagttatcgttggttggtgttacgtcgtttttgttagtttttcgtgttggggatgtttttgagcggtttatggtttggtgtgtggattttgtacggtaattatagtagtagtttgttattcgatatcgtttcgttgatcgattcgttgatgacgttgtaaagttttgttagtggttatttgtttgttacggtggcgttgatcggtgcggtgattattatcgtgttttacgttttggcgggaaagcgattattttgtagttgttacgtttggaaatgtagatgcgcggtatcggtgattatattatttagatcgaaaattattttttgtag

SEQ ID NO: 26042 - DNA, 1296 bp, Artificial Sequence
  chemically treated genomic DNA (Homo sapiens) CpG-island No: 26042
ctacaaaaaataattttcgatctaaataatataatcaccgataccgcgcatctacatttccaaacgtaacaactacaaaataatcgctttcccgccaaaacgtaaaacacgataataatcaccgcaccgatcaacgccaccgtaacaaacaaataaccactaacaaaactttacaacgtcatcaacgaatcgatcaacgaaacgatatcgaataacaaactactactataattaccgtacaaaatccacacaccaaaccataaaccgctcaaaaacatccccaacacgaaaaactaacaaaaacgacgtaacaccaaccaacgataactacgccaccaaccttttttctccaacgcctcgcgcccgacgtcacgtttacgatttaccattattcccctccaaccaaccgaaacgataataataacctaactcccctttcgccaataacaacgataacaccttaattaccgattattccaacacgcatactttttcgcacttaccgcaaccgatacaaacgtcgctataaaccgtcgacaaaaaacgaacgtacttaccgatacgcgtattacgctccaactccaaaataataacctcatcaattttcgaacattcgcgatacaaacatcgcaacgcaacccctaaaaaattaaaacaattttccctaatccaccaataccgccaacccaatccgcgcgtcgtcgatcgattcaatctcacgatccaacgcaccgcttaaacacactttaacgcacgaaatatcctcacacatttcgcaaaaaatatcccgtacgacaaaatataacgtacccgccgacaaaccaaaaaccaacgtcgccaattttaaaatatcgtaaaaacaaacctaaacacactaaccgcaacgcacacaaacactaacaaaaacgttctcgtttataactccgaacgaacgcaaccgcacgccaaatacgcgtacgatttactattataaccccaacgccacacccacgacaaccaacccgcctactatacgaacgacatcgcgcaaaaaacgacgacgaccattttaaaatttcgctaaccgaaacataataacttacaccttctccaatttaaccgcgcacttcttaaaatccgtctctttcgaaaacgaatcgatcgcatccaacgtcaatttattaaccaactatacgacgtcgaaaaacgacatatacaccaaaccctataacgaacgattacgaccgcgcgtttcaacaatcgaaatcacttcgccacgacgaaaaaccactttcactttatcgccacgacgcaaat

SEQ ID NO: 26043 - DNA, 1296 bp, Artificial Sequence
  chemically treated genomic DNA (Homo sapiens) CpG-island No: 26043
ttgtaaggggtaattttcgatttggatggtgtaattatcgatatcgcgtatttgtatttttaggcgtggtagttgtaaaataatcgttttttcgttaggacgtagagtacggtgataattatcgtatcggttaacgttatcgtggtaggtagatgattattggtaagattttgtagcgttattagcggatcggttagcggaacggtgtcgaataataggttattgttgtagttgtcgtgtaagatttatatattaaattatggatcgtttaaaaatatttttagtacgaagaattgataaaggcgacgtaatattagttaacggtgattgcgttattagttttttttttttagcgtttcgcgttcggcgttacgtttacgatttgttattgtttttttttagttagtcgaagcggtaatggtgatttaatttttttttcgttagtgatagcggtaatattttgattgtcggttgttttagtacgtatattttttcgtatttatcgtaatcggtataggcgtcgttgtgaatcgtcggtagaaagcgggcgtgtttatcggtacgcgtgttgcgttttagttttagggtgatggttttattaattttcgggtattcgcgatataaatatcgtagcgtagtttttgaaaagttgagatagttttttttggtttattagtatcgttagtttaattcgcgcgtcgtcgatcgatttaattttacgatttagcgtatcgtttgggtatattttggcgtacggaatgtttttatatatttcgtaaggaatatttcgtgcgataaaatatggcgtgttcgtcgatagattagaggttagcgtcgttagttttaaggtgtcgtaagggtaagtttgaatatattgatcgtaacgtatataggtattggtaaaggcgttttcgtttatggtttcgggcgggcgtaatcgtacgttagatgcgcgtgcggtttgttgttgtaattttagcgttatatttacggtagttagttcgtttgttgtgcgaacgatatcgcgtagaaagcggcggcgattattttgaggtttcgttgatcgggatataatggtttatattttttttagtttgatcgcgtattttttgaagttcgtttttttcgagagcggatcggtcgtatttagcgttagtttgttaattaattgtgcggcgtcgaagaacggtatgtatattaggttttgtggcggacggttacgatcgcgcgttttaataatcgagattatttcgttacggcgagaaattatttttattttgtcgttacggcgtagat

SEQ ID NO: 26044 - DNA, 1296 bp, Artificial Sequence
  chemically treated genomic DNA (Homo sapiens) CpG-island No: 26044
atctacgccgtaacgacaaaataaaaataatttctcgccgtaacgaaataatctcgattattaaaacgcgcgatcgtaaccgtccgccacaaaacctaatatacataccgttcttcgacgccgcacaattaattaacaaactaacgctaaatacgaccgatccgctctcgaaaaaaacgaacttcaaaaaatacgcgatcaaactaaaaaaaatataaaccattatatcccgatcaacgaaacctcaaaataatcgccgccgctttctacgcgatatcgttcgcacaacaaacgaactaactaccgtaaatataacgctaaaattacaacaacaaaccgcacgcgcatctaacgtacgattacgcccgcccgaaaccataaacgaaaacgcctttaccaatacctatatacgttacgatcaatatattcaaacttacccttacgacaccttaaaactaacgacgctaacctctaatctatcgacgaacacgccatattttatcgcacgaaatattccttacgaaatatataaaaacattccgtacgccaaaatatacccaaacgatacgctaaatcgtaaaattaaatcgatcgacgacgcgcgaattaaactaacgatactaataaaccaaaaaaaactatctcaacttttcaaaaactacgctacgatatttatatcgcgaatacccgaaaattaataaaaccatcaccctaaaactaaaacgcaacacgcgtaccgataaacacgcccgctttctaccgacgattcacaacgacgcctataccgattacgataaatacgaaaaaatatacgtactaaaacaaccgacaatcaaaatattaccgctatcactaacgaaaaaaaaattaaatcaccattaccgcttcgactaactaaaaaaaaacaataacaaatcgtaaacgtaacgccgaacgcgaaacgctaaaaaaaaaaaactaataacgcaatcaccgttaactaatattacgtcgcctttatcaattcttcgtactaaaaatatttttaaacgatccataatttaatatataaatcttacacgacaactacaacaataacctattattcgacaccgttccgctaaccgatccgctaataacgctacaaaatcttaccaataatcatctacctaccacgataacgttaaccgatacgataattatcaccgtactctacgtcctaacgaaaaaacgattattttacaactaccacgcctaaaaatacaaatacgcgatatcgataattacaccatccaaatcgaaaattaccccttacaa

SEQ ID NO: 26045 - DNA, 816 bp, Artificial Sequence
  chemically treated genomic DNA (Homo sapiens) CpG-island No: 26045
  unsure (682)
taggcgttggaaagtgcggttaataacgcgttaatttggtttgttacgttttcggttgaacgcgtagtattttgtatcgcgttgtcgtgttgatggaaagttagatgtagtaattgattggtattttggtgcgtgaggtcggaaaaatttttagtaacgttattgtcgaagtgcgcgaagggtcgattttttttattattacgtcggataggtgcgggatgatttcgttaacgaaatttatcgtttattagggtttgtggtgtgtattagttcgtggaatttttcgttggttatttttatcgggtagatcgtcgtcgtattggcggtaggtaatagcgtgttggtaaaatcggtagaataaacgtcgttgattgtcgcgtaagggatcgttattttgttggaagcgggtgtatcgttaggcgtggtgtaattgttgttaggtcggggtgaaatcgtgggcgcgtaattgacgggtgatgatcgcgtgcgcggggtgatgtttatcggtttaatcgaagtcgttacgttattgtagcgtaatatcgttagtcgtttggacgtttagggtcgttttatttcgtttatcgttgaaatcggcggtatgaacgcgatgattgtcgattttttagtattgatcgaataggtcgtcgtggatgtaattggtttcggcgttcgagagttncggttagcgttgtttcgcgttgcgcgttttgtgtttgtaagatgagattgtcgattatacgttgaaaatgttgcgcgtgtttttaatatgaataaatcgggtgcgttgcgtcgtgtggtaatgggtgaaaaaga

SEQ ID NO: 26046 - DNA, 816 bp, Artificial Sequence
  chemically treated genomic DNA (Homo sapiens) CpG-island No: 26046
  unsure (135)
tctttttcacccattaccacacgacgcaacgcacccgatttattcatattaaaaacacgcgcaacattttcaacgtataatcgacaatctcatcttacaaacacaaaacgcgcaacgcgaaacaacgctaaccgnaactctcgaacgccgaaaccaattacatccacgacgacctattcgatcaatactaaaaaatcgacaatcatcgcgttcataccgccgatttcaacgataaacgaaataaaacgaccctaaacgtccaaacgactaacgatattacgctacaataacgtaacgacttcgattaaaccgataaacatcaccccgcgcacgcgatcatcacccgtcaattacgcgcccacgatttcaccccgacctaacaacaattacaccacgcctaacgatacacccgcttccaacaaaataacgatcccttacgcgacaatcaacgacgtttattctaccgattttaccaacacgctattacctaccgccaatacgacgacgatctacccgataaaaataaccaacgaaaaattccacgaactaatacacaccacaaaccctaataaacgataaatttcgttaacgaaatcatcccgcacctatccgacgtaataataaaaaaaatcgacccttcgcgcacttcgacaataacgttactaaaaatttttccgacctcacgcaccaaaataccaatcaattactacatctaactttccatcaacacgacaacgcgatacaaaatactacgcgttcaaccgaaaacgtaacaaaccaaattaacgcgttattaaccgcactttccaacgccta

SEQ ID NO: 26047 - DNA, 816 bp, Artificial Sequence
  chemically treated genomic DNA (Homo sapiens) CpG-island No: 26047
  unsure (135)
ttttttttatttattattatacggcgtagcgtattcggtttgtttatattgaaaatacgcgtagtatttttaacgtgtggtcggtaattttattttgtaggtatagaacgcgtagcgcgaaataacgttgatcgnaattttcgaacgtcgaggttagttatatttacgacgatttgttcggttagtgttgaagaatcgataattatcgcgtttatgtcgtcggttttagcgatgagcggaatagggcgattttgagcgtttaggcggttggcgatattgcgttgtagtaacgtagcgatttcggttgaatcggtaaatattatttcgcgtacgcgattattattcgttagttgcgcgtttacggttttatttcgatttggtagtaattgtattacgtttggcggtatattcgtttttagtaaaatggcgattttttgcgcggtaattagcggcgtttgttttgtcggttttgttagtacgttgttatttgtcgttagtgcggcggcgatttgttcggtgaaaatagttagcgggaagttttacggattgatatatattataggttttaatggacggtgggtttcgttagcgaaattatttcgtatttgttcggcgtagtagtggagaaaatcgatttttcgcgtatttcggtaatggcgttattgaaggttttttcggttttacgtattagaatattaattagttgttgtatttggttttttattagtacggtagcgcggtgtaaaatgttgcgcgtttagtcggaggcgtggtaaattagattggcgcgttattaatcgtattttttagcgtttg

SEQ ID NO: 26048 - DNA, 816 bp, Artificial Sequence
  chemically treated genomic DNA (Homo sapiens) CpG-island No: 26048
  unsure (682)
caaacgctaaaaaatacgattaataacgcgccaatctaatttaccacgcctccgactaaacgcgcaacattttacaccgcgctaccgtactaataaaaaaccaaatacaacaactaattaatattctaatacgtaaaaccgaaaaaaccttcaataacgccattaccgaaatacgcgaaaaatcgattttctccactactacgccgaacaaatacgaaataatttcgctaacgaaacccaccgtccattaaaacctataatatatatcaatccgtaaaacttcccgctaactattttcaccgaacaaatcgccgccgcactaacgacaaataacaacgtactaacaaaaccgacaaaacaaacgccgctaattaccgcgcaaaaaatcgccattttactaaaaacgaatataccgccaaacgtaatacaattactaccaaatcgaaataaaaccgtaaacgcgcaactaacgaataataatcgcgtacgcgaaataatatttaccgattcaaccgaaatcgctacgttactacaacgcaatatcgccaaccgcctaaacgctcaaaatcgccctattccgctcatcgctaaaaccgacgacataaacgcgataattatcgattcttcaacactaaccgaacaaatcgtcgtaaatataactaacctcgacgttcgaaaattncgatcaacgttatttcgcgctacgcgttctatacctacaaaataaaattaccgaccacacgttaaaaatactacgcgtattttcaatataaacaaaccgaatacgctacgccgtataataataaataaaaaaaa

SEQ ID NO: 26049 - DNA, 1576 bp, Artificial Sequence
  chemically treated genomic DNA (Homo sapiens) CpG-island No: 26049
  unsure (1497)
agtcgagcgtggtcgttcgtagttcggttatattgtcgatgacgttcgttttttttttggttttgttttgatcgcgatgattacgttaattattaatagcgcgatatcgtttagcgttattagcggcggtatttgttggcggagtaaaaaggtgtatagtaaatttgttagcgtttcgaaaataattagcggttcgagaattattgtcggtaatagttggttggcgacgttttagtagagtgcgttaatttatgagtaaagtacggttatcgtaattattagattaataaatattagcggacgggggttaaagggtagggagaagttcggcgtttgcgtatttagttagtaataagcgacgagatagtcgataagtgaaatcggtagtgtgattagcgtttgcgttgttgtttatattatcggatgtttgtcgggattttttcgtagttagcgggcgttgcgtagggtatattacgtttagtagattacggaaattaacgttagtacgatgttagaggtataacgtgtttagttaaaatcggggagttcgtggtttaatttagtaatatttatatacgttaggtcgatgttaatataaattagtgttggggcgagttttttttacgcgagtttgtcgtcgcgttggttataaagtagattggtaaagataggaatgattatcggtagggtgtcgataattatcgtggaaataggcgcgttagtacgttgaatggtattggtaaggtagaagtaatagatgaggttgtttattatagtgagtattaaggcggtaagttagtcgcgacgcgttaattgacgtagacgtacgcgttttagttaggtaatgggtagcgtaattaattttaacgttagataacgttttatcgattgtaatatttgcgtattttatttacgatgataaatatcggggtcggatcggtggcgtatcgttatacgggtcgatcggaaatttgttatcgttacgatagcgacgggcgggtgatagaatagttaaattcggtaggtttaagttatacgtattagtatgagaaggatcgtattattattatcgatagtttgaatcgtcgtgaagttttgtatacgtagggtgaaggcgggttgaagcgggtggtgaaaaaggaatacgcggacggtagcgttacgtagagttagtttgacgcggtgggtaggtttagggtatagacggatgtcgtagtaggataatagaatatagttcggatgtggtgacgggttttattacgcgtattattacgtcggatggtagggtatcggcgttttattataattattatagttagttaacgttagttatcgggtttgacgggttggaaatacgtcgggaatatgatgaatggggtcgtttgatttaggaaattgtttttgacggcgatattattcgttatcgttatgataatttatatagtgatttattttgcgtaacggaagatgttatcggtagtcggaaaattatgacgntgagtcgttacggttagttgttgagttttattgattgtttcggttatgtaatcgttatgattatgatcgtttttgttat

SEQ ID NO: 26050 - DNA, 1576 bp, Artificial Sequence
  chemically treated genomic DNA (Homo sapiens) CpG-island No: 26050
  unsure (80)
ataacaaaaacgatcataatcataacgattacataaccgaaacaatcaataaaactcaacaactaaccgtaacgactcancgtcataattttccgactaccgataacatcttccgttacgcaaaataaatcactatataaattatcataacgataacgaataatatcgccgtcaaaaacaatttcctaaatcaaacgaccccattcatcatattcccgacgtatttccaacccgtcaaacccgataactaacgttaactaactataataattataataaaacgccgataccctaccatccgacgtaataatacgcgtaataaaacccgtcaccacatccgaactatattctattatcctactacgacatccgtctataccctaaacctacccaccgcgtcaaactaactctacgtaacgctaccgtccgcgtattcctttttcaccacccgcttcaacccgccttcaccctacgtatacaaaacttcacgacgattcaaactatcgataataataatacgatccttctcatactaatacgtataacttaaacctaccgaatttaactattctatcacccgcccgtcgctatcgtaacgataacaaatttccgatcgacccgtataacgatacgccaccgatccgaccccgatatttatcatcgtaaataaaatacgcaaatattacaatcgataaaacgttatctaacgttaaaattaattacgctacccattacctaactaaaacgcgtacgtctacgtcaattaacgcgtcgcgactaacttaccgccttaatactcactataataaacaacctcatctattacttctaccttaccaataccattcaacgtactaacgcgcctatttccacgataattatcgacaccctaccgataatcattcctatctttaccaatctactttataaccaacgcgacgacaaactcgcgtaaaaaaaactcgccccaacactaatttatattaacatcgacctaacgtatataaatattactaaattaaaccacgaactccccgattttaactaaacacgttatacctctaacatcgtactaacgttaatttccgtaatctactaaacgtaatataccctacgcaacgcccgctaactacgaaaaaatcccgacaaacatccgataatataaacaacaacgcaaacgctaatcacactaccgatttcacttatcgactatctcgtcgcttattactaactaaatacgcaaacgccgaacttctccctaccctttaacccccgtccgctaatatttattaatctaataattacgataaccgtactttactcataaattaacgcactctactaaaacgtcgccaaccaactattaccgacaataattctcgaaccgctaattattttcgaaacgctaacaaatttactatacacctttttactccgccaacaaataccgccgctaataacgctaaacgatatcgcgctattaataattaacgtaatcatcgcgatcaaaacaaaaccaaaaaaaaaacgaacgtcatcgacaatataaccgaactacgaacgaccacgctcgact

SEQ ID NO: 26051 - DNA, 1576 bp, Artificial Sequence
  chemically treated genomic DNA (Homo sapiens) CpG-island No: 26051
  unsure (80)
gtgataaaaacggttatggttatagcggttatataatcggaatagttagtgaagtttagtaattgatcgtaacggtttancgttatggtttttcggttgtcggtggtatttttcgttgcgtagggtaagttattgtgtggattattataacggtagcgggtgatatcgtcgttaggggtagttttttgaattagacggttttatttattatattttcggcgtatttttagttcgttaggttcggtggttgacgttaattggttgtggtggttatagtaaaacgtcgatgttttgttattcggcgtggtgatgcgcgtgatgaggttcgttattatattcggattgtattttgttgttttgttgcggtattcgtttgtgttttgagtttgtttatcgcgttaaattgattttgcgtgacgttgtcgttcgcgtgttttttttttattattcgttttagttcgtttttattttgcgtgtgtaggattttacggcggtttaggttgtcggtgatggtgatgcggttttttttatattgatacgtgtaatttaagtttgtcgggtttagttgttttgttattcgttcgtcgttgtcgtaacggtaatagattttcggtcggttcgtgtgacggtgcgttatcgattcggtttcggtatttattatcgtaagtaaagtgcgtagatgttgtagtcgatggggcgttatttggcgttagggttaattgcgttgtttattgtttggttgggacgcgtgcgtttgcgttagttggcgcgtcgcgattggtttatcgttttgatgtttattatgatgggtaattttatttattatttttgttttgttagtgttatttaacgtattggcgcgtttgtttttacgatgattatcggtattttgtcggtggttatttttgtttttgttaatttgttttatagttagcgcgacggtaaattcgcgtggggaaaattcgttttagtattgatttgtattggtatcggtttggcgtgtgtgaatattgttgagttaaattacggatttttcgattttgattgggtacgttatatttttggtatcgtgttggcgttagttttcgtggtttgttgggcgtggtatgttttgcgtaacgttcgttggttgcgggaaaatttcgataaatattcgatgatgtgggtaatagcgtaggcgttggttatattgtcggttttatttatcggttatttcgtcgtttgttattggttgaatacgtaaacgtcggatttttttttattttttggttttcgttcgttggtgtttattagtttgatggttgcgatagtcgtgttttgtttatgggttggcgtattttgttggaacgtcgttagttagttattatcgatagtgattttcgggtcgttgattgttttcgaaacgttggtaggtttgttgtatatttttttatttcgttagtaaatgtcgtcgttaatgacgttgagcggtatcgcgttgttagtgattggcgtggttatcgcggttagagtaaaattagaaaaaaaacgggcgttatcggtaatatggtcgagttgcgggcgattacgttcgatt

SEQ ID NO: 26052 - DNA, 1576 bp, Artificial Sequence
  chemically treated genomic DNA (Homo sapiens) CpG-island No: 26052
  unsure (1497)
aatcgaacgtaatcgcccgcaactcgaccatattaccgataacgcccgttttttttctaattttactctaaccgcgataaccacgccaatcactaacaacgcgataccgctcaacgtcattaacgacgacatttactaacgaaataaaaaaatatacaacaaacctaccaacgtttcgaaaacaatcaacgacccgaaaatcactatcgataataactaactaacgacgttccaacaaaatacgccaacccataaacaaaacacgactatcgcaaccatcaaactaataaacaccaacgaacgaaaaccaaaaaataaaaaaaaatccgacgtttacgtattcaaccaataacaaacgacgaaataaccgataaataaaaccgacaatataaccaacgcctacgctattacccacatcatcgaatatttatcgaaattttcccgcaaccaacgaacgttacgcaaaacataccacgcccaacaaaccacgaaaactaacgccaacacgataccaaaaatataacgtacccaatcaaaatcgaaaaatccgtaatttaactcaacaatattcacacacgccaaaccgataccaatacaaatcaatactaaaacgaattttccccacgcgaatttaccgtcgcgctaactataaaacaaattaacaaaaacaaaaataaccaccgacaaaataccgataatcatcgtaaaaacaaacgcgccaatacgttaaataacactaacaaaacaaaaataataaataaaattacccatcataataaacatcaaaacgataaaccaatcgcgacgcgccaactaacgcaaacgcacgcgtcccaaccaaacaataaacaacgcaattaaccctaacgccaaataacgccccatcgactacaacatctacgcactttacttacgataataaataccgaaaccgaatcgataacgcaccgtcacacgaaccgaccgaaaatctattaccgttacgacaacgacgaacgaataacaaaacaactaaacccgacaaacttaaattacacgtatcaatataaaaaaaaccgcatcaccatcaccgacaacctaaaccgccgtaaaatcctacacacgcaaaataaaaacgaactaaaacgaataataaaaaaaaaacacgcgaacgacaacgtcacgcaaaatcaatttaacgcgataaacaaactcaaaacacaaacgaataccgcaacaaaacaacaaaatacaatccgaatataataacgaacctcatcacgcgcatcaccacgccgaataacaaaacatcgacgttttactataaccaccacaaccaattaacgtcaaccaccgaacctaacgaactaaaaatacgccgaaaatataataaataaaaccgtctaattcaaaaaactacccctaacgacgatatcacccgctaccgttataataatccacacaataacttaccctacgcaacgaaaaataccaccgacaaccgaaaaaccataacgntaaaccgttacgatcaattactaaacttcactaactattccgattatataaccgctataaccataaccgtttttatcac

SEQ ID NO: 26053 - DNA, 665 bp, Artificial Sequence
  chemically treated genomic DNA (Homo sapiens) CpG-island No: 26053
  unsure (539)
atcggtagatggcgcgatcgttgtcgtattggttatttatattggcgaacgggaattgacgttggaaagttagtgcggtgtttggcgtgtaattttttttagtatttgtttatcgttattattgaattttaattgacgtagtatcggaataaacggacgttcgtgcggcgggattacggtttgggggaatttcgtatcggtaagggtttttatttttagtaagttttgtttcgtcgttagtcgcgggttagatatttgaaaacggtgacgggtagaggttttattattaaacgataggttcgcgtaatgatgcgttagtttattagttcgtcgaaattgattttttaggcgtttatcgtattattttatcggaaaaatttagttcggggttaagcgtggcgtgtaatgttaacgagttcgattttaggttcgttatcggttatgcgtagtaatttgcggtatattaggcgttggggcgatggttattggaagtattaatgtcgtcgaatgcgttggtattggtagtatcggtaagcggnttgttttagtaaatattttcgttcgcgtttttagtaatagttgatcgaatttttttcgttcgggggtaattagattgtaagagagttcgaacgagtgtaatttgttatcgaatcgttttatcgaaa

SEQ ID NO: 26054 - DNA, 665 bp, Artificial Sequence
  chemically treated genomic DNA (Homo sapiens) CpG-island No: 26054
  unsure (127)
tttcgataaaacgattcgataacaaattacactcgttcgaactctcttacaatctaattacccccgaacgaaaaaaattcgatcaactattactaaaaacgcgaacgaaaatatttactaaaacaanccgcttaccgatactaccaataccaacgcattcgacgacattaatacttccaataaccatcgccccaacgcctaatataccgcaaattactacgcataaccgataacgaacctaaaatcgaactcgttaacattacacgccacgcttaaccccgaactaaatttttccgataaaataatacgataaacgcctaaaaaatcaatttcgacgaactaataaactaacgcatcattacgcgaacctatcgtttaataataaaacctctacccgtcaccgttttcaaatatctaacccgcgactaacgacgaaacaaaacttactaaaaataaaaacccttaccgatacgaaattcccccaaaccgtaatcccgccgcacgaacgtccgtttattccgatactacgtcaattaaaattcaataataacgataaacaaatactaaaaaaaattacacgccaaacaccgcactaactttccaacgtcaattcccgttcgccaatataaataaccaatacgacaacgatcgcgccatctaccgat

SEQ ID NO: 26055 - DNA, 665 bp, Artificial Sequence
  chemically treated genomic DNA (Homo sapiens) CpG-island No: 26055
  unsure (127)
tttcgatgaagcgattcgatggtagattatattcgttcggatttttttgtagtttggttattttcgagcgggaaaagttcgattaattgttgttggaggcgcgggcggggatgtttattggaataantcgtttatcggtgttgttagtattagcgtattcggcggtattggtgtttttagtaattatcgttttagcgtttggtatgtcgtagattattgcgtatggtcgatggcgagtttggagtcggattcgttaatattgtacgttacgtttaatttcgggttggattttttcgatgaggtggtgcgatgaacgtttgggaagttaatttcgacgggttggtaggttgacgtattattacgcgggtttgtcgtttggtaatgaagtttttattcgttatcgtttttaggtgtttaattcgcgattggcggcgaagtagggtttattgaaaatgaaagtttttgtcgatgcgggatttttttaggtcgtgatttcgtcgtacgagcgttcgtttatttcggtgttgcgttagttgggatttagtggtagcgatgagtaggtattggaaaaagttgtacgttaggtatcgtattggttttttagcgttagttttcgttcgttaatgtgggtagttaatgcggtaacgatcgcgttatttgtcgat

SEQ ID NO: 26056 - DNA, 665 bp, Artificial Sequence
  chemically treated genomic DNA (Homo sapiens) CpG-island No: 26056
  unsure (539)
atcgacaaataacgcgatcgttaccgcattaactacccacattaacgaacgaaaactaacgctaaaaaaccaatacgatacctaacgtacaactttttccaatacctactcatcgctaccactaaatcccaactaacgcaacaccgaaataaacgaacgctcgtacgacgaaatcacgacctaaaaaaatcccgcatcgacaaaaactttcattttcaataaaccctacttcgccgccaatcgcgaattaaacacctaaaaacgataacgaataaaaacttcattaccaaacgacaaacccgcgtaataatacgtcaacctaccaacccgtcgaaattaacttcccaaacgttcatcgcaccacctcatcgaaaaaatccaacccgaaattaaacgtaacgtacaatattaacgaatccgactccaaactcgccatcgaccatacgcaataatctacgacataccaaacgctaaaacgataattactaaaaacaccaataccgccgaatacgctaatactaacaacaccgataaacganttattccaataaacatccccgcccgcgcctccaacaacaattaatcgaacttttcccgctcgaaaataaccaaactacaaaaaaatccgaacgaatataatctaccatcgaatcgcttcatcgaaa

SEQ ID NO: 26057 - DNA, 500 bp, Artificial Sequence
  chemically treated genomic DNA (Homo sapiens) CpG-island No: 26057
tgttcggtcgtttatgtataaaaaacgtaaagtgcgtcgggtacgtttttatcggatgttcgtaatgagaaatagtcgttttatggtgagtattaggtagggattttgacgttataataggtcgtaatgatgttggtggcgtttgatgtgtttgttagcgataaagtcgattttgagcggttgtttcgtttgttgatttagcgttttgtttttttgatttagggcggatagtattagaaacgttaaattagcgttttgttatattcgatttcggtatttttggcggttatattgcgttcgataattttattattacgtttatcggtgggtatttattgtttgatgagcgtttttgttttgcgtatagatgttagaaagttgtagaagatgacgcgtttttttacgattcgtttgatgcggcgttatgttatggtgatgtgttgttatagaattgcgttaatatttaggatacggttatttagcggtttgcgatattatta

SEQ ID NO: 26058 - DNA, 500 bp, Artificial Sequence
  chemically treated genomic DNA (Homo sapiens) CpG-island No: 26058
taataatatcgcaaaccgctaaataaccgtatcctaaatattaacgcaattctataacaacacatcaccataacataacgccgcatcaaacgaatcgtaaaaaaacgcgtcatcttctacaactttctaacatctatacgcaaaacaaaaacgctcatcaaacaataaatacccaccgataaacgtaataataaaattatcgaacgcaatataaccgccaaaaataccgaaatcgaatataacaaaacgctaatttaacgtttctaatactatccgccctaaatcaaaaaaacaaaacgctaaatcaacaaacgaaacaaccgctcaaaatcgactttatcgctaacaaacacatcaaacgccaccaacatcattacgacctattataacgtcaaaatccctacctaatactcaccataaaacgactatttctcattacgaacatccgataaaaacgtacccgacgcactttacgttttttatacataaacgaccgaaca

SEQ ID NO: 26059 - DNA, 500 bp, Artificial Sequence
  chemically treated genomic DNA (Homo sapiens) CpG-island No: 26059
tgatgatatcgtaagtcgttggataatcgtgttttaggtgttggcgtaattttgtagtaatatattattatgatataacgtcgtattaagcgagtcgtggggaaacgcgttattttttgtagttttttggtatttgtgcgtaaggtaaaagcgtttattaaataatgagtgtttatcgataaacgtgatggtgagattatcgggcgtaatgtagtcgttaagaatgtcggaatcgagtgtagtagggcgttgatttggcgtttttggtgttgttcgttttgagttagaaaagtaaaacgttgagttaataagcgaaataatcgtttaagatcggttttatcgttggtaagtatattaaacgttattagtattattgcggtttgttgtggcgttaggatttttgtttgatgtttattataaaacggttgttttttattgcgagtattcggtgaaagcgtattcggcgtattttgcgttttttgtgtatgagcgatcggata

SEQ ID NO: 26060 - DNA, 500 bp, Artificial Sequence
  chemically treated genomic DNA (Homo sapiens) CpG-island No: 26060
tatccgatcgctcatacacaaaaaacgcaaaatacgccgaatacgctttcaccgaatactcgcaataaaaaacaaccgttttataataaacatcaaacaaaaatcctaacgccacaacaaaccgcaataatactaataacgtttaatatacttaccaacgataaaaccgatcttaaacgattatttcgcttattaactcaacgttttacttttctaactcaaaacgaacaacaccaaaaacgccaaatcaacgccctactacactcgattccgacattcttaacgactacattacgcccgataatctcaccatcacgtttatcgataaacactcattatttaataaacgcttttaccttacgcacaaataccaaaaaactacaaaaaataacgcgtttccccacgactcgcttaatacgacgttatatcataataatatattactacaaaattacgccaacacctaaaacacgattatccaacgacttacgatatcatca

SEQ ID NO: 26061 - DNA, 707 bp, Artificial Sequence
  chemically treated genomic DNA (Homo sapiens) CpG-island No: 26061
acgttggttttagaaaattcggatgaagtcgggcgttatagtatggacgttgagtacggttagtatagcgttattttgttggtggaaggattttcgtcgttatatgtcgggattattatcgtgtatgaagatttttaattcggtacgttgaatgattttttcggtgttatgacggaggatgatgttcgttcggaggtattgcgtcgttttgaattgatggtggaagaggtggcgcgtaacgcgttcgcggtggtatagaatacggtagtcgcgaagaagttagttagtgatgttagtatattagttcgtgaggcggtaatttatgcggttgatgttgcggatttagtacgcgtagttagtacgttagtcggataggtcgcggtcgtcggtttagttagcgttttttagcgtaggaacggtattaataaaggttattgaagtattaaaaagtgttgtcgttgtagagtttttaaaaagcgcggcggcgattattgcgggttcggcgaaaacgttagaaacgaatgttttagcgttattataattagtagttatatttggatttaacgcgattacgaaggtattagaaatttcgaatttcgttcgggattcgggggtttaaaaagatagcggtaaattattagaaacggacgtattttttaatttttagtaagtgggattttttcgggtacgggcgtaagaaatttcgt

SEQ ID NO: 26062 - DNA, 707 bp, Artificial Sequence
  chemically treated genomic DNA (Homo sapiens) CpG-island No: 26062
acgaaatttcttacgcccgtacccgaaaaaatcccacttactaaaaattaaaaaatacgtccgtttctaataatttaccgctatctttttaaacccccgaatcccgaacgaaattcgaaatttctaataccttcgtaatcgcgttaaatccaaatataactactaattataataacgctaaaacattcgtttctaacgttttcgccgaacccgcaataatcgccgccgcgctttttaaaaactctacaacgacaacactttttaatacttcaataacctttattaataccgttcctacgctaaaaaacgctaactaaaccgacgaccgcgacctatccgactaacgtactaactacgcgtactaaatccgcaacatcaaccgcataaattaccgcctcacgaactaatatactaacatcactaactaacttcttcgcgactaccgtattctataccaccgcgaacgcgttacgcgccacctcttccaccatcaattcaaaacgacgcaatacctccgaacgaacatcatcctccgtcataacaccgaaaaaatcattcaacgtaccgaattaaaaatcttcatacacgataataatcccgacatataacgacgaaaatccttccaccaacaaaataacgctatactaaccgtactcaacgtccatactataacgcccgacttcatccgaattttctaaaaccaacgt

SEQ ID NO: 26063 - DNA, 707 bp, Artificial Sequence
  chemically treated genomic DNA (Homo sapiens) CpG-island No: 26063
acgaaattttttgcgttcgtgttcgaggaagttttatttattagggattgaaagatgcgttcgtttttgatgatttgtcgttgtttttttaggttttcgaatttcgggcggagttcgaagtttttgatgttttcgtggtcgcgttggatttagatgtggttgttgattgtagtgacgttaaagtattcgtttttgacgttttcgtcggattcgtaatggtcgtcgtcgcgttttttgaggattttgtagcggtagtattttttgatgttttagtggtttttgttgatgtcgtttttgcgttggaagacgttgattgagtcgacgatcgcggtttgttcggttgacgtgttggttgcgcgtgttgagttcgtagtattagtcgtatgggttgtcgttttacgggttgatgtgttggtattattggttgattttttcgcggttgtcgtgttttgtgttatcgcggacgcgttacgcgttattttttttattattagtttaaaacggcgtagtgttttcggacgggtattatttttcgttatggtatcgagaaaattatttagcgtatcgggttgagaatttttatatacggtaatggtttcggtatgtgacggcgggaatttttttattaatagaataacgttgtattgatcgtatttaacgtttatgttgtaacgttcggttttattcggattttttgaggttagcgt

SEQ ID NO: 26064 - DNA, 707 bp, Artificial Sequence
  chemically treated genomic DNA (Homo sapiens) CpG-island No: 26064
acgctaacctcaaaaaatccgaataaaaccgaacgttacaacataaacgttaaatacgatcaatacaacgttattctattaataaaaaaattcccgccgtcacataccgaaaccattaccgtatataaaaattctcaacccgatacgctaaataattttctcgataccataacgaaaaataatacccgtccgaaaacactacgccgttttaaactaataataaaaaaaataacgcgtaacgcgtccgcgataacacaaaacacgacaaccgcgaaaaaatcaaccaataataccaacacatcaacccgtaaaacgacaacccatacgactaatactacgaactcaacacgcgcaaccaacacgtcaaccgaacaaaccgcgatcgtcgactcaatcaacgtcttccaacgcaaaaacgacatcaacaaaaaccactaaaacatcaaaaaatactaccgctacaaaatcctcaaaaaacgcgacgacgaccattacgaatccgacgaaaacgtcaaaaacgaatactttaacgtcactacaatcaacaaccacatctaaatccaacgcgaccacgaaaacatcaaaaacttcgaactccgcccgaaattcgaaaacctaaaaaaacaacgacaaatcatcaaaaacgaacgcatctttcaatccctaataaataaaacttcctcgaacacgaacgcaaaaaatttcgt

SEQ ID NO: 26065 - DNA, 541 bp, Artificial Sequence
  chemically treated genomic DNA (Homo sapiens) CpG-island No: 26065
gttttcgtcgttttgataacggtcgattagtatttcgtttaggcgggattttagtttttgcggcgtttgttgttagcgtacgaaacgggtcggagaatacgcgtttatggtgttgggcgatttattcgttagatacgacgatagatagtaacgatttttcgatataatgtataggttgtcgaaagtaaagatttttagtggtataggtgtgattcgtgttagttgttttatttgatgaatcgataatacgcgcggtagtattacgcgagtaacgttaaaatggcgatgataaaagttaatcgtttttttattggtcgtcgaagtttgtatcgatacgtggcgtttaatatgcggataacgttcggcggcgtattttagtatggcgaggtcggcgaggattagcgcgtcggtatttagttgcgtcgttatatttacggcgcgttgttaacgggcgtaatcgttcggatgcgtaaaagtgttaatcgcgatgtgaagtttgcggcgatgttgatggataaaatttatcgttttttgtaatttt

SEQ ID NO: 26066 - DNA, 541 bp, Artificial Sequence
  chemically treated genomic DNA (Homo sapiens) CpG-island No: 26066
aaaattacaaaaaacgataaattttatccatcaacatcgccgcaaacttcacatcgcgattaacacttttacgcatccgaacgattacgcccgttaacaacgcgccgtaaatataacgacgcaactaaataccgacgcgctaatcctcgccgacctcgccatactaaaatacgccgccgaacgttatccgcatattaaacgccacgtatcgatacaaacttcgacgaccaataaaaaaacgattaacttttatcatcgccattttaacgttactcgcgtaatactaccgcgcgtattatcgattcatcaaataaaacaactaacacgaatcacacctataccactaaaaatctttactttcgacaacctatacattatatcgaaaaatcgttactatctatcgtcgtatctaacgaataaatcgcccaacaccataaacgcgtattctccgacccgtttcgtacgctaacaacaaacgccgcaaaaactaaaatcccgcctaaacgaaatactaatcgaccgttatcaaaacgacgaaaac

SEQ ID NO: 26067 - DNA, 541 bp, Artificial Sequence
  chemically treated genomic DNA (Homo sapiens) CpG-island No: 26067
aaaattgtaggaagcggtgagttttgtttattaatatcgtcgtaaattttatatcgcgattaatatttttgcgtattcggacggttacgttcgttggtagcgcgtcgtggatatggcggcgtagttgggtgtcgacgcgttgattttcgtcgatttcgttatgttggagtacgtcgtcgagcgttattcgtatattgagcgttacgtatcggtgtaggtttcggcgattaatgaagaggcgattaatttttattatcgttattttgacgttgttcgcgtggtgttgtcgcgcgtgttgtcgatttattaggtgaaataattggtacgggttatatttgtattattggaagtttttgttttcggtagtttgtgtattatgtcggaaggtcgttgttatttgtcgtcgtatttgacgggtgagtcgtttaatattataggcgcgtgtttttcggttcgtttcgtgcgttggtaataaacgtcgtaggggttggaatttcgtttgaacgaagtgttgatcgatcgttattaggacggcgaaaat

SEQ ID NO: 26068 - DNA, 541 bp, Artificial Sequence
  chemically treated genomic DNA (Homo sapiens) CpG-island No: 26068
attttcgccgtcctaataacgatcgatcaacacttcgttcaaacgaaattccaacccctacgacgtttattaccaacgcacgaaacgaaccgaaaaacacgcgcctataatattaaacgactcacccgtcaaatacgacgacaaataacaacgaccttccgacataatacacaaactaccgaaaacaaaaacttccaataatacaaatataacccgtaccaattatttcacctaataaatcgacaacacgcgcgacaacaccacgcgaacaacgtcaaaataacgataataaaaattaatcgcctcttcattaatcgccgaaacctacaccgatacgtaacgctcaatatacgaataacgctcgacgacgtactccaacataacgaaatcgacgaaaatcaacgcgtcgacacccaactacgccgccatatccacgacgcgctaccaacgaacgtaaccgtccgaatacgcaaaaatattaatcgcgatataaaatttacgacgatattaataaacaaaactcaccgcttcctacaatttt

SEQ ID NO: 26069 - DNA, 567 bp, Artificial Sequence
  chemically treated genomic DNA (Homo sapiens) CpG-island No: 26069
gcgttgattagcgaggttgacgtgcgcggtagaatcggttttgaattagcggattattcgtaaggtcgttggttgcgcgaacgttgggaagtggcgtagttagtgtcgataaaagtcgtcgttgaagcgggatttaaaggtgtggagattcgcgaggagttgattcggcggcggattgcggcggtagtagttggaaggaataacgttgtttaaagtttgaatgagtattgggtattttgtcggatgcggcgtaaacgttttattcggtttatattcgtgttttcgtaggtatgataagacgcgttagcgtcgtattaggtaaagataaatttcgtttgatttattttttttttttttttagtaaattttttaatatttcgcgtataatttgattcgttatttggcgagcggcgtttttggttattgtttgtattatattattttttttttcgtcgcgtggttcggtagtgtcgaataaaatattttttaatttattaagaatgtcgttatttatcgttatttttttttttttcgcgggaggattattttgttgttcggtattggttt

SEQ ID NO: 26070 - DNA, 567 bp, Artificial Sequence
  chemically treated genomic DNA (Homo sapiens) CpG-island No: 26070
aaaccaataccgaacaacaaaataatcctcccgcgaaaaaaaaaaaaataacgataaataacgacattcttaataaattaaaaaatattttattcgacactaccgaaccacgcgacgaaaaaaaaaataatataatacaaacaataaccaaaaacgccgctcgccaaataacgaatcaaattatacgcgaaatattaaaaaatttactaaaaaaaaaaaaaaaataaatcaaacgaaatttatctttacctaatacgacgctaacgcgtcttatcatacctacgaaaacacgaatataaaccgaataaaacgtttacgccgcatccgacaaaatacccaatactcattcaaactttaaacaacgttattccttccaactactaccgccgcaatccgccgccgaatcaactcctcgcgaatctccacacctttaaatcccgcttcaacgacgacttttatcgacactaactacgccacttcccaacgttcgcgcaaccaacgaccttacgaataatccgctaattcaaaaccgattctaccgcgcacgtcaacctcgctaatcaacgc

SEQ ID NO: 26071 - DNA, 567 bp, Artificial Sequence
  chemically treated genomic DNA (Homo sapiens) CpG-island No: 26071
aggttagtatcgagtagtaaaataattttttcgcgaaagggaaagaggtagcggtggatgacggtatttttggtggattgaaggatattttgttcggtattatcggattacgcggcgggaagaaagatggtgtggtgtaaataatggttaaaagcgtcgttcgttaagtgacgaattagattgtacgcgggatgttggggagtttgttgggggggagaagaaggtaagttaggcgagatttgtttttgtttgatgcgacgttggcgcgttttattatgtttacgggagtacgaatgtaggtcggataaagcgtttacgtcgtattcggtaaaatgtttaatatttatttaggttttgggtaacgttgttttttttagttgttatcgtcgtaattcgtcgtcgggttagtttttcgcgaatttttatatttttaaatttcgttttaacgacggtttttgtcggtattgattgcgttattttttagcgttcgcgtaattagcggttttgcgggtagttcgttgatttaaaatcggttttgtcgcgtacgttagtttcgttggttagcgt

SEQ ID NO: 26072 - DNA, 567 bp, Artificial Sequence
  chemically treated genomic DNA (Homo sapiens) CpG-island No: 26072
acgctaaccaacgaaactaacgtacgcgacaaaaccgattttaaatcaacgaactacccgcaaaaccgctaattacgcgaacgctaaaaaataacgcaatcaataccgacaaaaaccgtcgttaaaacgaaatttaaaaatataaaaattcgcgaaaaactaacccgacgacgaattacgacgataacaactaaaaaaaacaacgttacccaaaacctaaataaatattaaacattttaccgaatacgacgtaaacgctttatccgacctacattcgtactcccgtaaacataataaaacgcgccaacgtcgcatcaaacaaaaacaaatctcgcctaacttaccttcttctcccccccaacaaactccccaacatcccgcgtacaatctaattcgtcacttaacgaacgacgcttttaaccattatttacaccacaccatctttcttcccgccgcgtaatccgataataccgaacaaaatatccttcaatccaccaaaaataccgtcatccaccgctacctctttccctttcgcgaaaaaattattttactactcgatactaacct

SEQ ID NO: 26073 - DNA, 512 bp, Artificial Sequence
  chemically treated genomic DNA (Homo sapiens) CpG-island No: 26073
tatttggcgttgggcgtgcgcggcgcgttttgcgaggcggtgcgtatttttatgtgtcggtatatgttttggaatattacgcggatgtttaattatttgtattatagtacgtaggagaacgttattttggttatcgagtagtacgaggagttggtggacgtgaattgtagcgtcgtgttgcgtttttttttttgtgttatgtacgcgtttatttgtattttggagtttttgtacgattttattaagtcgtgtaagtcggtgtgttaacgcgcgcgcgacgattgcgagttttttatgaagatgtataattatagttggttcgaaagtttggtttgcgacgagttgtttgtttatgatcgtggcgtgtgtatttcgtttgaagttatcgttacggatttttcggagggtgaggtcgtaggaaggatggagggaggcgaggaggcgttcggggttgtggttgttaatcgagaattgggcggttatatttaaggttgttaggggcgtttgaggtt

SEQ ID NO: 26074 - DNA, 512 bp, Artificial Sequence
  chemically treated genomic DNA (Homo sapiens) CpG-island No: 26074
aacctcaaacgcccctaacaaccttaaatataaccgcccaattctcgattaacaaccacaaccccgaacgcctcctcgcctccctccatccttcctacgacctcaccctccgaaaaatccgtaacgataacttcaaacgaaatacacacgccacgatcataaacaaacaactcgtcgcaaaccaaactttcgaaccaactataattatacatcttcataaaaaactcgcaatcgtcgcgcgcgcgttaacacaccgacttacacgacttaataaaatcgtacaaaaactccaaaatacaaataaacgcgtacataacacaaaaaaaaaaacgcaacacgacgctacaattcacgtccaccaactcctcgtactactcgataaccaaaataacgttctcctacgtactataatacaaataattaaacatccgcgtaatattccaaaacatataccgacacataaaaatacgcaccgcctcgcaaaacgcgccgcgcacgcccaacgccaaata

SEQ ID NO: 26075 - DNA, 512 bp, Artificial Sequence
  chemically treated genomic DNA (Homo sapiens) CpG-island No: 26075
agttttagacgtttttggtagttttaggtgtggtcgtttagttttcgattggtagttatagtttcgggcgttttttcgtttttttttattttttttacggttttatttttcgggaggttcgtgacgatggttttaggcgagatgtatacgttacggttatagataggtagttcgtcgtaggttaggttttcgggttagttgtggttgtatatttttatgaggggttcgtagtcgtcgcgcgcgcgttggtatatcgatttgtacggtttgatagggtcgtgtaggaattttagggtgtaaatgggcgcgtatatggtatagaggaagaagcgtagtacggcgttgtagtttacgtttattagtttttcgtattgttcgatggttaggatggcgtttttttgcgtgttgtggtgtaggtggttgggtattcgcgtgatgttttagggtatgtgtcggtatatagggatgcgtatcgtttcgtagggcgcgtcgcgtacgtttagcgttaggtg

SEQ ID NO: 26076 - DNA, 512 bp, Artificial Sequence
  chemically treated genomic DNA (Homo sapiens) CpG-island No: 26076
cacctaacgctaaacgtacgcgacgcgccctacgaaacgatacgcatccctatataccgacacataccctaaaacatcacgcgaatacccaaccacctacaccacaacacgcaaaaaaacgccatcctaaccatcgaacaatacgaaaaactaataaacgtaaactacaacgccgtactacgcttcttcctctataccatatacgcgcccatttacaccctaaaattcctacacgaccctatcaaaccgtacaaatcgatataccaacgcgcgcgcgacgactacgaacccctcataaaaatatacaaccacaactaacccgaaaacctaacctacgacgaactacctatctataaccgtaacgtatacatctcgcctaaaaccatcgtcacgaacctcccgaaaaataaaaccgtaaaaaaaataaaaaaaaacgaaaaaacgcccgaaactataactaccaatcgaaaactaaacgaccacacctaaaactaccaaaaacgtctaaaact

SEQ ID NO: 26077 - DNA, 712 bp, Artificial Sequence
  chemically treated genomic DNA (Homo sapiens) CpG-island No: 26077
ttgcgggttattgagttgtttttattattgcgtttgtcgttagtcggagttggtaagatgaatatcgtcggttagtttgatttgtttcggtttgagttgttgatgaggtgtagaatttttacgtattagggtatagtcggaaattagcgtcgtgttgtcgagaatgttgtataatagtagacgtgaaagtcgacgattgattattgcgtggttttttgtgtttgtttcgtggcgggcgttaatgtcggggttgtttagtttggtaagcgggcgaaaagttggtagacgtgttgtttttgttttaataaggtgggtaggatggtttgagaggcgggtgtttttttaagcgttatttgaggagaacggttgagtgcggttgttagatcggtagcgtatttttttagggcgtcggtaaattgatttgttttgttcggttgtagtgcgttatttagcgtttgcgtcgagttttaggtggtattttacgcgtgaagaatatcgcggttttgacgaataatcgtttgcgtacgtttaattagtaatgcgcgtttttcgttgtttagttgacgttttacgttatgtattgtcgatgttaggtgcgattttcgaggattttttcggtacgattaggtaaaattatagtaaaattataattaaaggaatcgagcggaatacgttaacgtaggttttggtaaattacgttacgggcgtaaag

SEQ ID NO: 26078 - DNA, 712 bp, Artificial Sequence
  chemically treated genomic DNA (Homo sapiens) CpG-island No: 26078
ctttacgcccgtaacgtaatttaccaaaacctacgttaacgtattccgctcgattcctttaattataattttactataattttacctaatcgtaccgaaaaaatcctcgaaaatcgcacctaacatcgacaatacataacgtaaaacgtcaactaaacaacgaaaaacgcgcattactaattaaacgtacgcaaacgattattcgtcaaaaccgcgatattcttcacgcgtaaaataccacctaaaactcgacgcaaacgctaaataacgcactacaaccgaacaaaacaaatcaatttaccgacgccctaaaaaaatacgctaccgatctaacaaccgcactcaaccgttctcctcaaataacgcttaaaaaaacacccgcctctcaaaccatcctacccaccttattaaaacaaaaacaacacgtctaccaacttttcgcccgcttaccaaactaaacaaccccgacattaacgcccgccacgaaacaaacacaaaaaaccacgcaataatcaatcgtcgactttcacgtctactattatacaacattctcgacaacacgacgctaatttccgactataccctaatacgtaaaaattctacacctcatcaacaactcaaaccgaaacaaatcaaactaaccgacgatattcatcttaccaactccgactaacgacaaacgcaataataaaaacaactcaataacccgcaa

SEQ ID NO: 26079 - DNA, 712 bp, Artificial Sequence
  chemically treated genomic DNA (Homo sapiens) CpG-island No: 26079
ttttgcgttcgtggcgtggtttgttaaagtttacgttaacgtatttcgttcgatttttttagttatggttttgttgtggttttatttgatcgtgtcggggggattttcgagagtcgtatttggtatcggtagtgtatagcgtggagcgttaattggatagcgaagaacgcgtattattgattgaacgtgcgtaaacggttattcgttagggtcgcgatattttttacgcgtgggatgttatttggaattcggcgtaggcgttggataacgtattatagtcggatagagtaggttagtttgtcgacgttttggagaaatacgttgtcggtttggtaatcgtatttagtcgttttttttaaataacgtttgaagagatattcgttttttaggttattttgtttattttattaaaataggagtaatacgtttgttagtttttcgttcgtttgttagattggatagtttcggtattaacgttcgttacggaataggtataaggagttacgtaatgattaatcgtcgatttttacgtttgttgttgtgtagtattttcggtagtacgacgttgattttcggttgtgttttggtacgtaaggattttgtattttattaatagtttaaatcggaataaattaaattggtcgacgatatttattttgttagtttcggttggcggtaggcgtagtggtggaaataatttaatgattcgtag

SEQ ID NO: 26080 - DNA, 712 bp, Artificial Sequence
  chemically treated genomic DNA (Homo sapiens) CpG-island No: 26080
ctacgaatcattaaattatttccaccactacgcctaccgccaaccgaaactaacaaaataaatatcgtcgaccaatttaatttattccgatttaaactattaataaaatacaaaatccttacgtaccaaaacacaaccgaaaatcaacgtcgtactaccgaaaatactacacaacaacaaacgtaaaaatcgacgattaatcattacgtaactccttatacctattccgtaacgaacgttaataccgaaactatccaatctaacaaacgaacgaaaaactaacaaacgtattactcctattttaataaaataaacaaaataacctaaaaaacgaatatctcttcaaacgttatttaaaaaaaacgactaaatacgattaccaaaccgacaacgtatttctccaaaacgtcgacaaactaacctactctatccgactataatacgttatccaacgcctacgccgaattccaaataacatcccacgcgtaaaaaatatcgcgaccctaacgaataaccgtttacgcacgttcaatcaataatacgcgttcttcgctatccaattaacgctccacgctatacactaccgataccaaatacgactctcgaaaatccccccgacacgatcaaataaaaccacaacaaaaccataactaaaaaaatcgaacgaaatacgttaacgtaaactttaacaaaccacgccacgaacgcaaaa

SEQ ID NO: 26081 - DNA, 969 bp, Artificial Sequence
  chemically treated genomic DNA (Homo sapiens) CpG-island No: 26081
gttttattagtatttttattcgtatttttattcgttttattagtatttttatttttattttcgttcgttttattagtatttttatttttatttttattcgttttattagtatttttatttttatttttattcgtttcgttaatatttttatttttatttttatttttattcgttttattagtatttttattcgtatttttattcgttttattagtatttttattcgtatttttattcgttttattagtatttttatttttattttcgttcgttttattagtatttttatttgtattcgtattcgtattcgttttattagtatttttattcgtatttttattcgttttattagtatttttatttttattttcgttcgttttattagtatttttatttgtattcgtattcgtattcgttttattagtatttttattcgtatttttattcgttttattagtatttttattcgtatttttattcgtttcgttaatatttttatttttattcgttttattagtatttttatttttatttttatttttattcgttttattagtatttttattcgtatttttattcgttttattagtatttttattcgtatttttattcgttttattagtatttttattcgtttttttattcgttttattagtatttttattcgtttttttattcgttttattagtatttttattcgtatttttattcgttttattagtatttttattcgtatttttattcgttttattagtatttttattcgtatttttattcgttttattagtatttttatttttatttttattcgttttattagtatttttattcgtatttttattcgttttattagtatttttattcgtatttttattcgttttattagtatttttattcgtatttatattcgtattcgttttattagtaattttagtaagaataattcgtgttagtgttagggttttagag

SEQ ID NO: 26082 - DNA, 969 bp, Artificial Sequence
  chemically treated genomic DNA (Homo sapiens) CpG-island No: 26082
ctctaaaaccctaacactaacacgaattattcttactaaaattactaataaaacgaatacgaatataaatacgaataaaaatactaataaaacgaataaaaatacgaataaaaatactaataaaacgaataaaaatacgaataaaaatactaataaaacgaataaaaataaaaataaaaatactaataaaacgaataaaaatacgaataaaaatactaataaaacgaataaaaatacgaataaaaatactaataaaacgaataaaaatacgaataaaaatactaataaaacgaataaaaaaacgaataaaaatactaataaaacgaataaaaaaacgaataaaaatactaataaaacgaataaaaatacgaataaaaatactaataaaacgaataaaaatacgaataaaaatactaataaaacgaataaaaataaaaataaaaataaaaatactaataaaacgaataaaaataaaaatattaacgaaacgaataaaaatacgaataaaaatactaataaaacgaataaaaatacgaataaaaatactaataaaacgaatacgaatacgaatacaaataaaaatactaataaaacgaacgaaaataaaaataaaaatactaataaaacgaataaaaatacgaataaaaatactaataaaacgaatacgaatacgaatacaaataaaaatactaataaaacgaacgaaaataaaaataaaaatactaataaaacgaataaaaatacgaataaaaatactaataaaacgaataaaaatacgaataaaaatactaataaaacgaataaaaataaaaataaaaataaaaatattaacgaaacgaataaaaataaaaataaaaatactaataaaacgaataaaaataaaaataaaaatactaataaaacgaacgaaaataaaaataaaaatactaataaaacgaataaaaatacgaataaaaatactaataaaac

SEQ ID NO: 26083 - DNA, 969 bp, Artificial Sequence
  chemically treated genomic DNA (Homo sapiens) CpG-island No: 26083
ttttaaagttttgatattgatacgggttgtttttgttggggttgttaatggagcgggtgcgggtgtgggtgcgggtgagggtgttgatggagcgggtgagggtgcgggtgagggtgttggtggagcgggtgagggtgcgggtgagggtgttggtggagcgggtgagggtgagggtgagggtgttggtggagcgggtgagggtgcgggtgagggtgttggtggagcgggtgagggtgcgggtgagggtgttggtggagcgggtgagggtgcgggtgagggtgttggtggagcgggtgagggagcgggtgagggtgttggtggagcgggtgagggagcgggtgagggtgttggtggagcgggtgagggtgcgggtgagggtgttggtggagcgggtgagggtgcgggtgagggtgttgatggagcgggtgagggtgagggtgagggtgagggtgttgatggagcgggtgagggtgagggtgttgacggagcgggtgagggtgcgggtgagggtgttgatggagcgggtgagggtgcgggtgagggtgttggtggagcgggtgcgggtgcgggtgtaggtgagggtgttgatggagcgggcgagggtgagggtgagggtgttgatggagcgggtgagggtgcgggtgagggtgttggtggagcgggtgcgggtgcgggtgtaggtgagggtgttgatggagcgggcgagggtgagggtgagggtgttgatggagcgggtgagggtgcgggtgagggtgttgatggagcgggtgagggtgcgggtgagggtgttgatggagcgggtgagggtgagggtgagggtgagggtgttgacggagcgggtgagggtgagggtgagggtgttgatggagcgggtgagggtgagggtgagggtgttgatggagcgggcgagggtgagggtgagggtgttgatggagcgggtgagggtgcgggtgagggtgttggtggagt

SEQ ID NO: 26084 - DNA, 969 bp, Artificial Sequence
  chemically treated genomic DNA (Homo sapiens) CpG-island No: 26084
actccaccaacaccctcacccgcaccctcacccgctccatcaacaccctcaccctcaccctcgcccgctccatcaacaccctcaccctcaccctcacccgctccatcaacaccctcaccctcaccctcacccgctccgtcaacaccctcaccctcaccctcaccctcacccgctccatcaacaccctcacccgcaccctcacccgctccatcaacaccctcacccgcaccctcacccgctccatcaacaccctcaccctcaccctcgcccgctccatcaacaccctcacctacacccgcacccgcacccgctccaccaacaccctcacccgcaccctcacccgctccatcaacaccctcaccctcaccctcgcccgctccatcaacaccctcacctacacccgcacccgcacccgctccaccaacaccctcacccgcaccctcacccgctccatcaacaccctcacccgcaccctcacccgctccgtcaacaccctcaccctcacccgctccatcaacaccctcaccctcaccctcaccctcacccgctccatcaacaccctcacccgcaccctcacccgctccaccaacaccctcacccgcaccctcacccgctccaccaacaccctcacccgctccctcacccgctccaccaacaccctcacccgctccctcacccgctccaccaacaccctcacccgcaccctcacccgctccaccaacaccctcacccgcaccctcacccgctccaccaacaccctcacccgcaccctcacccgctccaccaacaccctcaccctcaccctcacccgctccaccaacaccctcacccgcaccctcacccgctccaccaacaccctcacccgcaccctcacccgctccatcaacaccctcacccgcacccacacccgcacccgctccattaacaaccccaacaaaaacaacccgtatcaatatcaaaactttaaaa

SEQ ID NO: 26085 - DNA, 728 bp, Artificial Sequence
  chemically treated genomic DNA (Homo sapiens) CpG-island No: 26085
gtgttcgtagttcgagtttttcggagcgatttcggttagcgttttttttcggtatttcgttttcgcgtacgtttatcgttcggttttcgttaggcgttcgcgtatttatcgcgcgttaggtttaggatcgcggcgagtagtaggtagacgtagcggcggaggttcggggcggttcgtatggtgttcgggagttggcggcggtggcggggcggcgggggtggaggcggtggcggcgggttttttcgttatgggtttagacgcgtttttgttttcggttattggtaggcgggtgcgcggcgtaggcggagaatcgcgggacgtttttatgtcgtcgcggtaaggtagttcgggcgttcggttcgattcggtttcggttttgcgaggcgtagagattttcgcgttttgggcgttttcggggttcgtcgcggtttttcggttttttagttgcgcgcggtgtttatcgcggtttagagttcgatcggttgtagcgtcggagtttggagtcgaatcgcgttttttgtttcgcgttcgtttttttcggcggcgagagtattttttttttttcgtttttttttcgttttttttttttttttcgttttttcgttttttttgtttttttttcgtcgcgtttttcgcgtattatatagatttttttttaattttttttgggttgttcggttttcgttcgttaagtcgatttattgtagggagaaggagagtttattttt

SEQ ID NO: 26086 - DNA, 728 bp, Artificial Sequence
  chemically treated genomic DNA (Homo sapiens) CpG-island No: 26086
aaaaataaactctccttctccctacaataaatcgacttaacgaacgaaaaccgaacaacccaaaaaaaattaaaaaaaaatctatataatacgcgaaaaacgcgacgaaaaaaaaacaaaaaaaacgaaaaaacgaaaaaaaaaaaaaaaacgaaaaaaaaacgaaaaaaaaaaaatactctcgccgccgaaaaaaacgaacgcgaaacaaaaaacgcgattcgactccaaactccgacgctacaaccgatcgaactctaaaccgcgataaacaccgcgcgcaactaaaaaaccgaaaaaccgcgacgaaccccgaaaacgcccaaaacgcgaaaatctctacgcctcgcaaaaccgaaaccgaatcgaaccgaacgcccgaactaccttaccgcgacgacataaaaacgtcccgcgattctccgcctacgccgcgcacccgcctaccaataaccgaaaacaaaaacgcgtctaaacccataacgaaaaaacccgccgccaccgcctccacccccgccgccccgccaccgccgccaactcccgaacaccatacgaaccgccccgaacctccgccgctacgtctacctactactcgccgcgatcctaaacctaacgcgcgataaatacgcgaacgcctaacgaaaaccgaacgataaacgtacgcgaaaacgaaataccgaaaaaaaacgctaaccgaaatcgctccgaaaaactcgaactacgaacac

SEQ ID NO: 26087 - DNA, 728 bp, Artificial Sequence
  chemically treated genomic DNA (Homo sapiens) CpG-island No: 26087
gggggtgagttttttttttttttgtaataaatcggtttagcggacgagagtcgaatagtttagaaaggattaaagaaaagtttgtataatacgcggagagcgcggcgaggggagggtaaggagggcgggggggcggggagagggggagggacggagggagggcgagaggaggggggtgttttcgtcgtcgggagaggcgagcgcgaggtagagagcgcgattcggttttaaatttcggcgttgtagtcgatcggattttgggtcgcggtgggtatcgcgcgtagttagggagtcgagaagtcgcggcgagtttcgaggacgtttagagcgcgagggtttttgcgtttcgtagagtcggagtcgagtcgagtcgggcgttcgggttgttttgtcgcggcggtatgggggcgtttcgcggtttttcgtttgcgtcgcgtattcgtttgttagtagtcggaggtaggagcgcgtttgagtttatggcgaggggattcgtcgttatcgtttttattttcgtcgtttcgttatcgtcgttagttttcgggtattatgcgaatcgtttcgagttttcgtcgttgcgtttgtttgttgttcgtcgcgattttggatttggcgcgcggtgagtgcgcgggcgtttggcgggagtcgagcggtgaacgtgcgcggggacggggtgtcgggggagggcgttggtcggggtcgtttcgagaggttcgggttacgagtat

SEQ ID NO: 26088 - DNA, 728 bp, Artificial Sequence
  chemically treated genomic DNA (Homo sapiens) CpG-island No: 26088
atactcgtaacccgaacctctcgaaacgaccccgaccaacgccctcccccgacaccccgtccccgcgcacgttcaccgctcgactcccgccaaacgcccgcgcactcaccgcgcgccaaatccaaaatcgcgacgaacaacaaacaaacgcaacgacgaaaactcgaaacgattcgcataatacccgaaaactaacgacgataacgaaacgacgaaaataaaaacgataacgacgaatcccctcgccataaactcaaacgcgctcctacctccgactactaacaaacgaatacgcgacgcaaacgaaaaaccgcgaaacgcccccataccgccgcgacaaaacaacccgaacgcccgactcgactcgactccgactctacgaaacgcaaaaaccctcgcgctctaaacgtcctcgaaactcgccgcgacttctcgactccctaactacgcgcgatacccaccgcgacccaaaatccgatcgactacaacgccgaaatttaaaaccgaatcgcgctctctacctcgcgctcgcctctcccgacgacgaaaacacccccctcctctcgccctccctccgtccctccccctctccccgcccccccgccctccttaccctcccctcgccgcgctctccgcgtattatacaaacttttctttaatcctttctaaactattcgactctcgtccgctaaaccgatttattacaaaaaaaaaaaaaactcaccccc

SEQ ID NO: 26089 - DNA, 885 bp, Artificial Sequence
  chemically treated genomic DNA (Homo sapiens) CpG-island No: 26089
cgtcgggggttttgcgggggacggcgcggagttgattgaagggtcgttgcggtagcgtagggcgtaggagttgtttcgtttcggagcgtcgggaaggttggcgttggtagtttttagtttttgttagtcgggcgagagtaggcggagaaggaggatgtatcgttatttatggttcgtttttatcggtcggtacgtaaggtgagttttgcgtgcgttcggcgggatagtgaggtaaaagggcgggagcgcgggagaggattcgtggtttcggtttagttcgtattttttttttttgggatttcgaatcgcgggttgcgtggtgggttaggagaggtgtagagtaggcggggcgtcgcggttagttcggagcgtaaattttttttggcgattgtagcgttgaatttgggcgtaggagagcgcggggttcgggttgtttagttttgttcggcggggtatttgggcgtagcgtatatgggttagtcggtaggaattgcgggatgggggatatttagcgttatcgtcgggagtcgtaggagcgagatggattatttggaaggttcgggttagtttttgggttttgaggtacgcggcgtttcggcgttggtggtagggtggattcggatttcgcgagggtgtcgcgttagtcgcgggggttgtttgaggtcgggggatttcgagtcgtcgttgtattattcgtttttagtttaggaggaaggcgtcggttggcgttgcgttttgttcggatttagggtaggagcgggggaggtttgcgaaagtcgggagcgagtcggggagggttcgcgaattggagaggtttagcgcgttgttgcggacgcggcggatggtcgattacgggtgttaggggaggtttacgttgcggcgtcg

SEQ ID NO: 26090 - DNA, 885 bp, Artificial Sequence
  chemically treated genomic DNA (Homo sapiens) CpG-island No: 26090
cgacgccgcaacgtaaacctcccctaacacccgtaatcgaccatccgccgcgtccgcaacaacgcgctaaacctctccaattcgcgaaccctccccgactcgctcccgactttcgcaaacctcccccgctcctaccctaaatccgaacaaaacgcaacgccaaccgacgccttcctcctaaactaaaaacgaataatacaacgacgactcgaaatcccccgacctcaaacaacccccgcgactaacgcgacaccctcgcgaaatccgaatccaccctaccaccaacgccgaaacgccgcgtacctcaaaacccaaaaactaacccgaaccttccaaataatccatctcgctcctacgactcccgacgataacgctaaatatcccccatcccgcaattcctaccgactaacccatatacgctacgcccaaataccccgccgaacaaaactaaacaacccgaaccccgcgctctcctacgcccaaattcaacgctacaatcgccaaaaaaaatttacgctccgaactaaccgcgacgccccgcctactctacacctctcctaacccaccacgcaacccgcgattcgaaatcccaaaaaaaaaaaatacgaactaaaccgaaaccacgaatcctctcccgcgctcccgcccttttacctcactatcccgccgaacgcacgcaaaactcaccttacgtaccgaccgataaaaacgaaccataaataacgatacatcctccttctccgcctactctcgcccgactaacaaaaactaaaaactaccaacgccaaccttcccgacgctccgaaacgaaacaactcctacgccctacgctaccgcaacgacccttcaatcaactccgcgccgtcccccgcaaaacccccgacg

SEQ ID NO: 26091 - DNA, 885 bp, Artificial Sequence
  chemically treated genomic DNA (Homo sapiens) CpG-island No: 26091
cggcgtcgtagcgtgggttttttttggtattcgtggtcggttattcgtcgcgttcgtagtagcgcgttgagtttttttagttcgcgggtttttttcggttcgttttcggttttcgtagatttttttcgtttttgttttgagttcgagtagagcgtaacgttagtcggcgttttttttttgggttgggagcgagtggtgtagcggcggttcgaagtttttcggttttaagtagttttcgcgattagcgcgatattttcgcgggattcgagtttattttgttattagcgtcgggacgtcgcgtgttttagagtttaagggttgattcgggttttttaggtggtttatttcgtttttacggttttcgacggtggcgttgggtgttttttatttcgtaatttttatcggttgatttatgtgcgttgcgtttaggtatttcgtcgggtagggttgagtagttcggatttcgcgtttttttgcgtttagatttagcgttgtagtcgttagggaaagtttgcgtttcggattggtcgcggcgtttcgtttgttttgtattttttttggtttattacgtagttcgcgattcgggattttagaggagaggggtgcgggttgagtcggggttacgagttttttttcgcgttttcgtttttttattttattgtttcgtcgggcgtacgtagagtttattttgcgtgtcggtcggtggaggcgagttataggtgacggtgtatttttttttttcgtttgttttcgttcggttggtaggggttggaggttgttagcgttaattttttcggcgtttcggggcggagtagtttttgcgttttgcgttatcgtagcggttttttagttagtttcgcgtcgtttttcgtagagttttcggcg

SEQ ID NO: 26092 - DNA, 885 bp, Artificial Sequence
  chemically treated genomic DNA (Homo sapiens) CpG-island No: 26092
cgccgaaaactctacgaaaaacgacgcgaaactaactaaaaaaccgctacgataacgcaaaacgcaaaaactactccgccccgaaacgccgaaaaaattaacgctaacaacctccaacccctaccaaccgaacgaaaacaaacgaaaaaaaaaaatacaccgtcacctataactcgcctccaccgaccgacacgcaaaataaactctacgtacgcccgacgaaacaataaaataaaaaaacgaaaacgcgaaaaaaaactcgtaaccccgactcaacccgcacccctctcctctaaaatcccgaatcgcgaactacgtaataaaccaaaaaaaatacaaaacaaacgaaacgccgcgaccaatccgaaacgcaaactttccctaacgactacaacgctaaatctaaacgcaaaaaaacgcgaaatccgaactactcaaccctacccgacgaaatacctaaacgcaacgcacataaatcaaccgataaaaattacgaaataaaaaacacccaacgccaccgtcgaaaaccgtaaaaacgaaataaaccacctaaaaaacccgaatcaacccttaaactctaaaacacgcgacgtcccgacgctaataacaaaataaactcgaatcccgcgaaaatatcgcgctaatcgcgaaaactacttaaaaccgaaaaacttcgaaccgccgctacaccactcgctcccaacccaaaaaaaaaacgccgactaacgttacgctctactcgaactcaaaacaaaaacgaaaaaaatctacgaaaaccgaaaacgaaccgaaaaaaacccgcgaactaaaaaaactcaacgcgctactacgaacgcgacgaataaccgaccacgaataccaaaaaaaacccacgctacgacgccg

SEQ ID NO: 26093 - DNA, 976 bp, Artificial Sequence
  chemically treated genomic DNA (Homo sapiens) CpG-island No: 26093
  unsure (746)
tcggttttttattcgggttcgattttttggaaggggtttggtttagcgcgtatttgtatacgtgcgtcgggaggcgggaggtcgtttcgcggtttagttggtttgtttttaataatacggttaaagttatacgtttatcgttatttacgtcgttagttagcgtcggtatttcggagggaggaaggaagtatttaaggcgttgggggcggaaacgttgaggaggaggggtgcgttttaggcgagagttggtcggcgtcgattcggtttggggtagcggtcgtagtttttcgttcgggatcgcgtaaaaaggtttaaggtttcgggtcgtatttatcgaagtttaggaattgttttatggagagcggggacggcgagaagcgcgcgtagaagtttatttggttcggaacgtcgcgttcggacgtcgggttggagttcgagttcgagttgaagttgcggttgaagtcggcggcgcgtagtttcgggttcgggtcggttaaggcggtttcgcgaagtagtcgcgttagttttatgtcgagtttcgttagagaagttatagttagtacgttaggttttttcgcgtttttgtcgagtggtacgtgagggacgtggcgggtagtaggggcggggatcggttgttatcggcgcggtttttatttttttagtcggagttcggttttttgcgtcgttgggcgggacgcggagcgggaaggaggcggggagagaaaaggggcgggcgtttgcggggntcgtttttttcgtcggagtttcgtttagtttttcgaggaaggagatgcggagcgcgcgttaggtcgtagtcgtcgtttagatttcgttttagtcggcgaggtgtggggtgagcgtgtcggtcgttttcgtatacgtcgggtgatgggattggggatattaagaggcgaggcggtatggagcgtttttttttcgtatttttttgaaataaattttatttttttgttttttt

SEQ ID NO: 26094 - DNA, 976 bp, Artificial Sequence
  chemically treated genomic DNA (Homo sapiens) CpG-island No: 26094
  unsure (231)
aaaaaaacaaaaaaataaaatttatttcaaaaaaatacgaaaaaaaaacgctccataccgcctcgcctcttaatatccccaatcccatcacccgacgtatacgaaaacgaccgacacgctcaccccacacctcgccgactaaaacgaaatctaaacgacgactacgacctaacgcgcgctccgcatctccttcctcgaaaaactaaacgaaactccgacgaaaaaaacganccccgcaaacgcccgccccttttctctccccgcctccttcccgctccgcgtcccgcccaacgacgcaaaaaaccgaactccgactaaaaaaataaaaaccgcgccgataacaaccgatccccgcccctactacccgccacgtccctcacgtaccactcgacaaaaacgcgaaaaaacctaacgtactaactataacttctctaacgaaactcgacataaaactaacgcgactacttcgcgaaaccgccttaaccgacccgaacccgaaactacgcgccgccgacttcaaccgcaacttcaactcgaactcgaactccaacccgacgtccgaacgcgacgttccgaaccaaataaacttctacgcgcgcttctcgccgtccccgctctccataaaacaattcctaaacttcgataaatacgacccgaaaccttaaacctttttacgcgatcccgaacgaaaaactacgaccgctaccccaaaccgaatcgacgccgaccaactctcgcctaaaacgcacccctcctcctcaacgtttccgcccccaacgccttaaatacttccttcctccctccgaaataccgacgctaactaacgacgtaaataacgataaacgtataactttaaccgtattattaaaaacaaaccaactaaaccgcgaaacgacctcccgcctcccgacgcacgtatacaaatacgcgctaaaccaaaccccttccaaaaaatcgaacccgaataaaaaaccga

SEQ ID NO: 26095 - DNA, 976 bp, Artificial Sequence
  chemically treated genomic DNA (Homo sapiens) CpG-island No: 26095
  unsure (231)
gaggaagtaggaaggtgggatttgttttaaaagggtgcgggaaggggacgttttatatcgtttcgttttttagtgtttttagttttattattcgacgtgtacggggacggtcgatacgtttattttatatttcgtcggttggggcgggatttgggcggcggttgcggtttggcgcgcgtttcgtattttttttttcgggaggttgggcgggatttcggcgaggggggcggntttcgtaagcgttcgtttttttttttttttcgtttttttttcgtttcgcgtttcgtttagcggcgtagggggtcgggtttcggttaggagggtgggggtcgcgtcggtgatagtcgattttcgtttttgttgttcgttacgttttttacgtattattcggtagaggcgcggggaaatttggcgtattggttgtggtttttttagcgggattcggtatgaggttggcgcggttgtttcgcggagtcgttttggtcggttcgggttcggggttgcgcgtcgtcggttttagtcgtagttttagttcggattcgggttttagttcggcgttcgagcgcggcgtttcgggttaggtggatttttacgcgcgtttttcgtcgttttcgttttttatgaagtagtttttggatttcggtgagtgcggttcgggattttgggtttttttgcgcggtttcgggcggggagttgcggtcgttgttttaggtcgggtcggcgtcggttagttttcgtttgaggcgtattttttttttttagcgttttcgtttttagcgttttaggtgtttttttttttttttcgaagtgtcggcgttggttggcggcgtaaataacggtgggcgtgtggttttgatcgtattgttgaaaataaattagttgggtcgcgggacgatttttcgtttttcggcgtacgtgtgtaggtgcgcgttaggttaggttttttttaaggagtcggattcgggtgggaggtcga

SEQ ID NO: 26096 - DNA, 976 bp, Artificial Sequence
  chemically treated genomic DNA (Homo sapiens) CpG-island No: 26096
  unsure (746)
tcgacctcccacccgaatccgactccttaaaaaaaacctaacctaacgcgcacctacacacgtacgccgaaaaacgaaaaatcgtcccgcgacccaactaatttattttcaacaatacgatcaaaaccacacgcccaccgttatttacgccgccaaccaacgccgacacttcgaaaaaaaaaaaaaaacacctaaaacgctaaaaacgaaaacgctaaaaaaaaaaaatacgcctcaaacgaaaactaaccgacgccgacccgacctaaaacaacgaccgcaactccccgcccgaaaccgcgcaaaaaaacccaaaatcccgaaccgcactcaccgaaatccaaaaactacttcataaaaaacgaaaacgacgaaaaacgcgcgtaaaaatccacctaacccgaaacgccgcgctcgaacgccgaactaaaacccgaatccgaactaaaactacgactaaaaccgacgacgcgcaaccccgaacccgaaccgaccaaaacgactccgcgaaacaaccgcgccaacctcataccgaatcccgctaaaaaaaccacaaccaatacgccaaatttccccgcgcctctaccgaataatacgtaaaaaacgtaacgaacaacaaaaacgaaaatcgactatcaccgacgcgacccccaccctcctaaccgaaacccgaccccctacgccgctaaacgaaacgcgaaacgaaaaaaaaacgaaaaaaaaaaaaaaacgaacgcttacgaaanccgcccccctcgccgaaatcccgcccaacctcccgaaaaaaaaaatacgaaacgcgcgccaaaccgcaaccgccgcccaaatcccgccccaaccgacgaaatataaaataaacgtatcgaccgtccccgtacacgtcgaataataaaactaaaaacactaaaaaacgaaacgatataaaacgtccccttcccgcacccttttaaaacaaatcccaccttcctacttcctc

SEQ ID NO: 26097 - DNA, 826 bp, Artificial Sequence
  chemically treated genomic DNA (Homo sapiens) CpG-island No: 26097
ttttttcggtatcggtaggtcgcggcgggagttgttttcgtttttaattttgtaggtgcgtgtgtcgcgggcgttcggggtaggtaggacgtagaggaggaggcgttcgttatgttcggtttgcggtttttcgtttcggtttttcgttcgtcgttttcgcggaacggtttgttgtagtttttgtgaagaggaagaggcggcggcggcggcggaggaggaggaggcgtcgtttttttggtaagtttttcgattcggcggtttcggtaggatttatggcggatttttcgttcgtattgtttttgcgggaaggcggttttcgcgcgtcgcggttttcggttttttcgtcgtcgtcgcgttcgcgtttcggtttcgagttcgaggaggtcgagttgtcgttgagtttggttcgtattaagattcgttcgtacggtagtatcgttagcgtgcgggcgtcgttgggcgtcggcgttatcgagcgttatgtggagtatcgggttcgcgcgggcgatacgttgtagggtatcgcgtttaagtacggtgttacggtgagtagggcgcgtcgtcgcggttcgggttggtagttatcgcgtaggaggcggtgcggttcggggtgcggtgggggtgggggtgggattgcgggtgggggtttgggggatggggagtcgtagggacggtcgtgcgttttcgggcggttcggtttttagggttcgtttagcgcgcgttgttggttatcgtagtggtcgttaaagttggttttgtagcgggaggggcggatcgttagggttttttttttaggtagttgtatcgagttttcggtgtttcgttt

SEQ ID NO: 26098 - DNA, 826 bp, Artificial Sequence
  chemically treated genomic DNA (Homo sapiens) CpG-island No: 26098
aaacgaaacaccgaaaactcgatacaactacctaaaaaaaaaaccctaacgatccgcccctcccgctacaaaaccaactttaacgaccactacgataaccaacaacgcgcgctaaacgaaccctaaaaaccgaaccgcccgaaaacgcacgaccgtccctacgactccccatcccccaaacccccacccgcaatcccacccccacccccaccgcaccccgaaccgcaccgcctcctacgcgataactaccaacccgaaccgcgacgacgcgccctactcaccgtaacaccgtacttaaacgcgataccctacaacgtatcgcccgcgcgaacccgatactccacataacgctcgataacgccgacgcccaacgacgcccgcacgctaacgatactaccgtacgaacgaatcttaatacgaaccaaactcaacgacaactcgacctcctcgaactcgaaaccgaaacgcgaacgcgacgacgacgaaaaaaccgaaaaccgcgacgcgcgaaaaccgccttcccgcaaaaacaatacgaacgaaaaatccgccataaatcctaccgaaaccgccgaatcgaaaaacttaccaaaaaaacgacgcctcctcctcctccgccgccgccgccgcctcttcctcttcacaaaaactacaacaaaccgttccgcgaaaacgacgaacgaaaaaccgaaacgaaaaaccgcaaaccgaacataacgaacgcctcctcctctacgtcctacctaccccgaacgcccgcgacacacgcacctacaaaattaaaaacgaaaacaactcccgccgcgacctaccgataccgaaaaaa

SEQ ID NO: 26099 - DNA, 826 bp, Artificial Sequence
  chemically treated genomic DNA (Homo sapiens) CpG-island No: 26099
gggcggggtatcgggaattcgatgtagttatttagggagggagttttggcggttcgtttttttcgttgtaggattagttttggcgattattgcggtggttagtagcgcgcgttgagcgagttttgggagtcgagtcgttcggggacgtacggtcgtttttgcgattttttattttttaaatttttattcgtagttttatttttatttttatcgtatttcgagtcgtatcgttttttgcgcggtagttgttagttcgggtcgcggcggcgcgttttgtttatcgtgatatcgtatttgagcgcgatgttttgtagcgtgtcgttcgcgcggattcggtgttttatatggcgttcgatgacgtcggcgtttagcggcgttcgtacgttggcggtgttgtcgtacgagcgggttttggtgcgggttaggtttagcgatagttcggttttttcggattcggagtcggagcgcgagcgcggcggcggcgagggggtcgagggtcgcggcgcgcgggggtcgttttttcgtagggatagtgcgggcgaggaattcgttatgggttttgtcgaggtcgtcgggtcggggagtttgttaagggggcggcgtttttttttttttcgtcgtcgtcgtcgtttttttttttttataggggttgtagtaggtcgtttcgcgggggcggcggacgggaagtcgaggcggggagtcgtaggtcgggtatggcgggcgtttttttttttgcgttttgtttgtttcgggcgttcgcggtatacgtatttgtaaggttaagagcgaaagtagttttcgtcgcggtttgtcggtatcgggaaga

SEQ ID NO: 26100 - DNA, 826 bp, Artificial Sequence
  chemically treated genomic DNA (Homo sapiens) CpG-island No: 26100
tcttcccgataccgacaaaccgcgacgaaaactactttcgctcttaaccttacaaatacgtataccgcgaacgcccgaaacaaacaaaacgcaaaaaaaaaaacgcccgccatacccgacctacgactccccgcctcgacttcccgtccgccgcccccgcgaaacgacctactacaacccctataaaaaaaaaaaaacgacgacgacgacgaaaaaaaaaaaaacgccgcccccttaacaaactccccgacccgacgacctcgacaaaacccataacgaattcctcgcccgcactatccctacgaaaaaacgacccccgcgcgccgcgaccctcgaccccctcgccgccgccgcgctcgcgctccgactccgaatccgaaaaaaccgaactatcgctaaacctaacccgcaccaaaacccgctcgtacgacaacaccgccaacgtacgaacgccgctaaacgccgacgtcatcgaacgccatataaaacaccgaatccgcgcgaacgacacgctacaaaacatcgcgctcaaatacgatatcacgataaacaaaacgcgccgccgcgacccgaactaacaactaccgcgcaaaaaacgatacgactcgaaatacgataaaaataaaaataaaactacgaataaaaatttaaaaaataaaaaatcgcaaaaacgaccgtacgtccccgaacgactcgactcccaaaactcgctcaacgcgcgctactaaccaccgcaataatcgccaaaactaatcctacaacgaaaaaaacgaaccgccaaaactccctccctaaataactacatcgaattcccgataccccgccc

SEQ ID NO: 26101 - DNA, 590 bp, Artificial Sequence
  chemically treated genomic DNA (Homo sapiens) CpG-island No: 26101
gttgcggtttagcgggttgtagaggttgcggtatcgtagtgcggggcgcgggatttatatttcggcgggcgtttttcgttcgggcgtagcgtttggtttttcggcgtagtcgatcgggtcgggaggcgagaggcgagaggcggttcggttttgtacgttcgttcggtcgatcgtttatgtcgcggagtattttttcgcgggtagggagggtacggcggttatcgcgttgcgggttcgggggttgtagatatcggttgtttagaataggttttattcgtttttcggggcgtttattcgttcgtgcgtttatttcggagtcggttgtgttggtcgttagttcgttagtttcggtggagcggggtcgggagaataggggcggcgtcgtggtcggggcgagcgcggcgattaataggcggttttcggtcgggcgcggcgtcggggcgcgcggttgtagcggagtaggttgggaagcgtagttttcggttgagtttcgtcgcggtttcgtagttttttagtttcgttttttttcgataggtgttttttttcggaatcggggtttgaatttcgttatagttttgtaggggaggaag

SEQ ID NO: 26102 - DNA, 590 bp, Artificial Sequence
  chemically treated genomic DNA (Homo sapiens) CpG-island No: 26102
cttcctcccctacaaaactataacgaaattcaaaccccgattccgaaaaaaaacacctatcgaaaaaaaacgaaactaaaaaactacgaaaccgcgacgaaactcaaccgaaaactacgcttcccaacctactccgctacaaccgcgcgccccgacgccgcgcccgaccgaaaaccgcctattaatcgccgcgctcgccccgaccacgacgccgcccctattctcccgaccccgctccaccgaaactaacgaactaacgaccaacacaaccgactccgaaataaacgcacgaacgaataaacgccccgaaaaacgaataaaacctattctaaacaaccgatatctacaacccccgaacccgcaacgcgataaccgccgtaccctccctacccgcgaaaaaatactccgcgacataaacgatcgaccgaacgaacgtacaaaaccgaaccgcctctcgcctctcgcctcccgacccgatcgactacgccgaaaaaccaaacgctacgcccgaacgaaaaacgcccgccgaaatataaatcccgcgccccgcactacgataccgcaacctctacaacccgctaaaccgcaac

SEQ ID NO: 26103 - DNA, 590 bp, Artificial Sequence
  chemically treated genomic DNA (Homo sapiens) CpG-island No: 26103
tttttttttttgtagagttgtggcggggtttagatttcgatttcgggagaggatatttgtcggggaagggcggggttgggggattgcggggtcgcggcgaggtttagtcgggaattacgttttttagtttgtttcgttgtagtcgcgcgtttcggcgtcgcgttcggtcgggagtcgtttgttgatcgtcgcgttcgtttcggttacggcgtcgtttttgttttttcggtttcgttttatcggggttgacggattgacggttagtatagtcggtttcgggatgagcgtacggacgggtgagcgtttcggggggcgggtggggtttgttttggatagtcggtgtttgtagttttcgggttcgtagcgcggtggtcgtcgtgttttttttgttcgcgggaggatgtttcgcgatatgggcggtcggtcgggcgggcgtgtagagtcgggtcgtttttcgtttttcgtttttcggttcggtcggttgcgtcgggagattaggcgttgcgttcgggcgggaggcgttcgtcggggtgtgagtttcgcgtttcgtattgcggtgtcgtagtttttgtagttcgttgggtcgtagt

SEQ ID NO: 26104 - DNA, 590 bp, Artificial Sequence
  chemically treated genomic DNA (Homo sapiens) CpG-island No: 26104
actacgacccaacgaactacaaaaactacgacaccgcaatacgaaacgcgaaactcacaccccgacgaacgcctcccgcccgaacgcaacgcctaatctcccgacgcaaccgaccgaaccgaaaaacgaaaaacgaaaaacgacccgactctacacgcccgcccgaccgaccgcccatatcgcgaaacatcctcccgcgaacaaaaaaaacacgacgaccaccgcgctacgaacccgaaaactacaaacaccgactatccaaaacaaaccccacccgccccccgaaacgctcacccgtccgtacgctcatcccgaaaccgactatactaaccgtcaatccgtcaaccccgataaaacgaaaccgaaaaaacaaaaacgacgccgtaaccgaaacgaacgcgacgatcaacaaacgactcccgaccgaacgcgacgccgaaacgcgcgactacaacgaaacaaactaaaaaacgtaattcccgactaaacctcgccgcgaccccgcaatcccccaaccccgcccttccccgacaaatatcctctcccgaaatcgaaatctaaaccccgccacaactctacaaaaaaaaaaa

SEQ ID NO: 26105 - DNA, 775 bp, Artificial Sequence
  chemically treated genomic DNA (Homo sapiens) CpG-island No: 26105
tcggcgacgagggcgagcgttttcgggtttattacgagtacggggatttcggcggttagcgagtagaggagtacggggggtacggcgttgttgtttttcgggttcgggtagggtttgcggtaggcgttgtcgtggtagaagaagttttgtacgtttacggtgaacgtgttcgtatattcgaagtagtacgttagtattatcgtttttgttatgattattatttggaaatagagtatgttgttggtgagcgtcgcgggtagtaggggtatgtacgtttttcgggtcgggtcgagtcgagtcgagcgggcggtcgacgcggtgggtttttttttcggttcgtcgaggtagttatcgggggcgcggcggcggaggcggcgggaggacgaggtacgggaggcgggatggagtcgttggaggaagaggcggaggtaggttcgggtttcgaggcgtcggtaggttgtagaggaggcggttattttcggacgagtttttttttttttgttcgttttttgttcgtcgtaagcgtcgttcgtttcggcgcggggtcgcgagggagggcggggagtttcgggcgacgggtagcggtcgttgcgtttttgtacgagattattcgagaagtagcggcgttgggttaattttttaggttagttcggaggaggcgttgcgtgggcggacggggcggtagtcggcgggatagcggtatttgtattttttatagggcggacgttgtggggttggagaagtttttggcgggggtaaaattaaaaggggggga

SEQ ID NO: 26106 - DNA, 775 bp, Artificial Sequence
  chemically treated genomic DNA (Homo sapiens) CpG-island No: 26106
tcccccccttttaattttacccccgccaaaaacttctccaaccccacaacgtccgccctataaaaaatacaaataccgctatcccgccgactaccgccccgtccgcccacgcaacgcctcctccgaactaacctaaaaaattaacccaacgccgctacttctcgaataatctcgtacaaaaacgcaacgaccgctacccgtcgcccgaaactccccgccctccctcgcgaccccgcgccgaaacgaacgacgcttacgacgaacaaaaaacgaacaaaaaaaaaaaaactcgtccgaaaataaccgcctcctctacaacctaccgacgcctcgaaacccgaacctacctccgcctcttcctccaacgactccatcccgcctcccgtacctcgtcctcccgccgcctccgccgccgcgcccccgataactacctcgacgaaccgaaaaaaaaacccaccgcgtcgaccgcccgctcgactcgactcgacccgacccgaaaaacgtacatacccctactacccgcgacgctcaccaacaacatactctatttccaaataataatcataacaaaaacgataatactaacgtactacttcgaatatacgaacacgttcaccgtaaacgtacaaaacttcttctaccacgacaacgcctaccgcaaaccctacccgaacccgaaaaacaacaacgccgtaccccccgtactcctctactcgctaaccgccgaaatccccgtactcgtaataaacccgaaaacgctcgccctcgtcgccga

SEQ ID NO: 26107 - DNA, 775 bp, Artificial Sequence
  chemically treated genomic DNA (Homo sapiens) CpG-island No: 26107
ttttttttttttgattttattttcgttaggagtttttttagttttatagcgttcgttttgtgaggggtataggtgtcgttgtttcgtcggttgtcgtttcgttcgtttacgtagcgtttttttcgggttagtttgggggattgatttagcgtcgttgtttttcgaatggtttcgtgtaggggcgtagcggtcgttgttcgtcgttcgggatttttcgttttttttcgcgatttcgcgtcggggcgggcggcgtttgcggcgggtagggggcgggtaggggagagggggttcgttcgggggtagtcgttttttttgtagtttgtcggcgtttcgaagttcggatttgttttcgtttttttttttagcggttttatttcgtttttcgtgtttcgttttttcgtcgttttcgtcgtcgcgttttcggtggttgtttcggcggatcggggagggggtttatcgcgtcgatcgttcgttcggttcggttcggttcggttcgggaggcgtgtatgtttttgttgttcgcggcgtttattagtagtatgttttatttttagatggtgattatggtagggacggtgatgttggcgtattatttcgagtatacggatacgtttatcgtgaacgtgtagggttttttttgttacgatagcgtttatcgtaaattttattcgggttcggaggatagtagcgtcgtgtttttcgtgtttttttattcgttggtcgtcggggttttcgtgttcgtggtaagttcgggggcgttcgttttcgtcgtcga

SEQ ID NO: 26108 - DNA, 775 bp, Artificial Sequence
  chemically treated genomic DNA (Homo sapiens) CpG-island No: 26108
tcgacgacgaaaacgaacgcccccgaacttaccacgaacacgaaaaccccgacgaccaacgaataaaaaaacacgaaaaacacgacgctactatcctccgaacccgaataaaatttacgataaacgctatcgtaacaaaaaaaaccctacacgttcacgataaacgtatccgtatactcgaaataatacgccaacatcaccgtccctaccataatcaccatctaaaaataaaacatactactaataaacgccgcgaacaacaaaaacatacacgcctcccgaaccgaaccgaaccgaaccgaacgaacgatcgacgcgataaaccccctccccgatccgccgaaacaaccaccgaaaacgcgacgacgaaaacgacgaaaaaacgaaacacgaaaaacgaaataaaaccgctaaaaaaaaaaacgaaaacaaatccgaacttcgaaacgccgacaaactacaaaaaaaacgactacccccgaacgaaccccctctcccctacccgccccctacccgccgcaaacgccgcccgccccgacgcgaaatcgcgaaaaaaaacgaaaaatcccgaacgacgaacaacgaccgctacgcccctacacgaaaccattcgaaaaacaacgacgctaaatcaatcccccaaactaacccgaaaaaaacgctacgtaaacgaacgaaacgacaaccgacgaaacaacgacacctatacccctcacaaaacgaacgctataaaactaaaaaaactcctaacgaaaataaaatcaaaaaaaaaaaa

SEQ ID NO: 26109 - DNA, 648 bp, Artificial Sequence
  chemically treated genomic DNA (Homo sapiens) CpG-island No: 26109
cgtagcgtttcgttgaagaggaagtttttaatttacgttttaattttaggttttcgtttttgcggtttttcggttcgtatttgggattttttttgtttttttttcggtttcggggttttatcgggtttcgttgtcgcgttgtttgtcgatgggggaggggcgcgtacgtgttcgcgtcgttttcgtttaaataatgtttcggagagcggggcgcgttttcggtcggtttttttttgcgttcgttaatatttatttttttttcgggttttcggttgtagcgcgggtttcgtcggtcgtcgcgagagagtacggcgaggtgagagagcgggcgaagtttcgcggagttgtttcgttataaggttttagcgattttcgtaatttgcggaagtatacggcgcggtggagttcgttcggcgcgtttcgtttcgtacgttagtagttgggcgcgtcggggcgcgcgcggcggcgcgcgcggtttcggggcggagtttttagggatgagggcggggcggggcggggcggggttggttcgggttgggatttcggttcgcgagggtattttttgggtagtgtgggcgtcgatttttgtaaaggtatagtcgtttattatttttttgttttagaagatggcgaattttaattttaagt

SEQ ID NO: 26110 - DNA, 648 bp, Artificial Sequence
  chemically treated genomic DNA (Homo sapiens) CpG-island No: 26110
acttaaaattaaaattcgccatcttctaaaacaaaaaaataataaacgactatacctttacaaaaatcgacgcccacactacccaaaaaataccctcgcgaaccgaaatcccaacccgaaccaaccccgccccgccccgccccgccctcatccctaaaaactccgccccgaaaccgcgcgcgccgccgcgcgcgccccgacgcgcccaactactaacgtacgaaacgaaacgcgccgaacgaactccaccgcgccgtatacttccgcaaattacgaaaatcgctaaaaccttataacgaaacaactccgcgaaacttcgcccgctctctcacctcgccgtactctctcgcgacgaccgacgaaacccgcgctacaaccgaaaacccgaaaaaaaaataaatattaacgaacgcaaaaaaaaaccgaccgaaaacgcgccccgctctccgaaacattatttaaacgaaaacgacgcgaacacgtacgcgcccctcccccatcgacaaacaacgcgacaacgaaacccgataaaaccccgaaaccgaaaaaaaaacaaaaaaaatcccaaatacgaaccgaaaaaccgcaaaaacgaaaacctaaaattaaaacgtaaattaaaaacttcctcttcaacgaaacgctacg

SEQ ID NO: 26111 - DNA, 648 bp, Artificial Sequence
  chemically treated genomic DNA (Homo sapiens) CpG-island No: 26111
atttggggttgaaattcgttattttttggggtaggaaagtgatggacgattgtgtttttgtaagaatcgacgtttatattgtttaggaagtgttttcgcgggtcggggttttagttcggattagtttcgtttcgtttcgtttcgtttttatttttgggagtttcgtttcgaggtcgcgcgcgtcgtcgcgcgcgtttcgacgcgtttagttgttgacgtgcggggcggaacgcgtcgggcgggttttatcgcgtcgtgtgttttcgtaggttgcgggggtcgttggggttttgtggcggggtagtttcgcggggtttcgttcgtttttttatttcgtcgtgttttttcgcggcggtcggcggggttcgcgttgtagtcggagattcggagaaagggtgagtgttggcgggcgtaggaagggatcggtcgggagcgcgtttcgtttttcggggtattgtttgggcgggggcggcgcgggtacgtgcgcgttttttttttatcggtaggtagcgcggtagcgggattcggtgaggtttcggggtcgaggggagggtagggaggattttaggtgcgggtcggggagtcgtagaagcgggagtttggaattggaacgtgagttgggggttttttttttagcggggcgttgcg

SEQ ID NO: 26112 - DNA, 648 bp, Artificial Sequence
  chemically treated genomic DNA (Homo sapiens) CpG-island No: 26112
cgcaacgccccgctaaaaaaaaaacccccaactcacgttccaattccaaactcccgcttctacgactccccgacccgcacctaaaatcctccctaccctcccctcgaccccgaaacctcaccgaatcccgctaccgcgctacctaccgataaaaaaaaaacgcgcacgtacccgcgccgcccccgcccaaacaataccccgaaaaacgaaacgcgctcccgaccgatcccttcctacgcccgccaacactcaccctttctccgaatctccgactacaacgcgaaccccgccgaccgccgcgaaaaaacacgacgaaataaaaaaacgaacgaaaccccgcgaaactaccccgccacaaaaccccaacgacccccgcaacctacgaaaacacacgacgcgataaaacccgcccgacgcgttccgccccgcacgtcaacaactaaacgcgtcgaaacgcgcgcgacgacgcgcgcgacctcgaaacgaaactcccaaaaataaaaacgaaacgaaacgaaacgaaactaatccgaactaaaaccccgacccgcgaaaacacttcctaaacaatataaacgtcgattcttacaaaaacacaatcgtccatcactttcctaccccaaaaaataacgaatttcaaccccaaat

SEQ ID NO: 26113 - DNA, 910 bp, Artificial Sequence
  chemically treated genomic DNA (Homo sapiens) CpG-island No: 26113
gcgtcgtttgtagtgtttacggattaaacgggggtgatttttgaggtcgtcggtagtttcgaggtcgcgtgggattcgggttttaggcgttttcgttttgtcgtttattttatttttttggtttcgggttttcgcgtttttttattatagggtggggattcgttgcggtttttatttagtttatatttgtacgacgtggttattgttgtagtcgcgttcgcgtcgtcgatgggtagtacgtagatttcgcgggcgtcgggcgtaggtggcgcggaggattgcgcggaggatttgtttttgcggtcgttcgttttcggttcgcgtttcggcggcggatttttgggttcggcgggcgtggtttataagtcgaagtttcgttggtattgagtgagcggtacgtttcggtcggaatttcgggcgttcgcgggaggttggtttttgcgcgaggcggcgtcgttcgtgttcggtttttcgttgtcgaggttcgagtagtcgtgtagagtgagcggtatcgttacgtcggagcggtttagttggttttaacgtcgcgttaggtagtataggcggttgatatagggttacgttatgttagtttcggcgttcgtcgtttcgttttcggcgcgcggcgttttcggtcgcgttttttgcgtttagcgttttcgttttcgcggttcgtttcgcgtcgtcgtagtatcgtttttcggtacgagggtgggcgtttcgggagggggcgtattcggcggtagttttatttggtcggggtcggttgcgtacggttggagttggagggagcgcggatgggggaaaggttgtatcgtcgttagggggtatcggaaatcgtttgtatttatttataagtgtttatttcgaagaatgttttagaattgaatttaaagtttttttagtgtta

SEQ ID NO: 26114 - DNA, 910 bp, Artificial Sequence
  chemically treated genomic DNA (Homo sapiens) CpG-island No: 26114
taacactaaaaaaactttaaattcaattctaaaacattcttcgaaataaacacttataaataaatacaaacgatttccgataccccctaacgacgatacaacctttcccccatccgcgctccctccaactccaaccgtacgcaaccgaccccgaccaaataaaactaccgccgaatacgccccctcccgaaacgcccaccctcgtaccgaaaaacgatactacgacgacgcgaaacgaaccgcgaaaacgaaaacgctaaacgcaaaaaacgcgaccgaaaacgccgcgcgccgaaaacgaaacgacgaacgccgaaactaacataacgtaaccctatatcaaccgcctatactacctaacgcgacgttaaaaccaactaaaccgctccgacgtaacgataccgctcactctacacgactactcgaacctcgacaacgaaaaaccgaacacgaacgacgccgcctcgcgcaaaaaccaacctcccgcgaacgcccgaaattccgaccgaaacgtaccgctcactcaataccaacgaaacttcgacttataaaccacgcccgccgaacccaaaaatccgccgccgaaacgcgaaccgaaaacgaacgaccgcaaaaacaaatcctccgcgcaatcctccgcgccacctacgcccgacgcccgcgaaatctacgtactacccatcgacgacgcgaacgcgactacaacaataaccacgtcgtacaaatataaactaaataaaaaccgcaacgaatccccaccctataataaaaaaacgcgaaaacccgaaaccaaaaaaataaaataaacgacaaaacgaaaacgcctaaaacccgaatcccacgcgacctcgaaactaccgacgacctcaaaaatcacccccgtttaatccgtaaacactacaaacgacgc

SEQ ID NO: 26115 - DNA, 910 bp, Artificial Sequence
  chemically treated genomic DNA (Homo sapiens) CpG-island No: 26115
tgatattgagggaattttggatttaattttgaggtatttttcgagatggatatttgtaaatgaatgtaggcggttttcggtgttttttggcgacggtgtagttttttttttattcgcgttttttttagttttagtcgtgcgtagtcggtttcggttaagtggggttgtcgtcgagtgcgttttttttcgggacgtttattttcgtgtcggggggcggtgttgcggcggcgcggggcgggtcgcgggggcggggacgttgggcgtaggaggcgcggtcgggagcgtcgcgcgtcgggagcggggcggcgggcgtcggggttggtatggcgtggttttgtattagtcgtttgtgttgtttggcgcggcgttggaattagttggatcgtttcgacgtggcggtgtcgtttattttgtacggttattcggatttcgatagcgaggagtcgggtacgggcggcgtcgtttcgcgtaggggttagtttttcgcgggcgttcgggatttcggtcgggacgtgtcgtttatttagtattagcgggatttcggtttgtggattacgttcgtcgggtttaaggattcgtcgtcggggcgcggatcgggggcgggcggtcgtaggggtaaatttttcgcgtagtttttcgcgttatttgcgttcggcgttcgcggggtttacgtgttgtttatcggcgacgcggacgcggttgtagtagtgattacgtcgtataggtatgggttgggtagggatcgtaacgagtttttattttgtggtgggaggacgcggaggttcggagttagagggatggggtgggcggtagagcggaggcgtttggagttcggattttacgcgatttcggagttgtcggcggttttagaggttattttcgtttggttcgtgggtattgtaggcggcgt

SEQ ID NO: 26116 - DNA, 910 bp, Artificial Sequence
  chemically treated genomic DNA (Homo sapiens) CpG-island No: 26116
acgccgcctacaatacccacgaaccaaacgaaaataacctctaaaaccgccgacaactccgaaatcgcgtaaaatccgaactccaaacgcctccgctctaccgcccaccccatccctctaactccgaacctccgcgtcctcccaccacaaaataaaaactcgttacgatccctacccaacccatacctatacgacgtaatcactactacaaccgcgtccgcgtcgccgataaacaacacgtaaaccccgcgaacgccgaacgcaaataacgcgaaaaactacgcgaaaaatttacccctacgaccgcccgcccccgatccgcgccccgacgacgaatccttaaacccgacgaacgtaatccacaaaccgaaatcccgctaatactaaataaacgacacgtcccgaccgaaatcccgaacgcccgcgaaaaactaacccctacgcgaaacgacgccgcccgtacccgactcctcgctatcgaaatccgaataaccgtacaaaataaacgacaccgccacgtcgaaacgatccaactaattccaacgccgcgccaaacaacacaaacgactaatacaaaaccacgccataccaaccccgacgcccgccgccccgctcccgacgcgcgacgctcccgaccgcgcctcctacgcccaacgtccccgcccccgcgacccgccccgcgccgccgcaacaccgccccccgacacgaaaataaacgtcccgaaaaaaaacgcactcgacgacaaccccacttaaccgaaaccgactacgcacgactaaaactaaaaaaaacgcgaataaaaaaaaaactacaccgtcgccaaaaaacaccgaaaaccgcctacattcatttacaaatatccatctcgaaaaatacctcaaaattaaatccaaaattccctcaatatca

SEQ ID NO: 26117 - DNA, 764 bp, Artificial Sequence
  chemically treated genomic DNA (Homo sapiens) CpG-island No: 26117
tttagagcgggggtcgtcgcgatttcgtcgagtaggaagaggcggagcgcgggacggtcgcgggaaaaggcgcgcggaaggggttttgttatcgcgttatttggtttgttttcgtttcgtcgcgttatttcgtttgttttcgtttttcgttcgtcgcgttatgtttgtggtcggttcggagttgtcgcgtcggtttttgtttttcgtcgtataggagcgggacgtcgagtcgcgttcgtcgtacggggagttgtagtatttggggtagatttaatatatttttcgttgcggcgttaggaaggacgatcgtacgggtatcggtattttgtcggtattcggtatgtaggcgcgttatagtttgagaggtgacgtcgcgggtttttgcgggacgggtggcgggaaggagggaggcgcggttggggagagcgttcgggagttgtcgggcgttgcggatttcgtttagttttaattttaattttgcgagggagggggacgtatcgtttttttcgttttatagacgtcgaaacggagggttttattagggacgtgattggcgcgggtaatatatatagtagcgatagtcgggaggtaagtcgcgttttagcggtttcgcggtcgggttcgtagtcgttttagtgatgtcgtggttttcgaggcgggcgttatcgggtagcgtttgtttagtgttggagggttagggagagttgtttgggtttgatcgcgcgtcggttttaaagttttggttttggtttttttttcgtttt

SEQ ID NO: 26118 - DNA, 764 bp, Artificial Sequence
  chemically treated genomic DNA (Homo sapiens) CpG-island No: 26118
aaaacgaaaaaaaaaccaaaaccaaaactttaaaaccgacgcgcgatcaaacccaaacaactctccctaaccctccaacactaaacaaacgctacccgataacgcccgcctcgaaaaccacgacatcactaaaacgactacgaacccgaccgcgaaaccgctaaaacgcgacttacctcccgactatcgctactatatatattacccgcgccaatcacgtccctaataaaaccctccgtttcgacgtctataaaacgaaaaaaacgatacgtccccctccctcgcaaaattaaaattaaaactaaacgaaatccgcaacgcccgacaactcccgaacgctctccccaaccgcgcctccctccttcccgccacccgtcccgcaaaaacccgcgacgtcacctctcaaactataacgcgcctacataccgaataccgacaaaataccgatacccgtacgatcgtccttcctaacgccgcaacgaaaaatatattaaatctaccccaaatactacaactccccgtacgacgaacgcgactcgacgtcccgctcctatacgacgaaaaacaaaaaccgacgcgacaactccgaaccgaccacaaacataacgcgacgaacgaaaaacgaaaacaaacgaaataacgcgacgaaacgaaaacaaaccaaataacgcgataacaaaaccccttccgcgcgccttttcccgcgaccgtcccgcgctccgcctcttcctactcgacgaaatcgcgacgacccccgctctaaa

SEQ ID NO: 26119 - DNA, 764 bp, Artificial Sequence
  chemically treated genomic DNA (Homo sapiens) CpG-island No: 26119
aaaacggaggaggggttaaagttaggattttgagatcggcgcgcggttaagtttaggtagttttttttaattttttagtattgggtaaacgttgttcgatgacgttcgtttcgggggttacggtattattggggcgattgcgagttcggtcgcggagtcgttgggacgcggtttatttttcggttgtcgttgttgtgtgtgttgttcgcgttagttacgtttttaatgggatttttcgtttcggcgtttgtaaggcgaggaggacgatgcgtttttttttttcgtaggattgaggttaggattaaacggggttcgtagcgttcggtagttttcgagcgttttttttagtcgcgtttttttttttttcgttattcgtttcgtaggggttcgcggcgttattttttaggttgtagcgcgtttgtatgtcgaatatcgatagggtgtcggtgttcgtgcggtcgttttttttgacgtcgtagcggaggatgtgttggatttgttttaggtattgtagtttttcgtgcggcggacgcggttcggcgtttcgtttttgtgcggcggggggtaagggtcggcgcggtagtttcgagtcggttataggtatggcgcggcgggcgggggacggaggtaggcgaagtggcgcggcgggacggaggtaggttaagtggcgcggtggtaggatttttttcgcgcgttttttttcgcggtcgtttcgcgtttcgtttttttttgttcggcggggtcgcggcggttttcgttttaga

SEQ ID NO: 26120 - DNA, 764 bp, Artificial Sequence
  chemically treated genomic DNA (Homo sapiens) CpG-island No: 26120
tctaaaacgaaaaccgccgcgaccccgccgaacaaaaaaaaacgaaacgcgaaacgaccgcgaaaaaaaacgcgcgaaaaaaatcctaccaccgcgccacttaacctacctccgtcccgccgcgccacttcgcctacctccgtcccccgcccgccgcgccatacctataaccgactcgaaactaccgcgccgacccttaccccccgccgcacaaaaacgaaacgccgaaccgcgtccgccgcacgaaaaactacaatacctaaaacaaatccaacacatcctccgctacgacgtcaaaaaaaacgaccgcacgaacaccgacaccctatcgatattcgacatacaaacgcgctacaacctaaaaaataacgccgcgaacccctacgaaacgaataacgaaaaaaaaaaaaacgcgactaaaaaaaacgctcgaaaactaccgaacgctacgaaccccgtttaatcctaacctcaatcctacgaaaaaaaaaaacgcatcgtcctcctcgccttacaaacgccgaaacgaaaaatcccattaaaaacgtaactaacgcgaacaacacacacaacaacgacaaccgaaaaataaaccgcgtcccaacgactccgcgaccgaactcgcaatcgccccaataataccgtaacccccgaaacgaacgtcatcgaacaacgtttacccaatactaaaaaattaaaaaaaactacctaaacttaaccgcgcgccgatctcaaaatcctaactttaacccctcctccgtttt

SEQ ID NO: 26121 - DNA, 1618 bp, Artificial Sequence
  chemically treated genomic DNA (Homo sapiens) CpG-island No: 26121
ttagcgtcgttagtagcgcggggggtagcgcggcgggcgcggtggggtcgggcggcgggggcgacgcggcgggtagcgcggggtttaggtcgttattgtttcgttcggtcgttttcgtcgcggtcgtcgtgtttagcgtcggcgagttgaggtagaaataggacgcgaagttcgagtcgtcgcggtttacgttttgcgaggttttttagatttgtatttatagggtattggtcggttttttttgttcgggttggatttaggttacgcgcggatttatttacgcgtcgttttcgcggggttcgcgcgttcgttcgtttcgacgcggtttcgttttcgtcgcgtttcgaggttcggtcgcgcgcgtacggacggacggacgggtttgggtcggtggcggcggcggcggcggcggcggcgggcgggtcgagtttcggttttttgttttagtcgcgttttcgtcgggtttcggcgtggggcggcggcggcggtgatgggtttcggtaggtcgcggcgggcggtttcggcgtttggcgcgttttagcgggcggttgcggttttcgggttttcgttttacgcggcgcggggcgggcgcgggggtcgcggcggcggcggcgttttattcgggtcgcggggagaggttatcggagaagggcgggcggcggggtcgagggggcgggtttaggcgtcgagcggttgaaggattcgcgggaggcgtcgtcgttcgtgcggttagtttttagttacgttcgcgtcgttggttcggcgtttttgcggcggcggcggcggcggcggtgaaaagatattttcggcggcgatagcgcgggggaaggagggggtcgtcgtcgcgttcgttttaatgaggggcgggggagggggcggggacgggggcggtaggaggaagcgcggtttcggtcgtcgggtcgtgtcgtcggtgcgtacgcgcgatcgattttaaatttttattagatattgtcgtcgtggttatcgcgtttgcgcgttggggtttcgtcggtcgcgggcggggtgaggacggcgttagaagttacgcgattgggaggggttggagggagaggcggtggcgttgagttattattgattaggtcggcgttgggtggaataggtagcggttggaaggttcgtacgtcgttttcggttcgtcgcggcgcgtagatttcggcgtgtagatatgcgcgttagggtcggtgttatcgggttgtcgtttgagtcgcgttgcgcgtgcgtagggtagcgtggtcgttatcgtcgtcggtggaagttttcgagtagtcgggcgggggtagcggacgttatcgtaggcgtttttttcgtcggtcggtttttttttttgacgtaagggcgggtttcggtcgtagatttcgttttaggttttttattcgagggttcgtgtagtaggttacgttgcgttttttggggttcgcgcgtcggtttacgtgttttttgtatttcgcggggtgagcggttagcgtgtcgtgtcgggtggttggtttcgtcgtttcgggagtcgggaggatacgcggtagagttttgttttttagcgggtttgtttataggcgttgggtttgttttttaaaatgattttttatgcgaaaagtgaagt

SEQ ID NO: 26122 - DNA, 1618 bp, Artificial Sequence
  chemically treated genomic DNA (Homo sapiens) CpG-island No: 26122
acttcacttttcgcataaaaaatcattttaaaaaacaaacccaacgcctataaacaaacccgctaaaaaacaaaactctaccgcgtatcctcccgactcccgaaacgacgaaaccaaccacccgacacgacacgctaaccgctcaccccgcgaaatacaaaaaacacgtaaaccgacgcgcgaaccccaaaaaacgcaacgtaacctactacacgaaccctcgaataaaaaacctaaaacgaaatctacgaccgaaacccgcccttacgtcaaaaaaaaaaaccgaccgacgaaaaaaacgcctacgataacgtccgctacccccgcccgactactcgaaaacttccaccgacgacgataacgaccacgctaccctacgcacgcgcaacgcgactcaaacgacaacccgataacaccgaccctaacgcgcatatctacacgccgaaatctacgcgccgcgacgaaccgaaaacgacgtacgaaccttccaaccgctacctattccacccaacgccgacctaatcaataataactcaacgccaccgcctctccctccaacccctcccaatcgcgtaacttctaacgccgtcctcaccccgcccgcgaccgacgaaaccccaacgcgcaaacgcgataaccacgacgacaatatctaataaaaatttaaaatcgatcgcgcgtacgcaccgacgacacgacccgacgaccgaaaccgcgcttcctcctaccgcccccgtccccgccccctcccccgcccctcattaaaacgaacgcgacgacgaccccctccttcccccgcgctatcgccgccgaaaatatcttttcaccgccgccgccgccgccgccgcaaaaacgccgaaccaacgacgcgaacgtaactaaaaactaaccgcacgaacgacgacgcctcccgcgaatccttcaaccgctcgacgcctaaacccgccccctcgaccccgccgcccgcccttctccgataacctctccccgcgacccgaataaaacgccgccgccgccgcgacccccgcgcccgccccgcgccgcgtaaaacgaaaacccgaaaaccgcaaccgcccgctaaaacgcgccaaacgccgaaaccgcccgccgcgacctaccgaaacccatcaccgccgccgccgccccacgccgaaacccgacgaaaacgcgactaaaacaaaaaaccgaaactcgacccgcccgccgccgccgccgccgccgccgccaccgacccaaacccgtccgtccgtccgtacgcgcgcgaccgaacctcgaaacgcgacgaaaacgaaaccgcgtcgaaacgaacgaacgcgcgaaccccgcgaaaacgacgcgtaaataaatccgcgcgtaacctaaatccaacccgaacaaaaaaaaccgaccaataccctataaatacaaatctaaaaaacctcgcaaaacgtaaaccgcgacgactcgaacttcgcgtcctatttctacctcaactcgccgacgctaaacacgacgaccgcgacgaaaacgaccgaacgaaacaataacgacctaaaccccgcgctacccgccgcgtcgcccccgccgcccgaccccaccgcgcccgccgcgctaccccccgcgctactaacgacgctaa

SEQ ID NO: 26123 - DNA, 1618 bp, Artificial Sequence
  chemically treated genomic DNA (Homo sapiens) CpG-island No: 26123
attttatttttcgtatagaaaattattttaaaaagtaaatttaacgtttgtaagtagattcgttagggagtaggattttgtcgcgtgttttttcggttttcggagcggcggagttagttattcggtacggtacgttggtcgtttatttcgcgaggtgtagggagtacgtgggtcgacgcgcggattttagagagcgtagcgtgatttgttgtacggattttcggatgagagatttggggcgggatttgcgatcggggttcgtttttacgttaggagggagggtcggtcggcgggggaagcgtttgcggtggcgttcgttgttttcgttcggttgttcggaaatttttatcggcggcggtgacggttacgttgttttgcgtacgcgtagcgcggtttaggcggtagttcggtgatatcggttttagcgcgtatgtttgtacgtcggggtttgcgcgtcgcggcgggtcgagggcggcgtgcgggttttttagtcgttgtttattttatttaacgtcggtttagttagtaatggtttaacgttatcgtttttttttttagttttttttagtcgcgtagtttttgacgtcgtttttatttcgttcgcggtcgacggggttttaacgcgtaggcgcggtaattacggcggtagtgtttagtgaggatttgaaatcggtcgcgcgtgcgtatcggcgatacggttcggcgatcgaggtcgcgtttttttttgtcgttttcgttttcgttttttttttcgttttttattggagcggacgcggcggcggttttttttttttttcgcgttgtcgtcgtcgagagtgtttttttatcgtcgtcgtcgtcgtcgtcgtaggagcgtcgagttagcggcgcgagcgtgattgagggttagtcgtacgggcggcggcgtttttcgcgggttttttagtcgttcggcgtttgggttcgttttttcggtttcgtcgttcgttttttttcgatggttttttttcgcggttcgagtggaacgtcgtcgtcgtcgcggttttcgcgttcgtttcgcgtcgcgtgaagcgggagttcggagatcgtagtcgttcgttgggacgcgttaagcgtcggagtcgttcgtcgcggtttgtcggggtttattatcgtcgtcgtcgttttacgtcggagttcgacgggagcgcggttagagtaggaggtcggggttcggttcgttcgtcgtcgtcgtcgtcgtcgtcgttatcggtttaggttcgttcgttcgttcgtgcgcgcgcggtcgggtttcggggcgcggcgggggcggggtcgcgtcggggcgggcgggcgcgcgggtttcgcgggggcggcgcgtggatggattcgcgcgtggtttggatttagttcgagtagaaggggtcggttaatgttttgtggatgtagatttgggagatttcgtagggcgtgggtcgcggcggttcgggtttcgcgttttatttttgttttaattcgtcggcgttggatacggcggtcgcggcgggggcggtcgggcggggtagtggcggtttgggtttcgcgttgttcgtcgcgtcgttttcgtcgttcggttttatcgcgttcgtcgcgttgtttttcgcgttgttgacggcgttgg

SEQ ID NO: 26124 - DNA, 1618 bp, Artificial Sequence
  chemically treated genomic DNA (Homo sapiens) CpG-island No: 26124
ccaacgccgtcaacaacgcgaaaaacaacgcgacgaacgcgataaaaccgaacgacgaaaacgacgcgacgaacaacgcgaaacccaaaccgccactaccccgcccgaccgcccccgccgcgaccgccgtatccaacgccgacgaattaaaacaaaaataaaacgcgaaacccgaaccgccgcgacccacgccctacgaaatctcccaaatctacatccacaaaacattaaccgaccccttctactcgaactaaatccaaaccacgcgcgaatccatccacgcgccgcccccgcgaaacccgcgcgcccgcccgccccgacgcgaccccgcccccgccgcgccccgaaacccgaccgcgcgcgcacgaacgaacgaacgaacctaaaccgataacgacgacgacgacgacgacgacgaacgaaccgaaccccgacctcctactctaaccgcgctcccgtcgaactccgacgtaaaacgacgacgacgataataaaccccgacaaaccgcgacgaacgactccgacgcttaacgcgtcccaacgaacgactacgatctccgaactcccgcttcacgcgacgcgaaacgaacgcgaaaaccgcgacgacgacgacgttccactcgaaccgcgaaaaaaaaccatcgaaaaaaaacgaacgacgaaaccgaaaaaacgaacccaaacgccgaacgactaaaaaacccgcgaaaaacgccgccgcccgtacgactaaccctcaatcacgctcgcgccgctaactcgacgctcctacgacgacgacgacgacgacgataaaaaaacactctcgacgacgacaacgcgaaaaaaaaaaaaaaccgccgccgcgtccgctccaataaaaaacgaaaaaaaaaacgaaaacgaaaacgacaaaaaaaaacgcgacctcgatcgccgaaccgtatcgccgatacgcacgcgcgaccgatttcaaatcctcactaaacactaccgccgtaattaccgcgcctacgcgttaaaaccccgtcgaccgcgaacgaaataaaaacgacgtcaaaaactacgcgactaaaaaaaactaaaaaaaaaaacgataacgttaaaccattactaactaaaccgacgttaaataaaataaacaacgactaaaaaacccgcacgccgccctcgacccgccgcgacgcgcaaaccccgacgtacaaacatacgcgctaaaaccgatatcaccgaactaccgcctaaaccgcgctacgcgtacgcaaaacaacgtaaccgtcaccgccgccgataaaaatttccgaacaaccgaacgaaaacaacgaacgccaccgcaaacgcttcccccgccgaccgaccctccctcctaacgtaaaaacgaaccccgatcgcaaatcccgccccaaatctctcatccgaaaatccgtacaacaaatcacgctacgctctctaaaatccgcgcgtcgacccacgtactccctacacctcgcgaaataaacgaccaacgtaccgtaccgaataactaactccgccgctccgaaaaccgaaaaaacacgcgacaaaatcctactccctaacgaatctacttacaaacgttaaatttactttttaaaataattttctatacgaaaaataaaat

SEQ ID NO: 26125 - DNA, 699 bp, Artificial Sequence
  chemically treated genomic DNA (Homo sapiens) CpG-island No: 26125
ggtagcggcgtgtcggagggcggatggggttaggaggtcgttcggggggtggggtttgcggcgggtcggttttcgcgtgcgcgtcgtttcgtcgggtattttaaaagttcgtcggtagggcgcggcgttagtttcgtgtgtttcgtaggcgtggtgggcgcgttttggtagtcgttcgtttggttttcgcgggattcgggtttcggttcgacgtcggttttttttttgacgtttcgtcgtcggggttgttatggtttattttttgtattcgggttatacgtttcggaatatcgttttttttgacgtttagaaggatgttttgggttgttgcgtggtataggtgagtatcggggtgcggggggcgacgcggatttcggcgttacgtttagtttcggcgagcgcggcgagttttttgggacgttgtcgaggtatttgttggggagtgtggttcgcgcggggttgcggtttagatgtcgagttttttttaggcgtaggcgtcgtcgcggaggtgcgttgtcgggggaggcggtttgggcgtcgcggagcggggggggtttttttgcgttcggcgaagcgcgtggaatttgcgttttgaggtagcgcggcgagagtttagttttagagatcggggcgagtttttttaggatttttcgttttagtgcgggttgttgtgagtttagacgtaggtgtagggtatgg

SEQ ID NO: 26126 - DNA, 699 bp, Artificial Sequence
  chemically treated genomic DNA (Homo sapiens) CpG-island No: 26126
ccataccctacacctacgtctaaactcacaacaacccgcactaaaacgaaaaatcctaaaaaaactcgccccgatctctaaaactaaactctcgccgcgctacctcaaaacgcaaattccacgcgcttcgccgaacgcaaaaaaaccccccccgctccgcgacgcccaaaccgcctcccccgacaacgcacctccgcgacgacgcctacgcctaaaaaaaactcgacatctaaaccgcaaccccgcgcgaaccacactccccaacaaatacctcgacaacgtcccaaaaaactcgccgcgctcgccgaaactaaacgtaacgccgaaatccgcgtcgccccccgcaccccgatactcacctataccacgcaacaacccaaaacatccttctaaacgtcaaaaaaaacgatattccgaaacgtataacccgaatacaaaaaataaaccataacaaccccgacgacgaaacgtcaaaaaaaaaaccgacgtcgaaccgaaacccgaatcccgcgaaaaccaaacgaacgactaccaaaacgcgcccaccacgcctacgaaacacacgaaactaacgccgcgccctaccgacgaacttttaaaatacccgacgaaacgacgcgcacgcgaaaaccgacccgccgcaaaccccaccccccgaacgacctcctaaccccatccgccctccgacacgccgctacc

SEQ ID NO: 26127 - DNA, 699 bp, Artificial Sequence
  chemically treated genomic DNA (Homo sapiens) CpG-island No: 26127
ttatgttttgtatttacgtttaagtttatagtagttcgtattggggcgaggaattttgaggaggttcgtttcggtttttgggattgggttttcgtcgcgttgttttagggcgtaagttttacgcgtttcgtcgggcgtagaaaagtttttttcgtttcgcggcgtttaggtcgtttttttcgataacgtattttcgcggcgacgtttgcgtttggaaggggttcggtatttagatcgtagtttcgcgcgggttatattttttagtaagtgtttcggtagcgttttaggagattcgtcgcgttcgtcggagttggacgtggcgtcgaggttcgcgtcgtttttcgtatttcggtgtttatttgtattacgtagtagtttagggtatttttttgagcgttaggagggacgatgtttcggggcgtgtggttcgggtgtaagaaatgaattatggtaatttcggcggcggggcgttaaaaagagagtcggcgtcgagtcggagttcggatttcgcgagaattaagcgggcggttgttaggacgcgtttattacgtttgcgaggtatacggagttagcgtcgcgttttgtcggcgagtttttgaaatgttcggcgaggcgacgcgtacgcgggggtcggttcgtcgtagattttatttttcgggcggttttttagttttattcgtttttcgatacgtcgttgtt

SEQ ID NO: 26128 - DNA, 699 bp, Artificial Sequence
  chemically treated genomic DNA (Homo sapiens) CpG-island No: 26128
aacaacgacgtatcgaaaaacgaataaaactaaaaaaccgcccgaaaaataaaatctacgacgaaccgacccccgcgtacgcgtcgcctcgccgaacatttcaaaaactcgccgacaaaacgcgacgctaactccgtatacctcgcaaacgtaataaacgcgtcctaacaaccgcccgcttaattctcgcgaaatccgaactccgactcgacgccgactctctttttaacgccccgccgccgaaattaccataattcatttcttacacccgaaccacacgccccgaaacatcgtccctcctaacgctcaaaaaaataccctaaactactacgtaatacaaataaacaccgaaatacgaaaaacgacgcgaacctcgacgccacgtccaactccgacgaacgcgacgaatctcctaaaacgctaccgaaacacttactaaaaaatataacccgcgcgaaactacgatctaaataccgaaccccttccaaacgcaaacgtcgccgcgaaaatacgttatcgaaaaaaacgacctaaacgccgcgaaacgaaaaaaacttttctacgcccgacgaaacgcgtaaaacttacgccctaaaacaacgcgacgaaaacccaatcccaaaaaccgaaacgaacctcctcaaaattcctcgccccaatacgaactactataaacttaaacgtaaatacaaaacataa

SEQ ID NO: 26129 - DNA, 514 bp, Artificial Sequence
  chemically treated genomic DNA (Homo sapiens) CpG-island No: 26129
ggcgttcggtattaggagggtaacgaaggggtaggaggcgttgtcgttcgggcgtttttcgagtatagttaggaagttttttttattttatgggtttgcggtttttcgtcgggttgcgggcgtaggtagtttattatcgcggttaggtcggtttcggatatcgcggcggcgggcgcggcgagcggggatgcgcgggcgtcggggcggtagtcgtaacggattttgtttttttcgtgtaggtcggaggtttcgtttgggcgcgcggcgttcggttttttacgtgatcgttgcgggtgggtttgcgggcggaggacgggcgacggcggggcgggtttttaggtttcggttttttttttggcggcgcgttgggtttagcgtagggaagcggattcggtagggacggggagtgggacgcgcgaggggtagtaggggtaagagttcgggcgggtggtcgcgtgggttaaaggttaaaggttattttcgtaaatggtattaattgtgtagtttggtagtg

SEQ ID NO: 26130 - DNA, 514 bp, Artificial Sequence
  chemically treated genomic DNA (Homo sapiens) CpG-island No: 26130
cactaccaaactacacaattaataccatttacgaaaataacctttaacctttaacccacgcgaccacccgcccgaactcttacccctactacccctcgcgcgtcccactccccgtccctaccgaatccgcttccctacgctaaacccaacgcgccgccaaaaaaaaaaccgaaacctaaaaacccgccccgccgtcgcccgtcctccgcccgcaaacccacccgcaacgatcacgtaaaaaaccgaacgccgcgcgcccaaacgaaacctccgacctacacgaaaaaaacaaaatccgttacgactaccgccccgacgcccgcgcatccccgctcgccgcgcccgccgccgcgatatccgaaaccgacctaaccgcgataataaactacctacgcccgcaacccgacgaaaaaccgcaaacccataaaataaaaaaaacttcctaactatactcgaaaaacgcccgaacgacaacgcctcctaccccttcgttaccctcctaataccgaacgcc

SEQ ID NO: 26131 - DNA, 514 bp, Artificial Sequence
  chemically treated genomic DNA (Homo sapiens) CpG-island No: 26131
tattgttaggttatatagttggtgttatttgcggaggtgatttttgatttttaatttacgcggttattcgttcgagtttttatttttgttgtttttcgcgcgttttatttttcgtttttgtcggattcgtttttttgcgttgggtttagcgcgtcgttagggaaggggtcggagtttgggagttcgtttcgtcgtcgttcgtttttcgttcgtaggtttattcgtagcggttacgtgaaggatcgagcgtcgcgcgtttaggcggggttttcggtttgtacgaggagggtagagttcgttgcggttgtcgtttcgacgttcgcgtattttcgttcgtcgcgttcgtcgtcgcgatgttcggggtcggtttagtcgcggtggtgagttgtttgcgttcgtagttcggcgaggagtcgtagatttatgaggtaaggaggattttttggttgtgttcggagggcgttcggacggtagcgttttttgttttttcgttgtttttttggtgtcgggcgtt

SEQ ID NO: 26132 - DNA, 514 bp, Artificial Sequence
  chemically treated genomic DNA (Homo sapiens) CpG-island No: 26132
aacgcccgacaccaaaaaaacaacgaaaaaacaaaaaacgctaccgtccgaacgccctccgaacacaaccaaaaaatcctccttacctcataaatctacgactcctcgccgaactacgaacgcaaacaactcaccaccgcgactaaaccgaccccgaacatcgcgacgacgaacgcgacgaacgaaaatacgcgaacgtcgaaacgacaaccgcaacgaactctaccctcctcgtacaaaccgaaaaccccgcctaaacgcgcgacgctcgatccttcacgtaaccgctacgaataaacctacgaacgaaaaacgaacgacgacgaaacgaactcccaaactccgaccccttccctaacgacgcgctaaacccaacgcaaaaaaacgaatccgacaaaaacgaaaaataaaacgcgcgaaaaacaacaaaaataaaaactcgaacgaataaccgcgtaaattaaaaatcaaaaatcacctccgcaaataacaccaactatataacctaacaata

SEQ ID NO: 26133 - DNA, 729 bp, Artificial Sequence
  chemically treated genomic DNA (Homo sapiens) CpG-island No: 26133
aggggttattcgtacggatgatgagcggatttatcggtattattacgatagttagtatcggttggtgtattatacgcggatataatatgaagagtcgttggtcgaaagtcgttatttttacgattcgttgggtcgtagggtggtaaaacgggtgtggcggcgtgaacgggatttgacgggttggatgtcgttgttacggaaatcgtaagtgatttggtacggttgggacggcgatcggttgattataatatagaacgatagaattcgtatttagacgatttattagtcggggagttttacgttatttattagagttgaaatcgttatcggtgagttggcgaaaacgtagcgtcgtagtttggcggatgcgttttagtagttcggcggcgaagacggtggtagtgtggtgttttcgtcggtgttggtgtagatgttcgatcggttggaaagtgaaattttggttgatcgggtgagtgaggaaagtcgtcgttggttggtatcgtgcggtttgatcgtggagtagatgtaaaattagatggattcggtgtatacgtcggcgcgaaaaatttatttgtattattgcgattatcgcggtttgtcgttggcgtttattagtacggaaggggtaatagcgtggtgcgtagaatatgatgaatggggtaatttgttgagtgatgagaattcgtattatttgtagtagtttattcgtttgtcgggttagtagtatga

SEQ ID NO: 26134 - DNA, 729 bp, Artificial Sequence
  chemically treated genomic DNA (Homo sapiens) CpG-island No: 26134
tcatactactaacccgacaaacgaataaactactacaaataatacgaattctcatcactcaacaaattaccccattcatcatattctacgcaccacgctattaccccttccgtactaataaacgccaacgacaaaccgcgataatcgcaataatacaaataaatttttcgcgccgacgtatacaccgaatccatctaattttacatctactccacgatcaaaccgcacgataccaaccaacgacgactttcctcactcacccgatcaaccaaaatttcactttccaaccgatcgaacatctacaccaacaccgacgaaaacaccacactaccaccgtcttcgccgccgaactactaaaacgcatccgccaaactacgacgctacgttttcgccaactcaccgataacgatttcaactctaataaataacgtaaaactccccgactaataaatcgtctaaatacgaattctatcgttctatattataatcaaccgatcgccgtcccaaccgtaccaaatcacttacgatttccgtaacaacgacatccaacccgtcaaatcccgttcacgccgccacacccgttttaccaccctacgacccaacgaatcgtaaaaataacgactttcgaccaacgactcttcatattatatccgcgtataatacaccaaccgatactaactatcgtaataataccgataaatccgctcatcatccgtacgaataacccct

SEQ ID NO: 26135 - DNA, 729 bp, Artificial Sequence
  chemically treated genomic DNA (Homo sapiens) CpG-island No: 26135
ttatattgttgattcggtaggcgaatgagttgttgtagatgatgcgggtttttattatttagtaggttgttttatttattatattttgcgtattacgttgttgtttttttcgtgttgatgagcgttagcggtaggtcgcgatggtcgtagtggtataggtggatttttcgcgtcggcgtgtatatcgggtttatttggttttgtatttgttttacggttaggtcgtacgatgttagttagcggcggttttttttatttattcggttagttaggattttattttttagtcggtcgagtatttgtattagtatcggcgggaatattatattgttatcgttttcgtcgtcggattgttgaagcgtattcgttaggttgcggcgttgcgttttcgttagtttatcggtggcggttttaattttgatgagtggcgtgaagtttttcggttgataaatcgtttggatgcgggttttgtcgttttgtattgtggttagtcggtcgtcgttttagtcgtattaggttatttgcggttttcgtgatagcgatatttagttcgttaggtttcgtttacgtcgttatattcgttttgttattttgcggtttagcgggtcgtaaagatagcgattttcgattagcggttttttatattgtgttcgcgtgtagtgtattagtcggtgttgattgtcgtaatggtatcggtgagttcgtttattattcgtgcggataattttt

SEQ ID NO: 26136 - DNA, 729 bp, Artificial Sequence
  chemically treated genomic DNA (Homo sapiens) CpG-island No: 26136
aaaaattatccgcacgaataataaacgaactcaccgataccattacgacaatcaacaccgactaatacactacacgcgaacacaatataaaaaaccgctaatcgaaaatcgctatctttacgacccgctaaaccgcaaaataacaaaacgaatataacgacgtaaacgaaacctaacgaactaaatatcgctatcacgaaaaccgcaaataacctaatacgactaaaacgacgaccgactaaccacaatacaaaacgacaaaacccgcatccaaacgatttatcaaccgaaaaacttcacgccactcatcaaaattaaaaccgccaccgataaactaacgaaaacgcaacgccgcaacctaacgaatacgcttcaacaatccgacgacgaaaacgataacaatataatattcccgccgatactaatacaaatactcgaccgactaaaaaataaaatcctaactaaccgaataaataaaaaaaaccgccgctaactaacatcgtacgacctaaccgtaaaacaaatacaaaaccaaataaacccgatatacacgccgacgcgaaaaatccacctataccactacgaccatcgcgacctaccgctaacgctcatcaacacgaaaaaaacaacaacgtaatacgcaaaatataataaataaaacaacctactaaataataaaaacccgcatcatctacaacaactcattcgcctaccgaatcaacaatataa

SEQ ID NO: 26137 - DNA, 515 bp, Artificial Sequence
  chemically treated genomic DNA (Homo sapiens) CpG-island No: 26137
ttttttaatttgttataatgttcgttattttttacgtcgtattattcgatttttgagtagtagtttgagtcgttttgacgagataattcgggcgggttatttgtcgtatgaattcggtattggcgttgcgaacgggtagttcggggggaacgagttttttgttttgtaaggtgcgttcgtttattttcgtttagtgtatttatttgcgagtgtatagtgtttgcgtttcgtaattcgttgggtgtttggcggtttggatatcggattgcggttgggacggttttggtgtgcgttcgtgggtgtaatttgggggtttcgttaggatataaatatgattagacgggaaacgtttttatagttaagtgcgacgtaaaaagagtagtacgattggggggcggtgttataggtttttcgtttgtttcgcggttaaaaatcggaattaggttaaaagtaggttaaaagtattttagaataaattagcgaatattttagtaatagaggtatttcgataattt

SEQ ID NO: 26138 - DNA, 515 bp, Artificial Sequence
  chemically treated genomic DNA (Homo sapiens) CpG-island No: 26138
aaattatcgaaatacctctattactaaaatattcgctaatttattctaaaatacttttaacctacttttaacctaattccgatttttaaccgcgaaacaaacgaaaaacctataacaccgccccccaatcgtactactctttttacgtcgcacttaactataaaaacgtttcccgtctaatcatatttatatcctaacgaaacccccaaattacacccacgaacgcacaccaaaaccgtcccaaccgcaatccgatatccaaaccgccaaacacccaacgaattacgaaacgcaaacactatacactcgcaaataaatacactaaacgaaaataaacgaacgcaccttacaaaacaaaaaactcgttccccccgaactacccgttcgcaacgccaataccgaattcatacgacaaataacccgcccgaattatctcgtcaaaacgactcaaactactactcaaaaatcgaataatacgacgtaaaaaataacgaacattataacaaattaaaaaa

SEQ ID NO: 26139 - DNA, 515 bp, Artificial Sequence
  chemically treated genomic DNA (Homo sapiens) CpG-island No: 26139
ggattatcggaatatttttgttattggggtattcgttggtttgttttagagtgtttttggtttgtttttggtttggtttcgatttttggtcgcgaagtaggcgaaaaatttatggtatcgttttttagtcgtgttattttttttacgtcgtatttgattgtggaggcgtttttcgtttggttatatttgtattttggcgaaatttttaggttgtatttacgagcgtatattagaatcgttttagtcgtaattcggtatttagatcgttaaatatttaacgggttgcgaggcgtaaatattatgtattcgtagatggatatattgaacggagatggacgaacgtattttgtagggtagagagttcgtttttttcgaattgttcgttcgtagcgttaatatcggatttatacgataagtgattcgttcggattgtttcgttaaaacggtttaggttgttgtttaggagtcgggtaatgcggcgtggaagatggcgggtattgtgataagttgagagg

SEQ ID NO: 26140 - DNA, 515 bp, Artificial Sequence
  chemically treated genomic DNA (Homo sapiens) CpG-island No: 26140
cctctcaacttatcacaatacccgccatcttccacgccgcattacccgactcctaaacaacaacctaaaccgttttaacgaaacaatccgaacgaatcacttatcgtataaatccgatattaacgctacgaacgaacaattcgaaaaaaacgaactctctaccctacaaaatacgttcgtccatctccgttcaatatatccatctacgaatacataatatttacgcctcgcaacccgttaaatatttaacgatctaaataccgaattacgactaaaacgattctaatatacgctcgtaaatacaacctaaaaatttcgccaaaatacaaatataaccaaacgaaaaacgcctccacaatcaaatacgacgtaaaaaaaataacacgactaaaaaacgataccataaatttttcgcctacttcgcgaccaaaaatcgaaaccaaaccaaaaacaaaccaaaaacactctaaaacaaaccaacgaataccccaataacaaaaatattccgataatcc

SEQ ID NO: 26141 - DNA, 661 bp, Artificial Sequence
  chemically treated genomic DNA (Homo sapiens) CpG-island No: 26141
aggttggcgtacgttgttaggtagtaaagagcgcgatgaagaaaacgacggtacgttattgtttgtggtggcgaaaggcgatgagttgttgtgtgaaaaaggtgaagtggtagagcggtaaatttagtcgtcgcgttattttatcgatgtaatattgttttcggcgatgatcgggatcgcgcgttttgtgtaggataaagatttgaaaaagatttttcgtgcgatcgatggtttggggatagaggtaacgcgtgtcgggattattgaattgttgtttaagcgtggttttttgattaaaaaagggcgttatatttattttatcgacgtcggaaaagcgttattttattcgttgtcggagatggcgacgcgatcggatatgatcgcgtattgggaatcggtgttgacgtaaattagcgaaaagtagtgtcgttattaggattttatgtagtcgttggtggggacgttatattagtttattgattaagttaaacgtacgtcggtgcggtagtttcgcggtattgtggtttcgggtagtggtggtagtgttgataagaaaaaggttgtatcgcgtaaacgtagtgcgaaaaaaagttcgttagtagatgaagtcggaagcggggcgatagcgtaagcgagtgaatttttcgtgttattcgagtta

SEQ ID NO: 26142 - DNA, 661 bp, Artificial Sequence
  chemically treated genomic DNA (Homo sapiens) CpG-island No: 26142
taactcgaataacacgaaaaattcactcgcttacgctatcgccccgcttccgacttcatctactaacgaactttttttcgcactacgtttacgcgatacaacctttttcttatcaacactaccaccactacccgaaaccacaataccgcgaaactaccgcaccgacgtacgtttaacttaatcaataaactaatataacgtccccaccaacgactacataaaatcctaataacgacactacttttcgctaatttacgtcaacaccgattcccaatacgcgatcatatccgatcgcgtcgccatctccgacaacgaataaaataacgcttttccgacgtcgataaaataaatataacgcccttttttaatcaaaaaaccacgcttaaacaacaattcaataatcccgacacgcgttacctctatccccaaaccatcgatcgcacgaaaaatctttttcaaatctttatcctacacaaaacgcgcgatcccgatcatcgccgaaaacaatattacatcgataaaataacgcgacgactaaatttaccgctctaccacttcacctttttcacacaacaactcatcgcctttcgccaccacaaacaataacgtaccgtcgttttcttcatcgcgctctttactacctaacaacgtacgccaacct

SEQ ID NO: 26143 - DNA, 661 bp, Artificial Sequence
  chemically treated genomic DNA (Homo sapiens) CpG-island No: 26143
tgattcgaatagtacgaaagatttattcgtttacgttatcgtttcgttttcgattttatttgttggcggattttttttcgtattacgtttacgcggtgtagttttttttttattagtattgttattattgttcggagttataatgtcgcgaaattgtcgtatcggcgtacgtttggtttgattaataagttgatatagcgtttttattagcggttgtataaagttttgatagcgatattgtttttcgttgatttgcgttagtatcgatttttagtgcgcggttatgttcggtcgcgtcgttattttcggtagcgaatggaatagcgttttttcggcgtcggtggagtggatatagcgtttttttttggttaggaaattacgtttgaataatagtttaataatttcggtacgcgttgtttttgtttttagattatcggtcgtacggaggattttttttagatttttattttgtataaagcgcgcgatttcggttatcgtcgaaagtagtgttgtatcggtaaaatggcgcggcggttgggtttgtcgttttattattttattttttttatatagtaatttatcgtttttcgttattataggtagtggcgtgtcgtcgttttttttatcgcgttttttgttgtttaatagcgtgcgttagttt

SEQ ID NO: 26144 - DNA, 661 bp, Artificial Sequence
  chemically treated genomic DNA (Homo sapiens) CpG-island No: 26144
aaactaacgcacgctattaaacaacaaaaaacgcgataaaaaaaacgacgacacgccactacctataataacgaaaaacgataaattactatataaaaaaaataaaataataaaacgacaaacccaaccgccgcgccattttaccgatacaacactactttcgacgataaccgaaatcgcgcgctttatacaaaataaaaatctaaaaaaaatcctccgtacgaccgataatctaaaaacaaaaacaacgcgtaccgaaattattaaactattattcaaacgtaatttcctaaccaaaaaaaaacgctatatccactccaccgacgccgaaaaaacgctattccattcgctaccgaaaataacgacgcgaccgaacataaccgcgcactaaaaatcgatactaacgcaaatcaacgaaaaacaatatcgctatcaaaactttatacaaccgctaataaaaacgctatatcaacttattaatcaaaccaaacgtacgccgatacgacaatttcgcgacattataactccgaacaataataacaatactaataaaaaaaaaactacaccgcgtaaacgtaatacgaaaaaaaatccgccaacaaataaaatcgaaaacgaaacgataacgtaaacgaataaatctttcgtactattcgaatca

SEQ ID NO: 26145 - DNA, 620 bp, Artificial Sequence
  chemically treated genomic DNA (Homo sapiens) CpG-island No: 26145
gtagttatcgtaagtatcggtatttagttttaacgttttttttgcgtttttacgttacgtgcgtgttcgattacggtaggttgtcggataagacgtattggtagtataggtcgttgtgttattggggtacgcgtttgtcgtttagaacgtttggtatttggcgcgttagttcgtcggcgtggtatacgacgagtttttaggcgtagttagtaagtcgttatattaggaggttttaggtcgtaaaataggtaattacgttagaggtcggtagggagaggcggttcgtatattggtttatgcgaaggtatttcgagtataaggagttgtgtaaggcggcgttaggggtaggttcgtaaattacgagtaaatcggatacgtcggattcgtaacgcggggtttacggtaatatacggttaataagtcgtgaataatagtgcgggtataggggaacgttaggttcgggtttgcgtggtttttaggttattcgtgaatcgaatttcggcggtatatagttggagcgtacgttacgaatcggtcgcggagtatgatatcgggggatttataggaaaaggtttcgggagattagtgaggcgagagtatgagtttttcggatacggggt

SEQ ID NO: 26146 - DNA, 620 bp, Artificial Sequence
  chemically treated genomic DNA (Homo sapiens) CpG-island No: 26146
accccgtatccgaaaaactcatactctcgcctcactaatctcccgaaaccttttcctataaatcccccgatatcatactccgcgaccgattcgtaacgtacgctccaactatataccgccgaaattcgattcacgaataacctaaaaaccacgcaaacccgaacctaacgttcccctatacccgcactattattcacgacttattaaccgtatattaccgtaaaccccgcgttacgaatccgacgtatccgatttactcgtaatttacgaacctacccctaacgccgccttacacaactccttatactcgaaataccttcgcataaaccaatatacgaaccgcctctccctaccgacctctaacgtaattacctattttacgacctaaaacctcctaatataacgacttactaactacgcctaaaaactcgtcgtataccacgccgacgaactaacgcgccaaataccaaacgttctaaacgacaaacgcgtaccccaataacacaacgacctatactaccaatacgtcttatccgacaacctaccgtaatcgaacacgcacgtaacgtaaaaacgcaaaaaaaacgttaaaactaaataccgatacttacgataactac

SEQ ID NO: 26147 - DNA, 620 bp, Artificial Sequence
  chemically treated genomic DNA (Homo sapiens) CpG-island No: 26147
atttcgtgttcggggagtttatgttttcgttttattggtttttcggggtttttttttgtgggtttttcggtgttatatttcgcgatcggttcgtaacgtgcgttttaattatgtgtcgtcgaggttcggtttacgagtagtttgaaggttacgtaagttcggatttaacgtttttttgtattcgtattgttgtttacgatttgttggtcgtatgttgtcgtaggtttcgcgttacgggttcggcgtattcgatttgttcgtggtttgcggatttgtttttaacgtcgttttgtataattttttatattcgggatgttttcgtatagattagtatgcggatcgtttttttttgtcggtttttgacgtagttatttgttttgcggtttaagattttttagtataacggtttgttggttacgtttagggattcgtcgtgtattacgtcgacgggttagcgcgttaagtgttaggcgttttgaacggtaggcgcgtgttttagtagtataacgatttgtattattagtacgttttgttcggtaatttatcgtgatcgagtacgtacgtagcgtagaaacgtaaggaggacgttagggttggatgtcggtatttgcgatagttgt

SEQ ID NO: 26148 - DNA, 620 bp, Artificial Sequence
  chemically treated genomic DNA (Homo sapiens) CpG-island No: 26148
acaactatcgcaaataccgacatccaaccctaacgtcctccttacgtttctacgctacgtacgtactcgatcacgataaattaccgaacaaaacgtactaataatacaaatcgttatactactaaaacacgcgcctaccgttcaaaacgcctaacacttaacgcgctaacccgtcgacgtaatacacgacgaatccctaaacgtaaccaacaaaccgttatactaaaaaatcttaaaccgcaaaacaaataactacgtcaaaaaccgacaaaaaaaaacgatccgcatactaatctatacgaaaacatcccgaatataaaaaattatacaaaacgacgttaaaaacaaatccgcaaaccacgaacaaatcgaatacgccgaacccgtaacgcgaaacctacgacaacatacgaccaacaaatcgtaaacaacaatacgaatacaaaaaaacgttaaatccgaacttacgtaaccttcaaactactcgtaaaccgaacctcgacgacacataattaaaacgcacgttacgaaccgatcgcgaaatataacaccgaaaaacccacaaaaaaaaaccccgaaaaaccaataaaacgaaaacataaactccccgaacacgaaat

SEQ ID NO: 26149 - DNA, 521 bp, Artificial Sequence
  chemically treated genomic DNA (Homo sapiens) CpG-island No: 26149
agcggttaatcggcgattaatcgttattgattgcgttaaggttcgttagaatagtatttggaaggatttttgtttgatgagcgcgaaagtaaatttcggtattgttatcgttatcggtatttggttacgtaatcggtttattacgattttttatattttttgtacgtagtcgaaaggttgatcggcggattcggtagtaataattcggtttttagttttttttagttcgggagtaggttgtttaggacgtaatagtcgtcgggtatcgcgttaattagcgaattttagaatttacgaggagtattcgaaaattcgttttgtttgtttttttaggcgtcggtaaacgaatttaacgaataggattcggaatgtttggtacgtcgggtttgaagtttgatttaggtagtttttttcgaagtagtatagcgtatttagtagattaagcggtaatcgacgattagaattggtagaagaggcgtacgtcgttaagtatcggattcgaattttaagagggcgtagaa

SEQ ID NO: 26150 - DNA, 521 bp, Artificial Sequence
  chemically treated genomic DNA (Homo sapiens) CpG-island No: 26150
ttctacgccctcttaaaattcgaatccgatacttaacgacgtacgcctcttctaccaattctaatcgtcgattaccgcttaatctactaaatacgctatactacttcgaaaaaaactacctaaatcaaacttcaaacccgacgtaccaaacattccgaatcctattcgttaaattcgtttaccgacgcctaaaaaaacaaacaaaacgaattttcgaatactcctcgtaaattctaaaattcgctaattaacgcgatacccgacgactattacgtcctaaacaacctactcccgaactaaaaaaaactaaaaaccgaattattactaccgaatccgccgatcaacctttcgactacgtacaaaaaatataaaaaatcgtaataaaccgattacgtaaccaaataccgataacgataacaataccgaaatttactttcgcgctcatcaaacaaaaatccttccaaatactattctaacgaaccttaacgcaatcaataacgattaatcgccgattaaccgct

SEQ ID NO: 26151 - DNA, 521 bp, Artificial Sequence
  chemically treated genomic DNA (Homo sapiens) CpG-island No: 26151
ttttacgtttttttagaattcgagttcggtgtttagcgacgtacgttttttttattagttttgatcgtcgattatcgtttgatttgttgaatgcgttgtattatttcggagagaattgtttgaattaggttttaaattcggcgtgttaggtatttcgagttttgttcgttgagttcgtttatcgacgtttgagggaataggtaaaacgggttttcgggtatttttcgtaggttttggaattcgttggttagcgcgatgttcgacggttgttacgttttaaatagtttattttcgggttgaaagaagttaggagtcgggttgttgttatcgaattcgtcggttagtttttcgattgcgtgtaggaagtataggaaatcgtgataagtcggttgcgtggttagatatcggtagcggtgataatatcgaggtttattttcgcgtttattaggtaggaatttttttagatattgttttagcgggttttagcgtaattagtagcggttaatcgtcgattggtcgtt

SEQ ID NO: 26152 - DNA, 521 bp, Artificial Sequence
  chemically treated genomic DNA (Homo sapiens) CpG-island No: 26152
aacgaccaatcgacgattaaccgctactaattacgctaaaacccgctaaaacaatatctaaaaaaattcctacctaataaacgcgaaaataaacctcgatattatcaccgctaccgatatctaaccacgcaaccgacttatcacgatttcctatacttcctacacgcaatcgaaaaactaaccgacgaattcgataacaacaacccgactcctaacttctttcaacccgaaaataaactatttaaaacgtaacaaccgtcgaacatcgcgctaaccaacgaattccaaaacctacgaaaaatacccgaaaacccgttttacctattccctcaaacgtcgataaacgaactcaacgaacaaaactcgaaatacctaacacgccgaatttaaaacctaattcaaacaattctctccgaaataatacaacgcattcaacaaatcaaacgataatcgacgatcaaaactaataaaaaaaacgtacgtcgctaaacaccgaactcgaattctaaaaaaacgtaaaa

SEQ ID NO: 26153 - DNA, 537 bp, Artificial Sequence
  chemically treated genomic DNA (Homo sapiens) CpG-island No: 26153
cgacggatttcgcggacgttagttttgtgtacgtcgttggttttgtcggcgtttatattcggcgtcggtagagttcgtggacgagatttagtggcgtagacgcgtttgggtagcgtcgttttggtcgtttcgcggggtcggggtcgatagtttacgttggcgcggtaggcgcgtgcgttcgtcgttttcgtgagttcgagtagcggcgagtttagggcgtcgggcggtcgggaggttggtttggtttagttgggtcgagaggtcggagggtcgagttagagcggtcggtttgattttttatgtaatattttatttttgtcgtatcgagtgtattttaggggtttttacggtcggcgggatcggttttttttttttacgatttagtaatattcgttttatcggttgtgatgttttaataaatttttttatgtttttgcggacgtcgcgtttatttttttaatggtaggggttacgggttatttagaagttcgattttggttagtggatcgggggcggggaggaggtttttgtatagta

SEQ ID NO: 26154 - DNA, 537 bp, Artificial Sequence
  chemically treated genomic DNA (Homo sapiens) CpG-island No: 26154
tactatacaaaaacctcctccccgcccccgatccactaaccaaaatcgaacttctaaataacccgtaacccctaccattaaaaaaataaacgcgacgtccgcaaaaacataaaaaaatttattaaaacatcacaaccgataaaacgaatattactaaatcgtaaaaaaaaaaaaccgatcccgccgaccgtaaaaacccctaaaatacactcgatacgacaaaaataaaatattacataaaaaatcaaaccgaccgctctaactcgaccctccgacctctcgacccaactaaaccaaaccaacctcccgaccgcccgacgccctaaactcgccgctactcgaactcacgaaaacgacgaacgcacgcgcctaccgcgccaacgtaaactatcgaccccgaccccgcgaaacgaccaaaacgacgctacccaaacgcgtctacgccactaaatctcgtccacgaactctaccgacgccgaatataaacgccgacaaaaccaacgacgtacacaaaactaacgtccgcgaaatccgtcg

SEQ ID NO: 26155 - DNA, 537 bp, Artificial Sequence
  chemically treated genomic DNA (Homo sapiens) CpG-island No: 26155
tattatatagggatttttttttcgttttcggtttattggttagggtcgggtttttggatggttcgtggtttttgttattaagaaagtaagcgcgacgttcgtaaaagtataaaaaagtttattggagtattatagtcggtggggcgggtattgttgagtcgtgggggagggaggtcgatttcgtcggtcgtaggggtttttaaagtgtattcggtgcggtaaggatggggtgttgtatagagagttaggtcggtcgttttaattcggtttttcggtttttcggtttagttaagttagattagtttttcggtcgttcggcgttttgggttcgtcgttgttcgggtttacgaaaacggcgggcgtacgcgtttgtcgcgttagcgtgggttgtcggtttcggtttcgcggggcggttagagcggcgttgtttaggcgcgtttgcgttattggatttcgtttacggattttgtcgacgtcgagtgtaggcgtcggtagggttagcggcgtgtatagggttggcgttcgcggaattcgtcg

SEQ ID NO: 26156 - DNA, 537 bp, Artificial Sequence
  chemically treated genomic DNA (Homo sapiens) CpG-island No: 26156
cgacgaattccgcgaacgccaaccctatacacgccgctaaccctaccgacgcctacactcgacgtcgacaaaatccgtaaacgaaatccaataacgcaaacgcgcctaaacaacgccgctctaaccgccccgcgaaaccgaaaccgacaacccacgctaacgcgacaaacgcgtacgcccgccgttttcgtaaacccgaacaacgacgaacccaaaacgccgaacgaccgaaaaactaatctaacttaactaaaccgaaaaaccgaaaaaccgaattaaaacgaccgacctaactctctatacaacaccccatccttaccgcaccgaatacactttaaaaacccctacgaccgacgaaatcgacctccctcccccacgactcaacaatacccgccccaccgactataatactccaataaacttttttatacttttacgaacgtcgcgcttactttcttaataacaaaaaccacgaaccatccaaaaacccgaccctaaccaataaaccgaaaacgaaaaaaaaatccctatataata

SEQ ID NO: 26157 - DNA, 866 bp, Artificial Sequence
  chemically treated genomic DNA (Homo sapiens) CpG-island No: 26157
tgtcggtttacgatgtattgtatgacggcggcgtggagtatttgttatgtcgatatgagtagggtgcggtaatggcggttatcggttatgttcgtgttatcggtaaaattggcgtatgtatcgttacgtttggttcgggcgtaattaatttgataatcgggtttgcggacgtattgttagattttatttttgttgttgttattatcggttaagtgttcgtatcgtttatcggtattgacgtattttaggaagtggatgttttgggattgtcgttagtttgtattaagtatagttttttggtgtagtcgttggaagagttgtcgcgtattatggttgaagtattcgacgttgtttgtttaggtcgttttggttcggttttggtcgatattttaaaagatatttagttagttagcggtgatttggaatcgtggtttattatcgttgaaaacgaagtgatttttttatatgtcgaagttgagtaagcgcgttagatgttggtaaaagcgtaaaaatcgatgttgtacgttggcggtggcgtgggtatggcgtaggtagtttcggttttgcgtgaatatttcgttgttataaaaatgtttggtatttgtacgttgaaagggttgggcgtagtagaagtagatatgcgtatatttgggtttttggggatgtcggtttaagcggaattttcgggcggattgtgattgtggttcgtggcgttttgattcggtgcgtatgattttggtcggcggttttatgaacgtcggaaacgtgtagttggtgaggatagcgacgtaggggaaagaggattgcgggaatcgtatcgggtcgggtatgtcgttttttgtttttttttttagtttttaaatttt

SEQ ID NO: 26158 - DNA, 866 bp, Artificial Sequence
  chemically treated genomic DNA (Homo sapiens) CpG-island No: 26158
aaaatttaaaaactaaaaaaaaaaacaaaaaacgacatacccgacccgatacgattcccgcaatcctctttcccctacgtcgctatcctcaccaactacacgtttccgacgttcataaaaccgccgaccaaaatcatacgcaccgaatcaaaacgccacgaaccacaatcacaatccgcccgaaaattccgcttaaaccgacatccccaaaaacccaaatatacgcatatctacttctactacgcccaaccctttcaacgtacaaataccaaacatttttataacaacgaaatattcacgcaaaaccgaaactacctacgccatacccacgccaccgccaacgtacaacatcgatttttacgcttttaccaacatctaacgcgcttactcaacttcgacatataaaaaaatcacttcgttttcaacgataataaaccacgattccaaatcaccgctaactaactaaatatcttttaaaatatcgaccaaaaccgaaccaaaacgacctaaacaaacaacgtcgaatacttcaaccataatacgcgacaactcttccaacgactacaccaaaaaactatacttaatacaaactaacgacaatcccaaaacatccacttcctaaaatacgtcaataccgataaacgatacgaacacttaaccgataataacaacaacaaaaataaaatctaacaatacgtccgcaaacccgattatcaaattaattacgcccgaaccaaacgtaacgatacatacgccaattttaccgataacacgaacataaccgataaccgccattaccgcaccctactcatatcgacataacaaatactccacgccgccgtcatacaatacatcgtaaaccgaca

SEQ ID NO: 26159 - DNA, 866 bp, Artificial Sequence
  chemically treated genomic DNA (Homo sapiens) CpG-island No: 26159
agaatttgggagttgagaaaagaaataaggaacgatatattcgattcggtacgattttcgtagtttttttttttttacgtcgttatttttattagttatacgttttcggcgtttatgaaatcgtcggttagggttatgcgtatcggattaaggcgttacggattatagttataattcgttcgggagtttcgtttgggtcggtatttttagaagtttagatatacgtatatttgtttttattgcgtttagtttttttagcgtataggtgttagatatttttgtggtagcgagatatttacgtaaagtcggaattgtttgcgttatatttacgttatcgttaacgtatagtatcggtttttgcgtttttgttagtatttggcgcgtttgtttaatttcggtatgtgggaaagttatttcgtttttaacggtggtgaattacggttttaggttatcgttggttaattggatattttttgggatatcgattagaatcggattaggacgatttgagtaggtaacgtcgaatgttttagttatgatgcgcggtaatttttttagcgattgtattagaaagttgtgtttggtataggttaacgataattttaggatatttattttttgaaatgcgttagtgtcgataaacggtgcggatatttgatcggtgatggtaataatagggatggaatttaatagtgcgttcgtaagttcggttattaggttggttgcgttcggattagacgtggcgatatatacgttagttttgtcggtagtacgagtataatcgatagtcgttattgtcgtattttgtttatgtcggtatagtaagtgttttacgtcgtcgttatataatgtatcgtaaatcggta

SEQ ID NO: 26160 - DNA, 866 bp, Artificial Sequence
  chemically treated genomic DNA (Homo sapiens) CpG-island No: 26160
taccgatttacgatacattatataacgacgacgtaaaacacttactataccgacataaacaaaatacgacaataacgactatcgattatactcgtactaccgacaaaactaacgtatatatcgccacgtctaatccgaacgcaaccaacctaataaccgaacttacgaacgcactattaaattccatccctattattaccatcaccgatcaaatatccgcaccgtttatcgacactaacgcatttcaaaaaataaatatcctaaaattatcgttaacctataccaaacacaactttctaatacaatcgctaaaaaaattaccgcgcatcataactaaaacattcgacgttacctactcaaatcgtcctaatccgattctaatcgatatcccaaaaaatatccaattaaccaacgataacctaaaaccgtaattcaccaccgttaaaaacgaaataactttcccacataccgaaattaaacaaacgcgccaaatactaacaaaaacgcaaaaaccgatactatacgttaacgataacgtaaatataacgcaaacaattccgactttacgtaaatatctcgctaccacaaaaatatctaacacctatacgctaaaaaaactaaacgcaataaaaacaaatatacgtatatctaaacttctaaaaataccgacccaaacgaaactcccgaacgaattataactataatccgtaacgccttaatccgatacgcataaccctaaccgacgatttcataaacgccgaaaacgtataactaataaaaataacgacgtaaaaaaaaaaaaactacgaaaatcgtaccgaatcgaatatatcgttccttatttcttttctcaactcccaaattct

SEQ ID NO: 26161 - DNA, 639 bp, Artificial Sequence
  chemically treated genomic DNA (Homo sapiens) CpG-island No: 26161
  unsure (53, 87, 97..98, 113..)
gaaaatcgtcgtattttatgtttgtacgttaagcgcgaggaatatgtagttanatttggggtttagtggtagagttaaaggttcgangaaaatttanncgttttggaaatgtnncggttttgtattacgcgcggtaaaatcggttagtagtagcgtaatcgtttcgataatatttattagatgtagaattttcggcgttattaggaataggtcgtgggtacgggcgattaggtagatattcgcggttattatggttgcggcgtggattagcgcggagataggcgtcgggttcgttatcgcgtcggtaagttatgtttgtaacggtaattgcgtagatttatcgatcgtatcgtttagtagtattagcgtcgtttatattagtatgttattgtcgttagtaaagtgcgttggtgttagttttattatttcgcggaagtttagggtgtttagttcgttgtaaagaatgaatagtgcgaaagcgaggaatacgttatttatacgggttacgacgaacgtttttattgtcgttgcgttatttttcggatcggtgtaatagaattcgattagtagataggagtataggtttacgtttttttagtcgaggtatattagtagtaggttgtcggtaagtattagaat

SEQ ID NO: 26162 - DNA, 639 bp, Artificial Sequence
  chemically treated genomic DNA (Homo sapiens) CpG-island No: 26162
  unsure (526..527, 542..543, 553, 587)
attctaatacttaccgacaacctactactaatatacctcgactaaaaaaacgtaaacctatactcctatctactaatcgaattctattacaccgatccgaaaaataacgcaacgacaataaaaacgttcgtcgtaacccgtataaataacgtattcctcgctttcgcactattcattctttacaacgaactaaacaccctaaacttccgcgaaataataaaactaacaccaacgcactttactaacgacaataacatactaatataaacgacgctaatactactaaacgatacgatcgataaatctacgcaattaccgttacaaacataacttaccgacgcgataacgaacccgacgcctatctccgcgctaatccacgccgcaaccataataaccgcgaatatctacctaatcgcccgtacccacgacctattcctaataacgccgaaaattctacatctaataaatattatcgaaacgattacgctactactaaccgattttaccgcgcgtaatacaaaaccgnnacatttccaaaacgnntaaattttcntcgaacctttaactctaccactaaaccccaaatntaactacatattcctcgcgcttaacgtacaaacataaaatacgacgattttc

SEQ ID NO: 26163 - DNA, 639 bp, Artificial Sequence
  chemically treated genomic DNA (Homo sapiens) CpG-island No: 26163
  unsure (526..527, 542..543, 553, 587)
gttttggtgtttgtcgataatttgttgttgatgtatttcggttgggaaggcgtgggtttgtgtttttatttgttgatcgggttttattatatcgattcgaagaatggcgtagcggtaatgaaagcgttcgtcgtgattcgtgtgggtgacgtgtttttcgttttcgtattgtttattttttataacgaattgggtattttgaattttcgcgaaatggtggaattggtattagcgtattttgttgacggtaataatatgttgatgtgggcgacgttgatgttgttgggcggtgcggtcggtaaatttgcgtagttgtcgttgtagatatggtttgtcgacgcgatggcgggttcgacgtttgttttcgcgttgatttacgtcgtaattatggtaatcgcgggtgtttatttgatcgttcgtatttacggtttgtttttgatgacgtcggaagttttgtatttggtgggtattgtcggggcggttacgttgttgttggtcggttttgtcgcgcgtggtataggatcgnnatatttttaaaacgnntgggtttttntcgggtttttaattttattattgagttttagatntggttatatgtttttcgcgtttggcgtgtaggtatgggatgcggcgattttt

SEQ ID NO: 26164 - DNA, 639 bp, Artificial Sequence
  chemically treated genomic DNA (Homo sapiens) CpG-island No: 26164
  unsure (53, 87, 97..98, 113..)
aaaaatcgccgcatcccatacctacacgccaaacgcgaaaaacatataaccanatctaaaactcaataataaaattaaaaacccganaaaaacccanncgttttaaaaatatnncgatcctataccacgcgcgacaaaaccgaccaacaacaacgtaaccgccccgacaatacccaccaaatacaaaacttccgacgtcatcaaaaacaaaccgtaaatacgaacgatcaaataaacacccgcgattaccataattacgacgtaaatcaacgcgaaaacaaacgtcgaacccgccatcgcgtcgacaaaccatatctacaacgacaactacgcaaatttaccgaccgcaccgcccaacaacatcaacgtcgcccacatcaacatattattaccgtcaacaaaatacgctaataccaattccaccatttcgcgaaaattcaaaatacccaattcgttataaaaaataaacaatacgaaaacgaaaaacacgtcacccacacgaatcacgacgaacgctttcattaccgctacgccattcttcgaatcgatataataaaacccgatcaacaaataaaaacacaaacccacgccttcccaaccgaaatacatcaacaacaaattatcgacaaacaccaaaac

SEQ ID NO: 26165 - DNA, 559 bp, Artificial Sequence
  chemically treated genomic DNA (Homo sapiens) CpG-island No: 26165
tgttcgtcgttgcgtcgtagttaatagcgcgggtgcgtttggtggcggtttatgtttggttgcgttttttgattgggcgttttcgggggcggggttaagtttaagtttggcgcgtagagtgtatttttttgagttcgagcggtttagcgttaagttcggggtttggggttggagcggttggttacgtggttggttcgcggcggtgcgcggggcgttgggttagcgggtttgggattggtggtatcggcggcggcgtaggacggaggcgtcgttaggtacgtgcgcgggtcgtgtttcggtaggtgggcggtttcgggttcgagggtcgcggcgttttagagttcggggggtgtttcggcgttttcgttgtttttcgtcgtattttattttttgtagtcgtaatgacgggaggggagcgtttgggtcgcgtttgggttggggatcgggcggcggttagtcgtagcgttttagttttaggtatattcggtatgatggggtggcggttcgtggtttttggtaagaatgcgaaggtttatcggggatgtgagtagtagttttt

SEQ ID NO: 26166 - DNA, 559 bp, Artificial Sequence
  chemically treated genomic DNA (Homo sapiens) CpG-island No: 26166
aaaaactactactcacatccccgataaaccttcgcattcttaccaaaaaccacgaaccgccaccccatcataccgaatatacctaaaactaaaacgctacgactaaccgccgcccgatccccaacccaaacgcgacccaaacgctcccctcccgtcattacgactacaaaaaataaaatacgacgaaaaacaacgaaaacgccgaaacaccccccgaactctaaaacgccgcgaccctcgaacccgaaaccgcccacctaccgaaacacgacccgcgcacgtacctaacgacgcctccgtcctacgccgccgccgataccaccaatcccaaacccgctaacccaacgccccgcgcaccgccgcgaaccaaccacgtaaccaaccgctccaaccccaaaccccgaacttaacgctaaaccgctcgaactcaaaaaaatacactctacgcgccaaacttaaacttaaccccgcccccgaaaacgcccaatcaaaaaacgcaaccaaacataaaccgccaccaaacgcacccgcgctattaactacgacgcaacgacgaaca

SEQ ID NO: 26167 - DNA, 559 bp, Artificial Sequence
  chemically treated genomic DNA (Homo sapiens) CpG-island No: 26167
gagagttattatttatattttcgataagttttcgtatttttgttaaaggttacgggtcgttattttattatatcgaatgtgtttggaattggggcgttgcggttggtcgtcgttcgatttttagtttaggcgcgatttaagcgtttttttttcgttattgcggttgtagagggtggggtacggcgggggatagcgaggacgtcgaagtatttttcgggttttgggacgtcgcggttttcggattcgaagtcgtttatttatcggaatacggttcgcgtacgtatttagcgacgttttcgttttacgtcgtcgtcggtgttattagttttagattcgttgatttaacgtttcgcgtatcgtcgcgggttagttacgtgattagtcgttttaattttaaatttcgaatttggcgttggatcgttcgagtttaggaaggtgtattttgcgcgttaggtttgggtttggtttcgttttcggaggcgtttaattagagagcgtagttaagtatgggtcgttattaaacgtattcgcgttattggttgcggcgtagcggcgggta

SEQ ID NO: 26168 - DNA, 559 bp, Artificial Sequence
  chemically treated genomic DNA (Homo sapiens) CpG-island No: 26168
tacccgccgctacgccgcaaccaataacgcgaatacgtttaataacgacccatacttaactacgctctctaattaaacgcctccgaaaacgaaaccaaacccaaacctaacgcgcaaaatacaccttcctaaactcgaacgatccaacgccaaattcgaaatttaaaattaaaacgactaatcacgtaactaacccgcgacgatacgcgaaacgttaaatcaacgaatctaaaactaataacaccgacgacgacgtaaaacgaaaacgtcgctaaatacgtacgcgaaccgtattccgataaataaacgacttcgaatccgaaaaccgcgacgtcccaaaacccgaaaaatacttcgacgtcctcgctatcccccgccgtaccccaccctctacaaccgcaataacgaaaaaaaaacgcttaaatcgcgcctaaactaaaaatcgaacgacgaccaaccgcaacgccccaattccaaacacattcgatataataaaataacgacccgtaacctttaacaaaaatacgaaaacttatcgaaaatataaataataactctc

SEQ ID NO: 26169 - DNA, 1017 bp, Artificial Sequence
  chemically treated genomic DNA (Homo sapiens) CpG-island No: 26169
ggtaaagcgttttcgtagttttttcggtttgttcgattcggtttttttcgtttttgtttcggttgcggtattattttttggagttacgtttcggcgagcgggggtcgtacgagggggtcgttgtgtcgttatttattcgagtcgttcgggttggtcgcgagtcgggattcgcgagggttggcgggttttggttttcgaggacgtagatatgtggtttgaattttcgtttttttagtcgttgtttttgtgtatttttttgggcgtttttagcgaatgcgagcggcgaggcgaggtaaagcgcgtcgattaagagcggtataggttcggagtttgttcgtttcgcgttgcgtcgagcgtcgggtttttttcgcgagttcgacggggtcgcgcgcgcgttttttattgttttcgtttttcgcgcggcgcgtgttttttatttttcgtcgcgcgttttcgtaatcgttcggttttacgcggcgcgcgtttgttttgtcgttagcggcggcggcggcggcggcgcgttttttttcgaacgtcgtttttagggttgttggttgcgttttttattgtttcgcggttgttgttcggggtgggcggttaggcgggggggaggtgtcggtttggtcgtcggggagggtttatcgttcgggcggatttttattgcgagagcgatgcgggtttaggcgcggcgcgcgggggttgtagggcgtttagtattgggggttgtcggcgcgcgggggtttttttttggtttttaggtattcgttgttgttgggcgtttttcgtattttcggttattatggatatttcgttttttcgtcgtttttttcgcgtatttcgggaggtcgtcggggcggtagtagcggcgcggtttcgcgggtgtttaggtgatcggttcggtagcggtagagtagtggtagtagtcgttattgtcgttgttattgcggtcgtcgtcgttgaagagaggaggacgaggagggtaaggggtagaagtaggttttgttttgtttgttttag

SEQ ID NO: 26170 - DNA, 1017 bp, Artificial Sequence
  chemically treated genomic DNA (Homo sapiens) CpG-island No: 26170
ctaaaacaaacaaaacaaaacctacttctaccccttaccctcctcgtcctcctctcttcaacgacgacgaccgcaataacaacgacaataacgactactaccactactctaccgctaccgaaccgatcacctaaacacccgcgaaaccgcgccgctactaccgccccgacgacctcccgaaatacgcgaaaaaaacgacgaaaaaacgaaatatccataataaccgaaaatacgaaaaacgcccaacaacaacgaatacctaaaaaccaaaaaaaaacccccgcgcgccgacaacccccaatactaaacgccctacaacccccgcgcgccgcgcctaaacccgcatcgctctcgcaataaaaatccgcccgaacgataaaccctccccgacgaccaaaccgacacctcccccccgcctaaccgcccaccccgaacaacaaccgcgaaacaataaaaaacgcaaccaacaaccctaaaaacgacgttcgaaaaaaaacgcgccgccgccgccgccgccgctaacgacaaaacaaacgcgcgccgcgtaaaaccgaacgattacgaaaacgcgcgacgaaaaataaaaaacacgcgccgcgcgaaaaacgaaaacaataaaaaacgcgcgcgcgaccccgtcgaactcgcgaaaaaaacccgacgctcgacgcaacgcgaaacgaacaaactccgaacctataccgctcttaatcgacgcgctttacctcgcctcgccgctcgcattcgctaaaaacgcccaaaaaaatacacaaaaacaacgactaaaaaaacgaaaattcaaaccacatatctacgtcctcgaaaaccaaaacccgccaaccctcgcgaatcccgactcgcgaccaacccgaacgactcgaataaataacgacacaacgaccccctcgtacgacccccgctcgccgaaacgtaactccaaaaaataataccgcaaccgaaacaaaaacgaaaaaaaccgaatcgaacaaaccgaaaaaactacgaaaacgctttacc

SEQ ID NO: 26171 - DNA, 1017 bp, Artificial Sequence
  chemically treated genomic DNA (Homo sapiens) CpG-island No: 26171
ttggggtagatagagtaggatttgtttttgttttttgtttttttcgtttttttttttttagcggcggcgatcgtagtaatagcggtagtggcggttgttgttattgttttgtcgttgtcgagtcggttatttgggtattcgcggagtcgcgtcgttgttatcgtttcggcggtttttcggagtgcgcggagggggcggcggaggagcgagatatttatagtaatcgaggatgcgaggggcgtttagtagtagcgagtgtttgggagttaggaggaggttttcgcgcgtcggtaatttttagtgttaggcgttttgtagttttcgcgcgtcgcgtttgggttcgtatcgttttcgtagtgagggttcgttcgagcggtaagtttttttcggcggttaagtcgatatttttttttcgtttggtcgtttatttcgggtagtagtcgcggaataatggagagcgtagttagtagttttggagacggcgttcgggggaggacgcgtcgtcgtcgtcgtcgtcgttgacgatagggtaggcgcgcgtcgcgtggagtcgggcggttgcgagggcgcgcggcggggggtggggggtacgcgtcgcgcggagggcggaggtagtggggggcgcgcgcgcggtttcgtcgagttcgcggagagagttcggcgttcggcgtagcgcggggcgggtaagtttcgagtttgtatcgtttttggtcggcgcgttttgtttcgtttcgtcgttcgtattcgttgggggcgtttagaaagatgtatagaggtaacggttaggggagcggaggtttaagttatatgtttgcgttttcgggggttagagttcgttagttttcgcggatttcggttcgcggttagttcgagcggttcgggtgagtagcggtatagcggttttttcgtgcggttttcgttcgtcgagacgtggttttaagaagtggtgtcgtagtcggggtagaggcggaggaagtcgagtcgggtaagtcgggaaggttgcggagacgttttgtt

SEQ ID NO: 26172 - DNA, 1017 bp, Artificial Sequence
  chemically treated genomic DNA (Homo sapiens) CpG-island No: 26172
aacaaaacgtctccgcaaccttcccgacttacccgactcgacttcctccgcctctaccccgactacgacaccacttcttaaaaccacgtctcgacgaacgaaaaccgcacgaaaaaaccgctataccgctactcacccgaaccgctcgaactaaccgcgaaccgaaatccgcgaaaactaacgaactctaacccccgaaaacgcaaacatataacttaaacctccgctcccctaaccgttacctctatacatctttctaaacgcccccaacgaatacgaacgacgaaacgaaacaaaacgcgccgaccaaaaacgatacaaactcgaaacttacccgccccgcgctacgccgaacgccgaactctctccgcgaactcgacgaaaccgcgcgcgcgccccccactacctccgccctccgcgcgacgcgtaccccccaccccccgccgcgcgccctcgcaaccgcccgactccacgcgacgcgcgcctaccctatcgtcaacgacgacgacgacgacgacgcgtcctcccccgaacgccgtctccaaaactactaactacgctctccattattccgcgactactacccgaaataaacgaccaaacgaaaaaaaaatatcgacttaaccgccgaaaaaaacttaccgctcgaacgaaccctcactacgaaaacgatacgaacccaaacgcgacgcgcgaaaactacaaaacgcctaacactaaaaattaccgacgcgcgaaaacctcctcctaactcccaaacactcgctactactaaacgcccctcgcatcctcgattactataaatatctcgctcctccgccgccccctccgcgcactccgaaaaaccgccgaaacgataacaacgacgcgactccgcgaatacccaaataaccgactcgacaacgacaaaacaataacaacaaccgccactaccgctattactacgatcgccgccgctaaaaaaaaaaaaacgaaaaaaacaaaaaacaaaaacaaatcctactctatctaccccaa

SEQ ID NO: 26173 - DNA, 594 bp, Artificial Sequence
  chemically treated genomic DNA (Homo sapiens) CpG-island No: 26173
ggtcggtgcggtgcgtaagtatttgattagcggcggtgataggttgcgtaggtgcgcgcgatcgtggtgggttgttggaagatagggacgtacgtttgtgtatatttattttttttattttagatttacgtcggtcggtgtttttttgttttgtgtttcgtgcgttcgtaaggtgcggtgcgcggggaagggggtagttagtggtcgttggatttatttcgttgttgtatacgcgtgcgtttgatatgtcgcgagttgttatattttgttaggtagaggtagtgcgtgtgcgttgaggagagtattatttttgtgcggagggtgtggtgagtgggtgttaattagtgcgtacgcgtggatagcgtgcgtcgtagatgtatggttacgtttcggtttttattttatcgtagttgcgtgtgaggtattcgtggagggtaggcgtatttatatgtgttagggtagcgttgttagtggttataatcgatcgtttgcggcgtttttcgtatagcggaagaagtgagtttcgggatgaaagaggtgagataagttgaattgtgtcgcgtacggtcggatatttagataaacgtggtaggt

SEQ ID NO: 26174 - DNA, 594 bp, Artificial Sequence
  chemically treated genomic DNA (Homo sapiens) CpG-island No: 26174
acctaccacgtttatctaaatatccgaccgtacgcgacacaattcaacttatctcacctctttcatcccgaaactcacttcttccgctatacgaaaaacgccgcaaacgatcgattataaccactaacaacgctaccctaacacatataaatacgcctaccctccacgaatacctcacacgcaactacgataaaataaaaaccgaaacgtaaccatacatctacgacgcacgctatccacgcgtacgcactaattaacacccactcaccacaccctccgcacaaaaataatactctcctcaacgcacacgcactacctctacctaacaaaatataacaactcgcgacatatcaaacgcacgcgtatacaacaacgaaataaatccaacgaccactaactacccccttccccgcgcaccgcaccttacgaacgcacgaaacacaaaacaaaaaaacaccgaccgacgtaaatctaaaataaaaaaaataaatatacacaaacgtacgtccctatcttccaacaacccaccacgatcgcgcgcacctacgcaacctatcaccgccgctaatcaaatacttacgcaccgcaccgacc

SEQ ID NO: 26175 - DNA, 594 bp, Artificial Sequence
  chemically treated genomic DNA (Homo sapiens) CpG-island No: 26175
atttgttacgtttatttgagtattcgatcgtacgcgatataatttaatttattttattttttttatttcgaagtttatttttttcgttgtgcggaagacgtcgtaaacgatcggttataattattggtagcgttattttaatatatatgagtacgtttattttttacgggtattttatacgtagttgcggtaaggtaaaagtcgaagcgtaattatatatttacgacgtacgttatttacgcgtgcgtattagttaatatttatttattatatttttcgtataagggtagtgttttttttaacgtatacgtattgtttttgtttagtaaaatgtgatagttcgcgatatgttaagcgtacgcgtatgtaatagcgagatgagtttaacggttattaattgttttttttttcgcgtatcgtattttacggacgtacggaatataagataggaagatatcgatcgacgtaggtttgagatgaaggaagtaagtatgtatagacgtacgtttttattttttaataatttattacggtcgcgcgtatttacgtaatttattatcgtcgttaattaagtatttacgtatcgtatcgatt

SEQ ID NO: 26176 - DNA, 594 bp, Artificial Sequence
  chemically treated genomic DNA (Homo sapiens) CpG-island No: 26176
aatcgatacgatacgtaaatacttaattaacgacgataataaattacgtaaatacgcgcgaccgtaataaattattaaaaaataaaaacgtacgtctatacatacttacttccttcatctcaaacctacgtcgatcgatatcttcctatcttatattccgtacgtccgtaaaatacgatacgcgaaaaaaaaaacaattaataaccgttaaactcatctcgctattacatacgcgtacgcttaacatatcgcgaactatcacattttactaaacaaaaacaatacgtatacgttaaaaaaaacactacccttatacgaaaaatataataaataaatattaactaatacgcacgcgtaaataacgtacgtcgtaaatatataattacgcttcgacttttaccttaccgcaactacgtataaaatacccgtaaaaaataaacgtactcatatatattaaaataacgctaccaataattataaccgatcgtttacgacgtcttccgcacaacgaaaaaaataaacttcgaaataaaaaaaataaaataaattaaattatatcgcgtacgatcgaatactcaaataaacgtaacaaat

SEQ ID NO: 26177 - DNA, 828 bp, Artificial Sequence
  chemically treated genomic DNA (Homo sapiens) CpG-island No: 26177
  unsure (822)
tttttgtagttcgggggtatggatgcgcggatagtcgttgttggttttttggatgtcgacggatttgtattgtcggtagaatttcgcgaggtcgtttagttttaggtagtagttgaattaattcgcgaggggatcgagttcggggtgggcgaaaaattttagtatgagattttcgcgttggaggattatttagtcggcgtttcggaaaacgatttcgaagtttaattttttatagaaggcgtcggtggaatcgaattttcgtgatggtaggttgggcgtcgtttgttcggttatttcgaattttagagtttcgtttagaagaattcgttaagaaggcgatagaaggcgatgcgttgcgaatcgggagcggcgatatcgtatagtacgaggaagcggttagtttattcgtcgttaagttttttagtaatattacgggtagttaacgttatgttttgatagcggttcgttatatttagtcggttatagtcgatgaatttagaaaagcggttattttttattatgatattcggtaagtaggtatcgttatgggttacgacgagattttcgtcgtcgggtatgcgcgttttgagtttggcgaatagttcggttggcgcgagtttttgatgtttttcgtttagattattttgatcgataagatcggtttttattcgagtacgtgttcgttcgatgcgatgtttcgtttggtggtcgaatgggtaggtagtcggattaagcgtatgtagtcgtcgtattgtattagttatgatggatattttttcggtaggagtaaggtgagatgataggaggttttgttttaatggnggcgtt

SEQ ID NO: 26178 - DNA, 828 bp, Artificial Sequence
  chemically treated genomic DNA (Homo sapiens) CpG-island No: 26178
  unsure (7)
aacgccnccattaaaacaaaacctcctatcatctcaccttactcctaccgaaaaaatatccatcataactaatacaatacgacgactacatacgcttaatccgactacctacccattcgaccaccaaacgaaacatcgcatcgaacgaacacgtactcgaataaaaaccgatcttatcgatcaaaataatctaaacgaaaaacatcaaaaactcgcgccaaccgaactattcgccaaactcaaaacgcgcatacccgacgacgaaaatctcgtcgtaacccataacgatacctacttaccgaatatcataataaaaaataaccgcttttctaaattcatcgactataaccgactaaatataacgaaccgctatcaaaacataacgttaactacccgtaatattactaaaaaacttaacgacgaataaactaaccgcttcctcgtactatacgatatcgccgctcccgattcgcaacgcatcgccttctatcgccttcttaacgaattcttctaaacgaaactctaaaattcgaaataaccgaacaaacgacgcccaacctaccatcacgaaaattcgattccaccgacgccttctataaaaaattaaacttcgaaatcgttttccgaaacgccgactaaataatcctccaacgcgaaaatctcatactaaaatttttcgcccaccccgaactcgatcccctcgcgaattaattcaactactacctaaaactaaacgacctcgcgaaattctaccgacaatacaaatccgtcgacatccaaaaaaccaacaacgactatccgcgcatccatacccccgaactacaaaaa

SEQ ID NO: 26179 - DNA, 828 bp, Artificial Sequence
  chemically treated genomic DNA (Homo sapiens) CpG-island No: 26179
  unsure (7)
agcgttnttattaggataggattttttgttattttattttgtttttgtcgagaaagtatttattatggttgatgtaatgcggcggttgtatacgtttgattcggttatttgtttattcgattattaagcgaaatatcgtatcgagcgagtacgtattcggatggaagtcggttttgtcgattaggatgatttggacgaagagtattaggggttcgcgttagtcgaattgttcgttaggtttaaggcgcgtatgttcgacggcgaggatttcgtcgtgatttatggcgatgtttgtttgtcgaatattatggtggaaaatggtcgtttttttggatttatcgattgtggtcggttgggtgtggcggatcgttattaggatatagcgttggttattcgtgatattgttgaagagtttggcggcgaatgggttgatcgttttttcgtgttatacggtatcgtcgttttcgattcgtagcgtatcgttttttatcgtttttttgacgagtttttttgagcgggattttggggttcgaaatgatcgaataagcgacgtttaatttgttattacgagaattcgattttatcggcgttttttatgaaaggttgggtttcggaatcgtttttcgggacgtcggttggatgattttttagcgcggggattttatgttggagtttttcgtttatttcgggttcgattttttcgcgagttggtttagttgttgtttgaggttggacgatttcgcggagttttatcggtagtgtaaattcgtcggtatttaggaaattagtagcggttattcgcgtatttatgttttcgaattgtaggag

SEQ ID NO: 26180 - DNA, 828 bp, Artificial Sequence
  chemically treated genomic DNA (Homo sapiens) CpG-island No: 26180
  unsure (822)
ctcctacaattcgaaaacataaatacgcgaataaccgctactaatttcctaaataccgacgaatttacactaccgataaaactccgcgaaatcgtccaacctcaaacaacaactaaaccaactcgcgaaaaaatcgaacccgaaataaacgaaaaactccaacataaaatccccgcgctaaaaaatcatccaaccgacgtcccgaaaaacgattccgaaacccaacctttcataaaaaacgccgataaaatcgaattctcgtaataacaaattaaacgtcgcttattcgatcatttcgaaccccaaaatcccgctcaaaaaaactcgtcaaaaaaacgataaaaaacgatacgctacgaatcgaaaacgacgataccgtataacacgaaaaaacgatcaacccattcgccgccaaactcttcaacaatatcacgaataaccaacgctatatcctaataacgatccgccacacccaaccgaccacaatcgataaatccaaaaaaacgaccattttccaccataatattcgacaaacaaacatcgccataaatcacgacgaaatcctcgccgtcgaacatacgcgccttaaacctaacgaacaattcgactaacgcgaacccctaatactcttcgtccaaatcatcctaatcgacaaaaccgacttccatccgaatacgtactcgctcgatacgatatttcgcttaataatcgaataaacaaataaccgaatcaaacgtatacaaccgccgcattacatcaaccataataaatactttctcgacaaaaacaaaataaaataacaaaaaatcctatcctaataanaacgct

SEQ ID NO: 26181 - DNA, 633 bp, Artificial Sequence
  chemically treated genomic DNA (Homo sapiens) CpG-island No: 26181
cgcggttggaggaggatagcgtagggggaggagcgagaggttttcgaaaggttttttatttcggtcgcgagtcggcgggtttttcgtatttcgttttttttttttttatttgggaatcggaggcgtaaggagggttatcgttgggcgtcgggtttgtttttagttttattcggcgatatggcggtcgacgtgttgttacggagtttgttcgggttttttttggtttcggtggaggagatatttttcgttttttcgtttcgtttttttttgcgtatttttcgcggttggtcggttggaggttggcggttcgcgatcgcggagtatagagtattggcggttagagaggaagcgtagagcgcggataattatagagtacgagttcggatattagtcggatggtcggtcgttttttttaacggtttatttataattttcgggcggttgagtcgaggcggaagcggaagtgagggagaaaagtaggaaggtttcgttgttcgtatgcgtaggttttagtgtttattttcgtttgatttggttcggacgttagaaaatgttttacgtgggatattttgcgtggggtttattgtagtagttgtattaggtgatttttggagcgggtttgagagataagga

SEQ ID NO: 26182 - DNA, 633 bp, Artificial Sequence
  chemically treated genomic DNA (Homo sapiens) CpG-island No: 26182
tccttatctctcaaacccgctccaaaaatcacctaatacaactactacaataaaccccacgcaaaatatcccacgtaaaacattttctaacgtccgaaccaaatcaaacgaaaataaacactaaaacctacgcatacgaacaacgaaaccttcctacttttctccctcacttccgcttccgcctcgactcaaccgcccgaaaattataaataaaccgttaaaaaaaacgaccgaccatccgactaatatccgaactcgtactctataattatccgcgctctacgcttcctctctaaccgccaatactctatactccgcgatcgcgaaccgccaacctccaaccgaccaaccgcgaaaaatacgcaaaaaaaaacgaaacgaaaaaacgaaaaatatctcctccaccgaaaccaaaaaaaacccgaacaaactccgtaacaacacgtcgaccgccatatcgccgaataaaactaaaaacaaacccgacgcccaacgataaccctccttacgcctccgattcccaaataaaaaaaaaaaaaacgaaatacgaaaaacccgccgactcgcgaccgaaataaaaaacctttcgaaaacctctcgctcctccccctacgctatcctcctccaaccgcg

SEQ ID NO: 26183 - DNA, 633 bp, Artificial Sequence
  chemically treated genomic DNA (Homo sapiens) CpG-island No: 26183
tttttgttttttaggttcgttttaagaattatttagtgtagttattatagtgaattttacgtagggtattttacgtggaatattttttggcgttcgggttaggttaagcggaagtaaatattagagtttgcgtatgcgaatagcggagtttttttgttttttttttttattttcgttttcgtttcggtttagtcgttcgaggattgtgagtggatcgttgaggagagcgatcgattattcggttggtgttcggattcgtattttatggttgttcgcgttttgcgttttttttttagtcgttagtgttttatgtttcgcggtcgcgggtcgttagtttttagtcggttagtcgcgaggggtgcgtagagggaggcggggcggaaaggcgagaggtgttttttttatcggagttaggggagattcgagtaagtttcgtgatagtacgtcggtcgttatgtcgtcgagtggggttggaaatagattcggcgtttagcggtagttttttttgcgttttcgatttttaggtgaggagaggaggagcgggatgcgggggattcgtcggttcgcggtcgggatggaaagtttttcggaagtttttcgtttttttttttgcgttgtttttttttagtcgcg

SEQ ID NO: 26184 - DNA, 633 bp, Artificial Sequence
  chemically treated genomic DNA (Homo sapiens) CpG-island No: 26184
cgcgactaaaaaaaaacaacgcaaaaaaaaaaacgaaaaacttccgaaaaactttccatcccgaccgcgaaccgacgaatcccccgcatcccgctcctcctctcctcacctaaaaatcgaaaacgcaaaaaaaactaccgctaaacgccgaatctatttccaaccccactcgacgacataacgaccgacgtactatcacgaaacttactcgaatctcccctaactccgataaaaaaaacacctctcgcctttccgccccgcctccctctacgcacccctcgcgactaaccgactaaaaactaacgacccgcgaccgcgaaacataaaacactaacgactaaaaaaaaaacgcaaaacgcgaacaaccataaaatacgaatccgaacaccaaccgaataatcgatcgctctcctcaacgatccactcacaatcctcgaacgactaaaccgaaacgaaaacgaaaataaaaaaaaaaaacaaaaaaactccgctattcgcatacgcaaactctaatatttacttccgcttaacctaacccgaacgccaaaaaatattccacgtaaaataccctacgtaaaattcactataataactacactaaataattcttaaaacgaacctaaaaaacaaaaa

SEQ ID NO: 26185 - DNA, 869 bp, Artificial Sequence
  chemically treated genomic DNA (Homo sapiens) CpG-island No: 26185
cgtgcgtttcgaggacgtcgtgttcgggttcgcgtaggttttattcgggttacggttcgggatacgtgcgtcgggcgtttagcgggttggggggggcgggttcgcgggacgcgggtgcggggtacggaggcggtcgggtcgtattatcgcgtcgcgggaagaggggtagttttcggtcggttttgtcgttttacgtatattcgcgggcggaggattcgtcgttaggttgcgttttacgtttagttcggaagtttcgcgagttcgggttatattatcgcgcggcgggaggaggattatttcgggtcgtattattcgttcggtcgggggacgcgttttggtttcgtcgcgttttcgtagttggcgtttcgtaggtttcgttcggtaggtgtcgttttttttcgggtagacgtgtagaaaagaacgcgtcggtttcgttcgcgaagggtcgcgcggcggtgggcggggcgtcgcgaatttttttcgcgtttattggttgcgttgcggtagggcgggttcggttaggtcggttattggttgagggattaggttatttgtatacggggttgggcgtggagtcgcggggttcggggtcggtcgggtcgggtcggggggcgagagggtgttagcggtcgtagttgaagttgggtcgagagtcggcgacggtttcgcgtcggggtcgtaggtgacgcgcgagggattttaggttggcgggcggggcgttttttagaggtcgttttttcgcgggggttgcggggggtcgggttgggtaggcgcggcggggttcggacgtttaagttggaggggacgggggtggggttaattttttcgttcgtttattcggtagtgtttttaggcgtagggtagttttt

SEQ ID NO: 26186 - DNA, 869 bp, Artificial Sequence
  chemically treated genomic DNA (Homo sapiens) CpG-island No: 26186
aaaaactaccctacgcctaaaaacactaccgaataaacgaacgaaaaaattaaccccacccccgtcccctccaacttaaacgtccgaaccccgccgcgcctacccaacccgaccccccgcaacccccgcgaaaaaacgacctctaaaaaacgccccgcccgccaacctaaaatccctcgcgcgtcacctacgaccccgacgcgaaaccgtcgccgactctcgacccaacttcaactacgaccgctaacaccctctcgccccccgacccgacccgaccgaccccgaaccccgcgactccacgcccaaccccgtatacaaataacctaatccctcaaccaataaccgacctaaccgaacccgccctaccgcaacgcaaccaataaacgcgaaaaaaattcgcgacgccccgcccaccgccgcgcgacccttcgcgaacgaaaccgacgcgttcttttctacacgtctacccgaaaaaaaacgacacctaccgaacgaaacctacgaaacgccaactacgaaaacgcgacgaaaccaaaacgcgtcccccgaccgaacgaataatacgacccgaaataatcctcctcccgccgcgcgataatataacccgaactcgcgaaacttccgaactaaacgtaaaacgcaacctaacgacgaatcctccgcccgcgaatatacgtaaaacgacaaaaccgaccgaaaactacccctcttcccgcgacgcgataatacgacccgaccgcctccgtaccccgcacccgcgtcccgcgaacccgccccccccaacccgctaaacgcccgacgcacgtatcccgaaccgtaacccgaataaaacctacgcgaacccgaacacgacgtcctcgaaacgcacg

SEQ ID NO: 26187 - DNA, 869 bp, Artificial Sequence
  chemically treated genomic DNA (Homo sapiens) CpG-island No: 26187
aggggttgttttgcgtttggaggtattgtcgggtgggcgggcggagggattgattttattttcgttttttttaatttgggcgttcgagtttcgtcgcgtttgtttagttcgatttttcgtagttttcgcgggagggcggtttttgaggggcgtttcgttcgttaatttgggatttttcgcgcgttatttgcgatttcggcgcggggtcgtcgtcggttttcggtttaattttagttgcggtcgttggtattttttcgtttttcggttcgattcgatcggtttcgggtttcgcggttttacgtttagtttcgtatgtaaatgatttggttttttagttaatggtcggtttagtcgggttcgttttatcgtaacgtagttagtgggcgcgaggggggttcgcgacgtttcgtttatcgtcgcgcggtttttcgcgggcgaggtcggcgcgtttttttttgtacgtttgttcggggaggggcggtatttgtcgggcggggtttgcggggcgttagttgcgagggcgcggcggggttagggcgcgtttttcggtcgggcggatggtacggttcgaggtggtttttttttcgtcgcgcggtggtatggttcgggttcgcggggttttcgggttgggcgtggggcgtagtttggcgacgggtttttcgttcgcgggtgtgcgtggggcggtagggtcggtcgggagttgttttttttttcgcggcgcggtggtacgattcggtcgttttcgtgtttcgtattcgcgtttcgcgggttcgttttttttaattcgttgggcgttcggcgtacgtatttcgggtcgtgattcgggtggggtttgcgcgggttcggatacggcgttttcgggacgtacg

SEQ ID NO: 26188 - DNA, 869 bp, Artificial Sequence
  chemically treated genomic DNA (Homo sapiens) CpG-island No: 26188
cgtacgtcccgaaaacgccgtatccgaacccgcgcaaaccccacccgaatcacgacccgaaatacgtacgccgaacgcccaacgaattaaaaaaaacgaacccgcgaaacgcgaatacgaaacacgaaaacgaccgaatcgtaccaccgcgccgcgaaaaaaaaaacaactcccgaccgaccctaccgccccacgcacacccgcgaacgaaaaacccgtcgccaaactacgccccacgcccaacccgaaaaccccgcgaacccgaaccataccaccgcgcgacgaaaaaaaaaccacctcgaaccgtaccatccgcccgaccgaaaaacgcgccctaaccccgccgcgccctcgcaactaacgccccgcaaaccccgcccgacaaataccgcccctccccgaacaaacgtacaaaaaaaaacgcgccgacctcgcccgcgaaaaaccgcgcgacgataaacgaaacgtcgcgaacccccctcgcgcccactaactacgttacgataaaacgaacccgactaaaccgaccattaactaaaaaaccaaatcatttacatacgaaactaaacgtaaaaccgcgaaacccgaaaccgatcgaatcgaaccgaaaaacgaaaaaataccaacgaccgcaactaaaattaaaccgaaaaccgacgacgaccccgcgccgaaatcgcaaataacgcgcgaaaaatcccaaattaacgaacgaaacgcccctcaaaaaccgccctcccgcgaaaactacgaaaaatcgaactaaacaaacgcgacgaaactcgaacgcccaaattaaaaaaaacgaaaataaaatcaatccctccgcccgcccacccgacaatacctccaaacgcaaaacaacccct

SEQ ID NO: 26189 - DNA, 932 bp, Artificial Sequence
  chemically treated genomic DNA (Homo sapiens) CpG-island No: 26189
cgtattttcggaataaggcgaattattaattagatttagtattttttattcgttttatttggttcggaggatattgtttttttttcgggcggcgcggaggcgttcgtacgttaggtttcgcggtcgtcggtatgggaacgttttatttcgatttgtttaggtcgtagaggcgttcggggtcgtaatttagatttcgattttgtagatggagtagatttcgggtttgagtagttttcgttagttcggggagtttcgtcgttgtcgtttaatcgttgcgttcgtttcgaaagtttcggttttcgtcgcgggtatcgaagttcgcgtcgcgattttagtttggcgggagttagggcgttttcgtttcgtagggcgggcgtaggtgcggcgtcgttttcgtttttcgttcgggtatcgcggaaaattttttttagttggagtcggcgttcggtcggttcgaggcgcgtttcgcgtttttaagtatcggggattcggcgcggtttatttgggcgttcgttagtttggagattcgtttcggcgtcgtcgtaatttgtcgtttttagcgtcgcggcgtattcgggtttcgcgtttttattggttcgcggttcgtacgtttcgtttttagtatttttattggttgtttagcgcgggcgtttcgtttttttttcgcgtttattggttgtttttgatacgttttttttcgatttattggttcgtcgtcgcgtttcgtttttttcgagattataggtgtgggcgggtcggaggggggcgtcgagtcgtagttttcgtttttatttttcgtttatcgcgaaaaacgcggaaatgcggtggttgcggttcgcgggtaggcgtcggggtaggtgtttggtttcgtttttgggtcgatttttttagtagttttttagtgtggcgggttttcgtttaggaagggtttt

SEQ ID NO: 26190 - DNA, 932 bp, Artificial Sequence
  chemically treated genomic DNA (Homo sapiens) CpG-island No: 26190
aaaacccttcctaaacgaaaacccgccacactaaaaaactactaaaaaaatcgacccaaaaacgaaaccaaacacctaccccgacgcctacccgcgaaccgcaaccaccgcatttccgcgtttttcgcgataaacgaaaaataaaaacgaaaactacgactcgacgcccccctccgacccgcccacacctataatctcgaaaaaaacgaaacgcgacgacgaaccaataaatcgaaaaaaaacgtatcaaaaacaaccaataaacgcgaaaaaaaaacgaaacgcccgcgctaaacaaccaataaaaatactaaaaacgaaacgtacgaaccgcgaaccaataaaaacgcgaaacccgaatacgccgcgacgctaaaaacgacaaattacgacgacgccgaaacgaatctccaaactaacgaacgcccaaataaaccgcgccgaatccccgatacttaaaaacgcgaaacgcgcctcgaaccgaccgaacgccgactccaactaaaaaaaattttccgcgatacccgaacgaaaaacgaaaacgacgccgcacctacgcccgccctacgaaacgaaaacgccctaactcccgccaaactaaaatcgcgacgcgaacttcgatacccgcgacgaaaaccgaaactttcgaaacgaacgcaacgattaaacgacaacgacgaaactccccgaactaacgaaaactactcaaacccgaaatctactccatctacaaaatcgaaatctaaattacgaccccgaacgcctctacgacctaaacaaatcgaaataaaacgttcccataccgacgaccgcgaaacctaacgtacgaacgcctccgcgccgcccgaaaaaaaaacaatatcctccgaaccaaataaaacgaataaaaaatactaaatctaattaataattcgccttattccgaaaatacg

SEQ ID NO: 26191 - DNA, 932 bp, Artificial Sequence
  chemically treated genomic DNA (Homo sapiens) CpG-island No: 26191
gagattttttttgggcgggaattcgttatattagaaggttgttgaggaagtcggtttaggagcggggttagatatttatttcgacgtttgttcgcgggtcgtagttatcgtattttcgcgtttttcgcggtaggcgggaggtgggggcggggattgcggttcggcgttttttttcgattcgtttatatttgtagtttcggggggggcggggcgcggcgacgagttaatgggtcggggaggggcgtgttagaggtagttaatgggcgcggggagggggcggaacgttcgcgttgagtagttaataggggtgttaggggcggggcgtgcggatcgcgggttaatgggggcgcggggttcgggtgcgtcgcggcgttgggggcggtaggttgcggcggcgtcggagcgggtttttaggttggcgagcgtttaggtgagtcgcgtcgggttttcggtatttgggagcgcggggcgcgtttcgagtcggtcggacgtcgattttaattggggagagtttttcgcgatgttcggacggagagcgggggcggcgtcgtatttgcgttcgttttgcggaacggggacgttttggttttcgttaggttggggtcgcggcgcgggtttcggtgttcgcggcggggatcgggattttcggggcgagcgtagcgattaggcggtagcggcggggtttttcgggttggcgggggttgtttagattcggagtttgttttatttgtagggtcgaggtttgggttgcgatttcgagcgtttttgcggtttgagtaggtcggggtggggcgtttttatgtcggcggtcgcggggtttggcgtgcgggcgttttcgcgtcgttcggggagggggtagtgtttttcgagttaggtgaggcgagtaggaaatgttggatttggttaatgattcgttttgtttcgggagtgcg

SEQ ID NO: 26192 - DNA, 932 bp, Artificial Sequence
  chemically treated genomic DNA (Homo sapiens) CpG-island No: 26192
cgcactcccgaaacaaaacgaatcattaaccaaatccaacatttcctactcgcctcacctaactcgaaaaacactaccccctccccgaacgacgcgaaaacgcccgcacgccaaaccccgcgaccgccgacataaaaacgccccaccccgacctactcaaaccgcaaaaacgctcgaaatcgcaacccaaacctcgaccctacaaataaaacaaactccgaatctaaacaacccccgccaacccgaaaaaccccgccgctaccgcctaatcgctacgctcgccccgaaaatcccgatccccgccgcgaacaccgaaacccgcgccgcgaccccaacctaacgaaaaccaaaacgtccccgttccgcaaaacgaacgcaaatacgacgccgcccccgctctccgtccgaacatcgcgaaaaactctccccaattaaaatcgacgtccgaccgactcgaaacgcgccccgcgctcccaaataccgaaaacccgacgcgactcacctaaacgctcgccaacctaaaaacccgctccgacgccgccgcaacctaccgcccccaacgccgcgacgcacccgaaccccgcgcccccattaacccgcgatccgcacgccccgcccctaacacccctattaactactcaacgcgaacgttccgccccctccccgcgcccattaactacctctaacacgcccctccccgacccattaactcgtcgccgcgccccgccccccccgaaactacaaatataaacgaatcgaaaaaaaacgccgaaccgcaatccccgcccccacctcccgcctaccgcgaaaaacgcgaaaatacgataactacgacccgcgaacaaacgtcgaaataaatatctaaccccgctcctaaaccgacttcctcaacaaccttctaatataacgaattcccgcccaaaaaaaatctc

SEQ ID NO: 26193 - DNA, 652 bp, Artificial Sequence
  chemically treated genomic DNA (Homo sapiens) CpG-island No: 26193
gcggtagggcggattcgtagggggtatgggcgtgggtgttatagagcgaggcgagtgggttttcgtcgcgttttcgtaagtttaggacgttcgttcgtaggttacgggttttttagtttcggcggggttttttagtttcggcggggttttttagtttcggcggggttttttagtttcggcggggttttttagtttcggcggggttttttagtttcggcggggttttttagtttcggcggggttttttagtttcggcggggttttttagtttcggcggggttttttagcgcgcgcgcgttcgttcgttttttcggttcgcggttagcgcggcgtaggtttcgtttcgcggtgtaggtcgtagataaagcgcgtggcgtttataggcggttcgcggttcggaggagtagggtttttagggtcggcgcggtcgtcgtatttattcggaaatttcgcgtttcgtagtcgttcgcgagcgttcgtcgtcgttgtacgatcgagagtcgtttttaggttcggtcgtcgtcgtttttgtcgtcgtcgtgcgtttttcgattcggaagagtacggcgtttttttcgggtttttttgttttgttcgttgattggaattattgagattagagcgggaaagaaatgattgaagtgaggaaggt

SEQ ID NO: 26194 - DNA, 652 bp, Artificial Sequence
  chemically treated genomic DNA (Homo sapiens) CpG-island No: 26194
accttcctcacttcaatcatttctttcccgctctaatctcaataattccaatcaacgaacaaaacaaaaaaacccgaaaaaaacgccgtactcttccgaatcgaaaaacgcacgacgacgacaaaaacgacgacgaccgaacctaaaaacgactctcgatcgtacaacgacgacgaacgctcgcgaacgactacgaaacgcgaaatttccgaataaatacgacgaccgcgccgaccctaaaaaccctactcctccgaaccgcgaaccgcctataaacgccacgcgctttatctacgacctacaccgcgaaacgaaacctacgccgcgctaaccgcgaaccgaaaaaacgaacgaacgcgcgcgcgctaaaaaaccccgccgaaactaaaaaaccccgccgaaactaaaaaaccccgccgaaactaaaaaaccccgccgaaactaaaaaaccccgccgaaactaaaaaaccccgccgaaactaaaaaaccccgccgaaactaaaaaaccccgccgaaactaaaaaaccccgccgaaactaaaaaacccgtaacctacgaacgaacgtcctaaacttacgaaaacgcgacgaaaacccactcgcctcgctctataacacccacgcccataccccctacgaatccgccctaccgc

SEQ ID NO: 26195 - DNA, 652 bp, Artificial Sequence
  chemically treated genomic DNA (Homo sapiens) CpG-island No: 26195
attttttttattttagttatttttttttcgttttggttttagtggttttagttagcgagtaggatagaggagttcggaagaggcgtcgtgttttttcgggtcgaagagcgtacggcggcggtagaggcggcggcggtcgggtttaggagcgattttcggtcgtgtagcggcggcgagcgttcgcgagcggttgcgggacgcgaggttttcgggtaagtgcggcggtcgcgtcggttttgggggttttgttttttcgggtcgcgggtcgtttgtgggcgttacgcgttttgtttgcggtttgtatcgcggggcgaggtttgcgtcgcgttggtcgcgggtcgggagggcgggcgggcgcgcgcgcgttgggaggtttcgtcgagattgggaggtttcgtcgagattgggaggtttcgtcgagattgggaggtttcgtcgagattgggaggtttcgtcgagattgggaggtttcgtcgagattgggaggtttcgtcgagattgggaggtttcgtcgagattgggaggtttcgtcgagattgggaggttcgtggtttgcgggcggacgttttgggtttgcgaggacgcggcgagagtttattcgtttcgttttgtggtatttacgtttatgttttttgcgagttcgttttgtcgt

SEQ ID NO: 26196 - DNA, 652 bp, Artificial Sequence
  chemically treated genomic DNA (Homo sapiens) CpG-island No: 26196
acgacaaaacgaactcgcaaaaaacataaacgtaaataccacaaaacgaaacgaataaactctcgccgcgtcctcgcaaacccaaaacgtccgcccgcaaaccacgaacctcccaatctcgacgaaacctcccaatctcgacgaaacctcccaatctcgacgaaacctcccaatctcgacgaaacctcccaatctcgacgaaacctcccaatctcgacgaaacctcccaatctcgacgaaacctcccaatctcgacgaaacctcccaatctcgacgaaacctcccaacgcgcgcgcgcccgcccgccctcccgacccgcgaccaacgcgacgcaaacctcgccccgcgatacaaaccgcaaacaaaacgcgtaacgcccacaaacgacccgcgacccgaaaaaacaaaacccccaaaaccgacgcgaccgccgcacttacccgaaaacctcgcgtcccgcaaccgctcgcgaacgctcgccgccgctacacgaccgaaaatcgctcctaaacccgaccgccgccgcctctaccgccgccgtacgctcttcgacccgaaaaaacacgacgcctcttccgaactcctctatcctactcgctaactaaaaccactaaaaccaaaacgaaaaaaaaataactaaaataaaaaaaat

SEQ ID NO: 26197 - DNA, 884 bp, Artificial Sequence
  chemically treated genomic DNA (Homo sapiens) CpG-island No: 26197
cgttcggggagattaatattttggaagagttcgtattgtttaattcgcgattatgggttggtttaggtcgtttttttcgcggtcgggatagttggtatcgttcggattttcgtttatcgtttagagcgaatgggagttgttttttgtacgttagtttcgtttttacgttcgtagtttcgttttttttcgggttcgtagttttatttcgtttttacgtacgtagtttcgtttttattttcgtagtttcgtttcgtttcgcgttcgtagtttcgtttttacgtttgtagtttcgttttgtttcgggacggtcgtttacggtttcgttttttttttcgtagtttcgttttacgttcgttgtttcgtagtttcgtttttattttcgtagtttcgtttttacgtcgtaatttcgttcgtagtttttttttagtttcgcgcgcggcgggagtatttggggagaagagttttggcgtcgtttgttattagcgtcgcgtttttttgaataaatattgtcggagtttttcgtgagtcggttattttagtttagtttcgcgttcgttcgtttcgtagtaggcgcggtgaatcgtgcgcgttggcggacgaggcgggttcggtaggacgttgttgtgtcgtttcgtgtggatttggttttaggtcgttttgaggatgtcgcgtagaagtcgtgtgggtttcgggacgtaggtttgcgtggttgtagcgtattaggggaggtttcggggatttcgagttggcgcggattcgcgagattttttggtcgttttgcggggagcgttggggaggcgtttcgagcgggcgttagagattcgcgggtttttcgtgtaggggttgtttgggttggggttcgggtgggtttgcgtaggtgtggg

SEQ ID NO: 26198 - DNA, 884 bp, Artificial Sequence
  chemically treated genomic DNA (Homo sapiens) CpG-island No: 26198
cccacacctacgcaaacccacccgaaccccaacccaaacaacccctacacgaaaaacccgcgaatctctaacgcccgctcgaaacgcctccccaacgctccccgcaaaacgaccaaaaaatctcgcgaatccgcgccaactcgaaatccccgaaacctcccctaatacgctacaaccacgcaaacctacgtcccgaaacccacacgacttctacgcgacatcctcaaaacgacctaaaaccaaatccacacgaaacgacacaacaacgtcctaccgaacccgcctcgtccgccaacgcgcacgattcaccgcgcctactacgaaacgaacgaacgcgaaactaaactaaaataaccgactcacgaaaaactccgacaatatttattcaaaaaaacgcgacgctaataacaaacgacgccaaaactcttctccccaaatactcccgccgcgcgcgaaactaaaaaaaaactacgaacgaaattacgacgtaaaaacgaaactacgaaaataaaaacgaaactacgaaacaacgaacgtaaaacgaaactacgaaaaaaaaaacgaaaccgtaaacgaccgtcccgaaacaaaacgaaactacaaacgtaaaaacgaaactacgaacgcgaaacgaaacgaaactacgaaaataaaaacgaaactacgtacgtaaaaacgaaataaaactacgaacccgaaaaaaaacgaaactacgaacgtaaaaacgaaactaacgtacaaaaaacaactcccattcgctctaaacgataaacgaaaatccgaacgataccaactatcccgaccgcgaaaaaaacgacctaaaccaacccataatcgcgaattaaacaatacgaactcttccaaaatattaatctccccgaacg

SEQ ID NO: 26199 - DNA, 884 bp, Artificial Sequence
  chemically treated genomic DNA (Homo sapiens) CpG-island No: 26199
tttatatttgcgtagatttattcgggttttagtttaggtagtttttgtacggggagttcgcgggtttttggcgttcgttcgggacgtttttttagcgtttttcgtagagcggttagggggtttcgcgagttcgcgttagttcgggattttcggagttttttttggtgcgttgtagttacgtaggtttgcgtttcgaggtttatacggtttttgcgcggtatttttaggacgatttggagttaaatttatacgggacggtatagtagcgttttgtcgagttcgtttcgttcgttagcgcgtacgatttatcgcgtttgttgcgggacgggcggacgcggggttgggttggaatagtcggtttacggagggtttcggtagtgtttgtttagaggagcgcggcgttggtagtaggcgacgttaggatttttttttttaggtgttttcgtcgcgcgcggggttagggaggagttgcgggcggggttgcggcgtgggggcggggttgcgagggtgggggcggggttgcggagtagcgggcgtgaggcggggttgcgagggagggggcggggtcgtgggcggtcgtttcgaggtagggcggggttgtagacgtgggggcggagttgcgggcgcgaggcggggcggggttgcgggggtgggggcggggttacgtgcgtgggggcggggtggggttgcgggttcgaggagggacggggttgcgggcgtgggggcggagttgacgtataggaagtagtttttattcgttttgggcggtgggcggagattcgggcggtattagttgtttcggtcgcgggggggacggtttggattagtttatggtcgcgggttaaatagtacgagtttttttaggatattggttttttcgggcg

SEQ ID NO: 26200 - DNA, 884 bp, Artificial Sequence
  chemically treated genomic DNA (Homo sapiens) CpG-island No: 26200
cgcccgaaaaaaccaatatcctaaaaaaactcgtactatttaacccgcgaccataaactaatccaaaccgtcccccccgcgaccgaaacaactaataccgcccgaatctccgcccaccgcccaaaacgaataaaaactacttcctatacgtcaactccgcccccacgcccgcaaccccgtccctcctcgaacccgcaaccccaccccgcccccacgcacgtaaccccgcccccacccccgcaaccccgccccgcctcgcgcccgcaactccgcccccacgtctacaaccccgccctacctcgaaacgaccgcccacgaccccgccccctccctcgcaaccccgcctcacgcccgctactccgcaaccccgcccccaccctcgcaaccccgcccccacgccgcaaccccgcccgcaactcctccctaaccccgcgcgcgacgaaaacacctaaaaaaaaaaatcctaacgtcgcctactaccaacgccgcgctcctctaaacaaacactaccgaaaccctccgtaaaccgactattccaacccaaccccgcgtccgcccgtcccgcaacaaacgcgataaatcgtacgcgctaacgaacgaaacgaactcgacaaaacgctactataccgtcccgtataaatttaactccaaatcgtcctaaaaataccgcgcaaaaaccgtataaacctcgaaacgcaaacctacgtaactacaacgcaccaaaaaaaactccgaaaatcccgaactaacgcgaactcgcgaaaccccctaaccgctctacgaaaaacgctaaaaaaacgtcccgaacgaacgccaaaaacccgcgaactccccgtacaaaaactacctaaactaaaacccgaataaatctacgcaaatataaa

SEQ ID NO: 26201 - DNA, 1013 bp, Artificial Sequence
  chemically treated genomic DNA (Homo sapiens) CpG-island No: 26201
gagggtcgggacgtacgtacgggtcgggtaggatggcgttggcgtcgatgttcgcgcgttttagggtttggtttggtcgtttttttatttttgtcggtttttcgggtcgcggatttcgcgcggcgtcgggcgatgttggtttgttcgtggttattatttcgttttattttcgtttttttgggtcgtcgtattcgtttacgtgttcgtttttttttgcgtaaaattttaagatgagtaaatattgggtttacggtggagcgtcgcgggggtttttttgagtcggggcgggtcgggggcgggattagggttcggtcggggcgtgttcgaggggagggatttttcggtttgcgattcggcgttgttcgcggtgtttagcgttcgttcgggcgcgttatggggaatcgtagtatcgcggacgcggacgggttgttggttgggcgcgggtcggtcgcgggggtatttgcgggggtatttgcggggttggttgggtagggcgcggcggcgttggtggggggcgtgttgtttatcggcgcggtgttcgcggggaattcgttcgtgtgcgtgagcgtggttatcgagcgcgttttgtagacgtttattaatttttttatcgtgagtttggcggtcgtcgatttttttttcgtttttttggtgttgtcgtttttcgtttatttcgaggtgagtcgcgttcggtcgtacgagtatttttatttgtttttcggtttttcgtttttgtttttacggaggattcggcgcgattcggtttttttttggtgcggagtttttagttggggcggcggtaggggcgttgcgttttgtttttcggcgatatatttatcgtcgttatttcgcgattttttattcgttgcgttgtttgtttttcgattttcgtttttttttttttttttcgtttgttttggcgtttgttatttaggagatgttcgtttttttatttagggatttcggaaataggcgattttgttaagtttagtttttttcgtagttggatttta

SEQ ID NO: 26202 - DNA, 1013 bp, Artificial Sequence
  chemically treated genomic DNA (Homo sapiens) CpG-island No: 26202
taaaatccaactacgaaaaaaactaaacttaacaaaatcgcctatttccgaaatccctaaataaaaaaacgaacatctcctaaataacaaacgccaaaacaaacgaaaaaaaaaaaaaaaaacgaaaatcgaaaaacaaacaacgcaacgaataaaaaatcgcgaaataacgacgataaatatatcgccgaaaaacaaaacgcaacgcccctaccgccgccccaactaaaaactccgcaccaaaaaaaaaccgaatcgcgccgaatcctccgtaaaaacaaaaacgaaaaaccgaaaaacaaataaaaatactcgtacgaccgaacgcgactcacctcgaaataaacgaaaaacgacaacaccaaaaaaacgaaaaaaaaatcgacgaccgccaaactcacgataaaaaaattaataaacgtctacaaaacgcgctcgataaccacgctcacgcacacgaacgaattccccgcgaacaccgcgccgataaacaacacgccccccaccaacgccgccgcgccctacccaaccaaccccgcaaatacccccgcaaatacccccgcgaccgacccgcgcccaaccaacaacccgtccgcgtccgcgatactacgattccccataacgcgcccgaacgaacgctaaacaccgcgaacaacgccgaatcgcaaaccgaaaaatccctcccctcgaacacgccccgaccgaaccctaatcccgcccccgacccgccccgactcaaaaaaacccccgcgacgctccaccgtaaacccaatatttactcatcttaaaattttacgcaaaaaaaaacgaacacgtaaacgaatacgacgacccaaaaaaacgaaaataaaacgaaataataaccacgaacaaaccaacatcgcccgacgccgcgcgaaatccgcgacccgaaaaaccgacaaaaataaaaaaacgaccaaaccaaaccctaaaacgcgcgaacatcgacgccaacgccatcctacccgacccgtacgtacgtcccgaccctc

SEQ ID NO: 26203 - DNA, 1013 bp, Artificial Sequence
  chemically treated genomic DNA (Homo sapiens) CpG-island No: 26203
tgaaatttagttacggaggggattgggtttgataaagtcgtttgttttcggggtttttggatagaaggacgggtattttttggataatagacgttaagatagacggggaaggagaagaggaacgagggtcgggggatagatagcgtagcgggtggaaggtcgcgaggtggcggcggtgggtgtatcgtcgagggataaggcgtagcgtttttgtcgtcgttttagttggaagtttcgtattagaaaggggtcgggtcgcgtcgggtttttcgtagggatagggacggggaatcgaggagtaggtgaggatgttcgtgcggtcggacgcggtttatttcggagtagacgaagagcggtagtattaggagagcgaggaggaggtcggcggtcgttaggtttacgatgaaggagttggtgggcgtttgtagggcgcgttcggtggttacgtttacgtatacgagcgagtttttcgcgagtatcgcgtcgatgagtagtacgttttttattagcgtcgtcgcgttttgtttagttagtttcgtagatgttttcgtagatgttttcgcggtcggttcgcgtttagttagtagttcgttcgcgttcgcggtgttgcggttttttatggcgcgttcgggcgggcgttgagtatcgcggataacgtcgggtcgtaagtcggggagttttttttttcgggtacgtttcggtcggattttggtttcgttttcgattcgtttcggtttaggggggttttcgcggcgttttatcgtgagtttagtatttgtttattttggaattttgcgtagggagagacgggtacgtggacgaatgcggcggtttaaagagacgggaatgaagcgaggtggtggttacgggtaggttagtatcgttcggcgtcgcgcggggttcgcgattcgagaaatcgataaggatggaggggcggttagattaggttttgaagcgcgcgggtatcgacgttagcgttattttattcggttcgtgcgtgcgtttcggttttt

SEQ ID NO: 26204 - DNA, 1013 bp, Artificial Sequence
  chemically treated genomic DNA (Homo sapiens) CpG-island No: 26204
aaaaaccgaaacgcacgcacgaaccgaataaaataacgctaacgtcgatacccgcgcgcttcaaaacctaatctaaccgcccctccatccttatcgatttctcgaatcgcgaaccccgcgcgacgccgaacgatactaacctacccgtaaccaccacctcgcttcattcccgtctctttaaaccgccgcattcgtccacgtacccgtctctccctacgcaaaattccaaaataaacaaatactaaactcacgataaaacgccgcgaaaacccccctaaaccgaaacgaatcgaaaacgaaaccaaaatccgaccgaaacgtacccgaaaaaaaaaactccccgacttacgacccgacgttatccgcgatactcaacgcccgcccgaacgcgccataaaaaaccgcaacaccgcgaacgcgaacgaactactaactaaacgcgaaccgaccgcgaaaacatctacgaaaacatctacgaaactaactaaacaaaacgcgacgacgctaataaaaaacgtactactcatcgacgcgatactcgcgaaaaactcgctcgtatacgtaaacgtaaccaccgaacgcgccctacaaacgcccaccaactccttcatcgtaaacctaacgaccgccgacctcctcctcgctctcctaatactaccgctcttcgtctactccgaaataaaccgcgtccgaccgcacgaacatcctcacctactcctcgattccccgtccctatccctacgaaaaacccgacgcgacccgacccctttctaatacgaaacttccaactaaaacgacgacaaaaacgctacgccttatccctcgacgatacacccaccgccgccacctcgcgaccttccacccgctacgctatctatcccccgaccctcgttcctcttctccttccccgtctatcttaacgtctattatccaaaaaatacccgtccttctatccaaaaaccccgaaaacaaacgactttatcaaacccaatcccctccgtaactaaatttca

SEQ ID NO: 26205 - DNA, 734 bp, Artificial Sequence
  chemically treated genomic DNA (Homo sapiens) CpG-island No: 26205
tggcgcgtggttgttgagttttcgtttgtgcgacgtttttatggttatggacgttatgttgtgtatcgtttttatttttaatttgtgcgttattagcgtggataggtgcgtcgtttttttcgttcgcgtttcggcgttttcgcgtttcgttcgtcgtttttatcgcggtttgtgcgttgttcggcgttttttcggcgtttttcgtaggttcgtggtcgtggtcgtgtcgttgcgttataatcggtagggtgggagtcgtcggtagttgttgtttatcggcgttacgtggttgttgttcgcggcggtggcggcgttcgtattgtgcggttttaacgacgtgcgcggtcgcgatttcgtcgtgtgtcgtttggaggatcgcgattacgtggtttattcgttcgtgtgttttttttttttattttgttcgtttatgttgttgttttattgggttacgtttcgcggtttgtagcgttgggaggtggtacgtcgcgttaagttgtacggtcgcgcgttacgtcgatttagcggttttggatcgttattatattaagtttatcggggttagtttcgttaggattcgtgtggtttcgaatgtgcgtttatcgcgttaggtttttttcggggtttttgcggcgtagtttgagcgttcgtcgagtttagtttatattaggatttttgcggtttagattgagcgtttattgagttcggttttttttcgggtatttgaggttgta

SEQ ID NO: 26206 - DNA, 734 bp, Artificial Sequence
  chemically treated genomic DNA (Homo sapiens) CpG-island No: 26206
tacaacctcaaatacccgaaaaaaaaccgaactcaataaacgctcaatctaaaccgcaaaaatcctaatataaactaaactcgacgaacgctcaaactacgccgcaaaaaccccgaaaaaaacctaacgcgataaacgcacattcgaaaccacacgaatcctaacgaaactaaccccgataaacttaatataataacgatccaaaaccgctaaatcgacgtaacgcgcgaccgtacaacttaacgcgacgtaccacctcccaacgctacaaaccgcgaaacgtaacccaataaaacaacaacataaacgaacaaaataaaaaaaaaaaacacacgaacgaataaaccacgtaatcgcgatcctccaaacgacacacgacgaaatcgcgaccgcgcacgtcgttaaaaccgcacaatacgaacgccgccaccgccgcgaacaacaaccacgtaacgccgataaacaacaactaccgacgactcccaccctaccgattataacgcaacgacacgaccacgaccacgaacctacgaaaaacgccgaaaaaacgccgaacaacgcacaaaccgcgataaaaacgacgaacgaaacgcgaaaacgccgaaacgcgaacgaaaaaaacgacgcacctatccacgctaataacgcacaaattaaaaataaaaacgatacacaacataacgtccataaccataaaaacgtcgcacaaacgaaaactcaacaaccacgcgcca

SEQ ID NO: 26207 - DNA, 734 bp, Artificial Sequence
  chemically treated genomic DNA (Homo sapiens) CpG-island No: 26207
tgtagttttaagtgttcggggggaggtcgggtttagtggacgtttagtttgggtcgtaagggttttggtgtaggttgggttcggcgagcgtttagattacgtcgtagggatttcggggaaggtttggcgcggtgggcgtatattcgaggttatacgggttttgacggagttagtttcgatgggtttgatgtgatggcggtttaaggtcgttgggtcggcgtggcgcgcggtcgtgtagtttggcgcgacgtgttattttttagcgttgtaggtcgcggaacgtggtttagtagagtagtagtatgagcgggtagggtaggaagaaggagtatacggacgagtagattacgtagtcgcggttttttaggcggtatacggcggggtcgcggtcgcgtacgtcgttgaggtcgtatagtacgggcgtcgttatcgtcgcggatagtagttacgtggcgtcgatgagtagtagttgtcggcggtttttattttgtcggttgtagcgtagcggtacggttacggttacgaatttgcggggagcgtcgagggggcgtcggatagcgtataggtcgcggtgagggcggcgggcggggcgcgggggcgtcggggcgcgggcggggagggcggcgtatttgtttacgttgatggcgtataggttgaagatggaggcggtgtatagtatgacgtttatggttatgagggcgtcgtataggcgggggtttagtagttacgcgtta

SEQ ID NO: 26208 - DNA, 734 bp, Artificial Sequence
  chemically treated genomic DNA (Homo sapiens) CpG-island No: 26208
taacgcgtaactactaaacccccgcctatacgacgccctcataaccataaacgtcatactatacaccgcctccatcttcaacctatacgccatcaacgtaaacaaatacgccgccctccccgcccgcgccccgacgcccccgcgccccgcccgccgccctcaccgcgacctatacgctatccgacgccccctcgacgctccccgcaaattcgtaaccgtaaccgtaccgctacgctacaaccgacaaaataaaaaccgccgacaactactactcatcgacgccacgtaactactatccgcgacgataacgacgcccgtactatacgacctcaacgacgtacgcgaccgcgaccccgccgtataccgcctaaaaaaccgcgactacgtaatctactcgtccgtatactccttcttcctaccctacccgctcatactactactctactaaaccacgttccgcgacctacaacgctaaaaaataacacgtcgcgccaaactacacgaccgcgcgccacgccgacccaacgaccttaaaccgccatcacatcaaacccatcgaaactaactccgtcaaaacccgtataacctcgaatatacgcccaccgcgccaaaccttccccgaaatccctacgacgtaatctaaacgctcgccgaacccaacctacaccaaaacccttacgacccaaactaaacgtccactaaacccgacctccccccgaacacttaaaactaca

SEQ ID NO: 26209 - DNA, 1298 bp, Artificial Sequence
  chemically treated genomic DNA (Homo sapiens) CpG-island No: 26209
gttgcgttcgtcgttcggaattttatcggggttgtaagcgttttcggggtgggttgcggtgggagtaggggagttggggtgcgtggtggtaggtggggtgcgcggtcgttttatttgcgcggaagggtagtcgggtaatcggatttcgcggttattcgggggtttttagtttcgagtatttcgttttggtttcggcggattttagtttttttttagttcgtagtttcgggattttcgcggtgggcggcgtcgcgttgtcggcgtagggagggtttttggtgtatcggtatcgttgagtcgggttttttcgtcggtttgttttcgggagagttcggggttttgttcggagatgtcgtttcgggtttttagatatcggttttttggtttttttcgagtaatttcgagttcggtttcggtttttagttaagtttaatttcgagaggtcgcggttttattggtttcgtttttcgcgttgttttcggaagtttcgttcgatcgcggtttttgatagacgggtcgtttagttaatcggggtggggcggggttcgatggcgcgtagttaatggtaggtcgcgtttggtagacggacgggcgcggggcggggcgtgcgtaggttcgttcgagttttcgtcgttcgtgttttgcgttcgtaattcgagtcgtattcgtcgcggacggagtttatgcgcggggcgaatcgcgcgttttcgttttcgtttcgtttcggtttcggtttcggttttggtttcgggggtagtcgcgtttgtgaacggtgagtgcgggtagggatcggtcgggtcgcgcgtttttttcgtttttaggcggtagtaatacgcgcggcgcgggtcgggggcgcggggtcggcgggcgtaagcggcggcggcggcggcggcggcgggtgggtggggtcgggcggggttcgcgggtataggtgagcgggcgtcgggggttgcggcgggcgggggtttttttttttttggggtttgcgggaattcgggttttattcgtggtttcgcgttgggtacggtttttacgtcggcgtattcgggagtttcgggttcggcgtttttatattcgggggcgtttgggaggaggcggtcgcggttacggtacgttcgggtattttcgatttagtattataggtcgcggattaggtcgggggttttagttttagtgtttttttttttttcgggtttttcgcgtcgtttttcggtttttttttgtcgtttagtttttgttttttaggagtttttttgttttttttagttttttgtggttgaaagatgttttcggttttt

SEQ ID NO: 26210 - DNA, 1298 bp, Artificial Sequence
  chemically treated genomic DNA (Homo sapiens) CpG-island No: 26210
aaaaaccgaaaacatctttcaaccacaaaaaactaaaaaaaacaaaaaaactcctaaaaaacaaaaactaaacgacaaaaaaaaaccgaaaaacgacgcgaaaaacccgaaaaaaaaaaaaacactaaaactaaaacccccgacctaatccgcgacctataatactaaatcgaaaatacccgaacgtaccgtaaccgcgaccgcctcctcccaaacgcccccgaatataaaaacgccgaacccgaaactcccgaatacgccgacgtaaaaaccgtacccaacgcgaaaccacgaataaaacccgaattcccgcaaaccccaaaaaaaaaaaaacccccgcccgccgcaacccccgacgcccgctcacctatacccgcgaaccccgcccgaccccacccacccgccgccgccgccgccgccgccgcttacgcccgccgaccccgcgcccccgacccgcgccgcgcgtattactaccgcctaaaaacgaaaaaaacgcgcgacccgaccgatccctacccgcactcaccgttcacaaacgcgactacccccgaaaccaaaaccgaaaccgaaaccgaaacgaaacgaaaacgaaaacgcgcgattcgccccgcgcataaactccgtccgcgacgaatacgactcgaattacgaacgcaaaacacgaacgacgaaaactcgaacgaacctacgcacgccccgccccgcgcccgtccgtctaccaaacgcgacctaccattaactacgcgccatcgaaccccgccccaccccgattaactaaacgacccgtctatcaaaaaccgcgatcgaacgaaacttccgaaaacaacgcgaaaaacgaaaccaataaaaccgcgacctctcgaaattaaacttaactaaaaaccgaaaccgaactcgaaattactcgaaaaaaaccaaaaaaccgatatctaaaaacccgaaacgacatctccgaacaaaaccccgaactctcccgaaaacaaaccgacgaaaaaacccgactcaacgataccgatacaccaaaaaccctccctacgccgacaacgcgacgccgcccaccgcgaaaatcccgaaactacgaactaaaaaaaaactaaaatccgccgaaaccaaaacgaaatactcgaaactaaaaacccccgaataaccgcgaaatccgattacccgactacccttccgcgcaaataaaacgaccgcgcaccccacctaccaccacgcaccccaactcccctactcccaccgcaacccaccccgaaaacgcttacaaccccgataaaattccgaacgacgaacgcaac

SEQ ID NO: 26211 - DNA, 1298 bp, Artificial Sequence
  chemically treated genomic DNA (Homo sapiens) CpG-island No: 26211
gggaatcgggggtattttttagttatagaaagttggagaagatagaggagtttttgggaagtagggattgagcgataggaaggggtcgagaagcggcgcgggagattcggagagggaaaaggtattggggttgaggttttcggtttggttcgcgatttgtgatgttgaatcgggggtgttcgggcgtgtcgtggtcgcggtcgtttttttttagacgttttcgggtgtgagggcgtcgggttcgaggttttcgggtacgtcggcgtggggatcgtgtttagcgcgaggttacgggtggggttcggattttcgtaggttttagggaggaaggggttttcgttcgtcgtagttttcgacgttcgtttatttgtgttcgcgggtttcgttcggttttatttattcgtcgtcgtcgtcgtcgtcgtcgtttacgttcgtcggtttcgcgttttcggttcgcgtcgcgcgtattgttgtcgtttgggggcgaggagggcgcgcggttcggtcgatttttgttcgtatttatcgtttataggcgcgattgttttcggggttagggtcggggtcgaggtcggggcggggcgggggcgggggcgcgcggttcgtttcgcgtatgggtttcgttcgcggcgggtgcggttcgggttgcgggcgtagggtacgggcggcggagattcgggcgggtttgcgtacgtttcgtttcgcgttcgttcgtttgttaggcgcggtttattattggttgcgcgttatcgggtttcgttttatttcggttggttgagcggttcgtttgttaggagtcgcggtcgggcggggttttcgggagtaacgcgggaggcggagttagtagggtcgcggtttttcggggttgggtttggttggagatcggagtcgagttcggggttgttcgaggaaggttagggagtcggtgtttgggggttcggggcggtattttcgagtagggtttcgggttttttcgggaataggtcggcgagagaattcgatttagcggtgtcggtgtattagaggttttttttgcgtcggtagcgcggcgtcgtttatcgcggaggtttcggggttacgggttggggaaaggttgggattcgtcgggattaaggcgggatgttcggagttgggggttttcgggtggtcgcggggttcggttgttcggttgttttttcgcgtaggtggagcggtcgcgtattttatttattattacgtattttagtttttttatttttatcgtaatttatttcgaggacgtttgtagtttcggtggggtttcgggcggcgggcgtagt

SEQ ID NO: 26212 - DNA, 1298 bp, Artificial Sequence
  chemically treated genomic DNA (Homo sapiens) CpG-island No: 26212
actacgcccgccgcccgaaaccccaccgaaactacaaacgtcctcgaaataaattacgataaaaataaaaaaactaaaatacgtaataataaataaaatacgcgaccgctccacctacgcgaaaaaacaaccgaacaaccgaaccccgcgaccacccgaaaacccccaactccgaacatcccgccttaatcccgacgaatcccaacctttccccaacccgtaaccccgaaacctccgcgataaacgacgccgcgctaccgacgcaaaaaaaacctctaatacaccgacaccgctaaatcgaattctctcgccgacctattcccgaaaaaacccgaaaccctactcgaaaataccgccccgaacccccaaacaccgactccctaaccttcctcgaacaaccccgaactcgactccgatctccaaccaaacccaaccccgaaaaaccgcgaccctactaactccgcctcccgcgttactcccgaaaaccccgcccgaccgcgactcctaacaaacgaaccgctcaaccaaccgaaataaaacgaaacccgataacgcgcaaccaataataaaccgcgcctaacaaacgaacgaacgcgaaacgaaacgtacgcaaacccgcccgaatctccgccgcccgtaccctacgcccgcaacccgaaccgcacccgccgcgaacgaaacccatacgcgaaacgaaccgcgcgcccccgcccccgccccgccccgacctcgaccccgaccctaaccccgaaaacaatcgcgcctataaacgataaatacgaacaaaaatcgaccgaaccgcgcgccctcctcgcccccaaacgacaacaatacgcgcgacgcgaaccgaaaacgcgaaaccgacgaacgtaaacgacgacgacgacgacgacgacgaataaataaaaccgaacgaaacccgcgaacacaaataaacgaacgtcgaaaactacgacgaacgaaaaccccttcctccctaaaacctacgaaaatccgaaccccacccgtaacctcgcgctaaacacgatccccacgccgacgtacccgaaaacctcgaacccgacgccctcacacccgaaaacgtctaaaaaaaaacgaccgcgaccacgacacgcccgaacacccccgattcaacatcacaaatcgcgaaccaaaccgaaaacctcaaccccaataccttttccctctccgaatctcccgcgccgcttctcgaccccttcctatcgctcaatccctacttcccaaaaactcctctatcttctccaactttctataactaaaaaatacccccgattccc

SEQ ID NO: 26213 - DNA, 1232 bp, Artificial Sequence
  chemically treated genomic DNA (Homo sapiens) CpG-island No: 26213
ttcgaattcggtgttttttttggagtcgatagttttttaggtttagttcggtttttgcgggaggcgacggtagggtggggttattcgggatggcgggtaggtgttgcggcgcggggatttcggggttttcgggtcgcgtaggtttttttcgcgcgtggaagagttttttcgagtttattgggggtagtaggtttcgcgttttggtggggcgagggtcgtgagggcggcggtcggttcgggaaaggcggttttagagggtttcgcgtttggggcggggtaggggtcgcggggcgtattggaggattagggggcggtcggggcggggtttggggaagtaggggttcgttttagcgaggggatacgagggatcgtttttgttgggtcggggtttggggagggaggttagatttcggggattcgcggtttttattttggttttcggcgattgattcggggttttcgtattcggtttttgcgtaggggtcgaggtgggcgcggcggtttgcgggtgtcggcgtcgggttcggttttagggagcgggaagcggtcgatggataagtcggtgtcgtcggcgaagattttcggggtcggagtttcgcggcgtgggattcggtgtttattgaggatttgcggggcgcgtcggttatttttatattttagtttcggtcgttttatcggggattcgtatcgatttcgtttttggggtttaggagtagcgtcgcgtagtcgcggatggagaggaggggaacgggttttcggttcgaggacgcgcgtagcggttttttggcgttgcgggtcgtttcgttttagatttggaggggcgtggagcggcgggtgaggggcggtcgggtcgggtcgtcggggtcgggttttcgggtcggggcgtatcgtgacgtggtgtcgcggggttagtagcgtgttcggcgggaagcggtataggcgtttcgggaagtcgcgtattagttgttttagtattatgtcgtttaggtcggtcgtgtttttttgcgacgggttgaagatgcggacgaatttttttcggtagtttatagttacgatttttaggtttgtcgggttgggaagagaggagacgttgtgaggagatgcggtcggtttattcgtatagttgcgcgtttcgttcggaaattagttttagttcggcgtcggaggtttgggttattcgttttttatttttgtaggagtttcgggttttagtggttcgggtttgtgtaggg

SEQ ID NO: 26214 - DNA, 1232 bp, Artificial Sequence
  chemically treated genomic DNA (Homo sapiens) CpG-island No: 26214
ccctacacaaacccgaaccactaaaacccgaaactcctacaaaaataaaaaacgaataacccaaacctccgacgccgaactaaaactaatttccgaacgaaacgcgcaactatacgaataaaccgaccgcatctcctcacaacgtctcctctcttcccaacccgacaaacctaaaaatcgtaactataaactaccgaaaaaaattcgtccgcatcttcaacccgtcgcaaaaaaacacgaccgacctaaacgacataatactaaaacaactaatacgcgacttcccgaaacgcctataccgcttcccgccgaacacgctactaaccccgcgacaccacgtcacgatacgccccgacccgaaaacccgaccccgacgacccgacccgaccgcccctcacccgccgctccacgcccctccaaatctaaaacgaaacgacccgcaacgccaaaaaaccgctacgcgcgtcctcgaaccgaaaacccgttcccctcctctccatccgcgactacgcgacgctactcctaaaccccaaaaacgaaatcgatacgaatccccgataaaacgaccgaaactaaaatataaaaataaccgacgcgccccgcaaatcctcaataaacaccgaatcccacgccgcgaaactccgaccccgaaaatcttcgccgacgacaccgacttatccatcgaccgcttcccgctccctaaaaccgaacccgacgccgacacccgcaaaccgccgcgcccacctcgacccctacgcaaaaaccgaatacgaaaaccccgaatcaatcgccgaaaaccaaaataaaaaccgcgaatccccgaaatctaacctccctccccaaaccccgacccaacaaaaacgatccctcgtatcccctcgctaaaacgaacccctacttccccaaaccccgccccgaccgccccctaatcctccaatacgccccgcgacccctaccccgccccaaacgcgaaaccctctaaaaccgcctttcccgaaccgaccgccgccctcacgaccctcgccccaccaaaacgcgaaacctactacccccaataaactcgaaaaaactcttccacgcgcgaaaaaaacctacgcgacccgaaaaccccgaaatccccgcgccgcaacacctacccgccatcccgaataaccccaccctaccgtcgcctcccgcaaaaaccgaactaaacctaaaaaactatcgactccaaaaaaaacaccgaattcgaa

SEQ ID NO: 26215 - DNA, 1232 bp, Artificial Sequence
  chemically treated genomic DNA (Homo sapiens) CpG-island No: 26215
ttttgtatagattcggattattggagttcggaatttttgtagaggtaaggggcgagtgatttaagttttcggcgtcggattggagttggttttcgggcggggcgcgtagttgtgcgggtggatcggtcgtatttttttatagcgttttttttttttttagttcgataggtttgaagatcgtggttgtgagttgtcgggagaagttcgttcgtatttttaattcgtcgtaggagagtacggtcgatttgagcggtatggtgttgaagtagttggtgcgcggtttttcggagcgtttgtatcgtttttcgtcgggtacgttgttggtttcgcggtattacgttacggtgcgtttcggttcgggagttcggtttcgacggttcggttcggtcgttttttattcgtcgttttacgtttttttaggtttggggcgaggcgattcgtagcgttaagaagtcgttgcgcgcgttttcgagtcgggagttcgttttttttttttttattcgcggttgcgcgacgttgtttttgagttttaagggcgaggtcggtgcgggttttcggtggggcggtcggggttggggtgtgggggtgatcgacgcgtttcgtaggtttttagtgagtatcggattttacgtcgcgagatttcggtttcgagggttttcgtcgacggtatcgatttgtttatcgatcgtttttcgttttttgaggtcgggttcggcgtcgatattcgtaagtcgtcgcgtttatttcgatttttgcgtaaaggtcgggtgcgggagtttcgggttagtcgtcggagattagggtggggatcgcgggttttcgggatttggtttttttttttaggtttcgatttagtagaaacggtttttcgtattttttcgttaggacggatttttatttttttaggtttcgtttcggtcgttttttggttttttagtacgtttcgcggtttttgtttcgttttaggcgcggagttttttagggtcgtttttttcgggtcggtcgtcgtttttacgattttcgttttattaggacgcggggtttgttgtttttagtgagttcggggaagtttttttacgcgcgggaggggtttgcgcggttcgagaatttcgagattttcgcgtcgtagtatttgttcgttatttcgggtgattttattttgtcgtcgtttttcgtagaggtcgggttgggtttggaggattgtcggttttagaaagaatatcgagttcggg

SEQ ID NO: 26216 - DNA, 1232 bp, Artificial Sequence
  chemically treated genomic DNA (Homo sapiens) CpG-island No: 26216
cccgaactcgatattctttctaaaaccgacaatcctccaaacccaacccgacctctacgaaaaacgacgacaaaataaaatcacccgaaataacgaacaaatactacgacgcgaaaatctcgaaattctcgaaccgcgcaaacccctcccgcgcgtaaaaaaacttccccgaactcactaaaaacaacaaaccccgcgtcctaataaaacgaaaatcgtaaaaacgacgaccgacccgaaaaaaacgaccctaaaaaactccgcgcctaaaacgaaacaaaaaccgcgaaacgtactaaaaaaccaaaaaacgaccgaaacgaaacctaaaaaaataaaaatccgtcctaacgaaaaaatacgaaaaaccgtttctactaaatcgaaacctaaaaaaaaaaaccaaatcccgaaaacccgcgatccccaccctaatctccgacgactaacccgaaactcccgcacccgacctttacgcaaaaatcgaaataaacgcgacgacttacgaatatcgacgccgaacccgacctcaaaaaacgaaaaacgatcgataaacaaatcgataccgtcgacgaaaaccctcgaaaccgaaatctcgcgacgtaaaatccgatactcactaaaaacctacgaaacgcgtcgatcacccccacaccccaaccccgaccgccccaccgaaaacccgcaccgacctcgcccttaaaactcaaaaacaacgtcgcgcaaccgcgaataaaaaaaaaaaaaacgaactcccgactcgaaaacgcgcgcaacgacttcttaacgctacgaatcgcctcgccccaaacctaaaaaaacgtaaaacgacgaataaaaaacgaccgaaccgaaccgtcgaaaccgaactcccgaaccgaaacgcaccgtaacgtaataccgcgaaaccaacaacgtacccgacgaaaaacgatacaaacgctccgaaaaaccgcgcaccaactacttcaacaccataccgctcaaatcgaccgtactctcctacgacgaattaaaaatacgaacgaacttctcccgacaactcacaaccacgatcttcaaacctatcgaactaaaaaaaaaaaaaacgctataaaaaaatacgaccgatccacccgcacaactacgcgccccgcccgaaaaccaactccaatccgacgccgaaaacttaaatcactcgccccttacctctacaaaaattccgaactccaataatccgaatctatacaaaa

SEQ ID NO: 26217 - DNA, 838 bp, Artificial Sequence
  chemically treated genomic DNA (Homo sapiens) CpG-island No: 26217
ggtgcggtttttttcgattttttatcgggacgtttttatttcgtggtagcgatagatcggttcgtaaggttttttagtttggttttaggatttatttatttcgtttttagggtaggtttcgcggcggttttcgcgttcgggtttttcgcggtaattagaagtagtttcgggtcgggagtttcgcgttggttaggtcgtttttgttattttcgcgtgatgcgtcggggggcgggaggagtttgcgggggcggggggcgcgttttaaggttttttttgtatatttggcgtaatggggagcgttcgtttttttttttcgggttttgtttttatagttgtgtttatttcgttcgtgatttcgcgagtgatttttgataggtgatgaattggcggcggcggtggcggcggcggcggcgcgcgggttagttcgcggcggggtcggagtcggagtttcggagtagattttttggcgttaggcgcgtgacgtcgtttatttacgtcgttttgtagttttgttttcgcggcgtcgtttaggcggttgttatggtaatcgcgtcgttatttagcgcgcgcgtttagttgattaatgtttgcgaggttcggtagttttaggttcgtttaggttcggtcgtcggttcgcgcgtatttgtagacgttgtacgttttaagtttcgagtgatttggggaaggaaagaggatcgagaagaaaagaaaagggttcgggggggggggggggtgggcgggtgaggggcggaggagaggacgaaggaaaaaagtcgggagagggagaagaaagaaattttttttttgtaaaaggaggtataatgtggtttagaggttg

SEQ ID NO: 26218 - DNA, 838 bp, Artificial Sequence
  chemically treated genomic DNA (Homo sapiens) CpG-island No: 26218
caacctctaaaccacattatacctccttttacaaaaaaaaaatttctttcttctccctctcccgacttttttccttcgtcctctcctccgcccctcacccgcccacccccccccccccccgaacccttttcttttcttctcgatcctctttccttccccaaatcactcgaaacttaaaacgtacaacgtctacaaatacgcgcgaaccgacgaccgaacctaaacgaacctaaaactaccgaacctcgcaaacattaatcaactaaacgcgcgcgctaaataacgacgcgattaccataacaaccgcctaaacgacgccgcgaaaacaaaactacaaaacgacgtaaataaacgacgtcacgcgcctaacgccaaaaaatctactccgaaactccgactccgaccccgccgcgaactaacccgcgcgccgccgccgccgccaccgccgccgccaattcatcacctatcaaaaatcactcgcgaaatcacgaacgaaataaacacaactataaaaacaaaacccgaaaaaaaaaaacgaacgctccccattacgccaaatatacaaaaaaaaccttaaaacgcgccccccgcccccgcaaactcctcccgccccccgacgcatcacgcgaaaataacaaaaacgacctaaccaacgcgaaactcccgacccgaaactacttctaattaccgcgaaaaacccgaacgcgaaaaccgccgcgaaacctaccctaaaaacgaaataaataaatcctaaaaccaaactaaaaaaccttacgaaccgatctatcgctaccacgaaataaaaacgtcccgataaaaaatcgaaaaaaaccgcacc

SEQ ID NO: 26219 - DNA, 838 bp, Artificial Sequence
  chemically treated genomic DNA (Homo sapiens) CpG-island No: 26219
taatttttaagttatattatgtttttttttgtaaaaggaagattttttttttttttttttttcggtttttttttttcgttttttttttcgttttttattcgtttattttttttttttttcgagtttttttttttttttttcggttttttttttttttttaaattattcgaaatttaagacgtgtagcgtttgtaggtgcgcgcgggtcggcggtcgggtttgggcgagtttgggattgtcgggtttcgtaggtattgattagttgggcgcgcgcgttgagtgacggcgcggttgttatggtagtcgtttgagcggcgtcgcgaggataaggttgtagggcggcgtgaatgggcggcgttacgcgtttggcgttagagagtttgtttcggggtttcggtttcggtttcgtcgcgggttggttcgcgcgtcgtcgtcgtcgttatcgtcgtcgttaatttattatttgttagggattattcgcggggttacgggcggaatggatatagttgtgagaataaaattcgggaaagaaaggcgaacgttttttattgcgttagatgtgtagggaggattttgagacgcgtttttcgttttcgtaggtttttttcgtttttcggcgtattacgcgggggtggtaaaggcggtttggttagcgcggagttttcggttcggagttgtttttgattatcgcgaggggttcggacgcgagagtcgtcgcggggtttgttttagaggcggagtgagtgagttttggagttaggttgggggattttacgggtcggtttgtcgttgttacggggtgggggcgtttcggtggggagtcgaggggaatcgtatt

SEQ ID NO: 26220 - DNA, 838 bp, Artificial Sequence
  chemically treated genomic DNA (Homo sapiens) CpG-island No: 26220
aatacgattcccctcgactccccaccgaaacgcccccaccccgtaacaacgacaaaccgacccgtaaaatcccccaacctaactccaaaactcactcactccgcctctaaaacaaaccccgcgacgactctcgcgtccgaacccctcgcgataatcaaaaacaactccgaaccgaaaactccgcgctaaccaaaccgcctttaccacccccgcgtaatacgccgaaaaacgaaaaaaacctacgaaaacgaaaaacgcgtctcaaaatcctccctacacatctaacgcaataaaaaacgttcgcctttctttcccgaattttattctcacaactatatccattccgcccgtaaccccgcgaataatccctaacaaataataaattaacgacgacgataacgacgacgacgacgcgcgaaccaacccgcgacgaaaccgaaaccgaaaccccgaaacaaactctctaacgccaaacgcgtaacgccgcccattcacgccgccctacaaccttatcctcgcgacgccgctcaaacgactaccataacaaccgcgccgtcactcaacgcgcgcgcccaactaatcaatacctacgaaacccgacaatcccaaactcgcccaaacccgaccgccgacccgcgcgcacctacaaacgctacacgtcttaaatttcgaataatttaaaaaaaaaaaaaaaaccgaaaaaaaaaaaaaaaaactcgaaaaaaaaaaaaaataaacgaataaaaaacgaaaaaaaaaacgaaaaaaaaaaaccgaaaaaaaaaaaaaaaaaaaatcttccttttacaaaaaaaaacataatataacttaaaaatta

SEQ ID NO: 26221 - DNA, 881 bp, Artificial Sequence
  chemically treated genomic DNA (Homo sapiens) CpG-island No: 26221
gtttttagtttcggggcgcgaggtgggttgggaggttttggaaggcgggttttaggtggacgcgaatcgggggaggaagggattcgggcggggtagtagtttatttggggcggaataggtgttcgggcggcgttatcgaggagttcgcgcgttttttcgttttgattttcgatcgtttttcgcgggcgttggcgttggaggagggcgggggtcgtggagtcgcggtcgttcggatcgttttgcggattcgcgtcggggattgggttttgtcggggttagcgcggggcggtcgtgtggttgattattatattcggaggaagttttgagggtcgtaggggcgtttttttcgtcgtaggttattcgcggatttggtttttaggttttcgttatttgtcgttagtcgcggtttcggtcgatttttgcgcggcggggagggaagcgcgttttggttttaattcgattttcgtttcgttttcgggagaggcgtagacgtcggtcgtacgttcgttttttagttacggggattcgcgcgtagttcgttcggacggttttggggagcgttttcggacggaagtagtgcgggcgggattgtgggggcggttcgggttttttcgagtttttgtcgggtatcgttggcgacgttggtttcgggatttttggagtcgtagtcgaggcgtagtagtttttttcggaggcgatttttcgcggcgttagtcgcgttgttcgatttcggtcgtggagttcgggcgttatttgttggtcgatacgaggacggcggttttcgcgcggggtttggtgggtttggggttcgggtattgggaattcgaggagtaattcgtggggtggaggaggtttcgggagaaaacgttagggagtgcggt

SEQ ID NO: 26222 - DNA, 881 bp, Artificial Sequence
  chemically treated genomic DNA (Homo sapiens) CpG-island No: 26222
accgcactccctaacgttttctcccgaaacctcctccaccccacgaattactcctcgaattcccaatacccgaaccccaaacccaccaaaccccgcgcgaaaaccgccgtcctcgtatcgaccaacaaataacgcccgaactccacgaccgaaatcgaacaacgcgactaacgccgcgaaaaatcgcctccgaaaaaaactactacgcctcgactacgactccaaaaatcccgaaaccaacgtcgccaacgatacccgacaaaaactcgaaaaaacccgaaccgcccccacaatcccgcccgcactacttccgtccgaaaacgctccccaaaaccgtccgaacgaactacgcgcgaatccccgtaactaaaaaacgaacgtacgaccgacgtctacgcctctcccgaaaacgaaacgaaaatcgaattaaaaccaaaacgcgcttccctccccgccgcgcaaaaatcgaccgaaaccgcgactaacgacaaataacgaaaacctaaaaaccaaatccgcgaataacctacgacgaaaaaaacgcccctacgaccctcaaaacttcctccgaatataataatcaaccacacgaccgccccgcgctaaccccgacaaaacccaatccccgacgcgaatccgcaaaacgatccgaacgaccgcgactccacgacccccgccctcctccaacgccaacgcccgcgaaaaacgatcgaaaatcaaaacgaaaaaacgcgcgaactcctcgataacgccgcccgaacacctattccgccccaaataaactactaccccgcccgaatcccttcctcccccgattcgcgtccacctaaaacccgccttccaaaacctcccaacccacctcgcgccccgaaactaaaaac

SEQ ID NO: 26223 - DNA, 881 bp, Artificial Sequence
  chemically treated genomic DNA (Homo sapiens) CpG-island No: 26223
gtcgtattttttggcgttttttttcgggattttttttattttacggattgtttttcgggtttttagtgttcgggttttaggtttattaggtttcgcgcgagagtcgtcgttttcgtgtcggttagtaggtggcgttcgggttttacggtcggagtcgggtagcgcggttggcgtcgcgggaagtcgttttcgagaggggttgttgcgtttcggttgcggttttaggggtttcggggttaacgtcgttagcggtgttcggtaggggttcgaaagggttcgggtcgtttttatagtttcgttcgtattgttttcgttcggggacgttttttagggtcgttcgagcggattacgcgcgggttttcgtggttggggggcgagcgtgcggtcggcgtttgcgtttttttcggaggcgaggcgggggtcgggttgggattagagcgcgttttttttttcgtcgcgtagaggtcggtcggggtcgcggttggcgataggtggcggggatttgggggttaggttcgcgggtagtttgcgacggggaagacgtttttacggtttttagggtttttttcgggtatgatgattaattatacgatcgtttcgcgttggtttcggtagagtttagttttcggcgcgggttcgtagggcgattcgggcggtcgcggttttacggttttcgtttttttttagcgttagcgttcgcggggagcgatcgggggttagggcggggagacgcgcggatttttcggtggcgtcgttcgaatatttgtttcgttttaggtgagttgttgtttcgttcggatttttttttttttcggttcgcgtttatttgggattcgttttttagagttttttagtttatttcgcgtttcgggattgaaaat

SEQ ID NO: 26224 - DNA, 881 bp, Artificial Sequence
  chemically treated genomic DNA (Homo sapiens) CpG-island No: 26224
attttcaatcccgaaacgcgaaataaactaaaaaactctaaaaaacgaatcccaaataaacgcgaaccgaaaaaaaaaaaaatccgaacgaaacaacaactcacctaaaacgaaacaaatattcgaacgacgccaccgaaaaatccgcgcgtctccccgccctaacccccgatcgctccccgcgaacgctaacgctaaaaaaaaacgaaaaccgtaaaaccgcgaccgcccgaatcgccctacgaacccgcgccgaaaactaaactctaccgaaaccaacgcgaaacgatcgtataattaatcatcatacccgaaaaaaaccctaaaaaccgtaaaaacgtcttccccgtcgcaaactacccgcgaacctaacccccaaatccccgccacctatcgccaaccgcgaccccgaccgacctctacgcgacgaaaaaaaaaacgcgctctaatcccaacccgacccccgcctcgcctccgaaaaaaacgcaaacgccgaccgcacgctcgccccccaaccacgaaaacccgcgcgtaatccgctcgaacgaccctaaaaaacgtccccgaacgaaaacaatacgaacgaaactataaaaacgacccgaaccctttcgaacccctaccgaacaccgctaacgacgttaaccccgaaacccctaaaaccgcaaccgaaacgcaacaacccctctcgaaaacgacttcccgcgacgccaaccgcgctacccgactccgaccgtaaaacccgaacgccacctactaaccgacacgaaaacgacgactctcgcgcgaaacctaataaacctaaaacccgaacactaaaaacccgaaaaacaatccgtaaaataaaaaaaatcccgaaaaaaaacgccaaaaaatacgac

SEQ ID NO: 26225 - DNA, 699 bp, Artificial Sequence
  chemically treated genomic DNA (Homo sapiens) CpG-island No: 26225
  unsure (618)
aaacgagtttagaatagcgaaatcgggttaaaaaatcgcgaattagcgaaattcggaaatagcggcgaaacgcgcgaaaagaaagagagaatcgttattcggggaaggtcgtaaaagaaaaaaacgggtcgaaaaggtcggaaagtcgtaaaaacgcgcgaatatcgcgagaaacgagtcgaaacggcgtaaagagagtttatatagcgaaacgagcgcgttaatagcgcgagaaacgtcgttataatcgtcgtaaaaatcggtagaataacggcgcgaaaagggggcgcgaataagcgtcgataaaggcggattaaatatcgtcgaataggtcgcgataaaaaacggaataaatgcgtttcgataaaagcgcgaataaaatagggcgaaagagcgcgtaataaatcgggtcgtataaaagtcgttagtaagagaaggtagtaatagacgtcgaataataagcgatcgtatagattcgcgggatgataagggttttaaataaacgcgcgcgagtaatagagcgggggtataataggaggggggaaaaaaacgagcgacgagaagagggaggtatatagaacgggcgcgttgaaaaagatcgggggtataatacgtcgnggaggaagaagacgttatataaaaagaacggtttacgatagggaatcgtcgtataataaatatagtatcgtaaagtacgga

SEQ ID NO: 26226 - DNA, 699 bp, Artificial Sequence
  chemically treated genomic DNA (Homo sapiens) CpG-island No: 26226
  unsure (82)
tccgtactttacgatactatatttattatacgacgattccctatcgtaaaccgttctttttatataacgtcttcttcctccncgacgtattatacccccgatctttttcaacgcgcccgttctatatacctccctcttctcgtcgctcgtttttttcccccctcctattatacccccgctctattactcgcgcgcgtttatttaaaacccttatcatcccgcgaatctatacgatcgcttattattcgacgtctattactaccttctcttactaacgacttttatacgacccgatttattacgcgctctttcgccctattttattcgcgcttttatcgaaacgcatttattccgttttttatcgcgacctattcgacgatatttaatccgcctttatcgacgcttattcgcgcccccttttcgcgccgttattctaccgatttttacgacgattataacgacgtttctcgcgctattaacgcgctcgtttcgctatataaactctctttacgccgtttcgactcgtttctcgcgatattcgcgcgtttttacgactttccgaccttttcgacccgtttttttcttttacgaccttccccgaataacgattctctctttcttttcgcgcgtttcgccgctatttccgaatttcgctaattcgcgattttttaacccgatttcgctattctaaactcgttt

SEQ ID NO: 26227 - DNA, 699 bp, Artificial Sequence
  chemically treated genomic DNA (Homo sapiens) CpG-island No: 26227
  unsure (82)
ttcgtgttttgcggtgttgtgtttgttgtgcggcggttttttatcgtgggtcgttttttttgtgtggcgttttttttttttncggcgtgttgtgttttcggttttttttagcgcgttcgttttgtgtgttttttttttttcgtcgttcgtttttttttttttttttgttgtgttttcgttttattattcgcgcgcgtttgtttggggtttttgttatttcgcgggtttgtgcggtcgtttattgttcggcgtttgttgttgtttttttttgttggcggtttttgtgcggttcggtttgttgcgcgttttttcgttttgttttgttcgcgtttttgtcggggcgtatttgtttcgttttttgtcgcggtttgttcggcggtgtttggttcgtttttgtcggcgtttgttcgcgtttttttttcgcgtcgttgttttgtcggtttttgcggcggttgtggcggcgtttttcgcgttgttggcgcgttcgtttcgttgtgtgggttttttttgcgtcgtttcggttcgtttttcgcggtgttcgcgcgtttttgcggtttttcggttttttcggttcgttttttttttttgcggtttttttcgggtggcggtttttttttttttttcgcgcgtttcgtcgttgttttcgggtttcgttggttcgcggttttttggttcggtttcgttgttttgggttcgttt

SEQ ID NO: 26228 - DNA, 699 bp, Artificial Sequence
  chemically treated genomic DNA (Homo sapiens) CpG-island No: 26228
  unsure (618)
aaacgaacccaaaacaacgaaaccgaaccaaaaaaccgcgaaccaacgaaacccgaaaacaacgacgaaacgcgcgaaaaaaaaaaaaaaaccgccacccgaaaaaaaccgcaaaaaaaaaaaacgaaccgaaaaaaccgaaaaaccgcaaaaacgcgcgaacaccgcgaaaaacgaaccgaaacgacgcaaaaaaaacccacacaacgaaacgaacgcgccaacaacgcgaaaaacgccgccacaaccgccgcaaaaaccgacaaaacaacgacgcgaaaaaaaaacgcgaacaaacgccgacaaaaacgaaccaaacaccgccgaacaaaccgcgacaaaaaacgaaacaaatacgccccgacaaaaacgcgaacaaaacaaaacgaaaaaacgcgcaacaaaccgaaccgcacaaaaaccgccaacaaaaaaaaacaacaacaaacgccgaacaataaacgaccgcacaaacccgcgaaataacaaaaaccccaaacaaacgcgcgcgaataataaaacgaaaacacaacaaaaaaaaaaaaaaaaacgaacgacgaaaaaaaaaaaacacacaaaacgaacgcgctaaaaaaaaccgaaaacacaacacgccgnaaaaaaaaaaaacgccacacaaaaaaaacgacccacgataaaaaaccgccgcacaacaaacacaacaccgcaaaacacgaa

SEQ ID NO: 26229 - DNA, 626 bp, Artificial Sequence
  chemically treated genomic DNA (Homo sapiens) CpG-island No: 26229
cgggaaggatggttgcggaatggcgaagttacgattaggatcgggtgaaggagtttggtttttcgggaaggtagcgggaatcgcgtaggttgcgggaatggcggagaaacgaggacgttttttaggaaatttatttttttgtttaggtagaagaatatcgtgggattttcgagagggttacggcggtcgttaaggttttcgataagtaacggttttacgtttttaatcgggagtattagtagtttcggaaagtttacgtcgttttggtaatcgttgttgttcggtcgtattcggggcgtcgcgggatattttcggtgacgttttcgtatcgggtatcggcgtagtgcgtttgtcggacgtcgatgggtttgtgggcgtagggcggaggcgtaggcggtacgtgggttagttttgttttttggcgtttgggtttttttgtttttcgtaagagtttgggtcgcgatttgttattgttagtcgtgcgttcgttttttgcgtttcgtttcgtggttattgtcgttttttttttcgttatatttgtgatgatcgttatggagtcgcgttttaggtggtattattataaatttaagaggagaggcgttcgttcgaataagggtaaattattt

SEQ ID NO: 26230 - DNA, 626 bp, Artificial Sequence
  chemically treated genomic DNA (Homo sapiens) CpG-island No: 26230
aaataatttacccttattcgaacgaacgcctctcctcttaaatttataataataccacctaaaacgcgactccataacgatcatcacaaatataacgaaaaaaaaaacgacaataaccacgaaacgaaacgcaaaaaacgaacgcacgactaacaataacaaatcgcgacccaaactcttacgaaaaacaaaaaaacccaaacgccaaaaaacaaaactaacccacgtaccgcctacgcctccgccctacgcccacaaacccatcgacgtccgacaaacgcactacgccgatacccgatacgaaaacgtcaccgaaaatatcccgcgacgccccgaatacgaccgaacaacaacgattaccaaaacgacgtaaactttccgaaactactaatactcccgattaaaaacgtaaaaccgttacttatcgaaaaccttaacgaccgccgtaaccctctcgaaaatcccacgatattcttctacctaaacaaaaaaataaatttcctaaaaaacgtcctcgtttctccgccattcccgcaacctacgcgattcccgctaccttcccgaaaaaccaaactccttcacccgatcctaatcgtaacttcgccattccgcaaccatccttcccg

SEQ ID NO: 26231 - DNA, 626 bp, Artificial Sequence
  chemically treated genomic DNA (Homo sapiens) CpG-island No: 26231
aaataatttgtttttattcgaacgggcgtttttttttttaggtttatagtaatgttatttgaggcgcggttttatagcgattattataggtgtggcgggagggagggcggtagtgattacgagacggggcgtagagggcgagcgtacggttggtagtgataggtcgcgatttaggtttttgcggagagtagaaaggtttagacgttagggaataggattagtttacgtatcgtttgcgttttcgttttgcgtttataaatttatcgacgttcggtaggcgtattacgtcggtgttcggtgcgagggcgttatcggaagtgtttcgcggcgtttcggatgcgatcgggtaatagcggttgttagggcgacgtgagtttttcggagttgttggtattttcgattggagacgtagaatcgttatttgtcgagggttttagcggtcgtcgtgattttttcggggattttacgatgtttttttatttgagtaagaaagtgagttttttggggggcgttttcgttttttcgttattttcgtagtttgcgcgattttcgttgttttttcgagaagttaggtttttttattcggttttggtcgtggtttcgttatttcgtagttatttttttcg

SEQ ID NO: 26232 - DNA, 626 bp, Artificial Sequence
  chemically treated genomic DNA (Homo sapiens) CpG-island No: 26232
cgaaaaaaataactacgaaataacgaaaccacgaccaaaaccgaataaaaaaacctaacttctcgaaaaaacaacgaaaatcgcgcaaactacgaaaataacgaaaaaacgaaaacgccccccaaaaaactcactttcttactcaaataaaaaaacatcgtaaaatccccgaaaaaatcacgacgaccgctaaaaccctcgacaaataacgattctacgtctccaatcgaaaataccaacaactccgaaaaactcacgtcgccctaacaaccgctattacccgatcgcatccgaaacgccgcgaaacacttccgataacgccctcgcaccgaacaccgacgtaatacgcctaccgaacgtcgataaatttataaacgcaaaacgaaaacgcaaacgatacgtaaactaatcctattccctaacgtctaaacctttctactctccgcaaaaacctaaatcgcgacctatcactaccaaccgtacgctcgccctctacgccccgtctcgtaatcactaccgccctccctcccgccacacctataataatcgctataaaaccgcgcctcaaataacattactataaacctaaaaaaaaaaacgcccgttcgaataaaaacaaattattt

SEQ ID NO: 26233 - DNA, 598 bp, Artificial Sequence
  chemically treated genomic DNA (Homo sapiens) CpG-island No: 26233
gcgcgtttggtggatgttttgggttttttttcgttcgatgtttacgcgtttttttcgtcgttcgtttgtatttgtatcgcgggcgcggttaggttcgttggtttcggaagcgggcgcgtcgtcgggagtcgtaggagaggggcggcgtttagggttgttttcgggatttcgggtttttagttttcggaagttcgggcgggttacggggtcgggggcggcggagggtagtagtagtagcggttagagtagtaggaggagtttcgggaggcggcgcgcgggggtcgggtcggtatggtgggtttcgtgggtttggtggtgttcgtcgggggttaggagttacgcgaggttcggatttaaaggtttcgcggtttcgggttcgttcgtttcggcgtttcgagcgttaggtcggttcgcgatatttcgtttaaggttaataaggagttttgttcgcgtattttagcggtagaaacggaatgtttgggcgaggcggttagcggcgcggttggttatttttcgtttttgttttaagtttcgagtcggttgtaattgggtgggttcggttgttgtcgtaattttcgtttttttagtaatatcgggg

SEQ ID NO: 26234 - DNA, 598 bp, Artificial Sequence
  chemically treated genomic DNA (Homo sapiens) CpG-island No: 26234
ccccgatattactaaaaaaacgaaaattacgacaacaaccgaacccacccaattacaaccgactcgaaacttaaaacaaaaacgaaaaataaccaaccgcgccgctaaccgcctcgcccaaacattccgtttctaccgctaaaatacgcgaacaaaactccttattaaccttaaacgaaatatcgcgaaccgacctaacgctcgaaacgccgaaacgaacgaacccgaaaccgcgaaacctttaaatccgaacctcgcgtaactcctaacccccgacgaacaccaccaaacccacgaaacccaccataccgacccgacccccgcgcgccgcctcccgaaactcctcctactactctaaccgctactactactaccctccgccgcccccgaccccgtaacccgcccgaacttccgaaaactaaaaacccgaaatcccgaaaacaaccctaaacgccgcccctctcctacgactcccgacgacgcgcccgcttccgaaaccaacgaacctaaccgcgcccgcgatacaaatacaaacgaacgacgaaaaaaacgcgtaaacatcgaacgaaaaaaaacccaaaacatccaccaaacgcgc

SEQ ID NO: 26235 - DNA, 598 bp, Artificial Sequence
  chemically treated genomic DNA (Homo sapiens) CpG-island No: 26235
tttcggtgttattgggaggacggaggttgcgatagtagtcgagtttatttagttgtagtcggttcggggtttagggtaggggcgggaggtgattaatcgcgtcgttggtcgtttcgtttagatatttcgtttttgtcgttggaatgcgcggataaggttttttgttggttttgggcggggtatcgcgggtcggtttggcgttcgaagcgtcggggcgggcgggttcgaggtcgcgggatttttaaattcgagtttcgcgtggtttttggttttcgacggatattattaggtttacggagtttattatgtcggttcggttttcgcgcgtcgtttttcgggattttttttgttgttttggtcgttgttgttgttgtttttcgtcgttttcgatttcgtggttcgttcgggttttcggaggttggagattcgaggtttcgggggtagttttggacgtcgttttttttttgcggttttcgacggcgcgttcgttttcgggattagcgagtttggtcgcgttcgcggtgtaggtataggcgggcggcgggagggacgcgtgagtatcgaacgaggagaagtttagggtatttattaagcgcgt

SEQ ID NO: 26236 - DNA, 598 bp, Artificial Sequence
  chemically treated genomic DNA (Homo sapiens) CpG-island No: 26236
acgcgcttaataaataccctaaacttctcctcgttcgatactcacgcgtccctcccgccgcccgcctatacctacaccgcgaacgcgaccaaactcgctaatcccgaaaacgaacgcgccgtcgaaaaccgcaaaaaaaaaacgacgtccaaaactacccccgaaacctcgaatctccaacctccgaaaacccgaacgaaccacgaaatcgaaaacgacgaaaaacaacaacaacaacgaccaaaacaacaaaaaaaatcccgaaaaacgacgcgcgaaaaccgaaccgacataataaactccgtaaacctaataatatccgtcgaaaaccaaaaaccacgcgaaactcgaatttaaaaatcccgcgacctcgaacccgcccgccccgacgcttcgaacgccaaaccgacccgcgataccccgcccaaaaccaacaaaaaaccttatccgcgcattccaacgacaaaaacgaaatatctaaacgaaacgaccaacgacgcgattaatcacctcccgcccctaccctaaaccccgaaccgactacaactaaataaactcgactactatcgcaacctccgtcctcccaataacaccgaaa

SEQ ID NO: 26237 - DNA, 622 bp, Artificial Sequence
  chemically treated genomic DNA (Homo sapiens) CpG-island No: 26237
agtgcgtaggcgcgaagaagttggtaggggtacgagtcgggggcgggtttgaagacgcgtcgttgggttttggaggtcgtgaaatagtcgtttgagtttggttgcgggtggagaacgtttgttaggggttcggttaagaaggaggttcgtttgttacgatggtgtttatgagttttaagcggaatcgtagtgatcggttttatagtattcggtgttgcggttgttgttatgttcgtatcgggacgattattttggggatttggtatatggtaaggcgggtaggcgtggcgcgtatgttcggggggtttggggagcggggtttggtgcggagggggtgagattggaaacggggtgttgggtggggcggggatttggagggcgttgttttttaaggcgcgttaattttggatgaagtttaaggattttgggaaagtaattttgtttaggaatcggagtcgggggagcggggggcggtggtaagtatggggagattgttttttggtaagaatttgaggagagaagcgggtttgggagagtagaggttttgtaggcgaagggacgagggtggtaggatttggtgggaatttttttgttttggtttttgttgtatttttacgatttg

SEQ ID NO: 26238 - DNA, 622 bp, Artificial Sequence
  chemically treated genomic DNA (Homo sapiens) CpG-island No: 26238
caaatcgtaaaaatacaacaaaaaccaaaacaaaaaaattcccaccaaatcctaccaccctcgtcccttcgcctacaaaacctctactctcccaaacccgcttctctcctcaaattcttaccaaaaaacaatctccccatacttaccaccgccccccgctcccccgactccgattcctaaacaaaattactttcccaaaatccttaaacttcatccaaaattaacgcgccttaaaaaacaacgccctccaaatccccgccccacccaacaccccgtttccaatctcaccccctccgcaccaaaccccgctccccaaaccccccgaacatacgcgccacgcctacccgccttaccatataccaaatccccaaaataatcgtcccgatacgaacataacaacaaccgcaacaccgaatactataaaaccgatcactacgattccgcttaaaactcataaacaccatcgtaacaaacgaacctccttcttaaccgaacccctaacaaacgttctccacccgcaaccaaactcaaacgactatttcacgacctccaaaacccaacgacgcgtcttcaaacccgcccccgactcgtacccctaccaacttcttcgcgcctacgcact

SEQ ID NO: 26239 - DNA, 622 bp, Artificial Sequence
  chemically treated genomic DNA (Homo sapiens) CpG-island No: 26239
tagatcgtagaaatataataagaattaaaatagaggaatttttattaaattttattattttcgttttttcgtttgtaaagtttttgtttttttaagttcgtttttttttttaaatttttgttaaagaataatttttttatgtttattatcgtttttcgttttttcgatttcgatttttgaataaggttatttttttaaagtttttggattttatttagagttggcgcgttttaaaaagtagcgttttttaagttttcgttttatttaatatttcgtttttagttttatttttttcgtattaggtttcgttttttaggtttttcggatatacgcgttacgtttgttcgttttattatgtattaggtttttaggatgatcgtttcggtgcggatatggtaatagtcgtagtatcgggtgttgtagaatcggttattgcggtttcgtttgaaatttatggatattatcgtaataggcgggttttttttttggtcgggtttttgataaacgttttttattcgtagttaaatttaaacggttgttttacggtttttaaaatttaacgacgcgtttttaaattcgttttcggttcgtgtttttgttagttttttcgcgtttgcgtatt

SEQ ID NO: 26240 - DNA, 622 bp, Artificial Sequence
  chemically treated genomic DNA (Homo sapiens) CpG-island No: 26240
aatacgcaaacgcgaaaaaactaacaaaaacacgaaccgaaaacgaatttaaaaacgcgtcgttaaattttaaaaaccgtaaaacaaccgtttaaatttaactacgaataaaaaacgtttatcaaaaacccgaccaaaaaaaaaacccgcctattacgataatatccataaatttcaaacgaaaccgcaataaccgattctacaacacccgatactacgactattaccatatccgcaccgaaacgatcatcctaaaaacctaatacataataaaacgaacaaacgtaacgcgtatatccgaaaaacctaaaaaacgaaacctaatacgaaaaaaataaaactaaaaacgaaatattaaataaaacgaaaacttaaaaaacgctactttttaaaacgcgccaactctaaataaaatccaaaaactttaaaaaaataaccttattcaaaaatcgaaatcgaaaaaacgaaaaacgataataaacataaaaaaattattctttaacaaaaatttaaaaaaaaaaacgaacttaaaaaaacaaaaactttacaaacgaaaaaacgaaaataataaaatttaataaaaattcctctattttaattcttattatatttctacgatcta

SEQ ID NO: 26241 - DNA, 634 bp, Artificial Sequence
  chemically treated genomic DNA (Homo sapiens) CpG-island No: 26241
ggggacggcggttttttagttaggcgattttaggtttcgcgatttttcgtcgtttaattttttttttttatttttatttatttttttttagcggtttttaggacgggtttaaaaattaattttatacgtaatttagtttatttcgcggagttgagaagtagggttgggtttcgagcgggcgtcggcgtttttggcgtgtggcggggaggtggcggtcgcggggggcgtcgcgagtcgttcgtgttcgtcgcggatgaataggcggttgcgagtagttttcggagtcgcgtagtattcgcgtatttagtgacggtggaagttacgttcgttcgagagtcggggggttgttttcgttttttttattttttttttttttatcgattttttttcggtcgcgttttttttttttttttcgcgtcggttttcggttcgttttcggttcggttcgcgggaggcgttgggcgtcggggttggcgcgttttttcgggtttatatatagtcgcgtacgtacgttcggggtcgtttttcgcgtcggtttttgtttttcgcgtttatgcggacggatcgagcgacggaagatggttgacgattttacggggtttcgaggatgcggttcggcggcggcggcggcggg

SEQ ID NO: 26242 - DNA, 634 bp, Artificial Sequence
  chemically treated genomic DNA (Homo sapiens) CpG-island No: 26242
cccgccgccgccgccgccgaaccgcatcctcgaaaccccgtaaaatcgtcaaccatcttccgtcgctcgatccgtccgcataaacgcgaaaaacaaaaaccgacgcgaaaaacgaccccgaacgtacgtacgcgactatatataaacccgaaaaaacgcgccaaccccgacgcccaacgcctcccgcgaaccgaaccgaaaacgaaccgaaaaccgacgcgaaaaaaaaaaaaaaaacgcgaccgaaaaaaaatcgataaaaaaaaaaaaaataaaaaaaacgaaaacaaccccccgactctcgaacgaacgtaacttccaccgtcactaaatacgcgaatactacgcgactccgaaaactactcgcaaccgcctattcatccgcgacgaacacgaacgactcgcgacgccccccgcgaccgccacctccccgccacacgccaaaaacgccgacgcccgctcgaaacccaaccctacttctcaactccgcgaaataaactaaattacgtataaaattaatttttaaacccgtcctaaaaaccgctaaaaaaaaataaataaaaataaaaaaaaaaaattaaacgacgaaaaatcgcgaaacctaaaatcgcctaactaaaaaaccgccgtcccc

SEQ ID NO: 26243 - DNA, 634 bp, Artificial Sequence
  chemically treated genomic DNA (Homo sapiens) CpG-island No: 26243
ttcgtcgtcgtcgtcgtcgggtcgtattttcggggtttcgtggagtcgttagttatttttcgtcgttcggttcgttcgtatgggcgcggggagtaagggtcggcgcggagagcggtttcgggcgtgcgtgcgcggttgtgtgtgagttcgggagagcgcgttagtttcggcgtttagcgtttttcgcgagtcgagtcgggggcgggtcgggggtcggcgcgggaggaggggagggagcgcggtcgggagggggtcggtagggaggggaaaggtggggggggcgaggatagtttttcggttttcgagcgggcgtggtttttatcgttattggatacgcggatgttgcgcggtttcgggggttgttcgtagtcgtttgtttattcgcggcgggtacgggcggttcgcggcgtttttcgcggtcgttattttttcgttatacgttaggggcgtcggcgttcgttcggaatttagttttgttttttagtttcgcgaggtgggttgggttgcgtgtggagttggtttttgagttcgttttaggagtcgttgaggaaaaatgaatgggggtgaaaggagaaggttgggcggcgggaggtcgcgagatttgaggtcgtttggttagagggtcgtcgttttt

SEQ ID NO: 26244 - DNA, 634 bp, Artificial Sequence
  chemically treated genomic DNA (Homo sapiens) CpG-island No: 26244
aaaaacgacgaccctctaaccaaacgacctcaaatctcgcgacctcccgccgcccaaccttctcctttcacccccattcatttttcctcaacgactcctaaaacgaactcaaaaaccaactccacacgcaacccaacccacctcgcgaaactaaaaaacaaaactaaattccgaacgaacgccgacgcccctaacgtataacgaaaaaataacgaccgcgaaaaacgccgcgaaccgcccgtacccgccgcgaataaacaaacgactacgaacaacccccgaaaccgcgcaacatccgcgtatccaataacgataaaaaccacgcccgctcgaaaaccgaaaaactatcctcgccccccccacctttcccctccctaccgaccccctcccgaccgcgctccctcccctcctcccgcgccgacccccgacccgcccccgactcgactcgcgaaaaacgctaaacgccgaaactaacgcgctctcccgaactcacacacaaccgcgcacgcacgcccgaaaccgctctccgcgccgacccttactccccgcgcccatacgaacgaaccgaacgacgaaaaataactaacgactccacgaaaccccgaaaatacgacccgacgacgacgacgacgaa

SEQ ID NO: 26245 - DNA, 732 bp, Artificial Sequence
  chemically treated genomic DNA (Homo sapiens) CpG-island No: 26245
aggatacggattttatcgttttttttattttttaaaacgttttcggggtttttaggatatcgttttttgtaatttcgtgtagggcgtttttattttagtttaacgcgcggtttcgttttatcgcgggtattttttagtttcggagttttatttcggagttatttcggagttatttcgcgcgttttcgcgtcgcgacgtacgtgtttttcgtttttatttatttcgtttattgttgttattggagtcgtgatttttgagtttcgtcgggcgcgcgttttttaattttatttgcgcgcggatttcggtagcggcgttcggttttaacggtttcgtacggtcgggggagtcgggttcggggtttcgcgtcgtcggtttttaggagtagtcgcgtcgttatcgttattagcgcgaggttatggtcggagtttgaaagtcgcggtagggcggcggtttcgtttttggttcgcgatttttttttcgggattcggagtcggaaatttggtataggaagcgtttcggttaggttcgggagcgcggttcgttttttttcgtttgcggttcggttgtcggcgcggatatttcgggtgtttgttcgtttgtagttaacggggattgtagtcgttttcgggaggcgacggggtaggggcgtgcggagatttggtttggggatttcgagcgtgatttttttcggggcgagttttttatttttattttttttcggaagttgtgtag

SEQ ID NO: 26246 - DNA, 732 bp, Artificial Sequence
  chemically treated genomic DNA (Homo sapiens) CpG-island No: 26246
ctacacaacttccgaaaaaaaataaaaataaaaaactcgccccgaaaaaaatcacgctcgaaatccccaaaccaaatctccgcacgcccctaccccgtcgcctcccgaaaacgactacaatccccgttaactacaaacgaacaaacacccgaaatatccgcgccgacaaccgaaccgcaaacgaaaaaaaacgaaccgcgctcccgaacctaaccgaaacgcttcctataccaaatttccgactccgaatcccgaaaaaaaaatcgcgaaccaaaaacgaaaccgccgccctaccgcgactttcaaactccgaccataacctcgcgctaataacgataacgacgcgactactcctaaaaaccgacgacgcgaaaccccgaacccgactcccccgaccgtacgaaaccgttaaaaccgaacgccgctaccgaaatccgcgcgcaaataaaattaaaaaacgcgcgcccgacgaaactcaaaaatcacgactccaataacaacaataaacgaaataaataaaaacgaaaaacacgtacgtcgcgacgcgaaaacgcgcgaaataactccgaaataactccgaaataaaactccgaaactaaaaaatacccgcgataaaacgaaaccgcgcgttaaactaaaataaaaacgccctacacgaaattacaaaaaacgatatcctaaaaaccccgaaaacgttttaaaaaataaaaaaaacgataaaatccgtatcct

SEQ ID NO: 26247 - DNA, 732 bp, Artificial Sequence
  chemically treated genomic DNA (Homo sapiens) CpG-island No: 26247
ttgtatagttttcgggaagaggtggggataggaggttcgtttcggggaaggttacgttcggggtttttagattaggttttcgtacgtttttgtttcgtcgtttttcgggagcggttgtagttttcgttggttgtagacgggtagatattcgaagtgttcgcgtcggtagtcggatcgtaagcgaggaagagcgaatcgcgttttcgggtttggtcgaagcgttttttgtgttaggttttcggtttcgggtttcgggaggaggatcgcgggttagaggcggagtcgtcgttttgtcgcgatttttagatttcgattatggtttcgcgttggtggcggtggcggcgcggttgtttttggaagtcggcggcgcggagtttcgggttcggttttttcggtcgtgcgggatcgttggggtcgagcgtcgttgtcgaagttcgcgcgtaggtgaggttgggaggcgcgcgttcggcggggtttagaggttacggttttaatgatagtagtgggcggaatgaatgggagcggggagtacgtgcgtcgcgacgcgggggcgcgcggggtagtttcggggtagtttcggggtgggatttcggagttgaggggtgttcgcggtgggacggagtcgcgcgttggattgaagtaggggcgttttatacggggttgtagaaagcggtgttttggggatttcgggagcgttttggggggtggagaaagcggtgggattcgtgtttt

SEQ ID NO: 26248 - DNA, 732 bp, Artificial Sequence
  chemically treated genomic DNA (Homo sapiens) CpG-island No: 26248
aaaacacgaatcccaccgctttctccaccccccaaaacgctcccgaaatccccaaaacaccgctttctacaaccccgtataaaacgcccctacttcaatccaacgcgcgactccgtcccaccgcgaacacccctcaactccgaaatcccaccccgaaactaccccgaaactaccccgcgcgcccccgcgtcgcgacgcacgtactccccgctcccattcattccgcccactactatcattaaaaccgtaacctctaaaccccgccgaacgcgcgcctcccaacctcacctacgcgcgaacttcgacaacgacgctcgaccccaacgatcccgcacgaccgaaaaaaccgaacccgaaactccgcgccgccgacttccaaaaacaaccgcgccgccaccgccaccaacgcgaaaccataatcgaaatctaaaaatcgcgacaaaacgacgactccgcctctaacccgcgatcctcctcccgaaacccgaaaccgaaaacctaacacaaaaaacgcttcgaccaaacccgaaaacgcgattcgctcttcctcgcttacgatccgactaccgacgcgaacacttcgaatatctacccgtctacaaccaacgaaaactacaaccgctcccgaaaaacgacgaaacaaaaacgtacgaaaacctaatctaaaaaccccgaacgtaaccttccccgaaacgaacctcctatccccacctcttcccgaaaactatacaa

SEQ ID NO: 26249 - DNA, 607 bp, Artificial Sequence
  chemically treated genomic DNA (Homo sapiens) CpG-island No: 26249
aagcggtttcggagtgattaattcggggataatttattttttttcgtttttcggcgcgaatttcgcgaagcgggattggagcgagttattttcgagagcgtagcgcgttttttttcggtcgggcggatatttggtttattttagtcgtagaagtttagggttttcgcgtatcgggatttttttcgagtagaaaaaagttttagagtttttttgatttttttttttttcggcggcgagcggagtttttttttcggcgttgtcggtcgcgttatgtcgcgttcgcggggacgggagttggggcgttgcggttgtttcgcggggagggttcgcggcgaaatcgggatttcggcgtttgtgtcgggcgtcgggagtcgttggggtcgttcgtcgtcgttaacgtcgtcgtttttgttgttgttgttgggttgtgggttgtttagcgtttcggtcgtcgcgggtgagtttagtcgcgtcgaggagttagcggtcgtcgcgcgttttattcgagtttcgagtttatttattttcgattcggttttagttttttttttcgtttttatttttgtttgaattttttatttttttagttgtttatttttatttttat

SEQ ID NO: 26250 - DNA, 607 bp, Artificial Sequence
  chemically treated genomic DNA (Homo sapiens) CpG-island No: 26250
ataaaaataaaaataaacaactaaaaaaataaaaaattcaaacaaaaataaaaacgaaaaaaaaaactaaaaccgaatcgaaaataaataaactcgaaactcgaataaaacgcgcgacgaccgctaactcctcgacgcgactaaactcacccgcgacgaccgaaacgctaaacaacccacaacccaacaacaacaacaaaaacgacgacgttaacgacgacgaacgaccccaacgactcccgacgcccgacacaaacgccgaaatcccgatttcgccgcgaaccctccccgcgaaacaaccgcaacgccccaactcccgtccccgcgaacgcgacataacgcgaccgacaacgccgaaaaaaaaactccgctcgccgccgaaaaaaaaaaaaatcaaaaaaactctaaaacttttttctactcgaaaaaaatcccgatacgcgaaaaccctaaacttctacgactaaaataaaccaaatatccgcccgaccgaaaaaaaacgcgctacgctctcgaaaataactcgctccaatcccgcttcgcgaaattcgcgccgaaaaacgaaaaaaaataaattatccccgaattaatcactccgaaaccgctt

SEQ ID NO: 26251 - DNA, 607 bp, Artificial Sequence
  chemically treated genomic DNA (Homo sapiens) CpG-island No: 26251
atgagaatgagagtaggtaattgggagggtgggagatttaggtagggatagaggcggggggagggattgggatcgggtcgaggatgggtgggttcggggttcgggtggggcgcgcggcggtcgttggtttttcggcgcggttggatttattcgcggcggtcgagacgttgagtaatttatagtttagtaatagtagtagaggcggcggcgttggcggcggcgggcggttttagcggttttcggcgttcggtataagcgtcgaaatttcggtttcgtcgcgagtttttttcgcggggtagtcgtagcgttttagttttcgttttcgcgagcgcggtatggcgcggtcggtagcgtcgagggagaggtttcgttcgtcgtcgaggagaaaggaggttaggagagttttggagtttttttttgttcggaaaaaatttcggtacgcgggagttttgagtttttgcggttggaatgaattaagtgttcgttcggtcggggagaggcgcgttgcgttttcggaaatgattcgttttaatttcgtttcgcggggttcgcgtcggggggcgggagggggtgaattattttcggattaattatttcggagtcgttt

SEQ ID NO: 26252 - DNA, 607 bp, Artificial Sequence
  chemically treated genomic DNA (Homo sapiens) CpG-island No: 26252
aaacgactccgaaataattaatccgaaaataattcaccccctcccgccccccgacgcgaaccccgcgaaacgaaattaaaacgaatcatttccgaaaacgcaacgcgcctctccccgaccgaacgaacacttaattcattccaaccgcaaaaactcaaaactcccgcgtaccgaaattttttccgaacaaaaaaaaactccaaaactctcctaacctcctttctcctcgacgacgaacgaaacctctccctcgacgctaccgaccgcgccataccgcgctcgcgaaaacgaaaactaaaacgctacgactaccccgcgaaaaaaactcgcgacgaaaccgaaatttcgacgcttataccgaacgccgaaaaccgctaaaaccgcccgccgccgccaacgccgccgcctctactactattactaaactataaattactcaacgtctcgaccgccgcgaataaatccaaccgcgccgaaaaaccaacgaccgccgcgcgccccacccgaaccccgaacccacccatcctcgacccgatcccaatccctccccccgcctctatccctacctaaatctcccaccctcccaattacctactctcattctcat

SEQ ID NO: 26253 - DNA, 608 bp, Artificial Sequence
  chemically treated genomic DNA (Homo sapiens) CpG-island No: 26253
ggtgaagagtaggcgggcggggtgcggaggggtgaggtcggcgagggtcgtgcgcgcgtcgtcgtcgggggggaggggagaggagggtatttaggttttttttttttttttttttttttcgcgcgttatgtaatttcgtttcgtcggcggtgagtttaagattttcgcgcgtatcgagtcgagtcggcggttgaggagagttaggttcgatgtggcgggggttacgcgtcgcggtcgagtcgtgaggaagcggttcgcgtttacgcgttttttagtatttcgagcggttgttttatatcgtttagtttaggtttgtcggggtatgagtgtgttcgggacgtttggagcgatggagtcggttggggaggaagagcggtcgttatcggcggtcgaaggagaggacgacgaggaggaggtggtagcggcggtttagattttagggtcggtttacggaaggagtgttttttcgttggaggacgcggacgattaggaggaagagatggaggcgatggtgatcggaggcggttgttgtaaggagtaggagttgatttacgagttatagtagggttatcgtattttgggcgagtttttgtaggagaagtatcggg

SEQ ID NO: 26254 - DNA, 608 bp, Artificial Sequence
  chemically treated genomic DNA (Homo sapiens) CpG-island No: 26254
cccgatacttctcctacaaaaactcgcccaaaatacgataaccctactataactcgtaaatcaactcctactccttacaacaaccgcctccgatcaccatcgcctccatctcttcctcctaatcgtccgcgtcctccaacgaaaaaacactccttccgtaaaccgaccctaaaatctaaaccgccgctaccacctcctcctcgtcgtcctctccttcgaccgccgataacgaccgctcttcctccccaaccgactccatcgctccaaacgtcccgaacacactcataccccgacaaacctaaactaaacgatataaaacaaccgctcgaaatactaaaaaacgcgtaaacgcgaaccgcttcctcacgactcgaccgcgacgcgtaacccccgccacatcgaacctaactctcctcaaccgccgactcgactcgatacgcgcgaaaatcttaaactcaccgccgacgaaacgaaattacataacgcgcgaaaaaaaaaaaaaaaaaaaaaaaacctaaataccctcctctcccctcccccccgacgacgacgcgcgcacgaccctcgccgacctcacccctccgcaccccgcccgcctactcttcacc

SEQ ID NO: 26255 - DNA, 608 bp, Artificial Sequence
  chemically treated genomic DNA (Homo sapiens) CpG-island No: 26255
ttcggtgttttttttgtaggaattcgtttaggatgcggtagttttgttgtagttcgtaggttagtttttgttttttgtagtaatcgttttcgattattatcgtttttattttttttttttgatcgttcgcgttttttagcgaggaggtatttttttcgtgggtcggttttgaggtttgggtcgtcgttgttatttttttttcgtcgttttttttttcggtcgtcggtggcggtcgttttttttttttagtcggttttatcgttttaggcgtttcgggtatatttatgtttcggtaggtttaggttgggcggtgtggaatagtcgttcgaggtgttgggggacgcgtgagcgcgagtcgtttttttacggttcggtcgcggcgcgtagttttcgttatatcgggtttggttttttttagtcgtcggttcggttcggtgcgcgcgggggttttgagtttatcgtcggcggggcggggttatatggcgcgcgaggaggggggagagaagaggagagtttaggtgttttttttttttttttttttcggcggcggcgcgcgtacggttttcgtcggttttattttttcgtatttcgttcgtttgttttttatt

SEQ ID NO: 26256 - DNA, 608 bp, Artificial Sequence
  chemically treated genomic DNA (Homo sapiens) CpG-island No: 26256
aataaaaaacaaacgaacgaaatacgaaaaaataaaaccgacgaaaaccgtacgcgcgccgccgccgaaaaaaaaaaaaaaaaaaaacacctaaactctcctcttctctcccccctcctcgcgcgccatataaccccgccccgccgacgataaactcaaaacccccgcgcgcaccgaaccgaaccgacgactaaaaaaaaccaaacccgatataacgaaaactacgcgccgcgaccgaaccgtaaaaaaacgactcgcgctcacgcgtcccccaacacctcgaacgactattccacaccgcccaacctaaacctaccgaaacataaatatacccgaaacgcctaaaacgataaaaccgactaaaaaaaaaaaacgaccgccaccgacgaccgaaaaaaaaaacgacgaaaaaaaaataacaacgacgacccaaacctcaaaaccgacccacgaaaaaaatacctcctcgctaaaaaacgcgaacgatcaaaaaaaaaaaataaaaacgataataatcgaaaacgattactacaaaaaacaaaaactaacctacgaactacaacaaaactaccgcatcctaaacgaattcctacaaaaaaaacaccgaa

SEQ ID NO: 26257 - DNA, 551 bp, Artificial Sequence
  chemically treated genomic DNA (Homo sapiens) CpG-island No: 26257
gaggcggcgggcgtcgcgcgtggttcgcgggcgggcggattcggggagggcgttagcgattgcgcgggcggtgggtgtggcgtttcggtttttagttgttaggcgcgtttgtttcgttattcgggttgtgatcgcgtcgttttcgtcgtcgcgttatgcgttttaggtttcggttttttttttcggttagttttcggtttcggggttaacggtttagggttcgtattttcgcgttcggggtttcggcgtttcgtgttcgttgagagcgggaggggtcgcgggtgggagcgcggagaattagggagtacggttgtgcgcgcgcgcggggaggggtcgcgtcgttattcggagagttcggcggatttcggattttcgttcgtcgtttttttcgtcgcgtattttcgtttatcgttcgttcggttttagtcgtcgtcgtattgtgagtatttacgttcggtagttcgtcgttttcgcgttttgtttttgtagtttttttttcgtttagttttgatttgggtttttgtggttgttgtttttatgattatatttaa

SEQ ID NO: 26258 - DNA, 551 bp, Artificial Sequence
  chemically treated genomic DNA (Homo sapiens) CpG-island No: 26258
ttaaatataatcataaaaacaacaaccacaaaaacccaaatcaaaactaaacgaaaaaaaaactacaaaaacaaaacgcgaaaacgacgaactaccgaacgtaaatactcacaatacgacgacgactaaaaccgaacgaacgataaacgaaaatacgcgacgaaaaaaacgacgaacgaaaatccgaaatccgccgaactctccgaataacgacgcgacccctccccgcgcgcgcgcacaaccgtactccctaattctccgcgctcccacccgcgacccctcccgctctcaacgaacacgaaacgccgaaaccccgaacgcgaaaatacgaaccctaaaccgttaaccccgaaaccgaaaactaaccgaaaaaaaaaaccgaaacctaaaacgcataacgcgacgacgaaaacgacgcgatcacaacccgaataacgaaacaaacgcgcctaacaactaaaaaccgaaacgccacacccaccgcccgcgcaatcgctaacgccctccccgaatccgcccgcccgcgaaccacgcgcgacgcccgccgcctc

SEQ ID NO: 26259 - DNA, 551 bp, Artificial Sequence
  chemically treated genomic DNA (Homo sapiens) CpG-island No: 26259
ttaggtataattataaaaataatagttataggagtttaaattagaattaaacgaaaaaaaagttgtaggagtagagcgcgggggcggcgggttatcggacgtgggtatttatagtgcggcggcggttggagtcgggcgagcggtgagcggaggtgcgcggcgggaggagcggcgggcgggagttcgggattcgtcgggtttttcgggtgacggcgcggttttttttcgcgcgcgcgtatagtcgtgttttttggtttttcgcgtttttattcgcggtttttttcgtttttagcgggtacggggcgtcggggtttcgggcgcggagatgcgaattttgagtcgttgatttcgaggtcggggattggtcggaagaagaggtcgaagtttggagcgtatggcgcggcggcggggacggcgcggttatagttcgagtggcggggtaggcgcgtttgatagttgagagtcggggcgttatatttatcgttcgcgtagtcgttagcgtttttttcgggttcgttcgttcgcgggttacgcgcggcgttcgtcgtttt

SEQ ID NO: 26260 - DNA, 551 bp, Artificial Sequence
  chemically treated genomic DNA (Homo sapiens) CpG-island No: 26260
aaaacgacgaacgccgcgcgtaacccgcgaacgaacgaacccgaaaaaaacgctaacgactacgcgaacgataaatataacgccccgactctcaactatcaaacgcgcctaccccgccactcgaactataaccgcgccgtccccgccgccgcgccatacgctccaaacttcgacctcttcttccgaccaatccccgacctcgaaatcaacgactcaaaattcgcatctccgcgcccgaaaccccgacgccccgtacccgctaaaaacgaaaaaaaccgcgaataaaaacgcgaaaaaccaaaaaacacgactatacgcgcgcgcgaaaaaaaaccgcgccgtcacccgaaaaacccgacgaatcccgaactcccgcccgccgctcctcccgccgcgcacctccgctcaccgctcgcccgactccaaccgccgccgcactataaatacccacgtccgataacccgccgcccccgcgctctactcctacaacttttttttcgtttaattctaatttaaactcctataactattatttttataattatacctaa

SEQ ID NO: 26261 - DNA, 1003 bp, Artificial Sequence
  chemically treated genomic DNA (Homo sapiens) CpG-island No: 26261
tcgcgcgtttaattcggagcgttttgttgggcgggttcgagtttcggcggcggcgttgaaaatggtttatttgttttttgttttttttatttcgtaggagcggcggtatggaggtttttattatttagttggggtcggggcgcgagggtagtttttcgtttaattttaagtaggagttgtagtcgtattcgggttttagcgtttttaaatttaattaggtgggcgagacgtcgttgtacggggtgtttattgtgtcgttggttatcgacggttaggagcgtttatgtttggcgtagatttttaatattttttttaagaattatagttataatgagatttataatcgtcgcgtggttttgggtattacgtgcgtgtagtgtacgtcggtatagttggagattttgcgtcgggtcggggttatgtttatttcgtcgcgtcgttgcggtatgattattaagcgagaggtcgaacgtttgtgtaagtcgtttttgggcgagtataaattatttaagttgttcgagaatttcgttttcgatgtggtgtacgagtgcgcgtggggttcgcgtggtagttttatttttgcgcgttataatagttttcgtgttaagtgtattaagtgcggttattgtagtatgtatttttcgtttaataagtttattttttattcgtatcgaatattcgacgttaagtatacgtagttcgatgtcgttaattttaatttttggcgtcgttattttaaatttagtgataagtcggttatagacgaattgagttatgtttgggaggacgttaaggttatgtttaatggcggtacgcgtaagcggattttttttttataaggaggcggcggaggcggtgttaatggcgggtcgggtgggtaggggaagggtggtgttggcggcggtggcggcggtggtttagggtgcggtgtagagatggttttaggttcgtcgttttataaaagtttgcgttgtggcgaagatgaggttgtcgggttttcggg

SEQ ID NO: 26262 - DNA, 1003 bp, Artificial Sequence
  chemically treated genomic DNA (Homo sapiens) CpG-island No: 26262
cccgaaaacccgacaacctcatcttcgccacaacgcaaacttttataaaacgacgaacctaaaaccatctctacaccgcaccctaaaccaccgccgccaccgccgccaacaccacccttcccctacccacccgacccgccattaacaccgcctccgccgcctccttataaaaaaaaaatccgcttacgcgtaccgccattaaacataaccttaacgtcctcccaaacataactcaattcgtctataaccgacttatcactaaatttaaaataacgacgccaaaaattaaaattaacgacatcgaactacgtatacttaacgtcgaatattcgatacgaataaaaaataaacttattaaacgaaaaatacatactacaataaccgcacttaatacacttaacacgaaaactattataacgcgcaaaaataaaactaccacgcgaaccccacgcgcactcgtacaccacatcgaaaacgaaattctcgaacaacttaaataatttatactcgcccaaaaacgacttacacaaacgttcgacctctcgcttaataatcataccgcaacgacgcgacgaaataaacataaccccgacccgacgcaaaatctccaactataccgacgtacactacacgcacgtaatacccaaaaccacgcgacgattataaatctcattataactataattcttaaaaaaaatattaaaaatctacgccaaacataaacgctcctaaccgtcgataaccaacgacacaataaacaccccgtacaacgacgtctcgcccacctaattaaatttaaaaacgctaaaacccgaatacgactacaactcctacttaaaattaaacgaaaaactaccctcgcgccccgaccccaactaaataataaaaacctccataccgccgctcctacgaaataaaaaaaacaaaaaacaaataaaccattttcaacgccgccgccgaaactcgaacccgcccaacaaaacgctccgaattaaacgcgcga

SEQ ID NO: 26263 - DNA, 1003 bp, Artificial Sequence
  chemically treated genomic DNA (Homo sapiens) CpG-island No: 26263
ttcggaggttcggtagttttattttcgttatagcgtaggtttttgtggggcggcgggtttggggttatttttgtatcgtattttgggttatcgtcgttatcgtcgttagtattattttttttttgtttattcgattcgttattggtatcgttttcgtcgtttttttgtagggagaaggttcgtttgcgcgtgtcgttattaaatatggttttgacgtttttttaagtatggtttagttcgtttgtggtcgatttgttattgagtttgaggtgacgacgttaggagttgaagttggcggtatcgggttgcgtgtatttggcgtcgggtgttcggtgcgagtggaagatgaatttgttgggcgagaagtatatgttgtagtagtcgtatttgatgtatttggtacgagagttgttgtaacgcgtagggatgaagttattacgcgagttttacgcgtattcgtgtattatatcgaaggcgaagttttcgggtagtttgggtggtttgtgttcgtttaggaacgatttgtataggcgttcggtttttcgtttagtgattatgtcgtagcggcgcgacgagatgggtatggtttcggttcgacgtagaatttttagttgtatcggcgtgtattgtacgtacgtgatgtttagggttacgcggcggttgtggattttattatagttgtagtttttgaggagggtgttggagatttgcgttaggtataggcgtttttggtcgtcgatgattagcgatataatgggtatttcgtatagcgacgtttcgtttatttggttgggtttgagagcgttggagttcgagtacggttgtagtttttgtttggagttgggcgaggaattgttttcgcgtttcggttttagttgagtggtgagagtttttatgtcgtcgtttttgcgaaatagagaaagtagagagtagatgagttatttttagcgtcgtcgtcgaggttcgggttcgtttagtagggcgtttcgagttgggcgcgcgg

SEQ ID NO: 26264 - DNA, 1003 bp, Artificial Sequence
  chemically treated genomic DNA (Homo sapiens) CpG-island No: 26264
ccgcgcgcccaactcgaaacgccctactaaacgaacccgaacctcgacgacgacgctaaaaataactcatctactctctactttctctatttcgcaaaaacgacgacataaaaactctcaccactcaactaaaaccgaaacgcgaaaacaattcctcgcccaactccaaacaaaaactacaaccgtactcgaactccaacgctctcaaacccaaccaaataaacgaaacgtcgctatacgaaatacccattatatcgctaatcatcgacgaccaaaaacgcctatacctaacgcaaatctccaacaccctcctcaaaaactacaactataataaaatccacaaccgccgcgtaaccctaaacatcacgtacgtacaatacacgccgatacaactaaaaattctacgtcgaaccgaaaccatacccatctcgtcgcgccgctacgacataatcactaaacgaaaaaccgaacgcctatacaaatcgttcctaaacgaacacaaaccacccaaactacccgaaaacttcgccttcgatataatacacgaatacgcgtaaaactcgcgtaataacttcatccctacgcgttacaacaactctcgtaccaaatacatcaaatacgactactacaacatatacttctcgcccaacaaattcatcttccactcgcaccgaacacccgacgccaaatacacgcaacccgataccgccaacttcaactcctaacgtcgtcacctcaaactcaataacaaatcgaccacaaacgaactaaaccatacttaaaaaaacgtcaaaaccatatttaataacgacacgcgcaaacgaaccttctccctacaaaaaaacgacgaaaacgataccaataacgaatcgaataaacaaaaaaaaaataatactaacgacgataacgacgataacccaaaatacgatacaaaaataaccccaaacccgccgccccacaaaaacctacgctataacgaaaataaaactaccgaacctccgaa

SEQ ID NO: 26265 - DNA, 1158 bp, Artificial Sequence
  chemically treated genomic DNA (Homo sapiens) CpG-island No: 26265
cgtagcggtagtggttgtagcggtcgtcgtcgttattgtgtattcgacgttttttatgttttggttagtagtaggtagtttttcggtatcgttttatttcgttgtttagagttaagttaaggtcgtggcggtagtcgtggcggcggtagcggcggcggtagcggtagttgttggtagcggtgttttagagtttttggacggtgtcgagttagttaaagagagtggtttcggcgcggaggagcgttgttcgagcgttttgtttcgcgggtttttggacgaagacggtacggacgaggcgttgttatcgtttttggtttcgttgttttcgtcgttttcgtcgttcgtacgtaaaggtttttacgtgtcggtttttcggtcggtggttaaggatatcgagagtatcgttaagttttacgggagcgttcgggaggcgtacggcgcggggtttgttcgggggtcgggattcggcgttgggagcggcggttacgtgagttcggattttttgagcgagggtagttttagttataatttcgtttcgttcgacgtggatatcgcggacgagttcgaggtggacgtggaatttaatcgttttttcgacgacgaggacgtttaagaggagatcgagtttagcgtatttagcgtagggggcggtttagacggtgaatagtttattggattttttttcgttattttttttggcgcggacggtttcgtaaattttttcgacggcggtagttttcgttttcggcgtcgtttcgggttatttttagttggtcggttcgtatttggggatttggtagtcgaagatttggtgcggagatttgagaggagttcgttaagcggcggcggcggttacgagttgcgagagttttgcgggtttttaggaggtttcgcgtcggttaaggtgagtttcgcgttcgtttcgttagtggcgtttttttatttattttgtgcgcggtagggttgcggggtcgggcggagaacgggaattttgtttcgcgtaggcgtgggagtagtaggtttcggttatttttcgtaggtttagttttgggcgcgttgcgaaatcgggtttattcgtattttttagtgagggtttcgaagggaagggaagttgggggcggcgggaggattggggaatttgtgtgttttgtttttgtt

SEQ ID NO: 26266 - DNA, 1158 bp, Artificial Sequence
  chemically treated genomic DNA (Homo sapiens) CpG-island No: 26266
aacaaaaacaaaacacacaaattccccaatcctcccgccgcccccaacttcccttcccttcgaaaccctcactaaaaaatacgaataaacccgatttcgcaacgcgcccaaaactaaacctacgaaaaataaccgaaacctactactcccacgcctacgcgaaacaaaattcccgttctccgcccgaccccgcaaccctaccgcgcacaaaataaataaaaaaacgccactaacgaaacgaacgcgaaactcaccttaaccgacgcgaaacctcctaaaaacccgcaaaactctcgcaactcgtaaccgccgccgccgcttaacgaactcctctcaaatctccgcaccaaatcttcgactaccaaatccccaaatacgaaccgaccaactaaaaataacccgaaacgacgccgaaaacgaaaactaccgccgtcgaaaaaatttacgaaaccgtccgcgccaaaaaaaataacgaaaaaaaatccaataaactattcaccgtctaaaccgccccctacgctaaatacgctaaactcgatctcctcttaaacgtcctcgtcgtcgaaaaaacgattaaattccacgtccacctcgaactcgtccgcgatatccacgtcgaacgaaacgaaattataactaaaactaccctcgctcaaaaaatccgaactcacgtaaccgccgctcccaacgccgaatcccgacccccgaacaaaccccgcgccgtacgcctcccgaacgctcccgtaaaacttaacgatactctcgatatccttaaccaccgaccgaaaaaccgacacgtaaaaacctttacgtacgaacgacgaaaacgacgaaaacaacgaaaccaaaaacgataacaacgcctcgtccgtaccgtcttcgtccaaaaacccgcgaaacaaaacgctcgaacaacgctcctccgcgccgaaaccactctctttaactaactcgacaccgtccaaaaactctaaaacaccgctaccaacaactaccgctaccgccgccgctaccgccgccacgactaccgccacgaccttaacttaactctaaacaacgaaataaaacgataccgaaaaactacctactactaaccaaaacataaaaaacgtcgaatacacaataacgacgacgaccgctacaaccactaccgctacg

SEQ ID NO: 26267 - DNA, 1158 bp, Artificial Sequence
  chemically treated genomic DNA (Homo sapiens) CpG-island No: 26267
aataaaaataaagtatataagttttttagttttttcgtcgtttttagtttttttttttttcgaaatttttattggagggtgcgggtgggttcggtttcgtagcgcgtttaaggttgggtttgcggagagtggtcgaggtttgttgtttttacgtttgcgcggaataaaattttcgtttttcgttcggtttcgtagttttgtcgcgtatagggtaggtgggaaggcgttattggcggggcgggcgcggggtttattttggtcggcgcggggttttttaggggttcgtaaggttttcgtagttcgtagtcgtcgtcgtcgtttggcgggttttttttaggttttcgtattaagttttcggttgttaagtttttaaatgcgggtcggttagttgggggtggttcgaggcggcgtcgggggcgggggttgtcgtcgtcgggagagtttgcgggatcgttcgcgttagaggaggtggcggaagggggtttagtgggttgtttatcgtttgggtcgttttttgcgttgggtgcgttgggttcggtttttttttgggcgttttcgtcgtcggggaagcggttggattttacgtttatttcgggttcgttcgcggtgtttacgtcgggcgaggcggaattgtagttggagttgttttcgtttagaaagttcgggtttacgtagtcgtcgtttttagcgtcgggtttcggttttcgagtaggtttcgcgtcgtacgtttttcgggcgttttcgtagagtttagcgatgttttcggtgtttttgattatcggtcggaaggtcgatacgtaggagtttttgcgtgcgggcggcgggggcggcgggggtaacggggttaggggcggtggtagcgtttcgttcgtgtcgttttcgtttaggggttcgcgggatagagcgttcgggtagcgttttttcgcgtcgaggttattttttttggttggttcggtatcgtttaggggttttggggtatcgttgttagtagttgtcgttgtcgtcgtcgttgtcgtcgttacggttgtcgttacggttttggtttggttttgagtagcggggtaggacggtatcgggaggttgtttgttgttggttagaatatgggaaacgtcgggtatatagtggcggcggcggtcgttgtagttattgtcgttgcg

SEQ ID NO: 26268 - DNA, 1158 bp, Artificial Sequence
  chemically treated genomic DNA (Homo sapiens) CpG-island No: 26268
cgcaacgacaataactacaacgaccgccgccgccactatatacccgacgtttcccatattctaaccaacaacaaacaacctcccgataccgtcctaccccgctactcaaaaccaaaccaaaaccgtaacgacaaccgtaacgacgacaacgacgacgacaacgacaactactaacaacgataccccaaaacccctaaacgataccgaaccaaccaaaaaaaataacctcgacgcgaaaaaacgctacccgaacgctctatcccgcgaacccctaaacgaaaacgacacgaacgaaacgctaccaccgcccctaaccccgttacccccgccgcccccgccgcccgcacgcaaaaactcctacgtatcgaccttccgaccgataatcaaaaacaccgaaaacatcgctaaactctacgaaaacgcccgaaaaacgtacgacgcgaaacctactcgaaaaccgaaacccgacgctaaaaacgacgactacgtaaacccgaactttctaaacgaaaacaactccaactacaattccgcctcgcccgacgtaaacaccgcgaacgaacccgaaataaacgtaaaatccaaccgcttccccgacgacgaaaacgcccaaaaaaaaaccgaacccaacgcacccaacgcaaaaaacgacccaaacgataaacaacccactaaacccccttccgccacctcctctaacgcgaacgatcccgcaaactctcccgacgacgacaacccccgcccccgacgccgcctcgaaccacccccaactaaccgacccgcatttaaaaacttaacaaccgaaaacttaatacgaaaacctaaaaaaaacccgccaaacgacgacgacgactacgaactacgaaaaccttacgaacccctaaaaaaccccgcgccgaccaaaataaaccccgcgcccgccccgccaataacgccttcccacctaccctatacgcgacaaaactacgaaaccgaacgaaaaacgaaaattttattccgcgcaaacgtaaaaacaacaaacctcgaccactctccgcaaacccaaccttaaacgcgctacgaaaccgaacccacccgcaccctccaataaaaatttcgaaaaaaaaaaaaactaaaaacgacgaaaaaactaaaaaacttatatactttatttttatt

SEQ ID NO: 26269 - DNA, 503 bp, Artificial Sequence
  chemically treated genomic DNA (Homo sapiens) CpG-island No: 26269
gcgggagggaaaatgtttaaaaggaggcgggtgtagagggtggaggatattttgaacgtttttcggtttgggagtcgttttgtgtttagagtaattttttcgagggcgttaataattattttgaatttataagggggtaagggtgcgtcgcgtgcgttattgtgttcgtttaagtttagcgggcgtattaatttttgttatttcgtcggtttttttttttggtcgcggggtagggttgggcgtttttgggtcgtcgtagggcgtttttttaatcgtttgttatttttcggtcgtcgtaggtgttcgcgttcgagagggatgagtacgtgaagagcgcggcggtggcgttggggttcgcggttttttacgtttgtattttcgaggtttacggtaacgtttgtcgcggtcgttggttattgtaatgggggaatcgtagatagagggtcggggttaaggaaggtttgcgaaggaagataaggagagagacgtagagaaagagggag

SEQ ID NO: 26270 - DNA, 503 bp, Artificial Sequence
  chemically treated genomic DNA (Homo sapiens) CpG-island No: 26270
ctccctctttctctacgtctctctccttatcttccttcgcaaaccttccttaaccccgaccctctatctacgattcccccattacaataaccaacgaccgcgacaaacgttaccgtaaacctcgaaaatacaaacgtaaaaaaccgcgaaccccaacgccaccgccgcgctcttcacgtactcatccctctcgaacgcgaacacctacgacgaccgaaaaataacaaacgattaaaaaaacgccctacgacgacccaaaaacgcccaaccctaccccgcgaccaaaaaaaaaaaccgacgaaataacaaaaattaatacgcccgctaaacttaaacgaacacaataacgcacgcgacgcacccttacccccttataaattcaaaataattattaacgccctcgaaaaaattactctaaacacaaaacgactcccaaaccgaaaaacgttcaaaatatcctccaccctctacacccgcctccttttaaacattttccctcccgc

SEQ ID NO: 26271 - DNA, 503 bp, Artificial Sequence
  chemically treated genomic DNA (Homo sapiens) CpG-island No: 26271
ttttttttttttttgcgtttttttttttgttttttttcgtaggttttttttgatttcggttttttgtttgcggtttttttattatagtggttagcggtcgcgataggcgttatcgtgggtttcgggggtgtagacgtaggaggtcgcgggttttagcgttatcgtcgcgttttttacgtgtttatttttttcgggcgcgaatatttgcgacggtcgagaaatgataggcgattaggggggcgttttgcggcggtttaaagacgtttagttttatttcgcggttaagagggaaagtcgacggagtggtaaaggttggtgcgttcgttggatttgagcgggtatagtgacgtacgcggcgtatttttgtttttttgtagatttagggtaattgttagcgttttcgggaaaattattttaaatataaagcggtttttaagtcgaggggcgtttaaagtgttttttattttttgtattcgtttttttttaggtattttttttttcgt

SEQ ID NO: 26272 - DNA, 503 bp, Artificial Sequence
  chemically treated genomic DNA (Homo sapiens) CpG-island No: 26272
acgaaaaaaaaaatacctaaaaaaaaacgaatacaaaaaataaaaaacactttaaacgcccctcgacttaaaaaccgctttatatttaaaataattttcccgaaaacgctaacaattaccctaaatctacaaaaaaacaaaaatacgccgcgtacgtcactatacccgctcaaatccaacgaacgcaccaacctttaccactccgtcgactttccctcttaaccgcgaaataaaactaaacgtctttaaaccgccgcaaaacgcccccctaatcgcctatcatttctcgaccgtcgcaaatattcgcgcccgaaaaaaataaacacgtaaaaaacgcgacgataacgctaaaacccgcgacctcctacgtctacacccccgaaacccacgataacgcctatcgcgaccgctaaccactataataaaaaaaccgcaaacaaaaaaccgaaatcaaaaaaaacctacgaaaaaaaacaaaaaaaaaaacgcaaaaaaaaaaaaaa

SEQ ID NO: 26273 - DNA, 826 bp, Artificial Sequence
  chemically treated genomic DNA (Homo sapiens) CpG-island No: 26273
attatcgttagtaggtatttatttacgttcgcgttatgattttcgtttggttttgatttacgttttcggtagagatttttttttggtcgattttgatttacgatttcgttgggattttttttagttttaatttacgtttttttatttcgggttgacgttgtttttagcgtttcggagataatatttcgcggtcgtattcgcgttgtcgattcggggttttattttcggttaggattcgtcgtattcgtagtcgtagttcgtttagttttatcgtttgttttacgaagttattttggtcgcggtcggaagtatcgtttagggagtttggattcgttaagaagtcgagcgtcgattgtagtagcgatatggcggtggttgcgtcgtatttcgcggtagtcggagtggtcgggttcgggttttcgttttttcgtcgttcgggttagtttagtaatcgtcggttcggaggtgtattatttttcgtttcgacgtcgtgacgtaggcgttcgtgaggacgcgtcgcgttaggcggcgattcggtttagtttcgtttttttcgtcgcggttttattttttggttgcgcgcgtaggcgcggaggtttgacggagatagcgcgtgcgcggcgtcgtcgggtttgcgatgaattttcggttgttaagttttcggtcgggttgatttaagcggaggcgcgcggaatagtcgtcgaggcgattttcgtttaggtagtttagcgttttagtttagttttcggtatcgttttttatatggtttgttttgtgggaggtttttttttaggtgttttcggtttaagcgtttcgttattttttg

SEQ ID NO: 26274 - DNA, 826 bp, Artificial Sequence
  chemically treated genomic DNA (Homo sapiens) CpG-island No: 26274
caaaaaataacgaaacgcttaaaccgaaaacacctaaaaaaaaacctcccacaaaacaaaccatataaaaaacgataccgaaaactaaactaaaacgctaaactacctaaacgaaaatcgcctcgacgactattccgcgcgcctccgcttaaatcaacccgaccgaaaacttaacaaccgaaaattcatcgcaaacccgacgacgccgcgcacgcgctatctccgtcaaacctccgcgcctacgcgcgcaaccaaaaaataaaaccgcgacgaaaaaaacgaaactaaaccgaatcgccgcctaacgcgacgcgtcctcacgaacgcctacgtcacgacgtcgaaacgaaaaataatacacctccgaaccgacgattactaaactaacccgaacgacgaaaaaacgaaaacccgaacccgaccactccgactaccgcgaaatacgacgcaaccaccgccatatcgctactacaatcgacgctcgacttcttaacgaatccaaactccctaaacgatacttccgaccgcgaccaaaataacttcgtaaaacaaacgataaaactaaacgaactacgactacgaatacgacgaatcctaaccgaaaataaaaccccgaatcgacaacgcgaatacgaccgcgaaatattatctccgaaacgctaaaaacaacgtcaacccgaaataaaaaaacgtaaattaaaactaaaaaaaatcccaacgaaatcgtaaatcaaaatcgaccaaaaaaaaatctctaccgaaaacgtaaatcaaaaccaaacgaaaatcataacgcgaacgtaaataaatacctactaacgataat

SEQ ID NO: 26275 - DNA, 826 bp, Artificial Sequence
  chemically treated genomic DNA (Homo sapiens) CpG-island No: 26275
tagaggatggcgaagcgtttaaatcggagatatttgagaaggagttttttataaaatagattatgtggggaacggtatcgggagttggattggggcgttgaattatttgggcgggaatcgtttcggcgattgtttcgcgcgttttcgtttgagttagttcggtcgggagtttgatagtcggaagtttatcgtaagttcggcgacgtcgcgtacgcgttgttttcgttagattttcgcgtttgcgcgcgtagttaggaagtgaggtcgcggcggaggggacggggttaggtcgggtcgtcgtttgacgcgacgcgtttttacgggcgtttacgttacggcgtcgaggcggaagatggtgtattttcgggtcggcggttgttgagttgattcggacggcgagggagcgggagttcgagttcgattatttcggttgtcgcggggtgcggcgtagttatcgttatgtcgttgttgtagtcggcgttcgattttttggcgggtttaggttttttgggcggtgttttcggtcgcgattagagtgatttcgtggggtagacggtggaattgggcgagttgcggttgcgggtgcggcgggttttggtcgaaggtgaggtttcgggtcggtagcgcgggtgcggtcgcggagtgttgttttcgggacgttgggggtagcgttagttcggagtggaagggcgtgggttagggttggggagggttttagcgggatcgtgggttagggtcggttaggggagggtttttgtcgagggcgtgggttagggttaggcgaaggttatagcgcgggcgtaggtgagtgtttgttggcggtgat

SEQ ID NO: 26276 - DNA, 826 bp, Artificial Sequence
  chemically treated genomic DNA (Homo sapiens) CpG-island No: 26276
atcaccgccaacaaacactcacctacgcccgcgctataaccttcgcctaaccctaacccacgccctcgacaaaaaccctcccctaaccgaccctaacccacgatcccgctaaaaccctccccaaccctaacccacgcccttccactccgaactaacgctacccccaacgtcccgaaaacaacactccgcgaccgcacccgcgctaccgacccgaaacctcaccttcgaccaaaacccgccgcacccgcaaccgcaactcgcccaattccaccgtctaccccacgaaatcactctaatcgcgaccgaaaacaccgcccaaaaaacctaaacccgccaaaaaatcgaacgccgactacaacaacgacataacgataactacgccgcaccccgcgacaaccgaaataatcgaactcgaactcccgctccctcgccgtccgaatcaactcaacaaccgccgacccgaaaatacaccatcttccgcctcgacgccgtaacgtaaacgcccgtaaaaacgcgtcgcgtcaaacgacgacccgacctaaccccgtcccctccgccgcgacctcacttcctaactacgcgcgcaaacgcgaaaatctaacgaaaacaacgcgtacgcgacgtcgccgaacttacgataaacttccgactatcaaactcccgaccgaactaactcaaacgaaaacgcgcgaaacaatcgccgaaacgattcccgcccaaataattcaacgccccaatccaactcccgataccgttccccacataatctattttataaaaaactccttctcaaatatctccgatttaaacgcttcgccatcctcta

SEQ ID NO: 26277 - DNA, 849 bp, Artificial Sequence
  chemically treated genomic DNA (Homo sapiens) CpG-island No: 26277
tcgttttgattttcgtttttttcgtagtacggtattaagaagaaggaggagcgcgaggtcgaggtttaggtcgttatggaggttaatttcgaggggagtttgacgcggtttaagaaggttatttcgtcgggttgcggggacgaggtggaggaggaggacgagagtattttggatatcgttattaagtatttgttcgggtcgttgtaggatatgtttaagaagtagtcgcgcgcgggatagcggtttcgcggagttttcgtttttttttttatagatttttcgcggaggtttttgagggacgagtagagcgtagtttttacgtcgatataagttatagttttaggttcgttttgttcgcgttcgtcgttttttttattcggtaaggggcgcgcgtttttaggatttttttagttcgtttcgtgtttttttgttcgcgggtggttggagttttatcgtttgggacgttttttttttttgttgtttatcgtttatttagtagcgttcgaggttagggtcgtcgaagggtagtttcgcgattatttttgtgcgcgcgttcgcggcggtgggcgtttgtcgggttcgtatttaggagtatagttatagtagacggggggttgcgggcggggcgagggcggcggggtttgggttttttttttgtacgcggatttcggggttcggatcgtttcgtcgtgagtatttgcgttcgtacgcggtcgtttttcgtttttcggtttggttttttcgcgtttttgtttattcgtttttgttcgcgttttttttttttttttttggaaggttttgttttttacgaacgttacggtcgtgtttatttttaaattaaaggaaata

SEQ ID NO: 26278 - DNA, 849 bp, Artificial Sequence
  chemically treated genomic DNA (Homo sapiens) CpG-island No: 26278
tatttcctttaatttaaaaataaacacgaccgtaacgttcgtaaaaaacaaaaccttccaaaaaaaaaaaaaaaaaacgcgaacaaaaacgaataaacaaaaacgcgaaaaaaccaaaccgaaaaacgaaaaacgaccgcgtacgaacgcaaatactcacgacgaaacgatccgaaccccgaaatccgcgtacaaaaaaaaaacccaaaccccgccgccctcgccccgcccgcaaccccccgtctactataactatactcctaaatacgaacccgacaaacgcccaccgccgcgaacgcgcgcacaaaaataatcgcgaaactacccttcgacgaccctaacctcgaacgctactaaataaacgataaacaacaaaaaaaaaaaacgtcccaaacgataaaactccaaccacccgcgaacaaaaaaacacgaaacgaactaaaaaaatcctaaaaacgcgcgccccttaccgaataaaaaaaacgacgaacgcgaacaaaacgaacctaaaactataacttatatcgacgtaaaaactacgctctactcgtccctcaaaaacctccgcgaaaaatctataaaaaaaaaaacgaaaactccgcgaaaccgctatcccgcgcgcgactacttcttaaacatatcctacaacgacccgaacaaatacttaataacgatatccaaaatactctcgtcctcctcctccacctcgtccccgcaacccgacgaaataaccttcttaaaccgcgtcaaactcccctcgaaattaacctccataacgacctaaacctcgacctcgcgctcctccttcttcttaataccgtactacgaaaaaaacgaaaatcaaaacga

SEQ ID NO: 26279 - DNA, 849 bp, Artificial Sequence
  chemically treated genomic DNA (Homo sapiens) CpG-island No: 26279
tgttttttttagtttagaagtgaatacggtcgtggcgttcgtaagaagtaaaattttttagagaggagaggaaaggacgcggatagagacggatggataggggcgcgagggggttaggtcggggggcggagagcggtcgcgtgcggacgtaaatatttacggcggagcgattcgaatttcggagttcgcgtgtaggagggggatttaggtttcgtcgttttcgtttcgttcgtagtttttcgtttgttatggttgtgtttttgagtgcgggttcgataggcgtttatcgtcgcgaacgcgcgtataggggtggtcgcggggttgtttttcggcggttttggtttcgggcgttgttgggtgggcggtaaatagtaagagaaaggggcgttttaggcgatggggttttagttattcgcgggtagaggagtacggggcggattgggggggttttgggggcgcgcgttttttgtcgggtgagggaggcggcgggcgcgggtagggcgggtttggggttatggtttatatcggcgtgggggttgcgttttgttcgttttttaggggttttcgcggaggatttgtagggggaggggcgggggtttcgcggggtcgttgtttcgcgcgcggttattttttgagtatgttttgtagcggttcgggtaggtatttgatgacggtgtttaggatgttttcgttttttttttttatttcgttttcgtagttcggcgggatggtttttttgggtcgcgttaagtttttttcggagttggtttttatggcggtttgggtttcggtttcgcgtttttttttttttttgatgtcgtattgcgggggaggcgggggttagggcgg

SEQ ID NO: 26280 - DNA, 849 bp, Artificial Sequence
  chemically treated genomic DNA (Homo sapiens) CpG-island No: 26280
ccgccctaacccccgcctcccccgcaatacgacatcaaaaaaaaaaaaaaacgcgaaaccgaaacccaaaccgccataaaaaccaactccgaaaaaaacttaacgcgacccaaaaaaaccatcccgccgaactacgaaaacgaaataaaaaaaaaaaacgaaaacatcctaaacaccgtcatcaaatacctacccgaaccgctacaaaacatactcaaaaaataaccgcgcgcgaaacaacgaccccgcgaaacccccgcccctccccctacaaatcctccgcgaaaacccctaaaaaacgaacaaaacgcaacccccacgccgatataaaccataaccccaaacccgccctacccgcgcccgccgcctccctcacccgacaaaaaacgcgcgcccccaaaacccccccaatccgccccgtactcctctacccgcgaataactaaaaccccatcgcctaaaacgcccctttctcttactatttaccgcccacccaacaacgcccgaaaccaaaaccgccgaaaaacaaccccgcgaccacccctatacgcgcgttcgcgacgataaacgcctatcgaacccgcactcaaaaacacaaccataacaaacgaaaaactacgaacgaaacgaaaacgacgaaacctaaatccccctcctacacgcgaactccgaaattcgaatcgctccgccgtaaatatttacgtccgcacgcgaccgctctccgccccccgacctaaccccctcgcgcccctatccatccgtctctatccgcgtcctttcctctcctctctaaaaaattttacttcttacgaacgccacgaccgtattcacttctaaactaaaaaaaaca

SEQ ID NO: 26281 - DNA, 1809 bp, Artificial Sequence
  chemically treated genomic DNA (Homo sapiens) CpG-island No: 26281
gataacgattattatcgtagcgacgagtaggtgggcggggttcgggggtcgttgtagtgttagtgttcgtcgtggaggcgtgagtaggtgggcggggttcgggggtcgttgtagtgttagtgttcgtcgtggaggcgtgagtaggtgggcggggttcgggggtcgttgtagtgttagtgttcgtcgtggaggcgtgagtaggtgggcggggttcgggggtcgttgtagtgttagtgttcgtcgtggaggcgtgagtaggtgggcggggttcgggggtcgttgtagtgttagtgttcgtcgtggaggcgtgagtaggtgggcggggtttcgggggtcgttgtagtgttagtgttcgtcgtggaggcgtgagtaggtgggcggggttcgggggtcgttgtagtgttagtgttcgtcgtggaggcgtgagtaggtgggcggggttcggggtcgttgtagtgttagtgttcgtcgtggaggcgtgagtaggtgggcggggttcgggggtcgttgtagtgttagtgttcgtcgtggaggcgtgagtaggtgggcggggttcgggggtcgttgtagtgttagtgttcgtcgtggaggcgtgagtaggtgggcggggttcgggggtcgttgtagtgttagtgttcgtcgtggaggcgtgagtaggtgggcggggtttcggggtcgttgtagtgttagtgtttttcgtggaggcgtgagtaggtgggcggggtttcggggtcgttgtagtgttagtgtttttcgtggaggcgtgagtaggtgggcggggttcgggggtcgttgtagtgttagtgtttttcgtggaggcgtgagtaggtgggcggggttcgggggtcgttgtagtgttagtgtttttcgtggaggcgtgagtaggtgggcggggttcgggggtcgttgtagtgttagtgtttttcgtggaggcgtgagtaggtgggcggggttcgggggtcgttgtagtgttagtgttcgtcgtggaggcgtgagtaggtgggcggggtttcggggtcgttgtagtgttagtgttcgtcgtggaggcgtgagtaggtgggcggggttcgggggtcgttgtagtgttagtgtttttcgtggaggcgtgagtaggtgggcggggttcgggggtcgttgtagtgttagtgttcgtcgtggaggcgtgagtaggtgggcggggtttcggggtcgttgtagtgttagtgttcgtcgtggaggcgtgagtaggtgggcggggttcgggggtcgttgtagtgttagtgtttttcgtggaggcgtgagtaggtgggcggggttcgggggtcgttgtagtgttagtgtttttcgtggaggcgtgagtaggtgggcggggttcgggggtcgttgtagtgttagtgtttttcgtggaggcgtgagtaggtgggcggggtttcgggggtcgttgtagtgttagtgttcgtcgtggaggcgtgagtaggtgggcggggtttcggggtcgttgtagtgttagtgttcgtcgtggaggcgtgagtaggtgggcggggttcggggtcgttgtatagttagggttcgtcgtggaggtttgagtaggtgggcggggttcgggggttttttaaagttagtgtttttttcggaggcgtgagtacgtgggcggggtttcggggtttttttatagttatagtttttttcggaggcgtgagtatatgggcggggtttcggggtttttttagagttaaagtttttttcggaggcgtgagtacgtgggcggggtttcggggtcgttttaaagttaaagtttttttaggaggcgtgagtacgtgggttgggttt

SEQ ID NO: 26282 - DNA, 1809 bp, Artificial Sequence
  chemically treated genomic DNA (Homo sapiens) CpG-island No: 26282
aaacccaacccacgtactcacgcctcctaaaaaaactttaactttaaaacgaccccgaaaccccgcccacgtactcacgcctccgaaaaaaactttaactctaaaaaaaccccgaaaccccgcccatatactcacgcctccgaaaaaaactataactataaaaaaaccccgaaaccccgcccacgtactcacgcctccgaaaaaaacactaactttaaaaaacccccgaaccccgcccacctactcaaacctccacgacgaaccctaactatacaacgaccccgaaccccgcccacctactcacgcctccacgacgaacactaacactacaacgaccccgaaaccccgcccacctactcacgcctccacgacgaacactaacactacaacgacccccgaaaccccgcccacctactcacgcctccacgaaaaacactaacactacaacgacccccgaaccccgcccacctactcacgcctccacgaaaaacactaacactacaacgacccccgaaccccgcccacctactcacgcctccacgaaaaacactaacactacaacgacccccgaaccccgcccacctactcacgcctccacgacgaacactaacactacaacgaccccgaaaccccgcccacctactcacgcctccacgacgaacactaacactacaacgacccccgaaccccgcccacctactcacgcctccacgaaaaacactaacactacaacgacccccgaaccccgcccacctactcacgcctccacgacgaacactaacactacaacgaccccgaaaccccgcccacctactcacgcctccacgacgaacactaacactacaacgacccccgaaccccgcccacctactcacgcctccacgaaaaacactaacactacaacgacccccgaaccccgcccacctactcacgcctccacgaaaaacactaacactacaacgacccccgaaccccgcccacctactcacgcctccacgaaaaacactaacactacaacgacccccgaaccccgcccacctactcacgcctccacgaaaaacactaacactacaacgaccccgaaaccccgcccacctactcacgcctccacgaaaaacactaacactacaacgaccccgaaaccccgcccacctactcacgcctccacgacgaacactaacactacaacgacccccgaaccccgcccacctactcacgcctccacgacgaacactaacactacaacgacccccgaaccccgcccacctactcacgcctccacgacgaacactaacactacaacgacccccgaaccccgcccacctactcacgcctccacgacgaacactaacactacaacgaccccgaaccccgcccacctactcacgcctccacgacgaacactaacactacaacgacccccgaaccccgcccacctactcacgcctccacgacgaacactaacactacaacgacccccgaaaccccgcccacctactcacgcctccacgacgaacactaacactacaacgacccccgaaccccgcccacctactcacgcctccacgacgaacactaacactacaacgacccccgaaccccgcccacctactcacgcctccacgacgaacactaacactacaacgacccccgaaccccgcccacctactcacgcctccacgacgaacactaacactacaacgacccccgaaccccgcccacctactcacgcctccacgacgaacactaacactacaacgacccccgaaccccgcccacctactcgtcgctacgataataatcgttatc

SEQ ID NO: 26283 - DNA, 1809 bp, Artificial Sequence
  chemically treated genomic DNA (Homo sapiens) CpG-island No: 26283
gggtttagtttacgtgtttacgttttttgggagagttttaattttaaagcgatttcggggtttcgtttacgtgtttacgttttcggggagagttttaattttaaagagatttcggggtttcgtttatgtgtttacgttttcggggagagttataattgtaaagagatttcggggtttcgtttacgtgtttacgttttcggggagagtattaattttaaagagttttcgggtttcgtttatttgtttaggtttttacggcgagttttaattatgtagcgatttcgggtttcgtttatttgtttacgtttttacggcgagtattaatattgtagcgatttcggggtttcgtttatttgtttacgtttttacggcgagtattaatattgtagcgattttcggggtttcgtttatttgtttacgtttttacggagagtattaatattgtagcgattttcgggtttcgtttatttgtttacgtttttacggagagtattaatattgtagcgattttcgggtttcgtttatttgtttacgtttttacggagagtattaatattgtagcgattttcgggtttcgtttatttgtttacgtttttacggcgagtattaatattgtagcgatttcggggtttcgtttatttgtttacgtttttacggcgagtattaatattgtagcgattttcgggtttcgtttatttgtttacgtttttacggagagtattaatattgtagcgattttcgggtttcgtttatttgtttacgtttttacggcgaatattaatattgtagcgatttcggggtttcgtttatttgtttacgtttttacggcgagtattaatattgtagcgattttcgggtttcgtttatttgtttacgtttttacggagagtattaatattgtagcgattttcgggtttcgtttatttgtttacgtttttacggagagtattaatattgtagcgattttcgggtttcgtttatttgtttacgtttttacggagagtattaatattgtagcgattttcgggtttcgtttatttgtttacgtttttacggagagtattaatattgtagcgatttcggggtttcgtttatttgtttacgtttttacggagagtattaatattgtagcgatttcggggtttcgtttatttgtttacgtttttacggcgagtattaatattgtagcgattttcgggtttcgtttatttgtttacgtttttacggcgagtattaatattgtagcgattttcgggtttcgtttatttgtttacgtttttacggcgagtattaatattgtagcgattttcgggtttcgtttatttgtttacgtttttacggcgaatattaatattgtagcgatttcgggtttcgtttatttgtttacgtttttacggcgagtattaatattgtagcgattttcgggtttcgtttatttgtttacgtttttacggcgaatattaatattgtagcgattttcggggtttcgtttatttgtttacgtttttacggcgagtattaatattgtagcgattttcgggtttcgtttatttgtttacgtttttacggcgagtattaatattgtagcgattttcgggtttcgtttatttgtttacgtttttacggcgagtattaatattgtagcgattttcgggtttcgtttatttgtttacgtttttacggcgagtattaatattgtagcgattttcgggtttcgtttatttgtttacgtttttacggcgagtattaatattgtagcgattttcgggtttcgtttatttgttcgtcgttgcggtggtagtcgttgtt

SEQ ID NO: 26284 - DNA, 1809 bp, Artificial Sequence
  chemically treated genomic DNA (Homo sapiens) CpG-island No: 26284
aacaacgactaccaccgcaacgacgaacaaataaacgaaacccgaaaatcgctacaatattaatactcgccgtaaaaacgtaaacaaataaacgaaacccgaaaatcgctacaatattaatactcgccgtaaaaacgtaaacaaataaacgaaacccgaaaatcgctacaatattaatactcgccgtaaaaacgtaaacaaataaacgaaacccgaaaatcgctacaatattaatactcgccgtaaaaacgtaaacaaataaacgaaacccgaaaatcgctacaatattaatactcgccgtaaaaacgtaaacaaataaacgaaaccccgaaaatcgctacaatattaatattcgccgtaaaaacgtaaacaaataaacgaaacccgaaaatcgctacaatattaatactcgccgtaaaaacgtaaacaaataaacgaaacccgaaatcgctacaatattaatattcgccgtaaaaacgtaaacaaataaacgaaacccgaaaatcgctacaatattaatactcgccgtaaaaacgtaaacaaataaacgaaacccgaaaatcgctacaatattaatactcgccgtaaaaacgtaaacaaataaacgaaacccgaaaatcgctacaatattaatactcgccgtaaaaacgtaaacaaataaacgaaaccccgaaatcgctacaatattaatactctccgtaaaaacgtaaacaaataaacgaaaccccgaaatcgctacaatattaatactctccgtaaaaacgtaaacaaataaacgaaacccgaaaatcgctacaatattaatactctccgtaaaaacgtaaacaaataaacgaaacccgaaaatcgctacaatattaatactctccgtaaaaacgtaaacaaataaacgaaacccgaaaatcgctacaatattaatactctccgtaaaaacgtaaacaaataaacgaaacccgaaaatcgctacaatattaatactcgccgtaaaaacgtaaacaaataaacgaaaccccgaaatcgctacaatattaatattcgccgtaaaaacgtaaacaaataaacgaaacccgaaaatcgctacaatattaatactctccgtaaaaacgtaaacaaataaacgaaacccgaaaatcgctacaatattaatactcgccgtaaaaacgtaaacaaataaacgaaaccccgaaatcgctacaatattaatactcgccgtaaaaacgtaaacaaataaacgaaacccgaaaatcgctacaatattaatactctccgtaaaaacgtaaacaaataaacgaaacccgaaaatcgctacaatattaatactctccgtaaaaacgtaaacaaataaacgaaacccgaaaatcgctacaatattaatactctccgtaaaaacgtaaacaaataaacgaaaccccgaaaatcgctacaatattaatactcgccgtaaaaacgtaaacaaataaacgaaaccccgaaatcgctacaatattaatactcgccgtaaaaacgtaaacaaataaacgaaacccgaaatcgctacataattaaaactcgccgtaaaaacctaaacaaataaacgaaacccgaaaactctttaaaattaatactctccccgaaaacgtaaacacgtaaacgaaaccccgaaatctctttacaattataactctccccgaaaacgtaaacacataaacgaaaccccgaaatctctttaaaattaaaactctccccgaaaacgtaaacacgtaaacgaaaccccgaaatcgctttaaaattaaaactctcccaaaaaacgtaaacacgtaaactaaaccc

SEQ ID NO: 26285 - DNA, 746 bp, Artificial Sequence
  chemically treated genomic DNA (Homo sapiens) CpG-island No: 26285
cgagcgtagcgcgcgttcggttttcgtttttcgggttttttttttcggtttcggcgtttttttttcggttttcgttttttttcgtttttttcgtcggtttcggtttttttttttcggtttttttttttttcgcggtttcggtttcgtttagttttttttttcggttttcgtttttcgggtttttttttttcggtttcggttttttttttcggtttcggttttttttttcggttttcgttttttttttcgatttcggttttttttcgtagttttcgtttttttttcgggtttcgcgcgcgcggggttcggggcgggcgttgtttattgtcgcggtgttgaagcggttttcgcggtttcggttcgcgttcggtttttttttcgtttttttttgtttcgaggtttttttttttttttttcgttttttttttttttttttttggcgcgttttcgtttgagggtcgttcggttcgttcgtaaagtcgaggggtgcgggtgcggcggggtcggagttttgcgggtttgcggggttcggtcgtgtttttttttttcgcgtcgcgggagttaggggagaagtttggaggagaatcggcgttgcggtaaagttttcgaggggcgtttttcgttcgtcgtttttttagttttcgcgcgagttttttttttttgcggagggcgaggggtgaatcgttaaatagtgtttttttagggatttggggtttttcgataggagagatttcgtaaaatcgggg

SEQ ID NO: 26286 - DNA, 746 bp, Artificial Sequence
  chemically treated genomic DNA (Homo sapiens) CpG-island No: 26286
ccccgattttacgaaatctctcctatcgaaaaaccccaaatccctaaaaaaacactatttaacgattcacccctcgccctccgcaaaaaaaaaaaactcgcgcgaaaactaaaaaaacgacgaacgaaaaacgcccctcgaaaactttaccgcaacgccgattctcctccaaacttctcccctaactcccgcgacgcgaaaaaaaaaaacacgaccgaaccccgcaaacccgcaaaactccgaccccgccgcacccgcacccctcgactttacgaacgaaccgaacgaccctcaaacgaaaacgcgccaaaaaaaaaaaaaaaaaaaacgaaaaaaaaaaaaaaaaacctcgaaacaaaaaaaaacgaaaaaaaaaccgaacgcgaaccgaaaccgcgaaaaccgcttcaacaccgcgacaataaacaacgcccgccccgaaccccgcgcgcgcgaaacccgaaaaaaaaacgaaaactacgaaaaaaaaccgaaatcgaaaaaaaaaacgaaaaccgaaaaaaaaaaccgaaaccgaaaaaaaaaaccgaaaccgaaaaaaaaaaacccgaaaaacgaaaaccgaaaaaaaaaactaaacgaaaccgaaaccgcgaaaaaaaaaaaaaccgaaaaaaaaaaaccgaaaccgacgaaaaaaacgaaaaaaaacgaaaaccgaaaaaaaaacgccgaaaccgaaaaaaaaaacccgaaaaacgaaaaccgaacgcgcgctacgctcg

SEQ ID NO: 26287 - DNA, 746 bp, Artificial Sequence
  chemically treated genomic DNA (Homo sapiens) CpG-island No: 26287
tttcggttttgcggggttttttttatcggggaattttaggtttttggagagatattgtttgacggtttatttttcgtttttcgtagaggaaggagattcgcgcggggattgggagggcggcgggcggggagcgtttttcggaggttttgtcgtagcgtcgatttttttttaaattttttttttggttttcgcggcgcggggaaggagggtacggtcgggtttcgtagattcgtagggtttcggtttcgtcgtattcgtatttttcggttttgcgggcgggtcgagcggtttttaggcgggagcgcgttaggagaggaaagaaagagggcgagggaggagagggggagtttcgagataggaagaagcgaggaggaggtcgggcgcgggtcgggatcgcgggggtcgttttagtatcgcggtagtggatagcgttcgtttcggatttcgcgcgcgcggagttcgggagagaaacgggggttgcggggagaagtcggggtcggggggagaaacgggggtcggagggagaggtcggagtcggggggagaagtcggagtcggggaggagagattcggggagcggaggtcggggggaggagttgggcgaagtcggggtcgcggggagaaggggggtcgggaaggagaaatcggggtcggcgggagaagcggggagaagcgggggtcggggaggagacgtcggggtcgggaggggagattcggggagcggaggtcgggcgcgcgttgcgttcg

SEQ ID NO: 26288 - DNA, 746 bp, Artificial Sequence
  chemically treated genomic DNA (Homo sapiens) CpG-island No: 26288
cgaacgcaacgcgcgcccgacctccgctccccgaatctcccctcccgaccccgacgtctcctccccgacccccgcttctccccgcttctcccgccgaccccgatttctccttcccgaccccccttctccccgcgaccccgacttcgcccaactcctccccccgacctccgctccccgaatctctcctccccgactccgacttctccccccgactccgacctctccctccgacccccgtttctccccccgaccccgacttctccccgcaacccccgtttctctcccgaactccgcgcgcgcgaaatccgaaacgaacgctatccactaccgcgatactaaaacgacccccgcgatcccgacccgcgcccgacctcctcctcgcttcttcctatctcgaaactccccctctcctccctcgccctctttctttcctctcctaacgcgctcccgcctaaaaaccgctcgacccgcccgcaaaaccgaaaaatacgaatacgacgaaaccgaaaccctacgaatctacgaaacccgaccgtaccctccttccccgcgccgcgaaaaccaaaaaaaaaatttaaaaaaaaatcgacgctacgacaaaacctccgaaaaacgctccccgcccgccgccctcccaatccccgcgcgaatctccttcctctacgaaaaacgaaaaataaaccgtcaaacaatatctctccaaaaacctaaaattccccgataaaaaaaaccccgcaaaaccgaaa

SEQ ID NO: 26289 - DNA, 869 bp, Artificial Sequence
  chemically treated genomic DNA (Homo sapiens) CpG-island No: 26289
ggcgagtattaatattgtagcgatttcggggtttcgtttatttgtttacgtttttacggcgagtattaatattgtagcgattttcgggtttcgtttatttgtttacgtttttacggcgaatattaatattgtagcgatttcgggtttcgtttatttgtttacgtttttacggcgagtattaatattgtagcgattttcgggtttcgtttatttgtttacgtttttacggcgaatattaatattgtagcgattttcggggtttcgtttatttgtttacgtttttacggcgagtattaatattgtagcgattttcgggtttcgtttatttgtttacgtttttacggagagtattaatattgtagcgattttcgggtttcgtttatttgtttacgtttttacggcgagtattaatattgtagcgatttcggggtttcgtttatttgtttacgtttatacggcgagtattaatattgtagcgattttcgggtttcgtttatttgtttacgtttttacggcgagtattaatattgtagcgatttcggggtttcgtttatttgtttacgtttttacggcgagtattaatattgtagcgatttcggggtttcgtttatttgtttacgtttttacggcgagtattaatattgtagcgattttcgggtttcgtttatttgtttacgtttttacggcgaatattaatattgtagcgatttcgggtttcgtttatttgtttacgtttttacggcgagtattaatattgtagcgattttcgggtttcgtttatttgtttacgtttttacggcgaatattaatattgtagcgattttcggggtttcgtttatttgtttacgtttttacggcgagtattatta

SEQ ID NO: 26290 - DNA, 869 bp, Artificial Sequence
  chemically treated genomic DNA (Homo sapiens) CpG-island No: 26290
taataatactcgccgtaaaaacgtaaacaaataaacgaaaccccgaaaatcgctacaatattaatattcgccgtaaaaacgtaaacaaataaacgaaacccgaaaatcgctacaatattaatactcgccgtaaaaacgtaaacaaataaacgaaacccgaaatcgctacaatattaatattcgccgtaaaaacgtaaacaaataaacgaaacccgaaaatcgctacaatattaatactcgccgtaaaaacgtaaacaaataaacgaaaccccgaaatcgctacaatattaatactcgccgtaaaaacgtaaacaaataaacgaaaccccgaaatcgctacaatattaatactcgccgtaaaaacgtaaacaaataaacgaaacccgaaaatcgctacaatattaatactcgccgtataaacgtaaacaaataaacgaaaccccgaaatcgctacaatattaatactcgccgtaaaaacgtaaacaaataaacgaaacccgaaaatcgctacaatattaatactctccgtaaaaacgtaaacaaataaacgaaacccgaaaatcgctacaatattaatactcgccgtaaaaacgtaaacaaataaacgaaaccccgaaaatcgctacaatattaatattcgccgtaaaaacgtaaacaaataaacgaaacccgaaaatcgctacaatattaatactcgccgtaaaaacgtaaacaaataaacgaaacccgaaatcgctacaatattaatattcgccgtaaaaacgtaaacaaataaacgaaacccgaaaatcgctacaatattaatactcgccgtaaaaacgtaaacaaataaacgaaaccccgaaatcgctacaatattaatactcgcc

SEQ ID NO: 26291 - DNA, 869 bp, Artificial Sequence
  chemically treated genomic DNA (Homo sapiens) CpG-island No: 26291
tggtagtgttcgtcgtggaggcgtgagtaggtgggcggggtttcgggggtcgttgtagtgttagtgttcgtcgtggaggcgtgagtaggtgggcggggttcgggggtcgttgtagtgttagtgttcgtcgtggaggcgtgagtaggtgggcggggttcggggtcgttgtagtgttagtgttcgtcgtggaggcgtgagtaggtgggcggggttcgggggtcgttgtagtgttagtgttcgtcgtggaggcgtgagtaggtgggcggggtttcggggtcgttgtagtgttagtgttcgtcgtggaggcgtgagtaggtgggcggggtttcggggtcgttgtagtgttagtgttcgtcgtggaggcgtgagtaggtgggcggggttcgggggtcgttgtagtgttagtgttcgtcgtgtaggcgtgagtaggtgggcggggtttcggggtcgttgtagtgttagtgttcgtcgtggaggcgtgagtaggtgggcggggttcgggggtcgttgtagtgttagtgtttttcgtggaggcgtgagtaggtgggcggggttcgggggtcgttgtagtgttagtgttcgtcgtggaggcgtgagtaggtgggcggggtttcgggggtcgttgtagtgttagtgttcgtcgtggaggcgtgagtaggtgggcggggttcgggggtcgttgtagtgttagtgttcgtcgtggaggcgtgagtaggtgggcggggttcggggtcgttgtagtgttagtgttcgtcgtggaggcgtgagtaggtgggcggggttcgggggtcgttgtagtgttagtgttcgtcgtggaggcgtgagtaggtgggcggggtttcggggtcgttgtagtgttagtgttcgtt

SEQ ID NO: 26292 - DNA, 869 bp, Artificial Sequence
  chemically treated genomic DNA (Homo sapiens) CpG-island No: 26292
aacgaacactaacactacaacgaccccgaaaccccgcccacctactcacgcctccacgacgaacactaacactacaacgacccccgaaccccgcccacctactcacgcctccacgacgaacactaacactacaacgaccccgaaccccgcccacctactcacgcctccacgacgaacactaacactacaacgacccccgaaccccgcccacctactcacgcctccacgacgaacactaacactacaacgacccccgaaaccccgcccacctactcacgcctccacgacgaacactaacactacaacgacccccgaaccccgcccacctactcacgcctccacgaaaaacactaacactacaacgacccccgaaccccgcccacctactcacgcctccacgacgaacactaacactacaacgaccccgaaaccccgcccacctactcacgcctacacgacgaacactaacactacaacgacccccgaaccccgcccacctactcacgcctccacgacgaacactaacactacaacgaccccgaaaccccgcccacctactcacgcctccacgacgaacactaacactacaacgaccccgaaaccccgcccacctactcacgcctccacgacgaacactaacactacaacgacccccgaaccccgcccacctactcacgcctccacgacgaacactaacactacaacgaccccgaaccccgcccacctactcacgcctccacgacgaacactaacactacaacgacccccgaaccccgcccacctactcacgcctccacgacgaacactaacactacaacgacccccgaaaccccgcccacctactcacgcctccacgacgaacactacca

SEQ ID NO: 26293 - DNA, 692 bp, Artificial Sequence
  chemically treated genomic DNA (Homo sapiens) CpG-island No: 26293
gggagaggggtcgcgcggggagaaagattcggagttcggaaggagaagaattcgggagaggggtcgcgcggggagaaagattcggagttcggagtaagaagagttcgggagaggggtcgcgcggggagaaagattcggagttcggagtaagaagagttcgggagaggggtcgcgaggggagaaagattcggagttcggaaggagaagaattcgggagaggggtcgcgcggggagaaagatttggagttcggaaggagaagaattcgggagaggggtcgcgcggggagaaagaattggagtcgggatggagaagaattcgggggaggggtcgtgcggggaaagattcggagtttggagggagaattcgggagaggggtcgcgtggggagaaagatttagagttcggagcgagaagagttcgggagaggggtcgtacgggaagaaagattcggagttcggaaggagaagaattcgggagaggggtcgcgcggggagaaagattcggagttcggaaggagaagaatttcggagaggggtttcgaggggagaaagatttggagttcggagcgagaagaattcgggagaggggtcgcgcggggagaaagatttggagtttggcggaagaagtgagaagtagggagaaagggggtgttcggtgagagtcgcggtgggggtgtttgtgtagggaggggt

SEQ ID NO: 26294 - DNA, 692 bp, Artificial Sequence
  chemically treated genomic DNA (Homo sapiens) CpG-island No: 26294
acccctccctacacaaacacccccaccgcgactctcaccgaacaccccctttctccctacttctcacttcttccgccaaactccaaatctttctccccgcgcgacccctctcccgaattcttctcgctccgaactccaaatctttctcccctcgaaacccctctccgaaattcttctccttccgaactccgaatctttctccccgcgcgacccctctcccgaattcttctccttccgaactccgaatctttcttcccgtacgacccctctcccgaactcttctcgctccgaactctaaatctttctccccacgcgacccctctcccgaattctccctccaaactccgaatctttccccgcacgacccctcccccgaattcttctccatcccgactccaattctttctccccgcgcgacccctctcccgaattcttctccttccgaactccaaatctttctccccgcgcgacccctctcccgaattcttctccttccgaactccgaatctttctcccctcgcgacccctctcccgaactcttcttactccgaactccgaatctttctccccgcgcgacccctctcccgaactcttcttactccgaactccgaatctttctccccgcgcgacccctctcccgaattcttctccttccgaactccgaatctttctccccgcgcgacccctctccc

SEQ ID NO: 26295 - DNA, 692 bp, Artificial Sequence
  chemically treated genomic DNA (Homo sapiens) CpG-island No: 26295
gtttttttttgtataagtatttttatcgcggtttttatcgggtattttttttttttttgttttttatttttttcgttaaattttaggttttttttttcgcgcggtttttttttcgagtttttttcgtttcggattttaggttttttttttttcgaggttttttttcggagttttttttttttcggatttcgggttttttttttcgcgcggtttttttttcgagttttttttttttcggatttcgggttttttttttcgtgcggtttttttttcgagtttttttcgtttcggattttgggtttttttttttacgcggtttttttttcgagttttttttttagatttcgggttttttttcgtacggtttttttttcgagtttttttttatttcgattttagtttttttttttcgcgcggtttttttttcgagttttttttttttcggattttaggttttttttttcgcgcggtttttttttcgagttttttttttttcggatttcgggttttttttttttcgcggtttttttttcgagttttttttgtttcggatttcgggttttttttttcgcgcggtttttttttcgagttttttttgtttcggatttcgggttttttttttcgcgcggtttttttttcgagttttttttttttcggatttcgggttttttttttcgcgcggtttttttttt

SEQ ID NO: 26296 - DNA, 692 bp, Artificial Sequence
  chemically treated genomic DNA (Homo sapiens) CpG-island No: 26296
aaaaaaaaaaccgcgcgaaaaaaaaaacccgaaatccgaaaaaaaaaaaactcgaaaaaaaaaccgcgcgaaaaaaaaaacccgaaatccgaaacaaaaaaaactcgaaaaaaaaaccgcgcgaaaaaaaaaacccgaaatccgaaacaaaaaaaactcgaaaaaaaaaccgcgaaaaaaaaaaaacccgaaatccgaaaaaaaaaaaactcgaaaaaaaaaccgcgcgaaaaaaaaaacctaaaatccgaaaaaaaaaaaactcgaaaaaaaaaccgcgcgaaaaaaaaaaactaaaatcgaaataaaaaaaaactcgaaaaaaaaaccgtacgaaaaaaaacccgaaatctaaaaaaaaaactcgaaaaaaaaaccgcgtaaaaaaaaaaacccaaaatccgaaacgaaaaaaactcgaaaaaaaaaccgcacgaaaaaaaaaacccgaaatccgaaaaaaaaaaaactcgaaaaaaaaaccgcgcgaaaaaaaaaacccgaaatccgaaaaaaaaaaaactccgaaaaaaaacctcgaaaaaaaaaaaacctaaaatccgaaacgaaaaaaactcgaaaaaaaaaccgcgcgaaaaaaaaaacctaaaatttaacgaaaaaaataaaaaacaaaaaaaaaaaaaatacccgataaaaaccgcgataaaaatacttatacaaaaaaaaac

SEQ ID NO: 26297 - DNA, 753 bp, Artificial Sequence
  chemically treated genomic DNA (Homo sapiens) CpG-island No: 26297
gtcgcggtttcggttttagaggtcgcgcgtcgcggggtcgggggaggtgggggagaggaggtcgttttggggtcgatttcgttcgtagttgggggttttcgttacgtgattagtcgggcgtttaggttacgtgtcggggcggggaggggggggttgtcgggggcgacgggcgttcgggtagtggcgcgcgcggtacgcgagtagcgtacgaggagaggtggcgcgggtcggagtcgcggagggaggcggcggcggcggcggcggcggcggcggcggcggcggtggaaggggcggtttcgcggtttcgcgttcgcgttacgtggtgcgaggcgggtagttattttgttataaatataaatatagaggagtcggttcgtcgtcggagtcggtcgagtttagagaagcgttcggagttaggcgcgcggggtcgttagcgaggatttttttcgtttttttttcgaggtcgtcgtagttcggtgcgttttttcgttttttcgttcgtttcggtttattttcgtcgtcgggatttttttttagagtcggttagtttcggggaggtttcgggagtcggcgttcggtttagggggcgatcgttcgtttttttcgtatttggcgtttttttttgaagggtacgtcgttttttcgggtcggcgcgttgttttttattttcgcgtttttaacggtcgttttcgggtttttgttaagttttgttttgggtcgtttgggggttttcgattttagcgttttagggtg

SEQ ID NO: 26298 - DNA, 753 bp, Artificial Sequence
  chemically treated genomic DNA (Homo sapiens) CpG-island No: 26298
caccctaaaacgctaaaatcgaaaacccccaaacgacccaaaacaaaacttaacaaaaacccgaaaacgaccgttaaaaacgcgaaaataaaaaacaacgcgccgacccgaaaaaacgacgtacccttcaaaaaaaaacgccaaatacgaaaaaaacgaacgatcgccccctaaaccgaacgccgactcccgaaacctccccgaaactaaccgactctaaaaaaaaatcccgacgacgaaaataaaccgaaacgaacgaaaaaacgaaaaaacgcaccgaactacgacgacctcgaaaaaaaaacgaaaaaaatcctcgctaacgaccccgcgcgcctaactccgaacgcttctctaaactcgaccgactccgacgacgaaccgactcctctatatttatatttataacaaaataactacccgcctcgcaccacgtaacgcgaacgcgaaaccgcgaaaccgccccttccaccgccgccgccgccgccgccgccgccgccgccgccgcctccctccgcgactccgacccgcgccacctctcctcgtacgctactcgcgtaccgcgcgcgccactacccgaacgcccgtcgcccccgacaacccccccctccccgccccgacacgtaacctaaacgcccgactaatcacgtaacgaaaacccccaactacgaacgaaatcgaccccaaaacgacctcctctcccccacctcccccgaccccgcgacgcgcgacctctaaaaccgaaaccgcgac

SEQ ID NO: 26299 - DNA, 753 bp, Artificial Sequence
  chemically treated genomic DNA (Homo sapiens) CpG-island No: 26299
tattttaggacgttagggtcgggggtttttaggcggtttagggtagggtttggtaggggttcgggggcgatcgttaggagcgcgggggtggaaggtagcgcgtcggttcgggaggacggcgtgttttttagggaggggcgttaggtgcgaggggggcgagcggtcgttttttaagtcgggcgtcggttttcggggttttttcgaggttggtcggttttgggggagggtttcggcggcggggatgggtcggagcgggcgggagagcgggaggacgtatcgggttgcggcggtttcggggaggagacgggggaggttttcgttggcggtttcgcgcgtttggtttcgggcgtttttttaagttcggtcggtttcggcggcgggtcggtttttttgtgtttgtgtttgtagtaagatggttgttcgtttcgtattacgtgacgcggacgcggggtcgcggggtcgttttttttatcgtcgtcgtcgtcgtcgtcgtcgtcgtcgtcgtcgttttttttcgcggtttcggttcgcgttattttttttcgtgcgttgttcgcgtgtcgcgcgcgttattgttcggacgttcgtcgttttcgatagttttttttttttcgtttcgatacgtgatttgggcgttcggttggttacgtgacgggggtttttagttgcgggcgggatcggttttagagcggtttttttttttttatttttttcggtttcgcgacgcgcgatttttgggatcgaggtcgcggt

SEQ ID NO: 26300 - DNA, 753 bp, Artificial Sequence
  chemically treated genomic DNA (Homo sapiens) CpG-island No: 26300
accgcgacctcgatcccaaaaatcgcgcgtcgcgaaaccgaaaaaaataaaaaaaaaaaaaccgctctaaaaccgatcccgcccgcaactaaaaacccccgtcacgtaaccaaccgaacgcccaaatcacgtatcgaaacgaaaaaaaaaaaactatcgaaaacgacgaacgtccgaacaataacgcgcgcgacacgcgaacaacgcacgaaaaaaaataacgcgaaccgaaaccgcgaaaaaaaacgacgacgacgacgacgacgacgacgacgacgacgataaaaaaaacgaccccgcgaccccgcgtccgcgtcacgtaatacgaaacgaacaaccatcttactacaaacacaaacacaaaaaaaccgacccgccgccgaaaccgaccgaacttaaaaaaacgcccgaaaccaaacgcgcgaaaccgccaacgaaaacctcccccgtctcctccccgaaaccgccgcaacccgatacgtcctcccgctctcccgcccgctccgacccatccccgccgccgaaaccctcccccaaaaccgaccaacctcgaaaaaaccccgaaaaccgacgcccgacttaaaaaacgaccgctcgcccccctcgcacctaacgcccctccctaaaaaacacgccgtcctcccgaaccgacgcgctaccttccacccccgcgctcctaacgatcgcccccgaacccctaccaaaccctaccctaaaccgcctaaaaacccccgaccctaacgtcctaaaata

SEQ ID NO: 26301 - DNA, 524 bp, Artificial Sequence
  chemically treated genomic DNA (Homo sapiens) CpG-island No: 26301
gtcggtcgttggcgagcgttttatttttgttttttttttttttttcgttagatttcggcgtcggagttttatttttattgacgggttttgattggtcgtttttgacgcgtttcggggttacgattggttcgttcggtttcggatatcgtttttttttttttgaggtaattacggcggttttaaggagggggtgggggaaggagggacggtcggtttcgttagttaggtagcgggagtcgtcgggagcggatggcggcggtcgtagcggttttattcgtcgtcgggggtgaggaggcggtagttacgattttcgtgttcgggtttttaggtttgtcggggagacgtagtgtagagcgggttttagaggacgtcgtggttatcgggattttgaatttgtttaatcggcgtttgaagtatttttttcggggcgcggttcgtagttacgatttgttagatattatttaggttggtgagtgtagtcgggtttcgggtttaatcgggttttttatttgtatagttttatt

SEQ ID NO: 26302 - DNA, 524 bp, Artificial Sequence
  chemically treated genomic DNA (Homo sapiens) CpG-island No: 26302
aataaaactatacaaataaaaaacccgattaaacccgaaacccgactacactcaccaacctaaataatatctaacaaatcgtaactacgaaccgcgccccgaaaaaaatacttcaaacgccgattaaacaaattcaaaatcccgataaccacgacgtcctctaaaacccgctctacactacgtctccccgacaaacctaaaaacccgaacacgaaaatcgtaactaccgcctcctcacccccgacgacgaataaaaccgctacgaccgccgccatccgctcccgacgactcccgctacctaactaacgaaaccgaccgtccctccttcccccaccccctccttaaaaccgccgtaattacctcaaaaaaaaaaaaacgatatccgaaaccgaacgaaccaatcgtaaccccgaaacgcgtcaaaaacgaccaatcaaaacccgtcaataaaaataaaactccgacgccgaaatctaacgaaaaaaaaaaaaaaaacaaaaataaaacgctcgccaacgaccgac

SEQ ID NO: 26303 - DNA, 524 bp, Artificial Sequence
  chemically treated genomic DNA (Homo sapiens) CpG-island No: 26303
ggtggggttatgtaaatgagggattcggttgggttcggggttcggttgtatttattagtttgggtgatgtttgataggtcgtagttacgggtcgcgtttcgggggaagtgttttaagcgtcggttagataggtttagggtttcggtggttacggcgttttttagggttcgttttgtattgcgttttttcggtagatttggagattcgggtacggaggtcgtggttgtcgtttttttattttcggcggcgagtggagtcgttacggtcgtcgttattcgttttcggcggttttcgttgtttgattgacgggatcggtcgttttttttttttttattttttttttggagtcgtcgtagttgttttaagggggagggagcggtgttcgggatcggacggattaatcgtggtttcgagacgcgttagaagcggttaattagaattcgttagtgggggtggagtttcggcgtcggagtttgacgagagaagggaggggaataaggatagagcgttcgttaacggtcgat

SEQ ID NO: 26304 - DNA, 524 bp, Artificial Sequence
  chemically treated genomic DNA (Homo sapiens) CpG-island No: 26304
atcgaccgttaacgaacgctctatccttattcccctcccttctctcgtcaaactccgacgccgaaactccacccccactaacgaattctaattaaccgcttctaacgcgtctcgaaaccacgattaatccgtccgatcccgaacaccgctccctcccccttaaaacaactacgacgactccaaaaaaaaaataaaaaaaaaaaaaacgaccgatcccgtcaatcaaacaacgaaaaccgccgaaaacgaataacgacgaccgtaacgactccactcgccgccgaaaataaaaaaacgacaaccacgacctccgtacccgaatctccaaatctaccgaaaaaacgcaatacaaaacgaaccctaaaaaacgccgtaaccaccgaaaccctaaacctatctaaccgacgcttaaaacacttcccccgaaacgcgacccgtaactacgacctatcaaacatcacccaaactaataaatacaaccgaaccccgaacccaaccgaatccctcatttacataaccccacc

SEQ ID NO: 26305 - DNA, 951 bp, Artificial Sequence
  chemically treated genomic DNA (Homo sapiens) CpG-island No: 26305
gtttttggcggggtgtgtcgtttttagttggatttttaatatagggaattggtaatacgtttttggcggggtgtgtcgtttttagttggatttttaatataaggaattggttagacgtttttggcggggtgtgtcgttttttattggatttttaacgtagggaattggtaatacgtttttggcggggtgtgtcgtttttagttggatttttaatatagggaattggttagacgtttttggcggggtgtgtcgtttttagttggatttttaatatagggaattggtaatacgtttttggcggggtgtgtcgtttttagttggatttttaatataaggaattggttagacgtttttggcggggtgtgttattttttattggatttttaacgtagggaattggttatacgtttttggcggggtgtgtcgtttttagttggatttttaatatagggaattggttagacgtttttggcggggtgtgtcgttttttattggatttttaatatagggaattggttagacgtttttggcggggtgtgtcgttttttattggatttttaacgtagggaattggttatacgtttttggcggggtgtgtcgtttttagttggatttttaacgtagggaattggttatacgtttttggcggggtgtgtcgtttttagttggatttttaatatagggaattggttagacgtttttggcggggtgtgtcgtttttagttggatttttaacgtagggaattggttagacgtttttggcggggtgtgtcgtttttagttggatttttaatatagggaattggttagacgtttttggcggggtgtgtcgttttttattggatttttaacgtagggaattggttagacgtttttggcggggtgtgtagtaggataagaggagttacgtagaaatatcgggttgtagtttttaattgggttgttgataat

SEQ ID NO: 26306 - DNA, 951 bp, Artificial Sequence
  chemically treated genomic DNA (Homo sapiens) CpG-island No: 26306
attatcaacaacccaattaaaaactacaacccgatatttctacgtaactcctcttatcctactacacaccccgccaaaaacgtctaaccaattccctacgttaaaaatccaataaaaaacgacacaccccgccaaaaacgtctaaccaattccctatattaaaaatccaactaaaaacgacacaccccgccaaaaacgtctaaccaattccctacgttaaaaatccaactaaaaacgacacaccccgccaaaaacgtctaaccaattccctatattaaaaatccaactaaaaacgacacaccccgccaaaaacgtataaccaattccctacgttaaaaatccaactaaaaacgacacaccccgccaaaaacgtataaccaattccctacgttaaaaatccaataaaaaacgacacaccccgccaaaaacgtctaaccaattccctatattaaaaatccaataaaaaacgacacaccccgccaaaaacgtctaaccaattccctatattaaaaatccaactaaaaacgacacaccccgccaaaaacgtataaccaattccctacgttaaaaatccaataaaaaataacacaccccgccaaaaacgtctaaccaattccttatattaaaaatccaactaaaaacgacacaccccgccaaaaacgtattaccaattccctatattaaaaatccaactaaaaacgacacaccccgccaaaaacgtctaaccaattccctatattaaaaatccaactaaaaacgacacaccccgccaaaaacgtattaccaattccctacgttaaaaatccaataaaaaacgacacaccccgccaaaaacgtctaaccaattccttatattaaaaatccaactaaaaacgacacaccccgccaaaaacgtattaccaattccctatattaaaaatccaactaaaaacgacacaccccgccaaaaac

SEQ ID NO: 26307 - DNA, 951 bp, Artificial Sequence
  chemically treated genomic DNA (Homo sapiens) CpG-island No: 26307
attattagtaatttaattagagattgtagttcgatatttttgcgtggttttttttattttgttatatatttcgttagggacgtttaattaattttttgcgttgaaaatttagtgggaagcgatatatttcgttagggacgtttaattaattttttgtgttgaaaatttagttggaagcgatatatttcgttagggacgtttaattaattttttgcgttgaaaatttagttggaagcgatatatttcgttagggacgtttaattaattttttgtgttgaaaatttagttggaagcgatatatttcgttagggacgtgtaattaattttttgcgttgaaaatttagttggaagcgatatatttcgttagggacgtgtaattaattttttgcgttgaaaatttagtgggaagcgatatatttcgttagggacgtttaattaattttttgtgttgaaaatttagtgggaagcgatatatttcgttagggacgtttaattaattttttgtgttgaaaatttagttggaagcgatatatttcgttagggacgtgtaattaattttttgcgttgaaaatttagtgggaagtgatatatttcgttagggacgtttaattaattttttgtgttgaaaatttagttggaagcgatatatttcgttagggacgtgttattaattttttgtgttgaaaatttagttggaagcgatatatttcgttagggacgtttaattaattttttgtgttgaaaatttagttggaagcgatatatttcgttagggacgtgttattaattttttgcgttgaaaatttagtgggaagcgatatatttcgttagggacgtttaattaattttttgtgttgaaaatttagttggaagcgatatatttcgttagggacgtgttattaattttttgtgttgaaaatttagttggaagcgatatatttcgttagggat

SEQ ID NO: 26308 - DNA, 951 bp, Artificial Sequence
  chemically treated genomic DNA (Homo sapiens) CpG-island No: 26308
atccctaacgaaatatatcgcttccaactaaattttcaacacaaaaaattaataacacgtccctaacgaaatatatcgcttccaactaaattttcaacacaaaaaattaattaaacgtccctaacgaaatatatcgcttcccactaaattttcaacgcaaaaaattaataacacgtccctaacgaaatatatcgcttccaactaaattttcaacacaaaaaattaattaaacgtccctaacgaaatatatcgcttccaactaaattttcaacacaaaaaattaataacacgtccctaacgaaatatatcgcttccaactaaattttcaacacaaaaaattaattaaacgtccctaacgaaatatatcacttcccactaaattttcaacgcaaaaaattaattacacgtccctaacgaaatatatcgcttccaactaaattttcaacacaaaaaattaattaaacgtccctaacgaaatatatcgcttcccactaaattttcaacacaaaaaattaattaaacgtccctaacgaaatatatcgcttcccactaaattttcaacgcaaaaaattaattacacgtccctaacgaaatatatcgcttccaactaaattttcaacgcaaaaaattaattacacgtccctaacgaaatatatcgcttccaactaaattttcaacacaaaaaattaattaaacgtccctaacgaaatatatcgcttccaactaaattttcaacgcaaaaaattaattaaacgtccctaacgaaatatatcgcttccaactaaattttcaacacaaaaaattaattaaacgtccctaacgaaatatatcgcttcccactaaattttcaacgcaaaaaattaattaaacgtccctaacgaaatatataacaaaataaaaaaaaccacgcaaaaatatcgaactacaatctctaattaaattactaataat

SEQ ID NO: 26309 - DNA, 1032 bp, Artificial Sequence
  chemically treated genomic DNA (Homo sapiens) CpG-island No: 26309
atttagcgttcgtttatgtatatacgtttatttcgtatttagagttcgttcgtgtatatatttattttgtatttagagtttatttatgtatatacgtttattttttatttagcgttggttcgtgtatatacgtttatttcgtatttagtattcgttcgtgtatatacgtttatttcgtatttagtgtttatgtatatatatttatttcgtaattagcgtttatttatgtatataggtttatttcgtatttagcgttcgttcgtgtatatacgtttatttcgtatttagcgttcgttcgtgtatatacgtttatttcgtatttagcgttcgttcgtgtatatacgtttatttcgtatttagcgttcgttcgtgtatatacgtttatttcgtatttagcgttcgttcgtgtatacgtttatttcgtatttagcgttcgttcgtgtatatacgtttatttcgtatttagcgttcgttcgtgtatatacgtttatttcgtatttagcgttcgttcgtgtatatacgtttatttcgtatttagcgttcgttcgtgtatacgtttatttcgtatttagcgttcgttcgtgtatacgtttatttcgtatttagcgttcgtttgtgtatatatgtttttttcgtatcgagcgtttgttcgtgtatacgtttattttatatttagtatttatttgtgtatatacgtttttttcgtatttagtattcgtgtatacgtttatttcgtatttagtatttgtttatgtatatatttttttcgtatttagcgttcgtttatgtatatatttattttgtatttagtatttatttgtgtatatatttttatttcgtatttagtatttgttcgtgtatatacgtttattttatatatatttttttcgtatttagcgttcgtcggtgtatatacgtttatttttcgtatttttcgtggaggcggtatttaggtagggaagtaaggatattttgcgtttatttttttttttaaatattaaggttttcgtaattcgaggaatatatttgata

SEQ ID NO: 26310 - DNA, 1032 bp, Artificial Sequence
  chemically treated genomic DNA (Homo sapiens) CpG-island No: 26310
tatcaaatatattcctcgaattacgaaaaccttaatatttaaaaaaaaaaataaacgcaaaatatccttacttccctacctaaataccgcctccacgaaaaatacgaaaaataaacgtatatacaccgacgaacgctaaatacgaaaaaaatatatataaaataaacgtatatacacgaacaaatactaaatacgaaataaaaatatatacacaaataaatactaaatacaaaataaatatatacataaacgaacgctaaatacgaaaaaaatatatacataaacaaatactaaatacgaaataaacgtatacacgaatactaaatacgaaaaaaacgtatatacacaaataaatactaaatataaaataaacgtatacacgaacaaacgctcgatacgaaaaaaacatatatacacaaacgaacgctaaatacgaaataaacgtatacacgaacgaacgctaaatacgaaataaacgtatacacgaacgaacgctaaatacgaaataaacgtatatacacgaacgaacgctaaatacgaaataaacgtatatacacgaacgaacgctaaatacgaaataaacgtatatacacgaacgaacgctaaatacgaaataaacgtatacacgaacgaacgctaaatacgaaataaacgtatatacacgaacgaacgctaaatacgaaataaacgtatatacacgaacgaacgctaaatacgaaataaacgtatatacacgaacgaacgctaaatacgaaataaacgtatatacacgaacgaacgctaaatacgaaataaacctatatacataaataaacgctaattacgaaataaatatatatacataaacactaaatacgaaataaacgtatatacacgaacgaatactaaatacgaaataaacgtatatacacgaaccaacgctaaataaaaaataaacgtatatacataaataaactctaaatacaaaataaatatatacacgaacgaactctaaatacgaaataaacgtatatacataaacgaacgctaaat

SEQ ID NO: 26311 - DNA, 1032 bp, Artificial Sequence
  chemically treated genomic DNA (Homo sapiens) CpG-island No: 26311
tgttaaatatatttttcggattgcgggggttttggtgtttagagagaggaatggacgtagagtgtttttgtttttttgtttggatgtcgtttttacgggaggtgcgggaggtgagcgtgtgtgtatcgacggacgttgggtgcgaggggagtgtgtgtgaggtgagcgtgtgtgtacggatagatgttgggtgcgaggtgagggtgtgtgtatagatggatgttgggtgtaaggtgagtatgtgtatggacggacgttaggtgcgaggggagtgtgtgtatggatagatgttgggtgcgaggtgagcgtgtgtacggatgttgggtgcgaggggagcgtgtgtgtatagatggatgttgggtgtgaggtaagcgtgtgtacggatagacgttcggtgcgaggggagtatgtgtgtatagacggacgttgggtacgaggtgagcgtgtgtacggacggacgttgggtgcgaggtgagcgtgtgtacggacggacgttgggtgcgaggtgagcgtgtgtgtacggacggacgttgggtgcgaggtgagcgtgtgtgtacggacggacgttgggtgcgaggtgagcgtgtgtgtacggacggacgttgggtgcgaggtgagcgtgtgtacggacggacgttgggtgcgaggtgagcgtgtgtgtacggacggacgttgggtgcgaggtgagcgtgtgtgtacggacggacgttgggtgcgaggtgagcgtgtgtgtacggacggacgttgggtgcgaggtgagcgtgtgtgtacggacggacgttgggtgcgaggtgagtttgtgtgtatggatggacgttggttgcgaggtgagtgtgtgtgtatggatattgggtgcgaggtgagcgtgtgtgtacggacggatgttgggtgcgaagtgagcgtgtgtgtacggattaacgttgggtgagagatgagcgtgtgtgtatggatggattttgggtgtaaggtgagtgtgtgtacggacggattttgggtgcgaggtgagcgtgtgtgtatggacggacgttgggt

SEQ ID NO: 26312 - DNA, 1032 bp, Artificial Sequence
  chemically treated genomic DNA (Homo sapiens) CpG-island No: 26312
acccaacgtccgtccatacacacacgctcacctcgcacccaaaatccgtccgtacacacactcaccttacacccaaaatccatccatacacacacgctcatctctcacccaacgttaatccgtacacacacgctcacttcgcacccaacatccgtccgtacacacacgctcacctcgcacccaatatccatacacacacactcacctcgcaaccaacgtccatccatacacacaaactcacctcgcacccaacgtccgtccgtacacacacgctcacctcgcacccaacgtccgtccgtacacacacgctcacctcgcacccaacgtccgtccgtacacacacgctcacctcgcacccaacgtccgtccgtacacacacgctcacctcgcacccaacgtccgtccgtacacacgctcacctcgcacccaacgtccgtccgtacacacacgctcacctcgcacccaacgtccgtccgtacacacacgctcacctcgcacccaacgtccgtccgtacacacacgctcacctcgcacccaacgtccgtccgtacacacgctcacctcgcacccaacgtccgtccgtacacacgctcacctcgtacccaacgtccgtctatacacacatactcccctcgcaccgaacgtctatccgtacacacgcttacctcacacccaacatccatctatacacacacgctcccctcgcacccaacatccgtacacacgctcacctcgcacccaacatctatccatacacacactcccctcgcacctaacgtccgtccatacacatactcaccttacacccaacatccatctatacacacaccctcacctcgcacccaacatctatccgtacacacacgctcacctcacacacactcccctcgcacccaacgtccgtcgatacacacacgctcacctcccgcacctcccgtaaaaacgacatccaaacaaaaaaacaaaaacactctacgtccattcctctctctaaacaccaaaacccccgcaatccgaaaaatatatttaaca

SEQ ID NO: 26313 - DNA, 1501 bp, Artificial Sequence
  chemically treated genomic DNA (Homo sapiens) CpG-island No: 26313
cgggtcggaggtgtcggttttttttttcgtttcgtttttttcgcggtgattttatttaaatttttttttttttcgttgttttatcggatttaggggttggggtcgtagttcggcgggtagcggtgtttatttttcgtataaatttgggttttttcgcggggtagttttcgggttttgtgttgggtcgtagtttcgggcggttttttcggggcgggacgtgttttcgttcgttttcgttcgttttcgtcgttttcgggtttcggttcgtttcgttttcgtagtcgtaggttcgttgcggcgttcgtttttttttttttttttcgggttttgttttgttcgtcgtttcgttttttgttcggtttttgttcggtttcgtttcgcgttcgttttttgttcgcgttcgtttcgttttttgttcggtttttgttcggtttttgttcgttttttgttcggttttttagcggcggcggttgtagcgcggcggttcgagcgggtgtatcgcggcggaggaggtagtatttcgcggcgttgacggttttggggagagtatggcgtcgaggtgaggtcggggttgcgggtaggggttgggggacgttaagatgcggttgcgggggtcgcgggggtcgcggggttcggtcgggttttgcgggggtcgcgggggttttgcggggtttgattcgtgtttgtttcgcgtaggtgtttttggttatggtcgcggcggcggcgttttttggacgtgttcgcgtttttggttttgttgttcggggttcgcgcggttttcgcggagttaggtaagattcgggcgggacgggaaggttcgcgtcggtgttcgtcggtttcgtcgttttggttggggttttcgttcggtttttttattttcgtttcggtcgttttgggtttagtttcggttttgtttacgcgcgtaggaggcgtcggagtcggacggagcggggcggggtggtcggagtttcgtttatttatttttttcgcggggttcgggtcgggaggggtgcgcggtgcgagcggtcggagttttcgcgcggggatcgaattttcgcggtcggcggggtcgtcggtgtcgggagggttcggggcggggtcgcggggtttcgggagacgcggtttttgtcgtcgttacggtttcgttttcgtagcgtcgggtttcgggattgatcgcgggcggaaggcggcggagcgcggggcgtcgttttcgcgtttttaatttgttgaggtttttcgtcgcgggtcgggttttgtgcgtttttgttttcgtcgtttttaggtttttgttttcgcgttcgtcgtggtgtcgggttgcgcggttttttttgatgttaatcgagcgtcgcgcggttcgagaataatgtttagaagtcgttgtttcgtcggtttcgtcgtttttcgtgcgcggtaaacggtgcgcggggttcgtggggatttttttgtttttaatttcgggatttagttttttattatttgttaatcggggttttttgttttt

SEQ ID NO: 26314 - DNA, 1501 bp, Artificial Sequence
  chemically treated genomic DNA (Homo sapiens) CpG-island No: 26314
aaaaacaaaaaaccccgattaacaaataataaaaaactaaatcccgaaattaaaaacaaaaaaatccccacgaaccccgcgcaccgtttaccgcgcacgaaaaacgacgaaaccgacgaaacaacgacttctaaacattattctcgaaccgcgcgacgctcgattaacatcaaaaaaaaccgcgcaacccgacaccacgacgaacgcgaaaacaaaaacctaaaaacgacgaaaacaaaaacgcacaaaacccgacccgcgacgaaaaacctcaacaaattaaaaacgcgaaaacgacgccccgcgctccgccgccttccgcccgcgatcaatcccgaaacccgacgctacgaaaacgaaaccgtaacgacgacaaaaaccgcgtctcccgaaaccccgcgaccccgccccgaaccctcccgacaccgacgaccccgccgaccgcgaaaattcgatccccgcgcgaaaactccgaccgctcgcaccgcgcacccctcccgacccgaaccccgcgaaaaaaataaataaacgaaactccgaccaccccgccccgctccgtccgactccgacgcctcctacgcgcgtaaacaaaaccgaaactaaacccaaaacgaccgaaacgaaaataaaaaaaccgaacgaaaaccccaaccaaaacgacgaaaccgacgaacaccgacgcgaaccttcccgtcccgcccgaatcttacctaactccgcgaaaaccgcgcgaaccccgaacaacaaaaccaaaaacgcgaacacgtccaaaaaacgccgccgccgcgaccataaccaaaaacacctacgcgaaacaaacacgaatcaaaccccgcaaaacccccgcgacccccgcaaaacccgaccgaaccccgcgacccccgcgacccccgcaaccgcatcttaacgtcccccaacccctacccgcaaccccgacctcacctcgacgccatactctccccaaaaccgtcaacgccgcgaaatactacctcctccgccgcgatacacccgctcgaaccgccgcgctacaaccgccgccgctaaaaaaccgaacaaaaaacgaacaaaaaccgaacaaaaaccgaacaaaaaacgaaacgaacgcgaacaaaaaacgaacgcgaaacgaaaccgaacaaaaaccgaacaaaaaacgaaacgacgaacaaaacaaaacccgaaaaaaaaaaaaaaaaacgaacgccgcaacgaacctacgactacgaaaacgaaacgaaccgaaacccgaaaacgacgaaaacgaacgaaaacgaacgaaaacacgtcccgccccgaaaaaaccgcccgaaactacgacccaacacaaaacccgaaaactaccccgcgaaaaaacccaaatttatacgaaaaataaacaccgctacccgccgaactacgaccccaacccctaaatccgataaaacaacgaaaaaaaaaaaaatttaaataaaatcaccgcgaaaaaaacgaaacgaaaaaaaaaaccgacacctccgacccg

SEQ ID NO: 26315 - DNA, 1501 bp, Artificial Sequence
  chemically treated genomic DNA (Homo sapiens) CpG-island No: 26315
ggaggtaggaggtttcggttagtaggtggtggggaattgggtttcggggttggaggtaggaaggtttttacgggtttcgcgtatcgtttgtcgcgtacgggaagcggcgaggtcggcggggtagcggtttttgggtattgttttcggatcgcgcggcgttcggttggtattaaaggggatcgcgtaattcgatattacggcgggcgcggggatagaggtttgagggcggcggggatagaggcgtataaggttcggttcgcggcgaggagttttaataggttggaaacgcggagacgacgtttcgcgtttcgtcgtttttcgttcgcggttagtttcgggattcggcgttgcggggacgaggtcgtgacggcgatagaggtcgcgtttttcgagatttcgcggtttcgtttcgagttttttcggtatcgacgatttcgtcggtcgcggaggttcggttttcgcgcggggatttcggtcgttcgtatcgcgtatttttttcggttcggatttcgcggggagaatgaatgggcgggatttcggttatttcgtttcgtttcgttcggtttcggcgttttttgcgcgcgtgggtagggtcggggttgaatttagagcggtcggggcgggggtgagggagtcgggcggggattttagttagggcggcgaggtcggcgggtatcggcgcgaattttttcgtttcgttcgggttttatttggtttcgcggaggtcgcgcggatttcgagtagtaggattaggggcgcgagtacgtttaggaggcgtcgtcgtcgcggttatggttaggggtatttgcgcgggataggtacgggttagatttcgtaggattttcgcgattttcgtaggattcggtcgagtttcgcgattttcgcgattttcgtagtcgtattttggcgttttttaatttttgttcgtagtttcggttttatttcggcgttatgttttttttaggatcgttagcgtcgcgggatgttgtttttttcgtcgcggtgtattcgttcggatcgtcgcgttgtagtcgtcgtcgttgggaggtcgggtagggggcgggtaggggtcgggtaggggtcgggtagggggcggggcgggcgcgggtagggggcgggcgcggggcggggtcgggtaggggtcgggtagggggcggagcgacgagtagggtaaggttcggggaggggagaggggggcgggcgtcgtagcggatttgcggttgcgaggacggggcgggtcgggattcgggggcggcggggacgggcgaggacggacggggatacgtttcgtttcgagggaatcgttcgaggttgcgatttagtatagggttcgggggttgtttcgcgaggaagtttaggtttatgcggaaggtgaatatcgttgttcgtcgggttacgattttagtttttgagttcggtggggtagcgggaaggggggagatttgaatagagttatcgcgggggggacgggacggaggaggaagtcggtattttcggttcg

SEQ ID NO: 26316 - DNA, 1501 bp, Artificial Sequence
  chemically treated genomic DNA (Homo sapiens) CpG-island No: 26316
cgaaccgaaaataccgacttcctcctccgtcccgtcccccccgcgataactctattcaaatctccccccttcccgctaccccaccgaactcaaaaactaaaatcgtaacccgacgaacaacgatattcaccttccgcataaacctaaacttcctcgcgaaacaacccccgaaccctatactaaatcgcaacctcgaacgattccctcgaaacgaaacgtatccccgtccgtcctcgcccgtccccgccgcccccgaatcccgacccgccccgtcctcgcaaccgcaaatccgctacgacgcccgcccccctctcccctccccgaaccttaccctactcgtcgctccgccccctacccgacccctacccgaccccgccccgcgcccgccccctacccgcgcccgccccgccccctacccgacccctacccgacccctacccgccccctacccgacctcccaacgacgacgactacaacgcgacgatccgaacgaatacaccgcgacgaaaaaaacaacatcccgcgacgctaacgatcctaaaaaaaacataacgccgaaataaaaccgaaactacgaacaaaaattaaaaaacgccaaaatacgactacgaaaatcgcgaaaatcgcgaaactcgaccgaatcctacgaaaatcgcgaaaatcctacgaaatctaacccgtacctatcccgcgcaaatacccctaaccataaccgcgacgacgacgcctcctaaacgtactcgcgcccctaatcctactactcgaaatccgcgcgacctccgcgaaaccaaataaaacccgaacgaaacgaaaaaattcgcgccgatacccgccgacctcgccgccctaactaaaatccccgcccgactccctcacccccgccccgaccgctctaaattcaaccccgaccctacccacgcgcgcaaaaaacgccgaaaccgaacgaaacgaaacgaaataaccgaaatcccgcccattcattctccccgcgaaatccgaaccgaaaaaaatacgcgatacgaacgaccgaaatccccgcgcgaaaaccgaacctccgcgaccgacgaaatcgtcgataccgaaaaaactcgaaacgaaaccgcgaaatctcgaaaaacgcgacctctatcgccgtcacgacctcgtccccgcaacgccgaatcccgaaactaaccgcgaacgaaaaacgacgaaacgcgaaacgtcgtctccgcgtttccaacctattaaaactcctcgccgcgaaccgaaccttatacgcctctatccccgccgccctcaaacctctatccccgcgcccgccgtaatatcgaattacgcgatcccctttaataccaaccgaacgccgcgcgatccgaaaacaatacccaaaaaccgctaccccgccgacctcgccgcttcccgtacgcgacaaacgatacgcgaaacccgtaaaaaccttcctacctccaaccccgaaacccaattccccaccacctactaaccgaaacctcctacctcc

SEQ ID NO: 26317 - DNA, 639 bp, Artificial Sequence
  chemically treated genomic DNA (Homo sapiens) CpG-island No: 26317
attttcggcggtcgcgtttcgtttcggaattacgtttcgttttcgtgaaatgcgtttttagtagttacggtaacgtttagtttcgtttttttcgcgtatgcgttatgcgttattatcggtaagtaggggcgggagggggaattgcgcgtgcgtagagttttcgtttttttgatcgtagcggttagaggttttattgtagattcggaggtcgtggttgtggttcgcggcggtgttgtcgcgggcgttttggcgtagtttacgtaggggtttttgagggttcgcgaggtcgggaggttcgggggtcgggaggtttcggggtcgggaagtcggtggattttgtaggttagtggggagggtacgcgagattgggggtcgggagggttgacggttggtggcgcggggcgggttcgtggggaggaggttcggggttggtaggggcgggagggttggacggcgggggcggggcggaggagggggttcgtagacggggtcggcgtcgggtgttttcgtttttttggagttggggtcggggcgggagtcgcgtatgagagtttgggtttttagtcggggggcgtcgtcgagttttatatttgcggttttttgggtgtttttaattttggagtttcggcgagggggtat

SEQ ID NO: 26318 - DNA, 639 bp, Artificial Sequence
  chemically treated genomic DNA (Homo sapiens) CpG-island No: 26318
ataccccctcgccgaaactccaaaattaaaaacacccaaaaaaccgcaaatataaaactcgacgacgccccccgactaaaaacccaaactctcatacgcgactcccgccccgaccccaactccaaaaaaacgaaaacacccgacgccgaccccgtctacgaaccccctcctccgccccgcccccgccgtccaaccctcccgcccctaccaaccccgaacctcctccccacgaacccgccccgcgccaccaaccgtcaaccctcccgacccccaatctcgcgtaccctccccactaacctacaaaatccaccgacttcccgaccccgaaacctcccgacccccgaacctcccgacctcgcgaaccctcaaaaacccctacgtaaactacgccaaaacgcccgcgacaacaccgccgcgaaccacaaccacgacctccgaatctacaataaaacctctaaccgctacgatcaaaaaaacgaaaactctacgcacgcgcaattccccctcccgcccctacttaccgataataacgcataacgcatacgcgaaaaaaacgaaactaaacgttaccgtaactactaaaaacgcatttcacgaaaacgaaacgtaattccgaaacgaaacgcgaccgccgaaaat

SEQ ID NO: 26319 - DNA, 639 bp, Artificial Sequence
  chemically treated genomic DNA (Homo sapiens) CpG-island No: 26319
gtgttttttcgtcggggttttagggttgggggtatttaggaggtcgtaggtgtggagttcgacggcgtttttcgattagaaatttaggtttttatgcgcggttttcgtttcgattttagttttagaggggcgagagtattcggcgtcgatttcgtttacggattttttttttcgtttcgttttcgtcgtttagttttttcgtttttattagtttcgggttttttttttacggattcgtttcgcgttattagtcgttagttttttcggtttttagtttcgcgtattttttttattggtttgtagggtttatcgatttttcgatttcgggatttttcgattttcggatttttcggtttcgcggatttttaggagtttttgcgtgggttgcgttagggcgttcgcgatagtatcgtcgcgaattatagttacggttttcgggtttgtaatggaatttttagtcgttgcggttaggagggcggagattttgcgtacgcgtagttttttttttcgtttttgtttgtcggtgatggcgtataacgtatgcgcggggagggcggagttgggcgttgtcgtggttattgggaacgtattttacgggggcggggcgtggtttcggggcggggcgcggtcgtcggaagt

SEQ ID NO: 26320 - DNA, 639 bp, Artificial Sequence
  chemically treated genomic DNA (Homo sapiens) CpG-island No: 26320
acttccgacgaccgcgccccgccccgaaaccacgccccgcccccgtaaaatacgttcccaataaccacgacaacgcccaactccgccctccccgcgcatacgttatacgccatcaccgacaaacaaaaacgaaaaaaaaaactacgcgtacgcaaaatctccgccctcctaaccgcaacgactaaaaattccattacaaacccgaaaaccgtaactataattcgcgacgatactatcgcgaacgccctaacgcaacccacgcaaaaactcctaaaaatccgcgaaaccgaaaaatccgaaaatcgaaaaatcccgaaatcgaaaaatcgataaaccctacaaaccaataaaaaaaatacgcgaaactaaaaaccgaaaaaactaacgactaataacgcgaaacgaatccgtaaaaaaaaaacccgaaactaataaaaacgaaaaaactaaacgacgaaaacgaaacgaaaaaaaaaatccgtaaacgaaatcgacgccgaatactctcgcccctctaaaactaaaatcgaaacgaaaaccgcgcataaaaacctaaatttctaatcgaaaaacgccgtcgaactccacacctacgacctcctaaatacccccaaccctaaaaccccgacgaaaaaacac

SEQ ID NO: 26321 - DNA, 777 bp, Artificial Sequence
  chemically treated genomic DNA (Homo sapiens) CpG-island No: 26321
aaaggggcggggtcggcgggtagcgtgcggtagtgcggagtttttgagatcggcgggtatacgggggtttgtggttttcgtcgtagtagtggttgtcgtcgtcgtttggttttcgtcggtttgcgggaggcgggttatggcggcggcggtagtgagagttgtgaatgaatttttcgggtggacgagggaagaagaaaggtttcggcggcgttagtaattcggtgttttttaggttttcgtttttttgtttggttttcgtttttttcgtcgtcgggtcggttttttcgttcgagtcgtcgtataagcggaatttgtattattttttttattcgttgtttgtaggtttcgcgttgttgcgtttggtcgttttttatttggggttttttttcgtgtggttttgttagcgtttttttcgcgtttttatggtagttaagaggagtttcggggtcgcgttagtatttgtttcggtttcggtttcggcgtcggtgtcgggcggcgaggtcgagcgcgttcgagttttttataaataggttttcgagtatatttttattgttttgcgtatcgatgaggatgagaaaggtaattagggggttgggggagggggcggcggcgtcgggaagaaggcggtggggtcgtcgggggagggtaatatttgcgttttttttttgcgggaggggacggtgtattttcggaattgatatgtttcgggagattgttttttcgtaggtcggagttttattttttagtatttttaaaatttttttttttttagggtat

SEQ ID NO: 26322 - DNA, 777 bp, Artificial Sequence
  chemically treated genomic DNA (Homo sapiens) CpG-island No: 26322
ataccctaaaaaaaaaaaaattttaaaaatactaaaaaataaaactccgacctacgaaaaaacaatctcccgaaacatatcaattccgaaaatacaccgtcccctcccgcaaaaaaaaaacgcaaatattaccctcccccgacgaccccaccgccttcttcccgacgccgccgccccctcccccaaccccctaattacctttctcatcctcatcgatacgcaaaacaataaaaatatactcgaaaacctatttataaaaaactcgaacgcgctcgacctcgccgcccgacaccgacgccgaaaccgaaaccgaaacaaatactaacgcgaccccgaaactcctcttaactaccataaaaacgcgaaaaaaacgctaacaaaaccacacgaaaaaaaaccccaaataaaaaacgaccaaacgcaacaacgcgaaacctacaaacaacgaataaaaaaaataatacaaattccgcttatacgacgactcgaacgaaaaaaccgacccgacgacgaaaaaaacgaaaaccaaacaaaaaaacgaaaacctaaaaaacaccgaattactaacgccgccgaaacctttcttcttccctcgtccacccgaaaaattcattcacaactctcactaccgccgccgccataacccgcctcccgcaaaccgacgaaaaccaaacgacgacgacaaccactactacgacgaaaaccacaaacccccgtatacccgccgatctcaaaaactccgcactaccgcacgctacccgccgaccccgccccttt

SEQ ID NO: 26323 - DNA, 777 bp, Artificial Sequence
  chemically treated genomic DNA (Homo sapiens) CpG-island No: 26323
gtgttttgaaaggggagaggttttaagaatattagaagatgaggtttcgatttacgggaaagtagtttttcggggtatattaatttcgggggtgtatcgttttttttcgtagaaaagggacgtaggtgttgttttttttcggcgattttatcgtttttttttcggcgtcgtcgtttttttttttagttttttagttattttttttatttttatcgatgcgtagggtaatggagatgtattcgaaggtttgtttgtggaagattcggacgcgttcggtttcgtcgttcggtatcggcgtcggggtcgaggtcgaggtaggtgttggcgcggtttcggagttttttttggttgttatgagggcgcgggagaagcgttggtagagttatacgaagaggagttttaggtggaaggcgattaaacgtagtagcgcgaagtttataaatagcgggtaggagaaatagtataggtttcgtttatgcggcgattcgggcggaggggtcggttcggcggcgggaggggcgggggttaggtaagggggcggaggtttgggaggtatcgggttgttggcgtcgtcggagtttttttttttttttcgtttattcggagaatttatttatagtttttattgtcgtcgtcgttataattcgtttttcgtagatcgacgggaattaagcgacggcggtagttattgttacggcgggggttatagattttcgtgtgttcgtcggttttaggagtttcgtattgtcgtacgttgttcgtcggtttcgttttttt

SEQ ID NO: 26324 - DNA, 777 bp, Artificial Sequence
  chemically treated genomic DNA (Homo sapiens) CpG-island No: 26324
aaaaaaacgaaaccgacgaacaacgtacgacaatacgaaactcctaaaaccgacgaacacacgaaaatctataacccccgccgtaacaataactaccgccgtcgcttaattcccgtcgatctacgaaaaacgaattataacgacgacgacaataaaaactataaataaattctccgaataaacgaaaaaaaaaaaaaaactccgacgacgccaacaacccgatacctcccaaacctccgcccccttacctaacccccgcccctcccgccgccgaaccgacccctccgcccgaatcgccgcataaacgaaacctatactatttctcctacccgctatttataaacttcgcgctactacgtttaatcgccttccacctaaaactcctcttcgtataactctaccaacgcttctcccgcgccctcataacaaccaaaaaaaactccgaaaccgcgccaacacctacctcgacctcgaccccgacgccgataccgaacgacgaaaccgaacgcgtccgaatcttccacaaacaaaccttcgaatacatctccattaccctacgcatcgataaaaataaaaaaaataactaaaaaactaaaaaaaaaaacgacgacgccgaaaaaaaaacgataaaatcgccgaaaaaaaacaacacctacgtcccttttctacgaaaaaaaacgatacacccccgaaattaatataccccgaaaaactactttcccgtaaatcgaaacctcatcttctaatattcttaaaacctctcccctttcaaaacac

SEQ ID NO: 26325 - DNA, 883 bp, Artificial Sequence
  chemically treated genomic DNA (Homo sapiens) CpG-island No: 26325
gtggggcggggtggaagaggtagttcggtcggttgggtttcggggcgggtttttcgttcgtacgttttttaatttatttattcgggttttcgcggcggcggggcgttttatcggtcgcggggcggtttttttttttagggtggtttgagcgcggggcggaggtcgtttttttttttttttcgggcgtcgtcgggttaggggatcgaagtttttttcgtcgttgagggttgggggacgaagtagggggttatggattatgatttttaataattttttttagtttttaggaggtcgggttcggtagcggggggttcgagggcgggcgggcggattagcggcgacgacgcggggatggcggatcggagggtggttcgtgtcgcgtaacggtagacggtatgggttgtcgtcggtagacggttttgtttttttggtttcgcgtcgttcgagttacggtttgttttagttaataattcgtattttttcgcgtttcggttcgaagtgagtaaagttaatgaaaagttttatttttagtaattttgcgtacggattcggtttttttatttttgcgtgatgcgttttttcgttttgtaggggcggggttagggttcggtcgggattattttttagttagtttcgcgttttagttcgttggtatttcgcggagtagtttttgtgtttttttgtgttcgtcggtcgtgcgttcggtttttcgtttttttttttttgttatagcgtcgcgtcgtattttttttttttatttttatattattttgaatttgtgcgcgtcgtgtgaggtgtttttttaggggcgtttcgtgagggtcggggattatttggggtcgggttgtttacgagtcgggtatagtgtattttttttttagtt

SEQ ID NO: 26326 - DNA, 883 bp, Artificial Sequence
  chemically treated genomic DNA (Homo sapiens) CpG-island No: 26326
aactaaaaaaaaaatacactatacccgactcgtaaacaacccgaccccaaataatccccgaccctcacgaaacgcccctaaaaaaacacctcacacgacgcgcacaaattcaaaataatataaaaataaaaaaaaaaaatacgacgcgacgctataacaaaaaaaaaaaaacgaaaaaccgaacgcacgaccgacgaacacaaaaaaacacaaaaactactccgcgaaataccaacgaactaaaacgcgaaactaactaaaaaataatcccgaccgaaccctaaccccgcccctacaaaacgaaaaaacgcatcacgcaaaaataaaaaaaccgaatccgtacgcaaaattactaaaaataaaacttttcattaactttactcacttcgaaccgaaacgcgaaaaaatacgaattattaactaaaacaaaccgtaactcgaacgacgcgaaaccaaaaaaacaaaaccgtctaccgacgacaacccataccgtctaccgttacgcgacacgaaccaccctccgatccgccatccccgcgtcgtcgccgctaatccgcccgcccgccctcgaaccccccgctaccgaacccgacctcctaaaaactaaaaaaaattattaaaaatcataatccataaccccctacttcgtcccccaaccctcaacgacgaaaaaaacttcgatcccctaacccgacgacgcccgaaaaaaaaaaaaaaacgacctccgccccgcgctcaaaccaccctaaaaaaaaaaaccgccccgcgaccgataaaacgccccgccgccgcgaaaacccgaataaataaattaaaaaacgtacgaacgaaaaacccgccccgaaacccaaccgaccgaactacctcttccaccccgccccac

SEQ ID NO: 26327 - DNA, 883 bp, Artificial Sequence
  chemically treated genomic DNA (Homo sapiens) CpG-island No: 26327
aattaaagggagagtgtattgtgttcggttcgtgagtaattcggttttaggtggttttcggtttttacggagcgtttttgggagaatattttatacgacgcgtataagtttagagtggtatgggaatgaaggaaaggagtgcggcgcggcgttgtgatagggaggggaagacggggagtcggacgtacgatcggcgagtatagaagggtataggagttgtttcgcgagatattagcgagttgaggcgcggggttggttgggaagtagtttcggtcgggttttggtttcgtttttgtagggcggagggacgtattacgtaggggtggggaagtcggattcgtgcgtagggttgttaagggtgaaattttttattgattttgtttatttcgggtcggggcgcgggaaggtgcgggttgttggttgaggtaagtcgtggttcgggcgacgcggggttaggagggtaggatcgtttgtcggcgatagtttatatcgtttgtcgttgcgcgatacgaattatttttcgattcgttattttcgcgtcgtcgtcgttagttcgttcgttcgttttcgggtttttcgttgtcgagttcgattttttaagagttgaaagaaattattgagagttatagtttatagttttttgtttcgttttttaatttttaacgacgaaaaggatttcggttttttggttcggcgacgttcgggaaggaaaggagagcgattttcgtttcgcgtttaggttattttggagggagaagtcgtttcgcggtcggtagagcgtttcgtcgtcgcggagattcgagtgagtgagttggggggcgtgcgggcggggggttcgtttcgagatttagtcggtcggattattttttttatttcgttttat

SEQ ID NO: 26328 - DNA, 883 bp, Artificial Sequence
  chemically treated genomic DNA (Homo sapiens) CpG-island No: 26328
ataaaacgaaataaaaaaaataatccgaccgactaaatctcgaaacgaaccccccgcccgcacgccccccaactcactcactcgaatctccgcgacgacgaaacgctctaccgaccgcgaaacgacttctccctccaaaataacctaaacgcgaaacgaaaatcgctctcctttccttcccgaacgtcgccgaaccaaaaaaccgaaatccttttcgtcgttaaaaattaaaaaacgaaacaaaaaactataaactataactctcaataatttctttcaactcttaaaaaatcgaactcgacaacgaaaaacccgaaaacgaacgaacgaactaacgacgacgacgcgaaaataacgaatcgaaaaataattcgtatcgcgcaacgacaaacgatataaactatcgccgacaaacgatcctaccctcctaaccccgcgtcgcccgaaccacgacttacctcaaccaacaacccgcaccttcccgcgccccgacccgaaataaacaaaatcaataaaaaatttcacccttaacaaccctacgcacgaatccgacttccccacccctacgtaatacgtccctccgccctacaaaaacgaaaccaaaacccgaccgaaactacttcccaaccaaccccgcgcctcaactcgctaatatctcgcgaaacaactcctatacccttctatactcgccgatcgtacgtccgactccccgtcttcccctccctatcacaacgccgcgccgcactcctttccttcattcccataccactctaaacttatacgcgtcgtataaaatattctcccaaaaacgctccgtaaaaaccgaaaaccacctaaaaccgaattactcacgaaccgaacacaatacactctccctttaatt

SEQ ID NO: 26329 - DNA, 529 bp, Artificial Sequence
  chemically treated genomic DNA (Homo sapiens) CpG-island No: 26329
acgagtatcgcgggggaggggagggagttattatgttcgtcggaaatttttcgttgagtcgttcgttttgtatttgtttcggagtttatggttcggacgtttgttcgagtcgtttttcggggttttttttttagtttcgagcgtttggtcgtgttcgcggcgatagtatcgtttcgttacggtttttgcgggagggggaattgaggggacgacgcgggttttggaaatatttcggattcgtttcgggtaggtatgagtttttcgagcgttttgtgatttttcggggggtttaacgtcgaaagaaaggcgagggagattttggggtttgggttacgttgtgcgggagtaagaggagtcgaggacgaggttgacggtcgtgaaattagtcgagtgttataaaggattttttttttatcgtttttggcgtttttttttttgtagtttggagggtcggttttggttttgcgtaggcgcgcgggcgtagttttttttttaatttttgtttgttttttttggttagcgattttag

SEQ ID NO: 26330 - DNA, 529 bp, Artificial Sequence
  chemically treated genomic DNA (Homo sapiens) CpG-island No: 26330
ctaaaatcgctaaccaaaaaaaacaaacaaaaattaaaaaaaaaactacgcccgcgcgcctacgcaaaaccaaaaccgaccctccaaactacaaaaaaaaaaacgccaaaaacgataaaaaaaaaatcctttataacactcgactaatttcacgaccgtcaacctcgtcctcgactcctcttactcccgcacaacgtaacccaaaccccaaaatctccctcgcctttctttcgacgttaaaccccccgaaaaatcacaaaacgctcgaaaaactcatacctacccgaaacgaatccgaaatatttccaaaacccgcgtcgtcccctcaattccccctcccgcaaaaaccgtaacgaaacgatactatcgccgcgaacacgaccaaacgctcgaaactaaaaaaaaaaccccgaaaaacgactcgaacaaacgtccgaaccataaactccgaaacaaatacaaaacgaacgactcaacgaaaaatttccgacgaacataataactccctcccctcccccgcgatactcgt

SEQ ID NO: 26331 - DNA, 529 bp, Artificial Sequence
  chemically treated genomic DNA (Homo sapiens) CpG-island No: 26331
ttggggtcgttggttagaaagagtaaataagagttgggagaggggttgcgttcgcgcgtttgcgtagagttagagtcggttttttaggttgtaaggaaaggagcgttagaggcggtgaggggaaggttttttgtggtattcggttagttttacggtcgttagtttcgttttcggttttttttattttcgtatagcgtggtttaggttttagagtttttttcgtttttttttcgacgttgagtttttcgaggaattataaggcgttcggaagatttatgtttgttcgaaacgggttcgaaatgtttttagagttcgcgtcgtttttttagttttttttttcgtagaggtcgtaacggggcgatgttatcgtcgcggatacggttagacgttcggagttggagggaaggtttcgggaaacggttcgggtaaacgttcgaattatgggtttcgaggtaggtgtagggcggacgatttagcggggggttttcggcgggtatggtgatttttttttttttttcgcgatattcgt

SEQ ID NO: 26332 - DNA, 529 bp, Artificial Sequence
  chemically treated genomic DNA (Homo sapiens) CpG-island No: 26332
acgaatatcgcgaaaaaaaaaaaaaaatcaccatacccgccgaaaaccccccgctaaatcgtccgccctacacctacctcgaaacccataattcgaacgtttacccgaaccgtttcccgaaaccttccctccaactccgaacgtctaaccgtatccgcgacgataacatcgccccgttacgacctctacgaaaaaaaaaactaaaaaaacgacgcgaactctaaaaacatttcgaacccgtttcgaacaaacataaatcttccgaacgccttataattcctcgaaaaactcaacgtcgaaaaaaaaacgaaaaaaactctaaaacctaaaccacgctatacgaaaataaaaaaaaccgaaaacgaaactaacgaccgtaaaactaaccgaataccacaaaaaaccttcccctcaccgcctctaacgctcctttccttacaacctaaaaaaccgactctaactctacgcaaacgcgcgaacgcaacccctctcccaactcttatttactctttctaaccaacgaccccaa

SEQ ID NO: 26333 - DNA, 747 bp, Artificial Sequence
  chemically treated genomic DNA (Homo sapiens) CpG-island No: 26333
gcgtatagaaatacggacgcgtagaggcggtttcggagacgtttatttttttcggttcggtttcgttttcgggttttatttatcgaggtcgtagatttcgcggcgtaggttaagacggtcgcgttttttcgttatggtacgtagtatgtgttgtagcgagcgtttttcggtttcggcgtcgttcgtaggttcgggggcggcggcggcggggagggcgggcggttcggttcgtagttcgtcgcgagtattaaggaagttatagttcgtttttgtgcgcgtcgtcgtcgtcgtcgtcgtcgttattattcgttaaatatagtatcggcgagcgtattttcgcgtcgtcgtcgttcgcgcgttttcggtttcgttcgtttcgtttcggttcggttcggtttcggttcggtttcgtttttttttcgtttcggtttcgtttttgttttttttcgtttcgtttttgaacggttcggatttatttcggttttttggtttcgttttttgattttttttgtttcgtttatttttaaacggttagttttcgttaattttcggatgtttaggatagttttttttaaatcgttcgcggggtttcgtttttatttaaggttttaaacgttttattaacgggattacgtttttgagtttttttcgtcgtttttttagggtattttttttttttttcgttgttattttacgggatgtgtattttgttattcgttttgtgcgttgttatttttattaagtttt

SEQ ID NO: 26334 - DNA, 747 bp, Artificial Sequence
  chemically treated genomic DNA (Homo sapiens) CpG-island No: 26334
aaaacttaataaaaataacaacgcacaaaacgaataacaaaatacacatcccgtaaaataacaacgaaaaaaaaaaaaaataccctaaaaaaacgacgaaaaaaactcaaaaacgtaatcccgttaataaaacgtttaaaaccttaaataaaaacgaaaccccgcgaacgatttaaaaaaaactatcctaaacatccgaaaattaacgaaaactaaccgtttaaaaataaacgaaacaaaaaaaatcaaaaaacgaaaccaaaaaaccgaaataaatccgaaccgttcaaaaacgaaacgaaaaaaaacaaaaacgaaaccgaaacgaaaaaaaaacgaaaccgaaccgaaaccgaaccgaaccgaaacgaaacgaacgaaaccgaaaacgcgcgaacgacgacgacgcgaaaatacgctcgccgatactatatttaacgaataataacgacgacgacgacgacgacgacgcgcacaaaaacgaactataacttccttaatactcgcgacgaactacgaaccgaaccgcccgccctccccgccgccgccgcccccgaacctacgaacgacgccgaaaccgaaaaacgctcgctacaacacatactacgtaccataacgaaaaaacgcgaccgtcttaacctacgccgcgaaatctacgacctcgataaataaaacccgaaaacgaaaccgaaccgaaaaaaataaacgtctccgaaaccgcctctacgcgtccgtatttctatacgc

SEQ ID NO: 26335 - DNA, 747 bp, Artificial Sequence
  chemically treated genomic DNA (Homo sapiens) CpG-island No: 26335
gggatttggtggaggtggtaacgtatagggcgggtgataaagtatatatttcgtggggtagtagcgggggaggggagaggtgttttgaaggggcggcgggaggggtttagaggcgtgatttcgttggtggggcgtttaggattttgggtggaggcgggatttcgcgagcggtttgagggaggttgttttgggtattcgaagattggcggagattggtcgtttggaagtgggcggggtaagggaggttagggggcggggttagggagtcggggtgggttcgggtcgtttagaggcggggcgggaggggataggggcggggtcggggcggggaaggggcggggtcggatcggggtcgggtcgggtcggggcggggcgagcggagtcgggggcgcgcgggcggcggcggcgcggaggtgcgttcgtcggtgttgtgtttggcgggtggtggcggcggcggcggcgacggcgacgcgtatagaggcggattgtggtttttttggtgttcgcggcgggttgcgggtcgggtcgttcgtttttttcgtcgtcgtcgttttcgagtttgcgggcggcgtcgaggtcgaggagcgttcgttgtagtatatgttgcgtgttatagcggaggagcgcggtcgttttagtttgcgtcgcgaggtttgcggtttcggtgagtgggattcgggggcgaggtcgggtcgggagaggtgagcgttttcggggtcgtttttgcgcgttcgtgtttttgtgcgt

SEQ ID NO: 26336 - DNA, 747 bp, Artificial Sequence
  chemically treated genomic DNA (Homo sapiens) CpG-island No: 26336
acgcacaaaaacacgaacgcgcaaaaacgaccccgaaaacgctcacctctcccgacccgacctcgcccccgaatcccactcaccgaaaccgcaaacctcgcgacgcaaactaaaacgaccgcgctcctccgctataacacgcaacatatactacaacgaacgctcctcgacctcgacgccgcccgcaaactcgaaaacgacgacgacgaaaaaaacgaacgacccgacccgcaacccgccgcgaacaccaaaaaaaccacaatccgcctctatacgcgtcgccgtcgccgccgccgccgccaccacccgccaaacacaacaccgacgaacgcacctccgcgccgccgccgcccgcgcgcccccgactccgctcgccccgccccgacccgacccgaccccgatccgaccccgccccttccccgccccgaccccgcccctatcccctcccgccccgcctctaaacgacccgaacccaccccgactccctaaccccgccccctaacctcccttaccccgcccacttccaaacgaccaatctccgccaatcttcgaatacccaaaacaacctccctcaaaccgctcgcgaaatcccgcctccacccaaaatcctaaacgccccaccaacgaaatcacgcctctaaacccctcccgccgccccttcaaaacacctctcccctcccccgctactaccccacgaaatatatactttatcacccgccctatacgttaccacctccaccaaatccc

SEQ ID NO: 26337 - DNA, 686 bp, Artificial Sequence
  chemically treated genomic DNA (Homo sapiens) CpG-island No: 26337
gtaaagtgttttcgttttttttttgtaaatgaggaaacgggacgcgcggttcgtcgggttaggtagggttaggacgcggattttaggtttaagcgttttttagcgtaagttttttttcgtatattcgatcgcgtttgcgttggagatttcgggggcgtggttttttcggtgggcgggatcgtggttatcgaggtgggcggtgttagaggatttggcggcggggcggggcggggcgcgcgttttggtttcgttttttttcggggcggggttttcggggatcgcggggtcgttggtttcgggacggaacgtttacgcggttggggcgggcgcgcgggggaagggtttgcggcggcgtcgttgtcggttaacgcggaggggcgtttggaggcggcgtggcgttcgttttggtttcgatttcggttttcgttttcgtttttagttcgcgtgtttgcgtagtttttttttcgagaattatttttttgtttcgtttagcgttaggggtgcgcggtcgtcgagagatttcggaggcgtagtcggttgcggaggcgaagaggtggtagcgcgagttgggattagcgtttcggaggcgtcgtaggtgagggggcggggcgggttcgcggtttttgtattcggagtttttggggatttcgagatttttaggattcgtttcggtttcggggttattt

SEQ ID NO: 26338 - DNA, 686 bp, Artificial Sequence
  chemically treated genomic DNA (Homo sapiens) CpG-island No: 26338
aaataaccccgaaaccgaaacgaatcctaaaaatctcgaaatccccaaaaactccgaatacaaaaaccgcgaacccgccccgccccctcacctacgacgcctccgaaacgctaatcccaactcgcgctaccacctcttcgcctccgcaaccgactacgcctccgaaatctctcgacgaccgcgcacccctaacgctaaacgaaacaaaaaaataattctcgaaaaaaaaactacgcaaacacgcgaactaaaaacgaaaacgaaaaccgaaatcgaaaccaaaacgaacgccacgccgcctccaaacgcccctccgcgttaaccgacaacgacgccgccgcaaacccttcccccgcgcgcccgccccaaccgcgtaaacgttccgtcccgaaaccaacgaccccgcgatccccgaaaaccccgccccgaaaaaaaacgaaaccaaaacgcgcgccccgccccgccccgccgccaaatcctctaacaccgcccacctcgataaccacgatcccgcccaccgaaaaaaccacgcccccgaaatctccaacgcaaacgcgatcgaatatacgaaaaaaaacttacgctaaaaaacgcttaaacctaaaatccgcgtcctaaccctacctaacccgacgaaccgcgcgtcccgtttcctcatttacaaaaaaaaaacgaaaacactttac

SEQ ID NO: 26339 - DNA, 686 bp, Artificial Sequence
  chemically treated genomic DNA (Homo sapiens) CpG-island No: 26339
gggtggtttcggggtcggggcggattttgaggatttcggggtttttaggggtttcggatgtagggatcgcgggttcgtttcgtttttttatttgcggcgttttcgagacgttggttttagttcgcgttgttattttttcgttttcgtagtcggttacgttttcggggtttttcggcggtcgcgtatttttgacgttgggcggggtaaggggatggttttcggggaggggattgcgtaggtacgcgggttagaagcgagagcgagagtcggagtcggagttagagcggacgttacgtcgtttttaggcgttttttcgcgttagtcggtagcggcgtcgtcgtaaatttttttttcgcgcgttcgttttagtcgcgtgaacgtttcgtttcgaaattaacggtttcgcggttttcggaggtttcgtttcggggaagggcgaagttaggacgcgcgtttcgtttcgtttcgtcgttagattttttggtatcgtttatttcggtgattacggtttcgtttatcggggaggttacgttttcggggtttttagcgtaggcgcggtcggatgtgcgggggagggtttgcgttggggagcgtttgggtttagagttcgcgttttagttttatttggttcggcgagtcgcgcgtttcgtttttttatttgtagaaagggggcgggagtattttgt

SEQ ID NO: 26340 - DNA, 686 bp, Artificial Sequence
  chemically treated genomic DNA (Homo sapiens) CpG-island No: 26340
acaaaatactcccgccccctttctacaaataaaaaaacgaaacgcgcgactcgccgaaccaaataaaactaaaacgcgaactctaaacccaaacgctccccaacgcaaaccctcccccgcacatccgaccgcgcctacgctaaaaaccccgaaaacgtaacctccccgataaacgaaaccgtaatcaccgaaataaacgataccaaaaaatctaacgacgaaacgaaacgaaacgcgcgtcctaacttcgcccttccccgaaacgaaacctccgaaaaccgcgaaaccgttaatttcgaaacgaaacgttcacgcgactaaaacgaacgcgcgaaaaaaaaatttacgacgacgccgctaccgactaacgcgaaaaaacgcctaaaaacgacgtaacgtccgctctaactccgactccgactctcgctctcgcttctaacccgcgtacctacgcaatcccctccccgaaaaccatccccttaccccgcccaacgtcaaaaatacgcgaccgccgaaaaaccccgaaaacgtaaccgactacgaaaacgaaaaaataacaacgcgaactaaaaccaacgtctcgaaaacgccgcaaataaaaaaacgaaacgaacccgcgatccctacatccgaaacccctaaaaaccccgaaatcctcaaaatccgccccgaccccgaaaccaccc

SEQ ID NO: 26341 - DNA, 842 bp, Artificial Sequence
  chemically treated genomic DNA (Homo sapiens) CpG-island No: 26341
tttcgttttttcgttttatttttttttttttcgtttatttttttttgggtttttttttcggttattcgttttgtttcggtttttgtaattttgtttttcgttttttttttttttttttttcgtttgcgtttttttcgtggggtcgtggtaatttcgtgtttcgtttgtttaatgagaatacggtttggggcggggcgcggttaggatcggagcggaagtggcgatcggagcggaagtggagttatcgttatcgtcgtcgtcgatttcggagtcggggtagtcgtcgtcgtcgtcgtcgttgtagttattgtaggtatcgttgtcgtcgtttgagtagtgggtttaggaaggaagaggttatttcgttcggagtttcgttcggaagggtttttgttttttgtagtttttttacggtgagtgcggcgcggggttcgatcggggttttcgggggtttaaattcgaagtttttttttggttgttgcgacgacggcggtttagtgggtgggtttcgtggggtagcggcgcgttgtttttttcgtttcgcgcggtcgtcggcggcgaggttagatttcgtagcggtttttttttgttttcggggtcgggttttttattttttggagaggttcgggtcgtttgaggttttgtcggtcgggcggggtgtaatttcgtattgtgtcgtaagggatagcggagtcggggatttcggatttttttttattatttgtttcgggttttacgcgatttttttttgcgttttggtcggtaagaacgttttttttagttttgttatttttgtttcgtgttttttggtttttagaaattaaaatttaattaaacgcgga

SEQ ID NO: 26342 - DNA, 842 bp, Artificial Sequence
  chemically treated genomic DNA (Homo sapiens) CpG-island No: 26342
tccgcgtttaattaaattttaatttctaaaaaccaaaaaacacgaaacaaaaataacaaaactaaaaaaaacgttcttaccgaccaaaacgcaaaaaaaaatcgcgtaaaacccgaaacaaataataaaaaaaaatccgaaatccccgactccgctatcccttacgacacaatacgaaattacaccccgcccgaccgacaaaacctcaaacgacccgaacctctccaaaaaataaaaaacccgaccccgaaaacaaaaaaaaaccgctacgaaatctaacctcgccgccgacgaccgcgcgaaacgaaaaaaacaacgcgccgctaccccacgaaacccacccactaaaccgccgtcgtcgcaacaaccaaaaaaaaacttcgaatttaaacccccgaaaaccccgatcgaaccccgcgccgcactcaccgtaaaaaaactacaaaaaacaaaaacccttccgaacgaaactccgaacgaaataacctcttccttcctaaacccactactcaaacgacgacaacgatacctacaataactacaacgacgacgacgacgacgactaccccgactccgaaatcgacgacgacgataacgataactccacttccgctccgatcgccacttccgctccgatcctaaccgcgccccgccccaaaccgtattctcattaaacaaacgaaacacgaaattaccacgaccccacgaaaaaaacgcaaacgaaaaaaaaaaaaaaaaaaaacgaaaaacaaaattacaaaaaccgaaacaaaacgaataaccgaaaaaaaaacccaaaaaaaaataaacgaaaaaaaaaaaaataaaacgaaaaaacgaaa

SEQ ID NO: 26343 - DNA, 842 bp, Artificial Sequence
  chemically treated genomic DNA (Homo sapiens) CpG-island No: 26343
ttcgcgtttgattaaattttaatttttggaaattagaaagtacggagtagaggtgatagggttgaaggggacgtttttgtcgattaagacgtagggaggggtcgcgtggggttcgaagtagatagtgagggagggttcgggattttcggtttcgttgttttttacggtatagtacggagttgtatttcgttcggtcggtaggattttaggcggttcgagtttttttaagaggtaaagggttcggtttcggaaatagggaggggtcgttgcgaggtttggtttcgtcgtcggcggtcgcgcggagcgaaagaggtagcgcgtcgttattttacggggtttatttattgggtcgtcgtcgtcgtagtagttagagaggggtttcgagtttgggttttcgggggtttcggtcggatttcgcgtcgtatttatcgtgggagggttgtagggaataaagattttttcgagcgaagtttcgagcgagatgatttttttttttttaagtttattatttaggcggcggtagcggtgtttgtagtggttgtagcggcggcggcggcggcgattatttcggtttcggaatcggcggcggcggtggcggtagttttattttcgtttcgatcgttattttcgtttcggttttggtcgcgtttcgttttaaatcgtgtttttattgggtaagcgaggtacggggttgttacggttttacgggaggggcgtagacggaagggaggaggaagaagagcgaaaggtagggttgtaggggtcggggtagggcggatggtcgggggagggatttaggaggaggtgggcggagaagaaggaaatggggcgggggagcggga

SEQ ID NO: 26344 - DNA, 842 bp, Artificial Sequence
  chemically treated genomic DNA (Homo sapiens) CpG-island No: 26344
tcccgctcccccgccccatttccttcttctccgcccacctcctcctaaatccctcccccgaccatccgccctaccccgacccctacaaccctacctttcgctcttcttcctcctcccttccgtctacgcccctcccgtaaaaccgtaacaaccccgtacctcgcttacccaataaaaacacgatttaaaacgaaacgcgaccaaaaccgaaacgaaaataacgatcgaaacgaaaataaaactaccgccaccgccgccgccgattccgaaaccgaaataatcgccgccgccgccgccgctacaaccactacaaacaccgctaccgccgcctaaataataaacttaaaaaaaaaaaaatcatctcgctcgaaacttcgctcgaaaaaatctttattccctacaaccctcccacgataaatacgacgcgaaatccgaccgaaacccccgaaaacccaaactcgaaacccctctctaactactacgacgacgacgacccaataaataaaccccgtaaaataacgacgcgctacctctttcgctccgcgcgaccgccgacgacgaaaccaaacctcgcaacgacccctccctatttccgaaaccgaaccctttacctcttaaaaaaactcgaaccgcctaaaatcctaccgaccgaacgaaatacaactccgtactataccgtaaaaaacaacgaaaccgaaaatcccgaaccctccctcactatctacttcgaaccccacgcgacccctccctacgtcttaatcgacaaaaacgtccccttcaaccctatcacctctactccgtactttctaatttccaaaaattaaaatttaatcaaacgcgaa

SEQ ID NO: 26345 - DNA, 2050 bp, Artificial Sequence
  chemically treated genomic DNA (Homo sapiens) CpG-island No: 26345
tcgcgcgggtgcgtcgagttcgtttttcgtttgtagcgaaggtttcggcgttagcgcggtcggttttttttttttcgttttagtttagggtttattttgggcgagggtttgatttggcggtttatacgtagttcggtggtttcgattttgagtaggttcgcggtgtatatatagaatcgaattcgaatacgtatacgtatattttacgcgcggagggttcgtaacgtcgcgtatagatagttttttcgcgtcggcggcgaaacgttcggttttgttcgtattaagaggggttagaggttacgggaggtcgaggtcgagggtattcggtagcggagcgcggcgggaagggggcgttttatttaggggtcgggaacggtcgatggcggggcgtaggagcgttcggtataaattcgggagttgtttttttttggtgtatagagcgcggggtttacggtcgcggggtagttgttgggacgagtcgggcgggtttcgagtcgagggagcggagtttcggaaaatcgtcgcgagtttcgcgcgtattcggtttacgtttgggggttcggtttcgggagttgcgaggtcggtttggagggattcggtttcggaggcgcggacggaacggcgtgggtcgggcggggatttcgaggggagcggttcgggcgttttttttgcgggtgggcgggcgggcggtttgtagaggagggggcggcgggagtaggcggcgtcgatttcgtttcgcgcggcgttggtcgtttcgttgtagtcggggtttcggcggggttgcgggagtcgcgttggtcgggtcgcggtttcgtttgtttttatttgttcgttcgttttatcgcggatggcgtcggcgatcggggttgcggggtgcgcgcgggttgttcggaggcgttgtggcgggcgagggcgcgggtggttggagtattcggttcgcggtaaggatcggttggcggtaggcggggcgcgcggagttcggggttcggtcgagacggagcgaaagagaaagtaagatcgaggatcgggtagtttggtcggggtagttttgttttcgtcgggttcggttgtgttaggtaagcgggtatagaggggtttacgcgggttcgagggcggtagcggcgggtcgggaggtggtcgggtgggttttttttgtcggaggtattgtcgtttcggcggttcgcgtaggttgtcggcgttttagaggagcgttttttattacgcggggtatagtcggggataaattttacgattatagtttttagttcgggtaaaagtttttattttgttttttaagtggttgcggttgtttcgtcgtcgttatttttgtttttgcgttcgcggagtcgggtgggcgtcggttcgcgttttttttttcgttttttttcggttcggggttttttttttttgcgttcggttggcggacgttaaaggcggtgttttagcgtttattattttaaaagttcggaatatgatttgattaggattgagagttattcggagagagagagggagagagcgagcggggaggaaaaagttgtttttttttttcgttaatttttcgttaatttttatttttcgtttttttttattttcggtttttttttttcgttttttttttcggtttttatcgcgcgtttcgggttttcgggttcgagcgtttgatattggtggggggggagggggtttcgcggggagggggtcggcgttttcggggagcgcgcggttcgggcgtttcgagttttcgcgtcgagttcggtcgtttcggagcgcgggaggcggagtagtttttcgggtcgcgcggtcgagtcgggggttcggagtcgtaggcgcgtcggtcgcgtttcgacgcgtatttttggttcgggcgtttcggttcggcggttcgggtttcggcggcgcggcgcggtcgagcgcgggagatttatttttggttagttttttcgttttcgttttggatcgtatggtgtcggttcgcggaatttttttttttttttttgagtttagaagtagttatatattatttttatttttttagtattgttagttt

SEQ ID NO: 26346 - DNA, 2050 bp, Artificial Sequence
  chemically treated genomic DNA (Homo sapiens) CpG-island No: 26346
aaactaacaatactaaaaaaataaaaataatatataactacttctaaactcaaaaaaaaaaaaaaaaattccgcgaaccgacaccatacgatccaaaacgaaaacgaaaaaactaaccaaaaataaatctcccgcgctcgaccgcgccgcgccgccgaaacccgaaccgccgaaccgaaacgcccgaaccaaaaatacgcgtcgaaacgcgaccgacgcgcctacgactccgaacccccgactcgaccgcgcgacccgaaaaactactccgcctcccgcgctccgaaacgaccgaactcgacgcgaaaactcgaaacgcccgaaccgcgcgctccccgaaaacgccgaccccctccccgcgaaaccccctccccccccaccaatatcaaacgctcgaacccgaaaacccgaaacgcgcgataaaaaccgaaaaaaaaaacgaaaaaaaaaaaccgaaaataaaaaaaaacgaaaaataaaaattaacgaaaaattaacgaaaaaaaaaaacaactttttcctccccgctcgctctctccctctctctctccgaataactctcaatcctaatcaaatcatattccgaacttttaaaataataaacgctaaaacaccgcctttaacgtccgccaaccgaacgcaaaaaaaaaaaaccccgaaccgaaaaaaaacgaaaaaaaaaacgcgaaccgacgcccacccgactccgcgaacgcaaaaacaaaaataacgacgacgaaacaaccgcaaccacttaaaaaacaaaataaaaacttttacccgaactaaaaactataatcgtaaaatttatccccgactataccccgcgtaataaaaaacgctcctctaaaacgccgacaacctacgcgaaccgccgaaacgacaatacctccgacaaaaaaaacccacccgaccacctcccgacccgccgctaccgccctcgaacccgcgtaaacccctctatacccgcttacctaacacaaccgaacccgacgaaaacaaaactaccccgaccaaactacccgatcctcgatcttactttctctttcgctccgtctcgaccgaaccccgaactccgcgcgccccgcctaccgccaaccgatccttaccgcgaaccgaatactccaaccacccgcgccctcgcccgccacaacgcctccgaacaacccgcgcgcaccccgcaaccccgatcgccgacgccatccgcgataaaacgaacgaacaaataaaaacaaacgaaaccgcgacccgaccaacgcgactcccgcaaccccgccgaaaccccgactacaacgaaacgaccaacgccgcgcgaaacgaaatcgacgccgcctactcccgccgccccctcctctacaaaccgcccgcccgcccacccgcaaaaaaaacgcccgaaccgctcccctcgaaatccccgcccgacccacgccgttccgtccgcgcctccgaaaccgaatccctccaaaccgacctcgcaactcccgaaaccgaacccccaaacgtaaaccgaatacgcgcgaaactcgcgacgattttccgaaactccgctccctcgactcgaaacccgcccgactcgtcccaacaactaccccgcgaccgtaaaccccgcgctctatacaccaaaaaaaaacaactcccgaatttataccgaacgctcctacgccccgccatcgaccgttcccgacccctaaataaaacgcccccttcccgccgcgctccgctaccgaataccctcgacctcgacctcccgtaacctctaacccctcttaatacgaacaaaaccgaacgtttcgccgccgacgcgaaaaaactatctatacgcgacgttacgaaccctccgcgcgtaaaatatacgtatacgtattcgaattcgattctatatatacaccgcgaacctactcaaaatcgaaaccaccgaactacgtataaaccgccaaatcaaaccctcgcccaaaataaaccctaaactaaaacgaaaaaaaaaaaaccgaccgcgctaacgccgaaaccttcgctacaaacgaaaaacgaactcgacgcacccgcgcga

SEQ ID NO: 26347 - DNA, 2050 bp, Artificial Sequence
  chemically treated genomic DNA (Homo sapiens) CpG-island No: 26347
aaattgataatgttggggagatgaagatagtgtgtggttgtttttggatttaaggaggaggagagagatttcgcgagtcgatattatgcgatttaaggcgagggcgaggaagttagttaaaagtaagtttttcgcgttcggtcgcgtcgcgtcgtcggggttcgggtcgtcgggtcggggcgttcgggttaggggtgcgcgtcggggcgcggtcggcgcgtttgcggtttcgggttttcggttcggtcgcgcggttcggggggttgtttcgtttttcgcgtttcggggcgatcgggttcggcgcggaggttcggggcgttcgggtcgcgcgtttttcgaaggcgtcggtttttttttcgcggaattttttttttttttattagtgttaggcgttcgggttcgggaattcgaggcgcgcggtgggggtcggggaggggggcggagggggagggtcgggggtggaggggagcgaaaagtgaaagttagcgaaaagttgacgaaaggggagagtaattttttttttttcgttcgtttttttttttttttttttcgagtggtttttagttttggttaaattatatttcgggtttttgaaatagtgggcgttagagtatcgtttttggcgttcgttagtcgggcgtagaggagggagatttcgagtcggggaggggcggaggagggggcgcgggtcggcgtttattcggtttcgcgggcgtaggggtaggggtggcgacggcgggatagtcgtagttatttggggagtaaaatggagatttttgttcgggttgggaattgtggtcgtgaagtttattttcggttgtgtttcgcgtggtggagggcgtttttttgggacgtcggtagtttgcgcgggtcgtcggggcgatagtgttttcgataggagggatttattcggttatttttcgattcgtcgttgtcgttttcgggttcgcgtggatttttttgtattcgtttgtttggtatagtcgggttcggcggggatagagttgtttcggttaggttgttcggttttcggttttattttttttttcgtttcgtttcggtcgagtttcgggtttcgcgcgtttcgtttgtcgttagtcggtttttgtcgcgggtcgggtgttttagttattcgcgttttcgttcgttatagcgttttcgagtagttcgcgcgtatttcgtagtttcggtcgtcggcgttattcgcggtgaggcgggcgggtaggtgaggataggcggagtcgcggttcggttagcgcggttttcgtagtttcgtcgaagtttcggttgtagcgaagcggttagcgtcgcgcggagcggaatcggcgtcgtttgttttcgtcgtttttttttttgtaggtcgttcgttcgtttattcgtagaagaggcgttcgggtcgtttttttcgaggttttcgttcgatttacgtcgtttcgttcgcgttttcggggtcgggtttttttaggtcggtttcgtagttttcggggtcgagtttttaaacgtgagtcgggtgcgcgcgggattcgcggcggtttttcgaagtttcgttttttcggttcggggttcgttcggttcgttttaatagttgtttcgcggtcgtaggtttcgcgttttgtgtattagggaaaagtagttttcgagtttgtgtcggacgtttttgcgtttcgttatcggtcgttttcggtttttgggtgaggcgtttttttttcgtcgcgtttcgttgtcgggtgttttcggtttcggtttttcgtgatttttgattttttttggtgcgaataagatcgggcgtttcgtcgtcgacgcgaaggggttgtttgtgcgcggcgttgcgggtttttcgcgcgtggggtgtgcgtgtgcgtgttcgggttcggttttgtgtgtgtatcgcgggtttgtttagagtcgggattatcgggttgcgtgtgggtcgttaggttaggttttcgtttaggatgggttttaagttggaacgagaaaggggaaatcggtcgcgttgacgtcggggttttcgttgtaagcgagaggcggattcggcgtattcgcgcgg

SEQ ID NO: 26348 - DNA, 2050 bp, Artificial Sequence
  chemically treated genomic DNA (Homo sapiens) CpG-island No: 26348
ccgcgcgaatacgccgaatccgcctctcgcttacaacgaaaaccccgacgtcaacgcgaccgatttcccctttctcgttccaacttaaaacccatcctaaacgaaaacctaacctaacgacccacacgcaacccgataatcccgactctaaacaaacccgcgatacacacacaaaaccgaacccgaacacgcacacgcacaccccacgcgcgaaaaacccgcaacgccgcgcacaaacaaccccttcgcgtcgacgacgaaacgcccgatcttattcgcaccaaaaaaaatcaaaaatcacgaaaaaccgaaaccgaaaacacccgacaacgaaacgcgacgaaaaaaaaacgcctcacccaaaaaccgaaaacgaccgataacgaaacgcaaaaacgtccgacacaaactcgaaaactacttttccctaatacacaaaacgcgaaacctacgaccgcgaaacaactattaaaacgaaccgaacgaaccccgaaccgaaaaaacgaaacttcgaaaaaccgccgcgaatcccgcgcgcacccgactcacgtttaaaaactcgaccccgaaaactacgaaaccgacctaaaaaaacccgaccccgaaaacgcgaacgaaacgacgtaaatcgaacgaaaacctcgaaaaaaacgacccgaacgcctcttctacgaataaacgaacgaacgacctacaaaaaaaaaaacgacgaaaacaaacgacgccgattccgctccgcgcgacgctaaccgcttcgctacaaccgaaacttcgacgaaactacgaaaaccgcgctaaccgaaccgcgactccgcctatcctcacctacccgcccgcctcaccgcgaataacgccgacgaccgaaactacgaaatacgcgcgaactactcgaaaacgctataacgaacgaaaacgcgaataactaaaacacccgacccgcgacaaaaaccgactaacgacaaacgaaacgcgcgaaacccgaaactcgaccgaaacgaaacgaaaaaaaaaataaaaccgaaaaccgaacaacctaaccgaaacaactctatccccgccgaacccgactataccaaacaaacgaatacaaaaaaatccacgcgaacccgaaaacgacaacgacgaatcgaaaaataaccgaataaatccctcctatcgaaaacactatcgccccgacgacccgcgcaaactaccgacgtcccaaaaaaacgccctccaccacgcgaaacacaaccgaaaataaacttcacgaccacaattcccaacccgaacaaaaatctccattttactccccaaataactacgactatcccgccgtcgccacccctacccctacgcccgcgaaaccgaataaacgccgacccgcgccccctcctccgcccctccccgactcgaaatctccctcctctacgcccgactaacgaacgccaaaaacgatactctaacgcccactatttcaaaaacccgaaatataatttaaccaaaactaaaaaccactcgaaaaaaaaaaaaaaaaaaacgaacgaaaaaaaaaaaattactctcccctttcgtcaacttttcgctaactttcacttttcgctcccctccacccccgaccctccccctccgcccccctccccgacccccaccgcgcgcctcgaattcccgaacccgaacgcctaacactaataaaaaaaaaaaaaattccgcgaaaaaaaaaccgacgccttcgaaaaacgcgcgacccgaacgccccgaacctccgcgccgaacccgatcgccccgaaacgcgaaaaacgaaacaaccccccgaaccgcgcgaccgaaccgaaaacccgaaaccgcaaacgcgccgaccgcgccccgacgcgcacccctaacccgaacgccccgacccgacgacccgaaccccgacgacgcgacgcgaccgaacgcgaaaaacttacttttaactaacttcctcgccctcgccttaaatcgcataatatcgactcgcgaaatctctctcctcctccttaaatccaaaaacaaccacacactatcttcatctccccaacattatcaattt

SEQ ID NO: 26349 - DNA, 1020 bp, Artificial Sequence
  chemically treated genomic DNA (Homo sapiens) CpG-island No: 26349
aaaaaaattttgtaatgtatttattatttttatcgtcgcgtcgtcgtcgtcgtcgtcgtcgtttcggcgcgggattggggggtttttttcggttttttcggttttcgttttatttattttttttttttttttttttttttttttttagcgtagttcggaattggttttttaagaaaatatttcgtgttcggcgttttcgttcggggttcgtatttcggatattttaaaaggatttaggtggtttcggaggcgaggtgattatttttttattttgtttttgcgtcgcggcgcgtcgcgttgttgttttcgttttagtcggggtcgaagatggggcggcggttgcggttttttatacgatttttttggatttcggggtatacgcgtcgatagttcggacgcgagttcgggttggttttgtttcgttttattgcgtttgattattaatttaaaagttttgcgtttttcgtcgtttcggttcgttttttttttgtatttttttttcggttttcgttttcgttttgcgatcgttggagggggcgtcggggttcgcgcgttagaattcggttttttcgaagtttttttcgggttttatcgtttttttcgcgtttttcggttttcgttttttttttttcgtttttatttaacggttgttgtttcgggtttcgcggtttaaaaataatagcggaggcgtcgttagtttcgcgtttcgttattgtttaggtcggcgggcggtattcggattcgtcgttttcggtttttcgcgaggttacggaggttaatacgtttcgtacggggggatagcgcgggggtagtcgtttaaatattaggcgttttcggttggtcgttttagggcgttcgtattttttcgttcgcgtttttttgtcgtcgcgtttttaaggtgagtattcggttgcgcgagcgttcgagttgggttattttcggggattcgggttattggggatatttttttttggtttttcggggtttaggtgcgtagcgggcggaaaggttagcggcgta

SEQ ID NO: 26350 - DNA, 1020 bp, Artificial Sequence
  chemically treated genomic DNA (Homo sapiens) CpG-island No: 26350
tacgccgctaacctttccgcccgctacgcacctaaaccccgaaaaaccaaaaaaaaatatccccaataacccgaatccccgaaaataacccaactcgaacgctcgcgcaaccgaatactcaccttaaaaacgcgacgacaaaaaaacgcgaacgaaaaaatacgaacgccctaaaacgaccaaccgaaaacgcctaatatttaaacgactacccccgcgctatccccccgtacgaaacgtattaacctccgtaacctcgcgaaaaaccgaaaacgacgaatccgaataccgcccgccgacctaaacaataacgaaacgcgaaactaacgacgcctccgctattatttttaaaccgcgaaacccgaaacaacaaccgttaaataaaaacgaaaaaaaaaaaacgaaaaccgaaaaacgcgaaaaaaacgataaaacccgaaaaaaacttcgaaaaaaccgaattctaacgcgcgaaccccgacgccccctccaacgatcgcaaaacgaaaacgaaaaccgaaaaaaaaatacaaaaaaaaaacgaaccgaaacgacgaaaaacgcaaaacttttaaattaataatcaaacgcaataaaacgaaacaaaaccaacccgaactcgcgtccgaactatcgacgcgtataccccgaaatccaaaaaaatcgtataaaaaaccgcaaccgccgccccatcttcgaccccgactaaaacgaaaacaacaacgcgacgcgccgcgacgcaaaaacaaaataaaaaaataatcacctcgcctccgaaaccacctaaatccttttaaaatatccgaaatacgaaccccgaacgaaaacgccgaacacgaaatattttcttaaaaaaccaattccgaactacgctaaaaaaaaaaaaaaaaaaaaaaaaaaaaaataaataaaacgaaaaccgaaaaaaccgaaaaaaaccccccaatcccgcgccgaaacgacgacgacgacgacgacgacgcgacgataaaaataataaatacattacaaaattttttt

SEQ ID NO: 26351 - DNA, 1020 bp, Artificial Sequence
  chemically treated genomic DNA (Homo sapiens) CpG-island No: 26351
tgcgtcgttggttttttcgttcgttacgtatttgggtttcgagaggttagaggggagtgtttttagtggttcgggttttcgaaggtggtttagttcgggcgttcgcgtagtcgggtatttattttgggggcgcggcggtaggagagcgcgggcggagaggtgcgggcgttttgggacgattagtcgaggacgtttggtgtttggacggttgttttcgcgttgttttttcgtgcgaggcgtgttggttttcgtggtttcgcgagggatcgagggcggcgggttcgagtgtcgttcgtcggtttgggtagtggcggagcgcggagttggcggcgttttcgttgttgtttttgagtcgcgaagttcgaagtagtagtcgttgggtgggggcgaaggggaggaggcgggggtcgggaggcgcgaggggggcggtggggttcggagggggtttcggaggagtcgggttttggcgcgcgagtttcgacgttttttttagcgatcgtagggcggggacgggggtcgaggggagaatgtaggagaaaagcgggtcggggcgacggggaacgtaaagtttttaaattagtaattaaacgtagtaaaacggagtaaaattagttcggattcgcgttcgaattatcggcgcgtgtgtttcgagatttaaggaagtcgtgtggaaaatcgtagtcgtcgttttattttcggtttcggttggggcgggagtagtagcgcgacgcgtcgcgacgtaggggtagggtggggggatagttatttcgttttcggggttatttgggtttttttaaagtgttcggggtgcgggtttcgggcgggagcgtcgaatacggaatgtttttttaaagggttagtttcgagttgcgttgaaaagggggggggggagaggggggagagataagtgagacgaagatcgagaaggtcgaggagagttttttaatttcgcgtcgaggcggcggcggcggcggcggcggcgcgacgatgaggatgatgaatatattgtaaagttttttt

SEQ ID NO: 26352 - DNA, 1020 bp, Artificial Sequence
  chemically treated genomic DNA (Homo sapiens) CpG-island No: 26352
aaaaaaactttacaatatattcatcatcctcatcgtcgcgccgccgccgccgccgccgccgcctcgacgcgaaattaaaaaactctcctcgaccttctcgatcttcgtctcacttatctctcccccctctcccccccccccttttcaacgcaactcgaaactaaccctttaaaaaaacattccgtattcgacgctcccgcccgaaacccgcaccccgaacactttaaaaaaacccaaataaccccgaaaacgaaataactatccccccaccctacccctacgtcgcgacgcgtcgcgctactactcccgccccaaccgaaaccgaaaataaaacgacgactacgattttccacacgacttccttaaatctcgaaacacacgcgccgataattcgaacgcgaatccgaactaattttactccgttttactacgtttaattactaatttaaaaactttacgttccccgtcgccccgacccgcttttctcctacattctcccctcgacccccgtccccgccctacgatcgctaaaaaaaacgtcgaaactcgcgcgccaaaacccgactcctccgaaaccccctccgaaccccaccgcccccctcgcgcctcccgacccccgcctcctccccttcgcccccacccaacgactactacttcgaacttcgcgactcaaaaacaacaacgaaaacgccgccaactccgcgctccgccactacccaaaccgacgaacgacactcgaacccgccgccctcgatccctcgcgaaaccacgaaaaccaacacgcctcgcacgaaaaaacaacgcgaaaacaaccgtccaaacaccaaacgtcctcgactaatcgtcccaaaacgcccgcacctctccgcccgcgctctcctaccgccgcgcccccaaaataaatacccgactacgcgaacgcccgaactaaaccaccttcgaaaacccgaaccactaaaaacactcccctctaacctctcgaaacccaaatacgtaacgaacgaaaaaaccaacgacgca

SEQ ID NO: 26353 - DNA, 549 bp, Artificial Sequence
  chemically treated genomic DNA (Homo sapiens) CpG-island No: 26353
tacgcgcgttcgtagtcgtggagtggcggttttttttgtcgttcgtaatttcggggtcgtcggtttgcgtatatcgggagtaatttcgttatttatagcgttcgcgttttgcggttcgcgcggaattgcgcgcgggaaggtggtagagcgacgttttagaacgttgtttgcgtagacgttgtcgttgtttttagattttaattcggtcgcgcgcgggcggggttttggtagtaacgaaaatggcgagtttcgtagtttttcgggttcggcggttatatttcgggagtcgttaggtgggagttcgtttttcgtgtttttaaacgtttagagttcgggatacgggtcggcggtcgggttattaagttagttttcggaatcggttcgcgtcggaatttagattcggtttgtaaagttcgtttttgtcgttttttcgtagcgcgttttgttttttattgtcggtttttttagttttaaaattaaattttgttttttattttgagagattaatatttcgtaggtgaaatcgtggagacggagttgcggtgggtt

SEQ ID NO: 26354 - DNA, 549 bp, Artificial Sequence
  chemically treated genomic DNA (Homo sapiens) CpG-island No: 26354
aacccaccgcaactccgtctccacgatttcacctacgaaatattaatctctcaaaataaaaaacaaaatttaattttaaaactaaaaaaaccgacaataaaaaacaaaacgcgctacgaaaaaacgacaaaaacgaactttacaaaccgaatctaaattccgacgcgaaccgattccgaaaactaacttaataacccgaccgccgacccgtatcccgaactctaaacgtttaaaaacacgaaaaacgaactcccacctaacgactcccgaaatataaccgccgaacccgaaaaactacgaaactcgccattttcgttactaccaaaaccccgcccgcgcgcgaccgaattaaaatctaaaaacaacgacaacgtctacgcaaacaacgttctaaaacgtcgctctaccaccttcccgcgcgcaattccgcgcgaaccgcaaaacgcgaacgctataaataacgaaattactcccgatatacgcaaaccgacgaccccgaaattacgaacgacaaaaaaaaccgccactccacgactacgaacgcgcgta

SEQ ID NO: 26355 - DNA, 549 bp, Artificial Sequence
  chemically treated genomic DNA (Homo sapiens) CpG-island No: 26355
aatttatcgtagtttcgtttttacggttttatttgcggggtattaattttttaggatgaaaggtaaaatttggttttgaagttaagagggtcggtagtggggggtagggcgcgttgcggagagacggtaggagcgggttttgtaagtcgagtttggatttcggcgcgagtcgatttcgggaattggtttggtgattcggtcgtcggttcgtgtttcgggttttgggcgtttggggatacggaaggcgggtttttatttggcgattttcggaatgtggtcgtcgggttcggaaggttacgaggttcgttattttcgttgttgttagggtttcgttcgcgcgcggtcgaattgggatttgaaggtagcggtagcgtttacgtaagtagcgttttggagcgtcgttttgttattttttcgcgcgtagtttcgcgcgagtcgtaggacgcgggcgttgtgggtaacgaagttgttttcggtgtgcgtagatcggcggtttcggggttgcgggcggtaggagggatcgttattttacggttgcgggcgcgcgtg

SEQ ID NO: 26356 - DNA, 549 bp, Artificial Sequence
  chemically treated genomic DNA (Homo sapiens) CpG-island No: 26356
cacgcgcgcccgcaaccgtaaaataacgatccctcctaccgcccgcaaccccgaaaccgccgatctacgcacaccgaaaacaacttcgttacccacaacgcccgcgtcctacgactcgcgcgaaactacgcgcgaaaaaataacaaaacgacgctccaaaacgctacttacgtaaacgctaccgctaccttcaaatcccaattcgaccgcgcgcgaacgaaaccctaacaacaacgaaaataacgaacctcgtaaccttccgaacccgacgaccacattccgaaaatcgccaaataaaaacccgccttccgtatccccaaacgcccaaaacccgaaacacgaaccgacgaccgaatcaccaaaccaattcccgaaatcgactcgcgccgaaatccaaactcgacttacaaaacccgctcctaccgtctctccgcaacgcgccctaccccccactaccgaccctcttaacttcaaaaccaaattttacctttcatcctaaaaaattaataccccgcaaataaaaccgtaaaaacgaaactacgataaatt

SEQ ID NO: 26357 - DNA, 2005 bp, Artificial Sequence
  chemically treated genomic DNA (Homo sapiens) CpG-island No: 26357
gcgcgcgttataggttttatttcggttacggcgaaggggcgtcgcgagttataatcgggttgtaggtggagggcgtcggtttcgcgcgtcgtcgcgtttttcgcgtcgtcggggatgaggtcggggtcgcgtcgcgttcgcgggggtgggggcggcggtttaggtgagttattaggtgagcggtcggagaggggaataggtgattgtcgcgtttcgttagttttcgttcggttcgcgcgatttcgggatatatcgcggtagggggacgggggttgcgggggacgtcggggttcgcggtgggtttgggggagggggaggggagagaaggggcggaggggggagggggaaaggagggcgggttcgcggttggcgggcggcggcgggggggaggggcggggcgcggcgtagcgggcgggggtcgcgtaggtttcgcgttcggcggtgtttatttcggtcggttggttgatttcgaataggtttagtcggttggcgttttagtggtggatgatgtcggttagttttcgtcgtttttcgttacggtcgttcgtcgatatggttttggtcgcgtttttttagtcgcgcggggtcggggtcggaggacgggtcgaggacgataggttcgcgggggttcggcgtttttcgttatttttcgtcggtcgttttcgttttcgcggttgttttcgttttcgcggtcgcgtcgcgtttttcgatttggttttcgtttggggtttagttcgcgtcgcgtcgcgtcgttttagtttcgtcggtcggtgtgcgttcggcgttcgtcgttcgtcgttcgtattcgttcgcgtttcgttcgtcgtcgtgcgcgtcgtcgttcgtcgtgcgcgtcgtcgtttcgcgcggcgtcgtcgtattttcgggtcgttttattaggtgttgttgtcgcggtcgttagggagggaggtgtcggagggcgggtttcgcgcggtgttagggtttcgtttggattggcggtggtgggttttaatcggcggtatcgggttttttttcgattagcggtgttaggttcggttcggacgcgcgttgttggatttaaatgggtagtgttgggttcgatgggtggtgttgtgttgggttcggacgcgcggtgtagagttcggacgggcggtgttggatttaaatgggcggtgttggatttggacgggcggtgatgggttcgatgggcggtgttatgttcggttcggacgggcggtgttaggtttaaatgggcgttgttgggttcgatgggcggtgttgcgttcggttcggacgggcggggacgggcggtgttgggtttaaatgggtggtgatggatttgtggacgggcggtgttggttttagacgggcggtgttgggtttagacgggcggtgggttcgatgggcggtgttaggttcggttcggatgggtggtgttaggtttaaatgggcggcgtcggattcgatgggcggtgttgggttcggttcggattggcgggttcgggtttggacgggcggtgttggatttaaatgggggtgtagtgttggatttggacgggcggtgttgggttcgaacgggcgatgggttttatgggcggtgttaggttcggttcggattggcggtgttgggtttaaatgggcggcgttgggttcgatgggtggtattgggttcggacgggcggttttgggtttggacgggcggtgtagtatttaaatgggcgttgttgggttcggacgggcggtgttaggttcggttcggacgggtggtgttgggtttaaatgggcggtgttaggtttagtaggggatcggtgggcgtggcggtataggtacggagcgtagggtcggtggagcgtttttttcgaagggttttgcgtttttcgcgttcgttgttttttttgttcgcgtattgtttcggggttgttgcgtgttttttttagggtgattttttttcgttgggttattttaaagtcgatttttttaagttgttttttttcgcggaggatacgttgttaggttttgtgt

SEQ ID NO: 26358 - DNA, 2005 bp, Artificial Sequence
  chemically treated genomic DNA (Homo sapiens) CpG-island No: 26358
acacaaaacctaacaacgtatcctccgcgaaaaaaaacaacttaaaaaaatcgactttaaaataacccaacgaaaaaaaatcaccctaaaaaaaacacgcaacaaccccgaaacaatacgcgaacaaaaaaaacaacgaacgcgaaaaacgcaaaacccttcgaaaaaaacgctccaccgaccctacgctccgtacctataccgccacgcccaccgatcccctactaaacctaacaccgcccatttaaacccaacaccacccgtccgaaccgaacctaacaccgcccgtccgaacccaacaacgcccatttaaatactacaccgcccgtccaaacccaaaaccgcccgtccgaacccaataccacccatcgaacccaacgccgcccatttaaacccaacaccgccaatccgaaccgaacctaacaccgcccataaaacccatcgcccgttcgaacccaacaccgcccgtccaaatccaacactacacccccatttaaatccaacaccgcccgtccaaacccgaacccgccaatccgaaccgaacccaacaccgcccatcgaatccgacgccgcccatttaaacctaacaccacccatccgaaccgaacctaacaccgcccatcgaacccaccgcccgtctaaacccaacaccgcccgtctaaaaccaacaccgcccgtccacaaatccatcaccacccatttaaacccaacaccgcccgtccccgcccgtccgaaccgaacgcaacaccgcccatcgaacccaacaacgcccatttaaacctaacaccgcccgtccgaaccgaacataacaccgcccatcgaacccatcaccgcccgtccaaatccaacaccgcccatttaaatccaacaccgcccgtccgaactctacaccgcgcgtccgaacccaacacaacaccacccatcgaacccaacactacccatttaaatccaacaacgcgcgtccgaaccgaacctaacaccgctaatcgaaaaaaaacccgataccgccgattaaaacccaccaccgccaatccaaacgaaaccctaacaccgcgcgaaacccgccctccgacacctccctccctaacgaccgcgacaacaacacctaataaaacgacccgaaaatacgacgacgccgcgcgaaacgacgacgcgcacgacgaacgacgacgcgcacgacgacgaacgaaacgcgaacgaatacgaacgacgaacgacgaacgccgaacgcacaccgaccgacgaaactaaaacgacgcgacgcgacgcgaactaaaccccaaacgaaaaccaaatcgaaaaacgcgacgcgaccgcgaaaacgaaaacaaccgcgaaaacgaaaacgaccgacgaaaaataacgaaaaacgccgaacccccgcgaacctatcgtcctcgacccgtcctccgaccccgaccccgcgcgactaaaaaaacgcgaccaaaaccatatcgacgaacgaccgtaacgaaaaacgacgaaaactaaccgacatcatccaccactaaaacgccaaccgactaaacctattcgaaatcaaccaaccgaccgaaataaacaccgccgaacgcgaaacctacgcgacccccgcccgctacgccgcgccccgcccctcccccccgccgccgcccgccaaccgcgaacccgccctcctttccccctcccccctccgccccttctctcccctccccctcccccaaacccaccgcgaaccccgacgtcccccgcaacccccgtccccctaccgcgatatatcccgaaatcgcgcgaaccgaacgaaaactaacgaaacgcgacaatcacctattcccctctccgaccgctcacctaataactcacctaaaccgccgcccccacccccgcgaacgcgacgcgaccccgacctcatccccgacgacgcgaaaaacgcgacgacgcgcgaaaccgacgccctccacctacaacccgattataactcgcgacgccccttcgccgtaaccgaaataaaacctataacgcgcgc

SEQ ID NO: 26359 - DNA, 2005 bp, Artificial Sequence
  chemically treated genomic DNA (Homo sapiens) CpG-island No: 26359
atataaagtttaataacgtgtttttcgcggaagaaaatagtttgaaaaggtcggttttgaagtgatttagcggaaaggaattattttggaagaaatacgtagtagtttcggggtaatgcgcgggtaggaggagtagcgagcgcggggagcgtagggtttttcggagagggcgttttatcggttttgcgtttcgtatttgtgtcgttacgtttatcggttttttgttgagtttagtatcgtttatttagatttagtattattcgttcggatcgaatttagtatcgttcgttcggatttagtagcgtttatttggatattgtatcgttcgtttagatttagaatcgttcgttcggatttagtattatttatcggatttagcgtcgtttatttagatttagtatcgttagttcgaatcgaatttagtatcgtttatgggatttatcgttcgttcggatttagtatcgttcgtttagatttagtattgtatttttatttggatttagtatcgttcgtttagattcggattcgttagttcggatcgaatttagtatcgtttatcggattcggcgtcgtttatttagatttagtattatttattcgaatcgaatttagtatcgtttatcggatttatcgttcgtttggatttagtatcgttcgtttggaattagtatcgttcgtttatagatttattattatttatttggatttagtatcgttcgttttcgttcgttcggatcgaacgtagtatcgtttatcggatttagtagcgtttatttagatttagtatcgttcgttcgaatcgaatatagtatcgtttatcggatttattatcgttcgtttagatttagtatcgtttatttggatttagtatcgttcgttcggattttgtatcgcgcgttcggatttaatatagtattatttatcggatttagtattgtttatttagatttagtagcgcgcgttcgaatcgaatttagtatcgttggtcgggaaggaattcggtatcgtcggttgggatttattatcgttagtttagacggaattttagtatcgcgcggggttcgtttttcgatatttttttttttggcggtcgcggtagtagtatttagtggagcggttcggaggtgcggcggcgtcgcgcggggcggcggcgcgtacggcgggcggcggcgcgtacggcggcgggcggggcgcgggcgggtgcgggcggcgggcggcgggcgtcgggcgtatatcggtcggcggggttgaggcggcgcggcgcggcgcggattgagttttaggcggaggttaagtcggaggacgcggcgcggtcgcggaggcggaggtagtcgcggaggcggaggcggtcggcggggggtggcgaggggcgtcgggttttcgcggatttgtcgttttcggttcgtttttcggtttcggtttcgcgcggttgaggaggcgcggttaggattatgtcggcgggcggtcgtgacgaggagcggcggaagttggtcgatattatttattattggaacgttaatcggttggatttgttcgagattagttagtcgatcgaggtgagtatcgtcgggcgcggggtttgcgcgattttcgttcgttgcgtcgcgtttcgtttttttttttcgtcgtcgttcgttagtcgcggattcgtttttttttttttttttttttttcgttttttttttttttttttttttttttaggtttatcgcgggtttcggcgtttttcgtagttttcgtttttttgtcgcggtgtatttcggggtcgcgcgggtcgagcgggggttggcggggcgcggtagttatttgttttttttttcggtcgtttatttggtggtttatttgggtcgtcgtttttattttcgcgagcgcggcgcggtttcggttttattttcggcggcgcggggggcgcggcggcgcgcggggtcggcgttttttatttgtagttcggttgtggttcgcggcgttttttcgtcgtggtcgggatggagtttgtgacgcgcgt

SEQ ID NO: 26360 - DNA, 2005 bp, Artificial Sequence
  chemically treated genomic DNA (Homo sapiens) CpG-island No: 26360
acgcgcgtcacaaactccatcccgaccacgacgaaaaaacgccgcgaaccacaaccgaactacaaataaaaaacgccgaccccgcgcgccgccgcgccccccgcgccgccgaaaataaaaccgaaaccgcgccgcgctcgcgaaaataaaaacgacgacccaaataaaccaccaaataaacgaccgaaaaaaaaaacaaataactaccgcgccccgccaacccccgctcgacccgcgcgaccccgaaatacaccgcgacaaaaaaacgaaaactacgaaaaacgccgaaacccgcgataaacctaaaaaaaaaaaaaaaaaaaaaaaaaacgaaaaaaaaaaaaaaaaaaaaaaacgaatccgcgactaacgaacgacgacgaaaaaaaaaaacgaaacgcgacgcaacgaacgaaaatcgcgcaaaccccgcgcccgacgatactcacctcgatcgactaactaatctcgaacaaatccaaccgattaacgttccaataataaataatatcgaccaacttccgccgctcctcgtcacgaccgcccgccgacataatcctaaccgcgcctcctcaaccgcgcgaaaccgaaaccgaaaaacgaaccgaaaacgacaaatccgcgaaaacccgacgcccctcgccaccccccgccgaccgcctccgcctccgcgactacctccgcctccgcgaccgcgccgcgtcctccgacttaacctccgcctaaaactcaatccgcgccgcgccgcgccgcctcaaccccgccgaccgatatacgcccgacgcccgccgcccgccgcccgcacccgcccgcgccccgcccgccgccgtacgcgccgccgcccgccgtacgcgccgccgccccgcgcgacgccgccgcacctccgaaccgctccactaaatactactaccgcgaccgccaaaaaaaaaaatatcgaaaaacgaaccccgcgcgatactaaaattccgtctaaactaacgataataaatcccaaccgacgataccgaattccttcccgaccaacgatactaaattcgattcgaacgcgcgctactaaatctaaataaacaatactaaatccgataaataatactatattaaatccgaacgcgcgatacaaaatccgaacgaacgatactaaatccaaataaacgatactaaatctaaacgaacgataataaatccgataaacgatactatattcgattcgaacgaacgatactaaatctaaataaacgctactaaatccgataaacgatactacgttcgatccgaacgaacgaaaacgaacgatactaaatccaaataaataataataaatctataaacgaacgatactaattccaaacgaacgatactaaatccaaacgaacgataaatccgataaacgatactaaattcgattcgaataaataatactaaatctaaataaacgacgccgaatccgataaacgatactaaattcgatccgaactaacgaatccgaatctaaacgaacgatactaaatccaaataaaaatacaatactaaatctaaacgaacgatactaaatccgaacgaacgataaatcccataaacgatactaaattcgattcgaactaacgatactaaatctaaataaacgacgctaaatccgataaataatactaaatccgaacgaacgattctaaatctaaacgaacgatacaatatccaaataaacgctactaaatccgaacgaacgatactaaattcgatccgaacgaataatactaaatctaaataaacgatactaaactcaacaaaaaaccgataaacgtaacgacacaaatacgaaacgcaaaaccgataaaacgccctctccgaaaaaccctacgctccccgcgctcgctactcctcctacccgcgcattaccccgaaactactacgtatttcttccaaaataattcctttccgctaaatcacttcaaaaccgaccttttcaaactattttcttccgcgaaaaacacgttattaaactttatat

SEQ ID NO: 26361 - DNA, 786 bp, Artificial Sequence
  chemically treated genomic DNA (Homo sapiens) CpG-island No: 26361
gcggttgtacgtaatatttttatcgtttgaaatttgcgatttttcgtatttggttttttttcgaggtttttgtatatcgtatcgtgattgacgtattcgaggggatcgttaaaaatatattttaagtttaattttttaatattttcgcgacgtaatttttttttttttttttagcggttttggttcgtttttcgtttttcgggtcgcgtttcggttggcgattcggcgtgtatacgaggttttttcgcgggagagttcgcgtttcggttcggggtttgtcgggggttgtagataaagaggttgtagcgtcgtcgcggtcgttaggatcgtttttacggggatagttttacgtttatcgtttcggttttcgcgtcgtcgtcgtcgtttcgttttatcggtggtttcggggtcgggtttttgcgttcgttattgttgtagttcgacgaataatggtaggaggaggcgtcggcgttcgaggttcgggttttttgcggttcgcgggttcgtcggttgttgttggttgattgattaaacgtattagcggagggagggagcgagcgagcgattttggcgcgcgttttttcgttttttttttgcgaggcgaggttagttcggttcgtagttcgttcgtcggttcgcgttttttttttttagttcgttataatattgtagtaaatttttattgggtcgcgtcggagggaaggagggggtcgggttcgcggttcgttcgtttattggttgaggttaatttttagttttttttgtttttttttttttttaggtcgg

SEQ ID NO: 26362 - DNA, 786 bp, Artificial Sequence
  chemically treated genomic DNA (Homo sapiens) CpG-island No: 26362
ccgacctaaaaaaaaaaaaaaacaaaaaaaactaaaaattaacctcaaccaataaacgaacgaaccgcgaacccgaccccctccttccctccgacgcgacccaataaaaatttactacaatattataacgaactaaaaaaaaaaaacgcgaaccgacgaacgaactacgaaccgaactaacctcgcctcgcaaaaaaaaaacgaaaaaacgcgcgccaaaatcgctcgctcgctccctccctccgctaatacgtttaatcaatcaaccaacaacaaccgacgaacccgcgaaccgcaaaaaacccgaacctcgaacgccgacgcctcctcctaccattattcgtcgaactacaacaataacgaacgcaaaaacccgaccccgaaaccaccgataaaacgaaacgacgacgacgacgcgaaaaccgaaacgataaacgtaaaactatccccgtaaaaacgatcctaacgaccgcgacgacgctacaacctctttatctacaacccccgacaaaccccgaaccgaaacgcgaactctcccgcgaaaaaacctcgtatacacgccgaatcgccaaccgaaacgcgacccgaaaaacgaaaaacgaaccaaaaccgctaaaaaaaaaaaaaaaaattacgtcgcgaaaatattaaaaaattaaacttaaaatatatttttaacgatcccctcgaatacgtcaatcacgatacgatatacaaaaacctcgaaaaaaaaccaaatacgaaaaatcgcaaatttcaaacgataaaaatattacgtacaaccgc

SEQ ID NO: 26363 - DNA, 786 bp, Artificial Sequence
  chemically treated genomic DNA (Homo sapiens) CpG-island No: 26363
tcggtttaggggaggggggaaataaggggagttagaagttggttttagttaatgggcggacgggtcgcgggttcggtttttttttttttttcggcgcggtttaatagaaatttattataatgttgtggcgaattgagggggaggggcgcgggtcggcgggcgggttgcgggtcgggttggtttcgtttcgtagagggaaggcgggagggcgcgcgttagggtcgttcgttcgtttttttttttcgttggtgcgtttagttagttagttagtagtagtcggcgggttcgcgagtcgtagagggttcgagtttcggacgtcggcgtttttttttgttattgttcgtcgggttgtagtagtggcgggcgtaggagttcggtttcggagttatcggtgaggcgaggcggcggcggcggcgcgggagtcggggcggtgggcgtggagttgttttcgtggggacggttttggcggtcgcggcggcgttgtagtttttttgtttgtaattttcgataggtttcgggtcggggcgcgggttttttcgcggaggagtttcgtgtgtacgtcgagtcgttagtcgggacgcggttcgaggagcgaggggcgggttagagtcgttgaggaaaggggaaggggttgcgtcgcgggagtgttggaaagttaggtttgagatgtatttttgacggttttttcgggtgcgttaattacggtgcggtgtgtaggagtttcgggaggaaattaaatgcggagaatcgtaggttttagacggtgaaggtgttgcgtgtagtcgt

SEQ ID NO: 26364 - DNA, 786 bp, Artificial Sequence
  chemically treated genomic DNA (Homo sapiens) CpG-island No: 26364
acgactacacgcaacaccttcaccgtctaaaacctacgattctccgcatttaatttcctcccgaaactcctacacaccgcaccgtaattaacgcacccgaaaaaaccgtcaaaaatacatctcaaacctaactttccaacactcccgcgacgcaaccccttcccctttcctcaacgactctaacccgcccctcgctcctcgaaccgcgtcccgactaacgactcgacgtacacacgaaactcctccgcgaaaaaacccgcgccccgacccgaaacctatcgaaaattacaaacaaaaaaactacaacgccgccgcgaccgccaaaaccgtccccacgaaaacaactccacgcccaccgccccgactcccgcgccgccgccgccgcctcgcctcaccgataactccgaaaccgaactcctacgcccgccactactacaacccgacgaacaataacaaaaaaaaacgccgacgtccgaaactcgaaccctctacgactcgcgaacccgccgactactactaactaactaactaaacgcaccaacgaaaaaaaaaaacgaacgaacgaccctaacgcgcgccctcccgccttccctctacgaaacgaaaccaacccgacccgcaacccgcccgccgacccgcgcccctccccctcaattcgccacaacattataataaatttctattaaaccgcgccgaaaaaaaaaaaaaaaccgaacccgcgacccgtccgcccattaactaaaaccaacttctaactccccttatttcccccctcccctaaaccga

SEQ ID NO: 26365 - DNA, 664 bp, Artificial Sequence
  chemically treated genomic DNA (Homo sapiens) CpG-island No: 26365
gcggcgtcggttcgtagcggatttatcggacgatgtcgaatatgataagtacgttgtttagtagttttacggcgtatacggtcgagtagagcgcggtgatggcgattgttagggcgagggacgaggcgtttcgcgcgtttggcggtttcgacgtattggcgttagcgttggggtaggcgttagggtaggcgttcgaggcgttggcgaagagcgggggttgtagttcggcgtcggcggagggggtcggttttatggttgtcggtcggtttcgtcgcgtttttttttatcgtgcgttttgggcgcggggattcgacgcgaggggagcggtaaggtagaggtcgcggtttcgacgtcgtcggttgtcgcgtttcggtcgtttcgttgtttttgcgtttcgttcgtttgtttcgtcgttcgtatcggtttagttttcggcgttcgttcgtttttttcgttcggagcgttgtgagttaggagtagtcgtaggtttttcggacgcgttcgtcgcgcgtattacgtggttcggaggcggtcgttagtttgcgttcgcgatcgggggcggacgttgtattatcggttcggagttgggtaggggaggtttttcgttttttttttagggatgtttcgtcggttcgagtgcgatttcgttttaatttggattttt

SEQ ID NO: 26366 - DNA, 664 bp, Artificial Sequence
  chemically treated genomic DNA (Homo sapiens) CpG-island No: 26366
aaaaatccaaattaaaacgaaatcgcactcgaaccgacgaaacatccctaaaaaaaaaacgaaaaacctcccctacccaactccgaaccgataatacaacgtccgcccccgatcgcgaacgcaaactaacgaccgcctccgaaccacgtaatacgcgcgacgaacgcgtccgaaaaacctacgactactcctaactcacaacgctccgaacgaaaaaaacgaacgaacgccgaaaactaaaccgatacgaacgacgaaacaaacgaacgaaacgcaaaaacaacgaaacgaccgaaacgcgacaaccgacgacgtcgaaaccgcgacctctaccttaccgctcccctcgcgtcgaatccccgcgcccaaaacgcacgataaaaaaaaacgcgacgaaaccgaccgacaaccataaaaccgaccccctccgccgacgccgaactacaacccccgctcttcgccaacgcctcgaacgcctaccctaacgcctaccccaacgctaacgccaatacgtcgaaaccgccaaacgcgcgaaacgcctcgtccctcgccctaacaatcgccatcaccgcgctctactcgaccgtatacgccgtaaaactactaaacaacgtacttatcatattcgacatcgtccgataaatccgctacgaaccgacgccgc

SEQ ID NO: 26367 - DNA, 664 bp, Artificial Sequence
  chemically treated genomic DNA (Homo sapiens) CpG-island No: 26367
gggagtttaggttgggacggggtcgtattcgagtcggcggagtatttttagggagggggcgggaggttttttttgtttagtttcgagtcggtggtgtagcgttcgttttcggtcgcgggcgtagattggcggtcgttttcgggttacgtggtgcgcgcggcgggcgcgttcgaggagtttgcggttgtttttggtttatagcgtttcgggcgaggagagcgggcggacgtcgggggttgggtcggtgcgggcggcgaggtaggcggacgaggcgtagagatagcggggcggtcggggcgcggtagtcggcggcgtcggggtcgcggtttttgttttgtcgtttttttcgcgtcggattttcgcgtttagggcgtacggtggagagggacgcggcggagtcggtcggtagttatggaatcggtttttttcgtcggcgtcgagttgtagttttcgtttttcgttaacgtttcggacgtttattttagcgtttgttttagcgttggcgttaatgcgtcggggtcgttaggcgcgcggagcgtttcgtttttcgttttggtaatcgttattatcgcgttttattcggtcgtgtgcgtcgtggggttgttgggtaacgtgtttgttatgttcggtatcgttcggtgagttcgttgcgggtcggcgtcgt

SEQ ID NO: 26368 - DNA, 664 bp, Artificial Sequence
  chemically treated genomic DNA (Homo sapiens) CpG-island No: 26368
acgacgccgacccgcaacgaactcaccgaacgataccgaacataacaaacacgttacccaacaaccccacgacgcacacgaccgaataaaacgcgataataacgattaccaaaacgaaaaacgaaacgctccgcgcgcctaacgaccccgacgcattaacgccaacgctaaaacaaacgctaaaataaacgtccgaaacgttaacgaaaaacgaaaactacaactcgacgccgacgaaaaaaaccgattccataactaccgaccgactccgccgcgtccctctccaccgtacgccctaaacgcgaaaatccgacgcgaaaaaaacgacaaaacaaaaaccgcgaccccgacgccgccgactaccgcgccccgaccgccccgctatctctacgcctcgtccgcctacctcgccgcccgcaccgacccaacccccgacgtccgcccgctctcctcgcccgaaacgctataaaccaaaaacaaccgcaaactcctcgaacgcgcccgccgcgcgcaccacgtaacccgaaaacgaccgccaatctacgcccgcgaccgaaaacgaacgctacaccaccgactcgaaactaaacaaaaaaaacctcccgccccctccctaaaaatactccgccgactcgaatacgaccccgtcccaacctaaactccc

SEQ ID NO: 26369 - DNA, 915 bp, Artificial Sequence
  chemically treated genomic DNA (Homo sapiens) CpG-island No: 26369
cgggcgtgtatattttttatttacgacgtagtttcgaaagtttttcgtcgattatttttttaggttattgttattcgtatagggtacggacgttttttttatttattcggtcgtgttagtcgttagtatatttattcgggagtatataattttttttgtaaagcgttttggtttattcgtttttttttttcggggtcgtttttcggataggttcgattatattttaggagttgttttcgttacgttggcgtggaaagggagcgggtatatttacgggcgatttcgcggggcggagaggaggtacgggtggggagacggatgtttttttttttcgcggtcgtatcggttttcgtagtgtttttttcgttcgggagtcggcggtcgaagtcgggcgtttttcgcgcgggttttttcgaaataagtagtttttcgcgttcgggagtcgtagtttttttttggggttttcgggcgaggtcggttaggcgggatattttaggagtttatggcggtggcggcgtttgcggacgatgcgcggtagtcggattttgcgggcggggcgggcggcgtcgtagtttcggagttttcgtcgtcgtcggcgcgtttcgggtttagtggagtgtagtcgcggcgcgtatgcgttttgggttcgtcgtcggggagggcggggcggcggacgcggttgagattattgtttgggttttaaaggggtcgcgtttcgaattttagttcgtcgtttcgaattttagttcgtcgtttcgcgggttggggcgcgattcgggtttttttgttatttataaaattagttacgatcggtttttaatcgcgagagttttttgggttgcgatttttgtttttgattttcgttggtgttttattttttttaattttaattttttttatttgagtttgttttga

SEQ ID NO: 26370 - DNA, 915 bp, Artificial Sequence
  chemically treated genomic DNA (Homo sapiens) CpG-island No: 26370
tcaaaacaaactcaaataaaaaaaattaaaattaaaaaaaataaaacaccaacgaaaatcaaaaacaaaaatcgcaacccaaaaaactctcgcgattaaaaaccgatcgtaactaattttataaataacaaaaaaacccgaatcgcgccccaacccgcgaaacgacgaactaaaattcgaaacgacgaactaaaattcgaaacgcgacccctttaaaacccaaacaataatctcaaccgcgtccgccgccccgccctccccgacgacgaacccaaaacgcatacgcgccgcgactacactccactaaacccgaaacgcgccgacgacgacgaaaactccgaaactacgacgccgcccgccccgcccgcaaaatccgactaccgcgcatcgtccgcaaacgccgccaccgccataaactcctaaaatatcccgcctaaccgacctcgcccgaaaaccccaaaaaaaaactacgactcccgaacgcgaaaaactacttatttcgaaaaaacccgcgcgaaaaacgcccgacttcgaccgccgactcccgaacgaaaaaaacactacgaaaaccgatacgaccgcgaaaaaaaaaaacatccgtctccccacccgtacctcctctccgccccgcgaaatcgcccgtaaatatacccgctccctttccacgccaacgtaacgaaaacaactcctaaaatataatcgaacctatccgaaaaacgaccccgaaaaaaaaaaacgaataaaccaaaacgctttacaaaaaaaattatatactcccgaataaatatactaacgactaacacgaccgaataaataaaaaaaacgtccgtaccctatacgaataacaataacctaaaaaaataatcgacgaaaaactttcgaaactacgtcgtaaataaaaaatatacacgcccg

SEQ ID NO: 26371 - DNA, 915 bp, Artificial Sequence
  chemically treated genomic DNA (Homo sapiens) CpG-island No: 26371
ttaaaataggtttaaatggaggaaattagggttaaaagaagtgaagtattagcgagggttaggggtagagatcgtagtttagaaagttttcgcggttgggggtcggtcgtagttggttttgtgagtggtaagagaattcgggtcgcgttttaattcgcggggcggcgggttggggttcggggcggcgggttggggttcggggcgcggtttttttaaggtttaggtagtgattttagtcgcgttcgtcgtttcgtttttttcggcggcgagtttagagcgtatgcgcgtcgcggttgtattttattgggttcgggacgcgtcggcggcggcggagatttcggggttgcggcgtcgttcgtttcgttcgtagagttcggttgtcgcgtatcgttcgtagacgtcgttatcgttatgggtttttgaggtatttcgtttggtcggtttcgttcgggagttttaagggggagttgcgattttcgagcgcggggggttgtttgtttcggagaggttcgcgcgagggacgttcggtttcggtcgtcggttttcgggcggggagggtattacggaggtcggtgcggtcgcggagggagggggtattcgtttttttattcgtgtttttttttcgtttcgcgaggtcgttcgtgggtgtgttcgttttttttttacgttaacgtggcgggggtagtttttggagtgtaatcggatttgttcggggggcggtttcgggagagggaggcggatggattaaggcgttttgtaagagggattgtgtgttttcgggtgggtgtgttggcgattggtacggtcgagtgagtgggggaggcgttcgtgttttgtgcgggtggtagtgatttgggagggtggtcggcggggggttttcggggttgcgtcgtgagtggagggtgtatacgttcg

SEQ ID NO: 26372 - DNA, 915 bp, Artificial Sequence
  chemically treated genomic DNA (Homo sapiens) CpG-island No: 26372
cgaacgtatacaccctccactcacgacgcaaccccgaaaaccccccgccgaccaccctcccaaatcactaccacccgcacaaaacacgaacgcctcccccactcactcgaccgtaccaatcgccaacacacccacccgaaaacacacaatccctcttacaaaacgccttaatccatccgcctccctctcccgaaaccgccccccgaacaaatccgattacactccaaaaactacccccgccacgttaacgtaaaaaaaaaacgaacacacccacgaacgacctcgcgaaacgaaaaaaaaacacgaataaaaaaacgaataccccctccctccgcgaccgcaccgacctccgtaataccctccccgcccgaaaaccgacgaccgaaaccgaacgtccctcgcgcgaacctctccgaaacaaacaaccccccgcgctcgaaaatcgcaactcccccttaaaactcccgaacgaaaccgaccaaacgaaatacctcaaaaacccataacgataacgacgtctacgaacgatacgcgacaaccgaactctacgaacgaaacgaacgacgccgcaaccccgaaatctccgccgccgccgacgcgtcccgaacccaataaaatacaaccgcgacgcgcatacgctctaaactcgccgccgaaaaaaacgaaacgacgaacgcgactaaaatcactacctaaaccttaaaaaaaccgcgccccgaaccccaacccgccgccccgaaccccaacccgccgccccgcgaattaaaacgcgacccgaattctcttaccactcacaaaaccaactacgaccgacccccaaccgcgaaaactttctaaactacgatctctacccctaaccctcgctaatacttcacttcttttaaccctaatttcctccatttaaacctattttaa

SEQ ID NO: 26373 - DNA, 556 bp, Artificial Sequence
  chemically treated genomic DNA (Homo sapiens) CpG-island No: 26373
gcggttttcgcgagaattcgcgcgggaataggagttgcgggtttcgtatagcgttcggtacgtagatttagtttattaacgggttggaaggtcgcgttttcgttttcgcgtttttttagaattttttttattttaagttcgggttttcggatttttttattttacggtttttttttttattttgggtcgtttagttttaatcgtttttattttcgttgattcgtttttcggaagcgatttttcgtagttgcgtatcgaggcgtattttcgcgtatttttaggaggcgggtttagttcggtggcgaggggagcgcggttttcgagtgggcgaggcgttggcggttgtaggtttcgatatcgcggagtatatttttttttatcgagatcgtgttttcgcggggtttgtgttttcgggaggagttggttgcgtttggagatttttcggtttggtattcgtcgcgtttttttgtttgttgttttttacgtttagttttattcgatttttggaagtttaggggtgtgtcgttcgatttttaaaatatgtttttatttttag

SEQ ID NO: 26374 - DNA, 556 bp, Artificial Sequence
  chemically treated genomic DNA (Homo sapiens) CpG-island No: 26374
ctaaaaataaaaacatattttaaaaatcgaacgacacacccctaaacttccaaaaatcgaataaaactaaacgtaaaaaacaacaaacaaaaaaacgcgacgaataccaaaccgaaaaatctccaaacgcaaccaactcctcccgaaaacacaaaccccgcgaaaacacgatctcgataaaaaaaaatatactccgcgatatcgaaacctacaaccgccaacgcctcgcccactcgaaaaccgcgctcccctcgccaccgaactaaacccgcctcctaaaaatacgcgaaaatacgcctcgatacgcaactacgaaaaatcgcttccgaaaaacgaatcaacgaaaataaaaacgattaaaactaaacgacccaaaataaaaaaaaaaaccgtaaaataaaaaaatccgaaaacccgaacttaaaataaaaaaaattctaaaaaaacgcgaaaacgaaaacgcgaccttccaacccgttaataaactaaatctacgtaccgaacgctatacgaaacccgcaactcctattcccgcgcgaattctcgcgaaaaccgc

SEQ ID NO: 26375 - DNA, 556 bp, Artificial Sequence
  chemically treated genomic DNA (Homo sapiens) CpG-island No: 26375
ttaggggtaggagtatattttaggggtcgagcgatatatttttgggtttttagaagtcggatggggttaaacgtggagagtaataagtagggagacgcgacgaatattaggtcgagggatttttaaacgtagttaatttttttcggggatatagatttcgcgggggtacggtttcgatggaggggagtgtgtttcgcggtatcggagtttatagtcgttagcgtttcgtttattcgggggtcgcgtttttttcgttatcgagttggattcgttttttgagggtgcgcggaggtgcgtttcggtgcgtagttgcggaggatcgttttcggggggcgggttagcggaagtgagggcggttgaggttgggcggtttaaggtggaaggaggggtcgtgaggtgagagagttcgggagttcgagtttgaggtgagaaaggttttagggaggcgcggaggcgggagcgcgattttttagttcgttagtagattgggtttacgtgtcgggcgttgtgcggagttcgtagtttttgttttcgcgcgagttttcgcgggagtcgt

SEQ ID NO: 26376 - DNA, 556 bp, Artificial Sequence
  chemically treated genomic DNA (Homo sapiens) CpG-island No: 26376
acgactcccgcgaaaactcgcgcgaaaacaaaaactacgaactccgcacaacgcccgacacgtaaacccaatctactaacgaactaaaaaatcgcgctcccgcctccgcgcctccctaaaacctttctcacctcaaactcgaactcccgaactctctcacctcacgacccctccttccaccttaaaccgcccaacctcaaccgccctcacttccgctaacccgccccccgaaaacgatcctccgcaactacgcaccgaaacgcacctccgcgcaccctcaaaaaacgaatccaactcgataacgaaaaaaacgcgacccccgaataaacgaaacgctaacgactataaactccgataccgcgaaacacactcccctccatcgaaaccgtacccccgcgaaatctatatccccgaaaaaaattaactacgtttaaaaatccctcgacctaatattcgtcgcgtctccctacttattactctccacgtttaaccccatccgacttctaaaaacccaaaaatatatcgctcgacccctaaaatatactcctacccctaa

SEQ ID NO: 26377 - DNA, 642 bp, Artificial Sequence
  chemically treated genomic DNA (Homo sapiens) CpG-island No: 26377
ttttcgtgttttttttcgtttagttttttttcgtttttcgtttttttcgattcgtttatgtttatgttttttttgttgtcgaggttgggttttttagttttcgttttcgcgttttcgttttagttagttcgggttcggatttgtcgcgcggtcgtttgggtttcggcgtggcgggcgtagattcggacggcggcggtagcggcggcggttagtagggtttcgagtagcgttagggaacgggcgcggcggcgcggtggcgcgggaggttgcgcggcggggtcggggttgggcggttcgcgttggttcggtcgggttcggtttatggttgcggttggcggcggttgtcggcggttcgggaagcgaaagagcggggcggggtcgggggcggggcggtcggggcggggaggggcggggcggtcgtaggggttgggcggggggtcgttggttttcggtttcgtagttcggttagagttcggggcggggttagttatatcggaacgttaagaggggttgatcgcgtttatgcggtcgggttcgtagtttcggttattttagtttttttaggtcgttttttgttttttcgcgttttttttcgtgttttcgtttttaaagttaagttaggtttttgcggtttatttgttt

SEQ ID NO: 26378 - DNA, 642 bp, Artificial Sequence
  chemically treated genomic DNA (Homo sapiens) CpG-island No: 26378
aaacaaataaaccgcaaaaacctaacttaactttaaaaacgaaaacacgaaaaaaaacgcgaaaaaacaaaaaacgacctaaaaaaactaaaataaccgaaactacgaacccgaccgcataaacgcgatcaacccctcttaacgttccgatataactaaccccgccccgaactctaaccgaactacgaaaccgaaaaccaacgaccccccgcccaacccctacgaccgccccgcccctccccgccccgaccgccccgcccccgaccccgccccgctctttcgcttcccgaaccgccgacaaccgccgccaaccgcaaccataaaccgaacccgaccgaaccaacgcgaaccgcccaaccccgaccccgccgcgcaacctcccgcgccaccgcgccgccgcgcccgttccctaacgctactcgaaaccctactaaccgccgccgctaccgccgccgtccgaatctacgcccgccacgccgaaacccaaacgaccgcgcgacaaatccgaacccgaactaactaaaacgaaaacgcgaaaacgaaaactaaaaaacccaacctcgacaacaaaaaaaacataaacataaacgaatcgaaaaaaacgaaaaacgaaaaaaaactaaacgaaaaaaaacacgaaaa

SEQ ID NO: 26379 - DNA, 642 bp, Artificial Sequence
  chemically treated genomic DNA (Homo sapiens) CpG-island No: 26379
aggtaagtgggtcgtagaggtttggtttagttttgggaacggaagtacgggaaggggcgcggagaggtaggaagcggtttggggaggttggggtggtcgggattacggattcgatcgtatagacgcgattagttttttttggcgtttcggtgtagttgatttcgtttcgggttttggtcgggttgcgaagtcgggaattagcgatttttcgtttagtttttgcggtcgtttcgttttttttcgtttcggtcgtttcgttttcggtttcgtttcgttttttcgtttttcgggtcgtcggtagtcgtcgttagtcgtagttatgggtcgggttcggtcgggttaacgcgggtcgtttagtttcggtttcgtcgcgtagtttttcgcgttatcgcgtcgtcgcgttcgttttttggcgttgttcggagttttgttggtcgtcgtcgttgtcgtcgtcgttcgggtttgcgttcgttacgtcgaggtttaggcggtcgcgcggtaggttcgggttcgagttggttggggcgggagcgcgggagcggggattgaaggatttagtttcggtagtaggggggatatgggtatggacgagtcgggggaggcggagggcggagggggattggacgggagggagtacgggaa

SEQ ID NO: 26380 - DNA, 642 bp, Artificial Sequence
  chemically treated genomic DNA (Homo sapiens) CpG-island No: 26380
ttcccgtactccctcccgtccaatccccctccgccctccgcctcccccgactcgtccatacccatatcccccctactaccgaaactaaatccttcaatccccgctcccgcgctcccgccccaaccaactcgaacccgaacctaccgcgcgaccgcctaaacctcgacgtaacgaacgcaaacccgaacgacgacgacaacgacgacgaccaacaaaactccgaacaacgccaaaaaacgaacgcgacgacgcgataacgcgaaaaactacgcgacgaaaccgaaactaaacgacccgcgttaacccgaccgaacccgacccataactacgactaacgacgactaccgacgacccgaaaaacgaaaaaacgaaacgaaaccgaaaacgaaacgaccgaaacgaaaaaaaacgaaacgaccgcaaaaactaaacgaaaaatcgctaattcccgacttcgcaacccgaccaaaacccgaaacgaaatcaactacaccgaaacgccaaaaaaaactaatcgcgtctatacgatcgaatccgtaatcccgaccaccccaacctccccaaaccgcttcctacctctccgcgccccttcccgtacttccgttcccaaaactaaaccaaacctctacgacccacttacct

SEQ ID NO: 26381 - DNA, 693 bp, Artificial Sequence
  chemically treated genomic DNA (Homo sapiens) CpG-island No: 26381
gaaattaaaatattataaattttcgaaggtatcgcgagaagcgtagatgcgtttgaggtcgtggagaggcggagcgagggcgggaacgttgagtaagtagggcggagtttaagttttttcgaggtttcggtcgggagtttgttttttttaggtggcgttttcgcgtgattgcgttttatataatcgcggtttggagcgttatagtggcgtattttaggttagatcgaattagagtgggcgaaagtttcgtgtttcgtttttttttatttgatcgacgttaaagtttattagtgagcgggcgtttagagtcgtcgtgttcgttttagttcgttcgggttcgtttcgattcgtttgcgttcgttcgtttgtcgtagttagtagtttgtagtcgtcgtcgggttgtgttttagattgttagataaatcggcgggtcgggtcggcgggtcggtgagcgcggttcgggtcggatatggcggcgttttacgtttgtattaagtgttattagcgtttttttttcgaggcgttgttttaggggtagtagttgtgtaaggtgcgcgggttggggcggcggtcgggaattggggacgtaggaggcgcggttcggagttttagattttgtggggacgttcggcggggttttcggagtagggtgtggtaggttcgttaggttgaggagtcgtatttatttcgttg

SEQ ID NO: 26382 - DNA, 693 bp, Artificial Sequence
  chemically treated genomic DNA (Homo sapiens) CpG-island No: 26382
caacgaaataaatacgactcctcaacctaacgaacctaccacaccctactccgaaaaccccgccgaacgtccccacaaaatctaaaactccgaaccgcgcctcctacgtccccaattcccgaccgccgccccaacccgcgcaccttacacaactactacccctaaaacaacgcctcgaaaaaaaaacgctaataacacttaatacaaacgtaaaacgccgccatatccgacccgaaccgcgctcaccgacccgccgacccgacccgccgatttatctaacaatctaaaacacaacccgacgacgactacaaactactaactacgacaaacgaacgaacgcaaacgaatcgaaacgaacccgaacgaactaaaacgaacacgacgactctaaacgcccgctcactaataaactttaacgtcgatcaaataaaaaaaaacgaaacacgaaactttcgcccactctaattcgatctaacctaaaatacgccactataacgctccaaaccgcgattatataaaacgcaatcacgcgaaaacgccacctaaaaaaaacaaactcccgaccgaaacctcgaaaaaacttaaactccgccctacttactcaacgttcccgccctcgctccgcctctccacgacctcaaacgcatctacgcttctcgcgataccttcgaaaatttataatattttaatttc

SEQ ID NO: 26383 - DNA, 693 bp, Artificial Sequence
  chemically treated genomic DNA (Homo sapiens) CpG-island No: 26383
tagcggggtgggtgcggttttttagtttggcgggtttgttatattttgtttcggggatttcgtcgggcgtttttatagaatttggagtttcgggtcgcgttttttgcgtttttagttttcggtcgtcgttttagttcgcgtattttgtatagttgttgtttttgagatagcgtttcgaaggggaagcgttggtggtatttggtgtaggcgtagagcgtcgttatgttcggttcgggtcgcgtttatcgattcgtcggttcggttcgtcgatttatttgatagtttgaggtataattcggcggcggttgtaggttgttggttgcggtaggcgggcgggcgtaggcgggtcggggcggattcgggcgggttggggcgggtacggcgattttagacgttcgtttattggtgggttttgacgtcgattaagtgggaaggggcggaatacggagttttcgtttattttgattcggtttggtttggagtacgttattgtgacgttttaggtcgcgattatgtaaagcgtagttacgcgggggcgttatttggaggggataggttttcggtcgggatttcggaagagtttaggtttcgttttatttgtttagcgttttcgttttcgtttcgtttttttacggttttaggcgtatttgcgtttttcgcgatattttcggggatttgtgatgttttggtttt

SEQ ID NO: 26384 - DNA, 693 bp, Artificial Sequence
  chemically treated genomic DNA (Homo sapiens) CpG-island No: 26384
aaaaccaaaacatcacaaatccccgaaaatatcgcgaaaaacgcaaatacgcctaaaaccgtaaaaaaacgaaacgaaaacgaaaacgctaaacaaataaaacgaaacctaaactcttccgaaatcccgaccgaaaacctatcccctccaaataacgcccccgcgtaactacgctttacataatcgcgacctaaaacgtcacaataacgtactccaaaccaaaccgaatcaaaataaacgaaaactccgtattccgccccttcccacttaatcgacgtcaaaacccaccaataaacgaacgtctaaaatcgccgtacccgccccaacccgcccgaatccgccccgacccgcctacgcccgcccgcctaccgcaaccaacaacctacaaccgccgccgaattatacctcaaactatcaaataaatcgacgaaccgaaccgacgaatcgataaacgcgacccgaaccgaacataacgacgctctacgcctacaccaaataccaccaacgcttccccttcgaaacgctatctcaaaaacaacaactatacaaaatacgcgaactaaaacgacgaccgaaaactaaaaacgcaaaaaacgcgacccgaaactccaaattctataaaaacgcccgacgaaatccccgaaacaaaatataacaaacccgccaaactaaaaaaccgcacccaccccgcta

SEQ ID NO: 26385 - DNA, 788 bp, Artificial Sequence
  chemically treated genomic DNA (Homo sapiens) CpG-island No: 26385
tgaggcggttacgcggggtatttggggtacgtttttcgatttgtggagtttgttatcgaagagatttcgaggttttttaaaacggtttttcgggttttttttcgtttcgacggtgaggacgtagttgttggagatgcgttcggtttttttagatttagggagggggtaggtttcggggcgcggtgaagggttatcgtagttcgggtgcgatacgtttgtggaggttaaggttaggttcggcgtcgattttcgatttttttcgtttcggtttttttattttttttcgcgttagcgtcgtttttcggtatcggggtattttggcggcgaaggcggcggttttagtcggggagttgaggtttttcgcggtgacggttaggaattcggcgacgttgaattgtttcggtatggcgggcgcgagcgtggagttgtcggagcggggcgcggggggtattgagttgtttcgcgttgagtcggttttatcgtcggtcgggggcgtcgtttcggtttttatacgtttcgttttttcgtacgtttcgttttcgattttttagtcgtttttcgttttttagttgggacggtttcgttttcggtttttcgtttttttttatcgttaaggtttaggtttcggtttcggtttcggtttcgtatcgcgttaggtcgttttttcggtttttcgtcggttttttaggttacgtttttagttttttatcgttttagatttcgttttttggcgcgatgttttatttttggttttagtagaaattttttcgtttttttttatttttgtt

SEQ ID NO: 26386 - DNA, 788 bp, Artificial Sequence
  chemically treated genomic DNA (Homo sapiens) CpG-island No: 26386
aacaaaaataaaaaaaaacgaaaaaatttctactaaaaccaaaaataaaacatcgcgccaaaaaacgaaatctaaaacgataaaaaactaaaaacgtaacctaaaaaaccgacgaaaaaccgaaaaaacgacctaacgcgatacgaaaccgaaaccgaaaccgaaacctaaaccttaacgataaaaaaaaacgaaaaaccgaaaacgaaaccgtcccaactaaaaaacgaaaaacgactaaaaaatcgaaaacgaaacgtacgaaaaaacgaaacgtataaaaaccgaaacgacgcccccgaccgacgataaaaccgactcaacgcgaaacaactcaataccccccgcgccccgctccgacaactccacgctcgcgcccgccataccgaaacaattcaacgtcgccgaattcctaaccgtcaccgcgaaaaacctcaactccccgactaaaaccgccgccttcgccgccaaaataccccgataccgaaaaacgacgctaacgcgaaaaaaaataaaaaaaccgaaacgaaaaaaatcgaaaatcgacgccgaacctaaccttaacctccacaaacgtatcgcacccgaactacgataacccttcaccgcgccccgaaacctaccccctccctaaatctaaaaaaaccgaacgcatctccaacaactacgtcctcaccgtcgaaacgaaaaaaaacccgaaaaaccgttttaaaaaacctcgaaatctcttcgataacaaactccacaaatcgaaaaacgtaccccaaataccccgcgtaaccgcctca

SEQ ID NO: 26387 - DNA, 788 bp, Artificial Sequence
  chemically treated genomic DNA (Homo sapiens) CpG-island No: 26387
ggtagggatgggggaaggcggaggagtttttattgaggttaggggtggggtatcgcgttagggggcggggtttgaggcggtgaggggttgggggcgtggtttagggggtcggcgaggggtcggggaagcggtttgacgcggtgcggggtcgggatcggggtcggagtttggattttggcggtggaggaaggcgaggagtcgggggcggggtcgttttagttgaggagcggagagcggttggagggtcgggggcggggcgtgcggaggggcggggcgtgtggaggtcgggacggcgttttcggtcggcggtgaggtcggtttagcgcggagtagtttagtgtttttcgcgtttcgtttcggtagttttacgttcgcgttcgttatgtcggagtagtttagcgtcgtcgagtttttggtcgttatcgcggaggattttagtttttcggttggggtcgtcgttttcgtcgttaagatgtttcggtatcgaggggcggcgttggcgcgggaggaggtgagggggtcgaggcgggaggggtcgggggtcggcgtcgggtttggttttgatttttataggcgtgtcgtattcgagttgcgatggttttttatcgcgtttcgaaatttgttttttttttaggtttgggaggatcgagcgtatttttaatagttgcgtttttatcgtcgaggcgggggaaggttcgagggatcgttttggggggtttcgaggttttttcgatgataaattttataggtcgggggacgtattttaagtgtttcgcgtgatcgtttta

SEQ ID NO: 26388 - DNA, 788 bp, Artificial Sequence
  chemically treated genomic DNA (Homo sapiens) CpG-island No: 26388
taaaacgatcacgcgaaacacttaaaatacgtcccccgacctataaaatttatcatcgaaaaaacctcgaaaccccccaaaacgatccctcgaaccttcccccgcctcgacgataaaaacgcaactattaaaaatacgctcgatcctcccaaacctaaaaaaaaaacaaatttcgaaacgcgataaaaaaccatcgcaactcgaatacgacacgcctataaaaatcaaaaccaaacccgacgccgacccccgacccctcccgcctcgaccccctcacctcctcccgcgccaacgccgcccctcgataccgaaacatcttaacgacgaaaacgacgaccccaaccgaaaaactaaaatcctccgcgataacgaccaaaaactcgacgacgctaaactactccgacataacgaacgcgaacgtaaaactaccgaaacgaaacgcgaaaaacactaaactactccgcgctaaaccgacctcaccgccgaccgaaaacgccgtcccgacctccacacgccccgcccctccgcacgccccgcccccgaccctccaaccgctctccgctcctcaactaaaacgaccccgcccccgactcctcgccttcctccaccgccaaaatccaaactccgaccccgatcccgaccccgcaccgcgtcaaaccgcttccccgacccctcgccgaccccctaaaccacgcccccaacccctcaccgcctcaaaccccgccccctaacgcgataccccacccctaacctcaataaaaactcctccgccttcccccatccctacc

SEQ ID NO: 26389 - DNA, 517 bp, Artificial Sequence
  chemically treated genomic DNA (Homo sapiens) CpG-island No: 26389
ttttcgggatttcgggtattagttttcgtaggcgggagtagtagtggtttatgtcgtttagtaagtttagcggttttttagttgtcgggtttttttttcggtttcgggcgatggttagattgcgtttcgataggtagtatatcgtttcgtagtagtcgcgtatcgggtttagcgtttttatgttggggagtgagtttagaggtgttttaaagagaaagaaaattaaaagaagtttcgttatagtgatttgtaacgcgcgtacgttcgtcgcggcggttatttatagagtttgtttggaaggtacgtttttttatttaaaatggttcgtttcggttttgttttcgtcggttttgggcgtttatagttcgtttaaattgtaaataggtttttttcggttggtttgacgtcgaagatcgcggagtcgcggatttaaagaatgaggaagcgttgatatcggggagaggcgggttttttcgttagtaaggatttaaaaattatttaaaattattaattttta

SEQ ID NO: 26390 - DNA, 517 bp, Artificial Sequence
  chemically treated genomic DNA (Homo sapiens) CpG-island No: 26390
taaaaattaataattttaaataatttttaaatccttactaacgaaaaaacccgcctctccccgatatcaacgcttcctcattctttaaatccgcgactccgcgatcttcgacgtcaaaccaaccgaaaaaaacctatttacaatttaaacgaactataaacgcccaaaaccgacgaaaacaaaaccgaaacgaaccattttaaataaaaaaacgtaccttccaaacaaactctataaataaccgccgcgacgaacgtacgcgcgttacaaatcactataacgaaacttcttttaattttctttctctttaaaacacctctaaactcactccccaacataaaaacgctaaacccgatacgcgactactacgaaacgatatactacctatcgaaacgcaatctaaccatcgcccgaaaccgaaaaaaaaacccgacaactaaaaaaccgctaaacttactaaacgacataaaccactactactcccgcctacgaaaactaatacccgaaatcccgaaaa

SEQ ID NO: 26391 - DNA, 517 bp, Artificial Sequence
  chemically treated genomic DNA (Homo sapiens) CpG-island No: 26391
tggaagttaatggttttgagtgatttttaaatttttgttggcggagaggttcgttttttttcggtattagcgtttttttattttttgaattcgcggtttcgcggttttcggcgttagattagtcggaggaagtttgtttgtaatttaagcgggttgtgaacgtttagggtcggcgggggtagggtcgaggcgggttattttgaataaagaggcgtgttttttaggtaggttttataagtgatcgtcgcggcgagcgtgcgcgcgttgtaggttattgtagcgggattttttttggttttttttttttttggggtatttttggatttattttttagtatgaaggcgttgagttcggtgcgcggttgttacgaggcggtgtgttgtttgtcggaacgtagtttggttatcgttcggggtcgagggaagggttcggtagttgaggagtcgttgagtttgttggacgatatgaattattgttattttcgtttgcgggaattggtattcggagtttcgagag

SEQ ID NO: 26392 - DNA, 517 bp, Artificial Sequence
  chemically treated genomic DNA (Homo sapiens) CpG-island No: 26392
ctctcgaaactccgaataccaattcccgcaaacgaaaataacaataattcatatcgtccaacaaactcaacgactcctcaactaccgaacccttccctcgaccccgaacgataaccaaactacgttccgacaaacaacacaccgcctcgtaacaaccgcgcaccgaactcaacgccttcatactaaaaaataaatccaaaaataccccaaaaaaaaaaaaaaccaaaaaaaatcccgctacaataacctacaacgcgcgcacgctcgccgcgacgatcacttataaaacctacctaaaaaacacgcctctttattcaaaataacccgcctcgaccctacccccgccgaccctaaacgttcacaacccgcttaaattacaaacaaacttcctccgactaatctaacgccgaaaaccgcgaaaccgcgaattcaaaaaataaaaaaacgctaataccgaaaaaaaacgaacctctccgccaacaaaaatttaaaaatcactcaaaaccattaacttcca

SEQ ID NO: 26393 - DNA, 853 bp, Artificial Sequence
  chemically treated genomic DNA (Homo sapiens) CpG-island No: 26393
tacgtcgacggaaaataagtgcgttttttattgtagttattaggaggcgttagtttcgtttgtttttcggtacgggttttcgtttgcgtacgcgttattttttttttttagcgttttcgttttttttttttcggtcgttattagtttcgtttggttagttgcgttcgtgcggcgacgtttacgtattttttgacgtagcgagcgacggcggggagtcgagcggaagtttagtattattgtcgttagaggaggggaggggtgagaagtataagtggtatcggaagtggaattaattcgtttattttttttgcgtttgcgaaatagaaaagataaggcgtttgtcgggcggggtgtggtttcgggtggcggagaacgttgcgattggttttcggttgtggcgatagcgacgattggtttttgcgtgtagagcgcggtgagagtgggtggtggtcgttggaatttaaaagtggcgggtgtggcgcggggttggtagcggtcggagtcgtgcgagttttttattttgtttcgcgagcgggcgagagaacgcgagttttaggattttcggtatttattttttttttattgtattttttcggcgcgtgtgggatcgaggtggatatggattcgtaggtgagtaggggcggcgtaggtgttttgttttggggatggggacgacggttgatcgtttcgatgttgtcgcgttttcggttttcggtcggtttttgttatgtttatcgggagagcgaaggttcgtgcgttttcgtataagtggaaaggggcggaggtaggagtggagacggtttagagtattcggggaggtcggaaggtacgtttgtttgtttttttttagttt

SEQ ID NO: 26394 - DNA, 853 bp, Artificial Sequence
  chemically treated genomic DNA (Homo sapiens) CpG-island No: 26394
aaactaaaaaaaaacaaacaaacgtaccttccgacctccccgaatactctaaaccgtctccactcctacctccgcccctttccacttatacgaaaacgcacgaaccttcgctctcccgataaacataacaaaaaccgaccgaaaaccgaaaacgcgacaacatcgaaacgatcaaccgtcgtccccatccccaaaacaaaacacctacgccgcccctactcacctacgaatccatatccacctcgatcccacacgcgccgaaaaaatacaataaaaaaaaaataaataccgaaaatcctaaaactcgcgttctctcgcccgctcgcgaaacaaaataaaaaactcgcacgactccgaccgctaccaaccccgcgccacacccgccacttttaaattccaacgaccaccacccactctcaccgcgctctacacgcaaaaaccaatcgtcgctatcgccacaaccgaaaaccaatcgcaacgttctccgccacccgaaaccacaccccgcccgacaaacgccttatcttttctatttcgcaaacgcaaaaaaaataaacgaattaattccacttccgataccacttatacttctcacccctcccctcctctaacgacaataatactaaacttccgctcgactccccgccgtcgctcgctacgtcaaaaaatacgtaaacgtcgccgcacgaacgcaactaaccaaacgaaactaataacgaccgaaaaaaaaaaaacgaaaacgctaaaaaaaaaaaataacgcgtacgcaaacgaaaacccgtaccgaaaaacaaacgaaactaacgcctcctaataactacaataaaaaacgcacttattttccgtcgacgta

SEQ ID NO: 26395 - DNA, 853 bp, Artificial Sequence
  chemically treated genomic DNA (Homo sapiens) CpG-island No: 26395
aagttaggggagggtagatagacgtgtttttcgattttttcgggtgttttaagtcgtttttatttttgttttcgtttttttttatttgtgcgggggcgtacggattttcgttttttcggtagatatgataaaggtcgatcgggagtcgggggcgcgatagtatcggagcggttagtcgtcgtttttatttttagggtaggatatttgcgtcgtttttatttatttgcggatttatgtttatttcggttttatacgcgtcgggggaatgtagtggaagagaagtgggtgtcggggattttgggattcgcgttttttcgttcgttcgcgaagtagggtagagaattcgtacggtttcggtcgttattagtttcgcgttatattcgttatttttgaattttaacggttattatttatttttatcgcgttttgtacgtagggattaatcgtcgttgtcgttatagtcgagggttaatcgtagcgtttttcgttattcgaagttatatttcgttcgataggcgttttgttttttttgtttcgtaggcgtaggagaggtaggcggattaattttattttcggtgttatttatgttttttatttttttttttttttagcggtaatagtgttggattttcgttcggtttttcgtcgtcgttcgttacgttagaaaatgcgtggacgtcgtcgtacgaacgtaattggttaagcgaaattggtggcggtcggaggagaaggggcggggacgttggaggaaagaaatgacgcgtgcgtaaacgaggattcgtgtcgggagataggcgggattagcgttttttggtgattgtagtagggagcgtatttgtttttcgtcgacgtg

SEQ ID NO: 26396 - DNA, 853 bp, Artificial Sequence
  chemically treated genomic DNA (Homo sapiens) CpG-island No: 26396
cacgtcgacgaaaaacaaatacgctccctactacaatcaccaaaaaacgctaatcccgcctatctcccgacacgaatcctcgtttacgcacgcgtcatttctttcctccaacgtccccgccccttctcctccgaccgccaccaatttcgcttaaccaattacgttcgtacgacgacgtccacgcattttctaacgtaacgaacgacgacgaaaaaccgaacgaaaatccaacactattaccgctaaaaaaaaaaaaaaataaaaaacataaataacaccgaaaataaaattaatccgcctacctctcctacgcctacgaaacaaaaaaaacaaaacgcctatcgaacgaaatataacttcgaataacgaaaaacgctacgattaaccctcgactataacgacaacgacgattaatccctacgtacaaaacgcgataaaaataaataataaccgttaaaattcaaaaataacgaatataacgcgaaactaataacgaccgaaaccgtacgaattctctaccctacttcgcgaacgaacgaaaaaacgcgaatcccaaaatccccgacacccacttctcttccactacattcccccgacgcgtataaaaccgaaataaacataaatccgcaaataaataaaaacgacgcaaatatcctaccctaaaaataaaaacgacgactaaccgctccgatactatcgcgcccccgactcccgatcgacctttatcatatctaccgaaaaaacgaaaatccgtacgcccccgcacaaataaaaaaaaacgaaaacaaaaataaaaacgacttaaaacacccgaaaaaatcgaaaaacacgtctatctaccctcccctaactt

SEQ ID NO: 26397 - DNA, 507 bp, Artificial Sequence
  chemically treated genomic DNA (Homo sapiens) CpG-island No: 26397
ttagcgcgcgtttttaaattgttggtttttttttttcgtttcgttttttttttgttttttcgttcgaacggttggggttttgttcgttcgttgtttattggttggttttcggtggcgttatcgttttgggttttcgcgtttttcgtttgcgttagttttggaagtacggggcgggacgtttacgggaagcggcgcgtacgttcgtcgattttttcgcgttaatcgtcgacggtcgtcgttcggtgaaggaggggtttagtttttttaggtgtcgcgcgtaggaggggatacgcgtgcgtaaaagggcggtgggtggggcgcgattcgttacggggagggcggggttggggttaatagcgagtggagggcggggcgcgcgagggaggagggcgtggtgggggtatcgagaagggtgaatggagggcggggttgtgaattggggtcggggggcgggatttggagtgattatggggggtggggtagttaacggatgtggtatggggcggg

SEQ ID NO: 26398 - DNA, 507 bp, Artificial Sequence
  chemically treated genomic DNA (Homo sapiens) CpG-island No: 26398
cccgccccataccacatccgttaactaccccaccccccataatcactccaaatcccgccccccgaccccaattcacaaccccgccctccattcacccttctcgatacccccaccacgccctcctccctcgcgcgccccgccctccactcgctattaaccccaaccccgccctccccgtaacgaatcgcgccccacccaccgcccttttacgcacgcgtatcccctcctacgcgcgacacctaaaaaaactaaacccctccttcaccgaacgacgaccgtcgacgattaacgcgaaaaaatcgacgaacgtacgcgccgcttcccgtaaacgtcccgccccgtacttccaaaactaacgcaaacgaaaaacgcgaaaacccaaaacgataacgccaccgaaaaccaaccaataaacaacgaacgaacaaaaccccaaccgttcgaacgaaaaaacaaaaaaaaaacgaaacgaaaaaaaaaaaccaacaatttaaaaacgcgcgctaa

SEQ ID NO: 26399 - DNA, 507 bp, Artificial Sequence
  chemically treated genomic DNA (Homo sapiens) CpG-island No: 26399
ttcgttttatgttatattcgttagttgttttattttttatggttattttaagtttcgtttttcggttttagtttatagtttcgttttttatttatttttttcgatgtttttattacgtttttttttttcgcgcgtttcgttttttattcgttgttagttttagtttcgtttttttcgtgacgagtcgcgttttatttatcgtttttttgcgtacgcgtgtttttttttgcgcgcggtatttgggaggattgagttttttttttatcgggcggcggtcgtcggcggttggcgcgagggagtcggcgggcgtgcgcgtcgtttttcgtggacgtttcgtttcgtgtttttagggttggcgtagacgaagggcgcgaggatttaaggcggtgacgttatcgagagttagttaatgggtagcgagcgggtagagttttagtcgttcgaacggaaaggtagggaaagggcgggacgggaggaaagagttaatagtttgggagcgcgcgttag

SEQ ID NO: 26400 - DNA, 507 bp, Artificial Sequence
  chemically treated genomic DNA (Homo sapiens) CpG-island No: 26400
ctaacgcgcgctcccaaactattaactctttcctcccgtcccgccctttccctacctttccgttcgaacgactaaaactctacccgctcgctacccattaactaactctcgataacgtcaccgccttaaatcctcgcgcccttcgtctacgccaaccctaaaaacacgaaacgaaacgtccacgaaaaacgacgcgcacgcccgccgactccctcgcgccaaccgccgacgaccgccgcccgataaaaaaaaaactcaatcctcccaaataccgcgcgcaaaaaaaaacacgcgtacgcaaaaaaacgataaataaaacgcgactcgtcacgaaaaaaacgaaactaaaactaacaacgaataaaaaacgaaacgcgcgaaaaaaaaaaacgtaataaaaacatcgaaaaaaataaataaaaaacgaaactataaactaaaaccgaaaaacgaaacttaaaataaccataaaaaataaaacaactaacgaatataacataaaacgaa

SEQ ID NO: 26401 - DNA, 628 bp, Artificial Sequence
  chemically treated genomic DNA (Homo sapiens) CpG-island No: 26401
gcgtttttcgtagtcggggttcggggagggagggtttcggtagggggcgtcggggagggaggattaggagattcgcggtttcgttttcgtcgcgtttttttttcgggcgggataattgaacggcgcggttttggtttagcgttggttgtcgaggttcggtcggagcgtggagttcgcgtcgttgttttaggatcgcgttcgcgtttttgttcgtcgtcgtttatcgttcgtcgttcgtcgtttatggagcgcgtcgcgtcgtcgcgtcgggtttcgttttcgttgttgttgttcggcggttttgcgttgttggcggtcggaggtaggggcgtttcgggttcgtcgttttagtttagggtttcgattttttcggtttcgcgttttttgcgagtttcggaattacggggattcggagttcgtgcgttgttttgcgcggcgttttcggattgttagcgtcgaggtttcggcgacgttttttttttttacggttagtttcggtttttatttttttttcggtttggggatttgttttaaaatcggatttttttattttttaaatatatcgttttattttagttttagtaaatttagtcggtttcgggggtcgtatttcgggttttgggggttt

SEQ ID NO: 26402 - DNA, 628 bp, Artificial Sequence
  chemically treated genomic DNA (Homo sapiens) CpG-island No: 26402
aaacccccaaaacccgaaatacgacccccgaaaccgactaaatttactaaaactaaaataaaacgatatatttaaaaaataaaaaaatccgattttaaaacaaatccccaaaccgaaaaaaaaataaaaaccgaaactaaccgtaaaaaaaaaaaacgtcgccgaaacctcgacgctaacaatccgaaaacgccgcgcaaaacaacgcacgaactccgaatccccgtaattccgaaactcgcaaaaaacgcgaaaccgaaaaaatcgaaaccctaaactaaaacgacgaacccgaaacgcccctacctccgaccgccaacaacgcaaaaccgccgaacaacaacaacgaaaacgaaacccgacgcgacgacgcgacgcgctccataaacgacgaacgacgaacgataaacgacgacgaacaaaaacgcgaacgcgatcctaaaacaacgacgcgaactccacgctccgaccgaacctcgacaaccaacgctaaaccaaaaccgcgccgttcaattatcccgcccgaaaaaaaaacgcgacgaaaacgaaaccgcgaatctcctaatcctccctccccgacgccccctaccgaaaccctccctccccgaaccccgactacgaaaaacgc

SEQ ID NO: 26403 - DNA, 628 bp, Artificial Sequence
  chemically treated genomic DNA (Homo sapiens) CpG-island No: 26403
gaatttttagggttcgggatgcggttttcggagtcggttggatttgttaggattggggtaggacggtgtgtttgaggggtgggggaattcggttttgaaataagtttttaggtcggggaggagatgaggatcggagttggtcgtgggggaggggggcgtcgtcgaggtttcggcgttgatagttcgggggcgtcgcgtagggtaacgtacggatttcgagttttcgtggtttcgaaattcgtagggagcgcgaggtcgagggggtcgggattttaagttggggcggcggattcgggacgtttttattttcggtcgttagtagcgtaaggtcgtcgagtagtagtagcggaagcgggattcggcgcgacggcgcggcgcgttttatgggcggcgggcgacgggcggtgggcggcggcggataaaggcgcgggcgcggttttggggtagcggcgcgggttttacgtttcggtcgagtttcggtagttaacgttgggttagggtcgcgtcgtttaattatttcgttcgggaggagggcgcggcggaggcggggtcgcgggttttttggtttttttttttcggcgttttttgtcgggatttttttttttcggatttcggttgcgaggggcgt

SEQ ID NO: 26404 - DNA, 628 bp, Artificial Sequence
  chemically treated genomic DNA (Homo sapiens) CpG-island No: 26404
acgcccctcgcaaccgaaatccgaaaaaaaaaaatcccgacaaaaaacgccgaaaaaaaaaaaccaaaaaacccgcgaccccgcctccgccgcgccctcctcccgaacgaaataattaaacgacgcgaccctaacccaacgttaactaccgaaactcgaccgaaacgtaaaacccgcgccgctaccccaaaaccgcgcccgcgcctttatccgccgccgcccaccgcccgtcgcccgccgcccataaaacgcgccgcgccgtcgcgccgaatcccgcttccgctactactactcgacgaccttacgctactaacgaccgaaaataaaaacgtcccgaatccgccgccccaacttaaaatcccgaccccctcgacctcgcgctccctacgaatttcgaaaccacgaaaactcgaaatccgtacgttaccctacgcgacgcccccgaactatcaacgccgaaacctcgacgacgcccccctcccccacgaccaactccgatcctcatctcctccccgacctaaaaacttatttcaaaaccgaattcccccacccctcaaacacaccgtcctaccccaatcctaacaaatccaaccgactccgaaaaccgcatcccgaaccctaaaaattc

SEQ ID NO: 26405 - DNA, 574 bp, Artificial Sequence
  chemically treated genomic DNA (Homo sapiens) CpG-island No: 26405
cgtgggaggtagttgcgtttttggggttcggttttgcgagtagtcgtgggtggggaaaggagtttgggggtacgcgggttttgggagtggataagggggtggcgttcgggggttgagggggtttaggggcgagtgtatttaaggcgtgtcggtttcgtttagtcgcgttttgggtgcggcgagtttgtatattggtgtagatgttttcgtcgtcgcgtcgggcgtaggtttgtatttgtaagttcgggattagggatttgaaagcgttcggcgcgtcgtttggatttgtttcgtcgggcgttatcgttgcgttttaggcgggaattgtaggaaaattttttttgtttggcgggagggcgggggaggaggacggtttacgatcgatttcgggtgcggtaggggaagattttgtcggggtcggggcggggggaggcgggtaaagggtttattacgttggggtcgaaagtttaagtaagtcgcgcgttttttgatttttaatattttaggttgtaggataagtagtattgttttatttatttttggacgttgcgttgggcgttttatttgtttttat

SEQ ID NO: 26406 - DNA, 574 bp, Artificial Sequence
  chemically treated genomic DNA (Homo sapiens) CpG-island No: 26406
ataaaaacaaataaaacgcccaacgcaacgtccaaaaataaataaaacaatactacttatcctacaacctaaaatattaaaaatcaaaaaacgcgcgacttacttaaactttcgaccccaacgtaataaaccctttacccgcctccccccgccccgaccccgacaaaatcttcccctaccgcacccgaaatcgatcgtaaaccgtcctcctcccccgccctcccgccaaacaaaaaaaattttcctacaattcccgcctaaaacgcaacgataacgcccgacgaaacaaatccaaacgacgcgccgaacgctttcaaatccctaatcccgaacttacaaatacaaacctacgcccgacgcgacgacgaaaacatctacaccaatatacaaactcgccgcacccaaaacgcgactaaacgaaaccgacacgccttaaatacactcgcccctaaaccccctcaacccccgaacgccacccccttatccactcccaaaacccgcgtacccccaaactcctttccccacccacgactactcgcaaaaccgaaccccaaaaacgcaactacctcccacg

SEQ ID NO: 26407 - DNA, 574 bp, Artificial Sequence
  chemically treated genomic DNA (Homo sapiens) CpG-island No: 26407
atagaagtaagtaaaacgtttaacgtaacgtttagaaatggatgagatagtattgtttattttatagtttgggatgttagggattagagagcgcgcggtttgtttaaattttcggttttagcgtggtaggttttttgttcgttttttttcgtttcgatttcggtaaggtttttttttgtcgtattcggggtcggtcgtgggtcgtttttttttttcgttttttcgttaggtagaggggatttttttatagttttcgtttaaagcgtagcggtgacgttcggcggggtaggtttaggcggcgcgtcgggcgtttttaagtttttggtttcgggtttgtaagtgtagatttgcgttcggcgcggcggcgggaatatttgtattagtgtgtagattcgtcgtatttagagcgcggttgggcgggatcggtacgttttgggtatattcgtttttgggtttttttaattttcgggcgttatttttttatttatttttagagttcgcgtatttttaaatttttttttttatttacggttgttcgtagggtcgggttttaagggcgtagttattttttacg

SEQ ID NO: 26408 - DNA, 574 bp, Artificial Sequence
  chemically treated genomic DNA (Homo sapiens) CpG-island No: 26408
cgtaaaaaataactacgcccttaaaacccgaccctacgaacaaccgtaaataaaaaaaaaaatttaaaaatacgcgaactctaaaaataaataaaaaaataacgcccgaaaattaaaaaaacccaaaaacgaatatacccaaaacgtaccgatcccgcccaaccgcgctctaaatacgacgaatctacacactaatacaaatattcccgccgccgcgccgaacgcaaatctacacttacaaacccgaaaccaaaaacttaaaaacgcccgacgcgccgcctaaacctaccccgccgaacgtcaccgctacgctttaaacgaaaactataaaaaaatcccctctacctaacgaaaaaacgaaaaaaaaaaacgacccacgaccgaccccgaatacgacaaaaaaaaaccttaccgaaatcgaaacgaaaaaaaacgaacaaaaaacctaccacgctaaaaccgaaaatttaaacaaaccgcgcgctctctaatccctaacatcccaaactataaaataaacaatactatctcatccatttctaaacgttacgttaaacgttttacttacttctat

SEQ ID NO: 26409 - DNA, 798 bp, Artificial Sequence
  chemically treated genomic DNA (Homo sapiens) CpG-island No: 26409
ggtggttgttgaggtaatcgatatttcgggtaacggtaagtggaggcgggagggggcgtggtttcgacgggtaagcggcgataagaggtggcgtttttcgcggtattgcgagtatcgttagtttgcgtcgttaggcgtaggcggggtggtttttgcgtttttcgtttttttgaaaaattcggcgggcgagcgaggttgcgggtcggtcgttgtttttttttatatttttcgtcgagaagtttcgttcggcgtttaatatggcgggtgggcgttgcggttcgtagttaacggcgtttttggtcgtttggatcgcggttgtggcggcgacggtaggtttcgaggaggtcgcgttgtcgtcggagtagagtcgggtttagtttatgatcgtttttaattggacgttggtgatggagggcgagtggatgttgaaattgtgagtgtgttcgttcgtttcggacgtcgtagtgttttcgcgggcgttatttttttaagttcgcgcggttcggtggcgatttcgtattgtcgtttgggtttaatttaaaatttcggattaggtttgttaataatttgcggcgtcggtgtcgggtcgtttgcgattttgtattgtcgttgggttcgatttggggttcgcggattcgttttattaacgatttgcggttgtggggttcggtcgttcgcgtcgcgtatgcgcgtcgagttttcgcggtgatagtcgagggtgtagcgcgtttttttgttttgggggatagtgttttcggggtggagtgggtagttttttatagggaggagaagggaagg

SEQ ID NO: 26410 - DNA, 798 bp, Artificial Sequence
  chemically treated genomic DNA (Homo sapiens) CpG-island No: 26410
ccttcccttctcctccctataaaaaactacccactccaccccgaaaacactatcccccaaaacaaaaaaacgcgctacaccctcgactatcaccgcgaaaactcgacgcgcatacgcgacgcgaacgaccgaaccccacaaccgcaaatcgttaataaaacgaatccgcgaaccccaaatcgaacccaacgacaatacaaaatcgcaaacgacccgacaccgacgccgcaaattattaacaaacctaatccgaaattttaaattaaacccaaacgacaatacgaaatcgccaccgaaccgcgcgaacttaaaaaaataacgcccgcgaaaacactacgacgtccgaaacgaacgaacacactcacaatttcaacatccactcgccctccatcaccaacgtccaattaaaaacgatcataaactaaacccgactctactccgacgacaacgcgacctcctcgaaacctaccgtcgccgccacaaccgcgatccaaacgaccaaaaacgccgttaactacgaaccgcaacgcccacccgccatattaaacgccgaacgaaacttctcgacgaaaaatataaaaaaaaacaacgaccgacccgcaacctcgctcgcccgccgaatttttcaaaaaaacgaaaaacgcaaaaaccaccccgcctacgcctaacgacgcaaactaacgatactcgcaataccgcgaaaaacgccacctcttatcgccgcttacccgtcgaaaccacgccccctcccgcctccacttaccgttacccgaaatatcgattacctcaacaaccacc

SEQ ID NO: 26411 - DNA, 798 bp, Artificial Sequence
  chemically treated genomic DNA (Homo sapiens) CpG-island No: 26411
ttttttttttttttttttatgggaagttgtttattttatttcgaaaatattgttttttaaagtaaggggacgcgttgtattttcggttgttatcgcgagggttcggcgcgtatgcgcggcgcgagcggtcgggttttatagtcgtaggtcgttggtaaggcgggttcgcggattttaggtcgagtttagcggtagtgtaggatcgtaagcggttcggtatcggcgtcgtaggttgttggtaagtttggttcggggttttaggttgagtttaagcggtaatgcgggatcgttatcgggtcgcgcgggtttgggagggtgacgttcgcgaggatattgcggcgttcggggcgggcgggtatatttataattttagtatttattcgttttttattattagcgtttagttggaggcggttatgggttggattcggttttgtttcggcggtagcgcggttttttcggggtttgtcgtcgtcgttatagtcgcgatttaggcggttaggagcgtcgttagttgcgggtcgtagcgtttattcgttatgttgggcgtcgagcgaggtttttcggcggggagtgtggggaagggtagcggtcggttcgtagtttcgttcgttcgtcgggttttttaaggaagcgggagacgtaagggttatttcgtttacgtttagcggcgtagattggcggtgttcgtaatgtcgcggaggacgttattttttatcgtcgtttgttcgtcgaggttacgttttttttcgtttttatttgtcgttgttcggggtgtcggttattttagtaattatt

SEQ ID NO: 26412 - DNA, 798 bp, Artificial Sequence
  chemically treated genomic DNA (Homo sapiens) CpG-island No: 26412
aataattactaaaataaccgacaccccgaacaacgacaaataaaaacgaaaaaaaacgtaacctcgacgaacaaacgacgataaaaaataacgtcctccgcgacattacgaacaccgccaatctacgccgctaaacgtaaacgaaataacccttacgtctcccgcttccttaaaaaacccgacgaacgaacgaaactacgaaccgaccgctacccttccccacactccccgccgaaaaacctcgctcgacgcccaacataacgaataaacgctacgacccgcaactaacgacgctcctaaccgcctaaatcgcgactataacgacgacgacaaaccccgaaaaaaccgcgctaccgccgaaacaaaaccgaatccaacccataaccgcctccaactaaacgctaataataaaaaacgaataaatactaaaattataaatatacccgcccgccccgaacgccgcaatatcctcgcgaacgtcaccctcccaaacccgcgcgacccgataacgatcccgcattaccgcttaaactcaacctaaaaccccgaaccaaacttaccaacaacctacgacgccgataccgaaccgcttacgatcctacactaccgctaaactcgacctaaaatccgcgaacccgccttaccaacgacctacgactataaaacccgaccgctcgcgccgcgcatacgcgccgaaccctcgcgataacaaccgaaaatacaacgcgtccccttactttaaaaaacaatattttcgaaataaaataaacaacttcccataaaaaaaaaaaaaaaaaa

SEQ ID NO: 26413 - DNA, 582 bp, Artificial Sequence
  chemically treated genomic DNA (Homo sapiens) CpG-island No: 26413
ttcgcgttcgttttttcgtttttttttcgttcgtttttttttttattatcgtagcgttaggaggaaggcggtcggggtttaagatggttttagtcgggttttgcgttttgttcgtttgttgttgggggtcggcggcggtgttggttacggtcgtcggcgacgtggatttatttaaggagttggagtgtaagtttaaaagtattacggtgtcggtattgttttttttgcgcgagaacgatttgagtattatgtatagtttttcggtttcggagtttaagttttttttttcggtgcgtaacgatttttcgggagaaatggtcgtggtggacgatttggagaatacggagttgttttatttcgtgttgggtgagtttcgggggaggtcgaggcggtcggaggcgttggatcggcgtttttattttttattttagttcgttttatatatttattcgtcgacgatttttttttttttatttttatttttcggattcgttttattttcggattattttttatatttatttgtatattagcgtttttgtgtatttgatttttttttaaattcgatttggatgttgagtt

SEQ ID NO: 26414 - DNA, 582 bp, Artificial Sequence
  chemically treated genomic DNA (Homo sapiens) CpG-island No: 26414
aactcaacatccaaatcgaatttaaaaaaaaatcaaatacacaaaaacgctaatatacaaataaatataaaaaataatccgaaaataaaacgaatccgaaaaataaaaataaaaaaaaaaaaatcgtcgacgaataaatatataaaacgaactaaaataaaaaataaaaacgccgatccaacgcctccgaccgcctcgacctcccccgaaactcacccaacacgaaataaaacaactccgtattctccaaatcgtccaccacgaccatttctcccgaaaaatcgttacgcaccgaaaaaaaaaacttaaactccgaaaccgaaaaactatacataatactcaaatcgttctcgcgcaaaaaaaacaataccgacaccgtaatacttttaaacttacactccaactccttaaataaatccacgtcgccgacgaccgtaaccaacaccgccgccgacccccaacaacaaacgaacaaaacgcaaaacccgactaaaaccatcttaaaccccgaccgccttcctcctaacgctacgataataaaaaaaaaaacgaacgaaaaaaaaacgaaaaaacgaacgcgaa

SEQ ID NO: 26415 - DNA, 582 bp, Artificial Sequence
  chemically treated genomic DNA (Homo sapiens) CpG-island No: 26415
ggtttagtatttaggtcggatttggggagaagttaggtgtatagaggcgttagtatgtaagtgggtgtggagaatggttcgggagtggggcggattcgggaggtaggagtgggggaggggaggtcgtcggcgagtgggtgtgtagagcgagttggagtggggggtgggggcgtcggtttagcgttttcggtcgtttcgatttttttcgggatttatttagtacgaagtagggtagtttcgtgttttttaggtcgtttattacgattatttttttcgggaagtcgttgcgtatcgagaagaggagtttgggtttcgaggtcgaggggttgtgtatgatgtttaggtcgttttcgcgtaggaagggtagtgtcgatatcgtgatgtttttgagtttgtattttagttttttggatggatttacgtcgtcggcggtcgtggttagtatcgtcgtcggtttttagtagtaggcgagtagggcgtagagttcggttaaagttattttgagtttcggtcgttttttttttagcgttgcgatggtgggggaggaagcgagcggggagggagcgagggagcgagcgcggg

SEQ ID NO: 26416 - DNA, 582 bp, Artificial Sequence
  chemically treated genomic DNA (Homo sapiens) CpG-island No: 26416
cccgcgctcgctccctcgctccctccccgctcgcttcctcccccaccatcgcaacgctaaaaaaaaaacgaccgaaactcaaaataactttaaccgaactctacgccctactcgcctactactaaaaaccgacgacgatactaaccacgaccgccgacgacgtaaatccatccaaaaaactaaaatacaaactcaaaaacatcacgatatcgacactacccttcctacgcgaaaacgacctaaacatcatacacaacccctcgacctcgaaacccaaactcctcttctcgatacgcaacgacttcccgaaaaaaataatcgtaataaacgacctaaaaaacacgaaactaccctacttcgtactaaataaatcccgaaaaaaatcgaaacgaccgaaaacgctaaaccgacgcccccaccccccactccaactcgctctacacacccactcgccgacgacctcccctcccccactcctacctcccgaatccgccccactcccgaaccattctccacacccacttacatactaacgcctctatacacctaacttctccccaaatccgacctaaatactaaacc

SEQ ID NO: 26417 - DNA, 528 bp, Artificial Sequence
  chemically treated genomic DNA (Homo sapiens) CpG-island No: 26417
gtcgcggggattcgataggcggtattacgtatatatttgcggtaggtgtgcggagtcgttttttttcgggaaagtgttgggttggggggatgatggggcgttggggggtggatttcggttgcgggttgcgttcggtttttagcgttggggattttcgttgcgcgtttttttcgcgtattttacgcgcgttaggaggagatcgcgcgttttacgttcgtggagaggaggggacgcgtttttttcggttgtcgtcgtagtgtttttcggtttttagtagggggcgcgttagagtgttaggcgtcgttgcgaggtttttcggtttcgcgggattcgtcggggtttttttttgtttttcgtttttatttggttgaggtagttttcgtcgttggttttcgtttttatttttatttttattagtatcgcgttcggtttcgttatataatatagtatggttggggttgtcgttgtcgttatagtcgttttttttttggtgtgcgcggggttgtcgttttgttattggtgggattt

SEQ ID NO: 26418 - DNA, 528 bp, Artificial Sequence
  chemically treated genomic DNA (Homo sapiens) CpG-island No: 26418
aaatcccaccaataacaaaacgacaaccccgcgcacaccaaaaaaaaaacgactataacgacaacgacaaccccaaccatactatattatataacgaaaccgaacgcgatactaataaaaataaaaataaaaacgaaaaccaacgacgaaaactacctcaaccaaataaaaacgaaaaacaaaaaaaaaccccgacgaatcccgcgaaaccgaaaaacctcgcaacgacgcctaacactctaacgcgccccctactaaaaaccgaaaaacactacgacgacaaccgaaaaaaacgcgtcccctcctctccacgaacgtaaaacgcgcgatctcctcctaacgcgcgtaaaatacgcgaaaaaaacgcgcaacgaaaatccccaacgctaaaaaccgaacgcaacccgcaaccgaaatccaccccccaacgccccatcatccccccaacccaacactttcccgaaaaaaaacgactccgcacacctaccgcaaatatatacgtaataccgcctatcgaatccccgcgac

SEQ ID NO: 26419 - DNA, 528 bp, Artificial Sequence
  chemically treated genomic DNA (Homo sapiens) CpG-island No: 26419
gggttttattagtgataaggcggtagtttcgcgtatattaaagagaaggcggttgtggcggtagcggtagttttagttatgttgtgttatgtgacgaggtcggacgcggtgttgatggaggtggaggtggaggcgaaagttaacggcgaggattgttttaattaggtgagggcgaggggtaagaaggggtttcggcgggtttcgcgaggtcgaggggtttcgtagcgacgtttggtattttggcgcgttttttattaggggtcgggaggtattgcggcggtagtcggggggagcgcgtttttttttttttacgggcgtggggcgcgcggtttttttttggcgcgcgtggggtgcgcggagaaagcgcgtagcgggggtttttagcgttgagggtcgggcgtagttcgtagtcgggatttattttttagcgttttattatttttttaatttagtattttttcggaagaaggcggtttcgtatatttgtcgtaggtatgtgcgtgatgtcgtttgtcgggttttcgcggt

SEQ ID NO: 26420 - DNA, 528 bp, Artificial Sequence
  chemically treated genomic DNA (Homo sapiens) CpG-island No: 26420
accgcgaaaacccgacaaacgacatcacgcacatacctacgacaaatatacgaaaccgccttcttccgaaaaaatactaaattaaaaaaataataaaacgctaaaaaataaatcccgactacgaactacgcccgaccctcaacgctaaaaacccccgctacgcgctttctccgcgcaccccacgcgcgccaaaaaaaaaccgcgcgccccacgcccgtaaaaaaaaaaaaacgcgctccccccgactaccgccgcaatacctcccgacccctaataaaaaacgcgccaaaataccaaacgtcgctacgaaacccctcgacctcgcgaaacccgccgaaaccccttcttacccctcgccctcacctaattaaaacaatcctcgccgttaactttcgcctccacctccacctccatcaacaccgcgtccgacctcgtcacataacacaacataactaaaactaccgctaccgccacaaccgccttctctttaatatacgcgaaactaccgccttatcactaataaaaccc

SEQ ID NO: 26421 - DNA, 1267 bp, Artificial Sequence
  chemically treated genomic DNA (Homo sapiens) CpG-island No: 26421
aacggagaaggtagcggtttttttaaataaggcggagaaggttaagatgatgatcggacggttattttaggtattcgtttcgaggtcgcggggggagggattttattatgtaaatttgagttgttgatcgatgacgcgttattattttacgtatcgtttcgttcgtttattggttgagatgagtttggttttattgataataaataggggggcgcgcggtttggaggcggggtcgtagggggcgcgggttggggcgggggaatttcgtttcgttttttttgtgcggcgttcgggcgtaacgtaaatatggcggcgggtggtattcgtcggtgaggcggtgtcgggcgggggttgtcgggtgttatgggcggtggcgacggtatcgttttcgcgtttttttgagcgggacggtagggggggtttttgcgttgagtcgggcgatggacgatagcggcgagttgggtggtttggagattatggagatttttacggagttgggcgacgagttgattttgggagatatcgacggtgagtggtgggtgggtgggagtgcgggggtcgcgcggggaggaaggggttacggcggcgcgttcgggtgcgcgtgcgtttatttttcgatagtttcggttcgcgcgggaagaatttcgtgcgtacggtgttttcggcggtttttaattttttcggcgttgcgagcgtgagttcgatttagttgcgtcgtttcgggaggtcgtgggatttggggcgtcgcggggtcgaaagcggcgcgagggtcgcgggttttagagcgcggggttagggacgtcgcgggggcgttttagggagcggtttaaggagagcgcgtggtcgtcgtttttttcgcgcgtttatacgcggttttcgtggttcgttttttcgtcgttcgcgatcgcgcgtcgtatttgttattttttttttggtcgcggggacgtttttgggattttcggggtttagtttttagttttcgcgtttcgaatttttgggttttttaggattgatcgacggttaggtcgtcgggtgtttcgcgaaattttgggtagcgattgtagaagtaagttgttgatgaagagagtagtggcggcggagtgtggatatattttttcgggatggagattcgggcgtttttgttgttacgttgtaaggggaattgagtagaagaaattttgagttgtggtttttcgggtacgggttggggagcgggtggtttttgttttagcgttttaatagcggagtggaagagttggtaggagtt

SEQ ID NO: 26422 - DNA, 1267 bp, Artificial Sequence
  chemically treated genomic DNA (Homo sapiens) CpG-island No: 26422
aactcctaccaactcttccactccgctattaaaacgctaaaacaaaaaccacccgctccccaacccgtacccgaaaaaccacaactcaaaatttcttctactcaattccccttacaacgtaacaacaaaaacgcccgaatctccatcccgaaaaaatatatccacactccgccgccactactctcttcatcaacaacttacttctacaatcgctacccaaaatttcgcgaaacacccgacgacctaaccgtcgatcaatcctaaaaaacccaaaaattcgaaacgcgaaaactaaaaactaaaccccgaaaatcccaaaaacgtccccgcgaccaaaaaaaaaataacaaatacgacgcgcgatcgcgaacgacgaaaaaacgaaccacgaaaaccgcgtataaacgcgcgaaaaaaacgacgaccacgcgctctccttaaaccgctccctaaaacgcccccgcgacgtccctaaccccgcgctctaaaacccgcgaccctcgcgccgctttcgaccccgcgacgccccaaatcccacgacctcccgaaacgacgcaactaaatcgaactcacgctcgcaacgccgaaaaaattaaaaaccgccgaaaacaccgtacgcacgaaattcttcccgcgcgaaccgaaactatcgaaaaataaacgcacgcgcacccgaacgcgccgccgtaaccccttcctccccgcgcgacccccgcactcccacccacccaccactcaccgtcgatatctcccaaaatcaactcgtcgcccaactccgtaaaaatctccataatctccaaaccacccaactcgccgctatcgtccatcgcccgactcaacgcaaaaaccccccctaccgtcccgctcaaaaaaacgcgaaaacgataccgtcgccaccgcccataacacccgacaacccccgcccgacaccgcctcaccgacgaataccacccgccgccatatttacgttacgcccgaacgccgcacaaaaaaaacgaaacgaaattcccccgccccaacccgcgccccctacgaccccgcctccaaaccgcgcgcccccctatttattatcaataaaaccaaactcatctcaaccaataaacgaacgaaacgatacgtaaaataataacgcgtcatcgatcaacaactcaaatttacataataaaatccctccccccgcgacctcgaaacgaatacctaaaataaccgtccgatcatcatcttaaccttctccgccttatttaaaaaaaccgctaccttctccgtt

SEQ ID NO: 26423 - DNA, 1267 bp, Artificial Sequence
  chemically treated genomic DNA (Homo sapiens) CpG-island No: 26423
ggtttttattagtttttttatttcgttgttaaggcgttggaataaaggttattcgttttttagttcgtattcgaggggttataatttaaaattttttttgtttaattttttttgtagcgtgatagtaggagcgttcgggtttttatttcggagagatgtgtttatatttcgtcgttattgttttttttattagtaatttgtttttgtagtcgttgtttaaagtttcgcggagtattcggcgatttggtcgtcggttaattttgagaagtttagggattcggggcgcggagattgggggttgggtttcgggaattttaaagacgttttcgcggttaggaagggagtgataggtgcgacgcgcggtcgcgggcggcgggagagcggattacggaaatcgcgtgtgggcgcgcgagggaggcggcggttacgcgttttttttaggtcgttttttgagacgttttcgcgacgtttttagtttcgcgttttggaattcgcgattttcgcgtcgttttcggtttcgcggcgttttagattttacggtttttcggagcggcgtagttgggtcgggtttacgttcgtagcgtcggaagggttgaggatcgtcgggggtatcgtgcgtacggggtttttttcgcgcgaatcggggttgtcggggggtgggcgtacgcgtattcgggcgcgtcgtcgtaattttttttttttcgcgcggttttcgtatttttatttatttattatttatcgtcgatgttttttagggttagttcgtcgtttagtttcgtgagggtttttatggtttttagattatttagttcgtcgttgtcgtttatcgttcggtttagcgtagaagttttttttgtcgtttcgtttagggagacgcgggggcggtgtcgtcgttatcgtttatgatattcgataattttcgttcggtatcgttttatcgacgggtgttattcgtcgttatgtttgcgttgcgttcgggcgtcgtatagaaagggcggggcgggattttttcgttttagttcgcgttttttgcggtttcgtttttaggtcgcgcgtttttttgtttgttgttaatgggattaggtttattttagttaatgggcgagcgaagcggtgcgtggggtgatggcgcgttatcgattagtagtttagatttgtatagtgaggttttttttttcgcggtttcggagcgaatgtttggagtagtcgttcggttattattttaatttttttcgttttgtttaaaggagtcgttgtttttttcgtt

SEQ ID NO: 26424 - DNA, 1267 bp, Artificial Sequence
  chemically treated genomic DNA (Homo sapiens) CpG-island No: 26424
aacgaaaaaaacaacgactcctttaaacaaaacgaaaaaaattaaaataataaccgaacgactactccaaacattcgctccgaaaccgcgaaaaaaaaaacctcactatacaaatctaaactactaatcgataacgcgccatcaccccacgcaccgcttcgctcgcccattaactaaaataaacctaatcccattaacaacaaacaaaaaaacgcgcgacctaaaaacgaaaccgcaaaaaacgcgaactaaaacgaaaaaatcccgccccgccctttctatacgacgcccgaacgcaacgcaaacataacgacgaataacacccgtcgataaaacgataccgaacgaaaattatcgaatatcataaacgataacgacgacaccgcccccgcgtctccctaaacgaaacgacaaaaaaaacttctacgctaaaccgaacgataaacgacaacgacgaactaaataatctaaaaaccataaaaaccctcacgaaactaaacgacgaactaaccctaaaaaacatcgacgataaataataaataaataaaaatacgaaaaccgcgcgaaaaaaaaaaaattacgacgacgcgcccgaatacgcgtacgcccaccccccgacaaccccgattcgcgcgaaaaaaaccccgtacgcacgatacccccgacgatcctcaacccttccgacgctacgaacgtaaacccgacccaactacgccgctccgaaaaaccgtaaaatctaaaacgccgcgaaaccgaaaacgacgcgaaaatcgcgaattccaaaacgcgaaactaaaaacgtcgcgaaaacgtctcaaaaaacgacctaaaaaaaacgcgtaaccgccgcctccctcgcgcgcccacacgcgatttccgtaatccgctctcccgccgcccgcgaccgcgcgtcgcacctatcactcccttcctaaccgcgaaaacgtctttaaaattcccgaaacccaacccccaatctccgcgccccgaatccctaaacttctcaaaattaaccgacgaccaaatcgccgaatactccgcgaaactttaaacaacgactacaaaaacaaattactaataaaaaaaacaataacgacgaaatataaacacatctctccgaaataaaaacccgaacgctcctactatcacgctacaaaaaaaattaaacaaaaaaaattttaaattataacccctcgaatacgaactaaaaaacgaataacctttattccaacgccttaacaacgaaataaaaaaactaataaaaacc

SEQ ID NO: 26425 - DNA, 581 bp, Artificial Sequence
  chemically treated genomic DNA (Homo sapiens) CpG-island No: 26425
agatagtcgttgtcgacgttaggggcgaggcgtagtgagttttttttcgagttttttttttcgcgttaagtattgtaattcgttgcggagatagtagaggtttgatcgtttcgttgaggttttagaatagtaaagtaagttattgggattgtcgaagtttcgcgtgtttttcgttttcgcgggtgtcgggtttggagagtgttaagtattttgagattcgcgtttttttagcgcgtgaattttaatcgttaatcgaatattgcgtttttcgattttgttcgattttgtagacgttcgaaatttcggaagttaaaatcgtgtttgaatttattgttcgcgttttatttttttttatgggtagttttttgagtaaattggaattttcgttttcgtttttagtttaggtgcgtatcgatttgttcgagaggtttacgaaacgtcggttattttagtttttttattaagtttatcgggtttagttcgtttatcgcgtttattttgttttacggtatagatttgtgaggaggcggttaaatttggattttgttaatttaattacgtggttggttaacgaggtttgg

SEQ ID NO: 26426 - DNA, 581 bp, Artificial Sequence
  chemically treated genomic DNA (Homo sapiens) CpG-island No: 26426
ccaaacctcgttaaccaaccacgtaattaaattaacaaaatccaaatttaaccgcctcctcacaaatctataccgtaaaacaaaataaacgcgataaacgaactaaacccgataaacttaataaaaaaactaaaataaccgacgtttcgtaaacctctcgaacaaatcgatacgcacctaaactaaaaacgaaaacgaaaattccaatttactcaaaaaactacccataaaaaaaaataaaacgcgaacaataaattcaaacacgattttaacttccgaaatttcgaacgtctacaaaatcgaacaaaatcgaaaaacgcaatattcgattaacgattaaaattcacgcgctaaaaaaacgcgaatctcaaaatacttaacactctccaaacccgacacccgcgaaaacgaaaaacacgcgaaacttcgacaatcccaataacttactttactattctaaaacctcaacgaaacgatcaaacctctactatctccgcaacgaattacaatacttaacgcgaaaaaaaaaactcgaaaaaaaactcactacgcctcgcccctaacgtcgacaacgactatct

SEQ ID NO: 26427 - DNA, 581 bp, Artificial Sequence
  chemically treated genomic DNA (Homo sapiens) CpG-island No: 26427
ttaggtttcgttggttagttacgtggttggattggtaggatttaggtttggtcgtttttttataggtttatatcgtggggtagggtgggcgcggtggacgaattgaattcgatgaatttggtgaaggggttgaggtggtcggcgtttcgtgggtttttcgggtaagtcggtgcgtatttgggttggggacgagggcgaaagttttagtttgtttaggaaattgtttatgaggagagatgaggcgcgggtagtgagtttaagtacggttttggttttcgaggtttcggacgtttgtagaatcggatagagtcgaagagcgtagtgttcggttgacggttgggatttacgcgttaggaaagcgcgagttttagggtgtttagtattttttaggttcggtattcgcgggaacgggggatacgcgggatttcggtagttttagtaatttgttttgttgttttgagattttagcggggcggttagatttttgttgttttcgtagcgagttgtagtatttggcgcggggagaggaattcgagaggaagtttattgcgtttcgtttttggcgtcggtagcggttgttt

SEQ ID NO: 26428 - DNA, 581 bp, Artificial Sequence
  chemically treated genomic DNA (Homo sapiens) CpG-island No: 26428
aaacaaccgctaccgacgccaaaaacgaaacgcaataaacttcctctcgaattcctctccccgcgccaaatactacaactcgctacgaaaacaacaaaaatctaaccgccccgctaaaatctcaaaacaacaaaacaaattactaaaactaccgaaatcccgcgtatcccccgttcccgcgaataccgaacctaaaaaatactaaacaccctaaaactcgcgctttcctaacgcgtaaatcccaaccgtcaaccgaacactacgctcttcgactctatccgattctacaaacgtccgaaacctcgaaaaccaaaaccgtacttaaactcactacccgcgcctcatctctcctcataaacaatttcctaaacaaactaaaactttcgccctcgtccccaacccaaatacgcaccgacttacccgaaaaacccacgaaacgccgaccacctcaaccccttcaccaaattcatcgaattcaattcgtccaccgcgcccaccctaccccacgatataaacctataaaaaaacgaccaaacctaaatcctaccaatccaaccacgtaactaaccaacgaaacctaa

SEQ ID NO: 26429 - DNA, 822 bp, Artificial Sequence
  chemically treated genomic DNA (Homo sapiens) CpG-island No: 26429
agacgttcgagggtgaattgcgaatttcgaatttcgttgtttagatgttaaatagttttgtttttttttttttttagaaggagaagttgcggtcgatgtagcggtagatgttttcgttgttgaattcgtttattttagatattagttttaaagggttttcggcgggggtttcggaattcggagagtttgagattcggggaggcgcggcggggaggcgcggcgggtcggcgggcgggcgggcggtggcggcggttgcggtataggggttagggtttcgcgttgttttttgggcgggttttttttttgaatcggagcggttttttcggttcgtttttgtttttttttttttttttttttttttttcgtttgtttttcgggggtcggtttagtttttaggtcgttttcgaagaatttgtgtttgaggttttcgaagtcgtcgttttagtcgcgtcggtcggtttttattttttttagtattacgcggtggaagaggcggatgcgtttttacgggtggttgtttagtcggtggaatatttcgtagtatagtaggtggcggaatttgcgattttcgcggtttaggtttattttcggtagttggaagtagtcgagtatgaagaggtcgagcgtgaggttttcgtagcgcgggggtgcgtcgtcgtttaggggcgataggaagtgttggggttagtatacgtcgtgcgttaggttcgggtttggcggtacgtgtcgtcgtaggtttcgttagtggtgtagtagtttgtttattgtttgtcgttgttttagtagttgtcgtagtcgttcgttggggttgtgggtttcgtt

SEQ ID NO: 26430 - DNA, 822 bp, Artificial Sequence
  chemically treated genomic DNA (Homo sapiens) CpG-island No: 26430
aacgaaacccacaaccccaacgaacgactacgacaactactaaaacaacgacaaacaataaacaaactactacaccactaacgaaacctacgacgacacgtaccgccaaacccgaacctaacgcacgacgtatactaaccccaacacttcctatcgcccctaaacgacgacgcacccccgcgctacgaaaacctcacgctcgacctcttcatactcgactacttccaactaccgaaaataaacctaaaccgcgaaaatcgcaaattccgccacctactatactacgaaatattccaccgactaaacaaccacccgtaaaaacgcatccgcctcttccaccgcgtaatactaaaaaaaataaaaaccgaccgacgcgactaaaacgacgacttcgaaaacctcaaacacaaattcttcgaaaacgacctaaaaactaaaccgacccccgaaaaacaaacgaaaaaaaaaaaaaaaaaaaaaaaaaaacaaaaacgaaccgaaaaaaccgctccgattcaaaaaaaaaacccgcccaaaaaacaacgcgaaaccctaacccctataccgcaaccgccgccaccgcccgcccgcccgccgacccgccgcgcctccccgccgcgcctccccgaatctcaaactctccgaattccgaaacccccgccgaaaaccctttaaaactaatatctaaaataaacgaattcaacaacgaaaacatctaccgctacatcgaccgcaacttctccttctaaaaaaaaaaaaaaacaaaactatttaacatctaaacaacgaaattcgaaattcgcaattcaccctcgaacgtct

SEQ ID NO: 26431 - DNA, 822 bp, Artificial Sequence
  chemically treated genomic DNA (Homo sapiens) CpG-island No: 26431
ggcgaggtttatagttttaacgaacggttgcggtagttgttgaggtagcggtaggtagtgggtaagttgttgtattattggcggagtttgcggcggtacgtgtcgttaagttcgggtttggcgtacggcgtgtattggttttagtattttttgtcgtttttagacggcggcgtattttcgcgttacgaaagttttacgttcgatttttttatgttcggttatttttagttatcggagatgggtttgagtcgcgaggatcgtaagtttcgttatttattgtgttacgagatgttttatcggttggatagttattcgtgggagcgtattcgttttttttatcgcgtggtgttggaggaggtggaggtcggtcggcgcggttggagcgacggtttcgaggattttaggtataggtttttcggaaacggtttggaggttgggtcggttttcgaagaataggcgaagaaaaaggaagagaaggggaaagaataggagcggatcgaagaggtcgtttcggtttagaagggggattcgtttaaggggtagcgcgaggttttggtttttgtgtcgtagtcgtcgttatcgttcgttcgttcgtcggttcgtcgcgttttttcgtcgcgttttttcggattttagatttttcgggtttcgaagttttcgtcgaagattttttggaattagtgtttgagatgggcgaatttagtaacgaggatatttgtcgttatatcgatcgtagtttttttttttggaaggagaaggaggtagagttgtttgatatttgagtagcggaattcggaattcgtagtttattttcgagcgttt

SEQ ID NO: 26432 - DNA, 822 bp, Artificial Sequence
  chemically treated genomic DNA (Homo sapiens) CpG-island No: 26432
aaacgctcgaaaataaactacgaattccgaattccgctactcaaatatcaaacaactctacctccttctccttccaaaaaaaaaaactacgatcgatataacgacaaatatcctcgttactaaattcgcccatctcaaacactaattccaaaaaatcttcgacgaaaacttcgaaacccgaaaaatctaaaatccgaaaaaacgcgacgaaaaaacgcgacgaaccgacgaacgaacgaacgataacgacgactacgacacaaaaaccaaaacctcgcgctaccccttaaacgaatcccccttctaaaccgaaacgacctcttcgatccgctcctattctttccccttctcttcctttttcttcgcctattcttcgaaaaccgacccaacctccaaaccgtttccgaaaaacctatacctaaaatcctcgaaaccgtcgctccaaccgcgccgaccgacctccacctcctccaacaccacgcgataaaaaaaacgaatacgctcccacgaataactatccaaccgataaaacatctcgtaacacaataaataacgaaacttacgatcctcgcgactcaaacccatctccgataactaaaaataaccgaacataaaaaaatcgaacgtaaaactttcgtaacgcgaaaatacgccgccgtctaaaaacgacaaaaaatactaaaaccaatacacgccgtacgccaaacccgaacttaacgacacgtaccgccgcaaactccgccaataatacaacaacttacccactacctaccgctacctcaacaactaccgcaaccgttcgttaaaactataaacctcgcc

SEQ ID NO: 26433 - DNA, 839 bp, Artificial Sequence
  chemically treated genomic DNA (Homo sapiens) CpG-island No: 26433
gcgttcgtggtttttagtttcggttagtacgggcggtcgttacgttagggagtagtttgtttaggcgcgtttggttcgcggaaggttcggttcgaggaaggtttagaggcgttagtgttttaggaagaggtaaacgatgcgttttttgcgtaggtcgaggtagttttggacgtcgcgtagtttcgtgtagaggggcggtcggcgcgttagttgttcgggtttaagtagcgtcgtttggtaattttgtgttttaggcgggtttagggtgtttaggggtttttagtcggttagcgggtcgtgggcggcggcggcgttgggttggttagagtcggtcgttacgtagtttttttataggatgggttcgcggatcggggcgttagcggattgcgggggtttgcggcgcggatagcgcgggggcgtcgcgtttagtgcgcgtagttcgtaggtggcgcggtgatgttgtacggagacgtcgtattcgaggatttcgcgcgttatagtttcgcggtattagttgagttagtgcgagcggtttaggtaaagcggtttcggtagttagggcgttttaggtagcggcgttagcggttggttcgtgttagcggtcggtagtttcgttaggtgcgtaggtcggtcgtttagcgcggttagtagcgtggttatgtttttgagtagcgtggagattttgttgtattaggcgggtaggttggcggcgcggttatgtattcggcgcgggtcgacggtgaagcgcggttttatagggcgacggagatgggtagtagttgtttagttttagttgttttaggcgcgtttttagtttttgcgttttgtgtagtatttgt

SEQ ID NO: 26434 - DNA, 839 bp, Artificial Sequence
  chemically treated genomic DNA (Homo sapiens) CpG-island No: 26434
acaaatactacacaaaacgcaaaaactaaaaacgcgcctaaaacaactaaaactaaacaactactacccatctccgtcgccctataaaaccgcgcttcaccgtcgacccgcgccgaatacataaccgcgccgccaacctacccgcctaatacaacaaaatctccacgctactcaaaaacataaccacgctactaaccgcgctaaacgaccgacctacgcacctaacgaaactaccgaccgctaacacgaaccaaccgctaacgccgctacctaaaacgccctaactaccgaaaccgctttacctaaaccgctcgcactaactcaactaataccgcgaaactataacgcgcgaaatcctcgaatacgacgtctccgtacaacatcaccgcgccacctacgaactacgcgcactaaacgcgacgcccccgcgctatccgcgccgcaaacccccgcaatccgctaacgccccgatccgcgaacccatcctataaaaaaactacgtaacgaccgactctaaccaacccaacgccgccgccgcccacgacccgctaaccgactaaaaacccctaaacaccctaaacccgcctaaaacacaaaattaccaaacgacgctacttaaacccgaacaactaacgcgccgaccgcccctctacacgaaactacgcgacgtccaaaactacctcgacctacgcaaaaaacgcatcgtttacctcttcctaaaacactaacgcctctaaaccttcctcgaaccgaaccttccgcgaaccaaacgcgcctaaacaaactactccctaacgtaacgaccgcccgtactaaccgaaactaaaaaccacgaacgc

SEQ ID NO: 26435 - DNA, 839 bp, Artificial Sequence
  chemically treated genomic DNA (Homo sapiens) CpG-island No: 26435
gtaggtgttgtataaggcgtagaagttggaggcgcgtttggagtaattggagttgagtagttgttgtttattttcgtcgttttgtggagtcgcgttttatcgtcgattcgcgtcgaatgtatggtcgcgtcgttagtttgttcgtttggtgtagtaagatttttacgttgtttaagagtatggttacgttgttagtcgcgttgggcggtcggtttgcgtatttggcggagttgtcgatcgttgatacgggttagtcgttggcgtcgttgtttgaggcgttttgattgtcggggtcgttttgtttgggtcgttcgtattggtttaattggtgtcgcgaggttgtggcgcgcgagattttcgagtgcggcgttttcgtgtagtattatcgcgttatttacgagttgcgcgtattggacgcggcgttttcgcgttgttcgcgtcgtaagttttcgtagttcgttggcgtttcggttcgcgagtttattttgtaggaggattacgtggcggtcggttttggttagtttagcgtcgtcgtcgtttacggttcgttggtcgattgggagtttttggatattttgggttcgtttgaggtataggattgttaggcggcgttatttgagttcgagtagttggcgcgtcggtcgtttttttgtacggaattgcgcggcgtttaggattatttcgatttgcgtaaggagcgtatcgtttatttttttttggagtattggcgtttttgggtttttttcggatcgggtttttcgcggattaggcgcgtttaggtagattgttttttggcgtgacggtcgttcgtgttggtcggagttggaggttacggacgt

SEQ ID NO: 26436 - DNA, 839 bp, Artificial Sequence
  chemically treated genomic DNA (Homo sapiens) CpG-island No: 26436
acgtccgtaacctccaactccgaccaacacgaacgaccgtcacgccaaaaaacaatctacctaaacgcgcctaatccgcgaaaaacccgatccgaaaaaaacccaaaaacgccaatactccaaaaaaaaataaacgatacgctccttacgcaaatcgaaataatcctaaacgccgcgcaattccgtacaaaaaaacgaccgacgcgccaactactcgaactcaaataacgccgcctaacaatcctatacctcaaacgaacccaaaatatccaaaaactcccaatcgaccaacgaaccgtaaacgacgacgacgctaaactaaccaaaaccgaccgccacgtaatcctcctacaaaataaactcgcgaaccgaaacgccaacgaactacgaaaacttacgacgcgaacaacgcgaaaacgccgcgtccaatacgcgcaactcgtaaataacgcgataatactacacgaaaacgccgcactcgaaaatctcgcgcgccacaacctcgcgacaccaattaaaccaatacgaacgacccaaacaaaacgaccccgacaatcaaaacgcctcaaacaacgacgccaacgactaacccgtatcaacgatcgacaactccgccaaatacgcaaaccgaccgcccaacgcgactaacaacgtaaccatactcttaaacaacgtaaaaatcttactacaccaaacgaacaaactaacgacgcgaccatacattcgacgcgaatcgacgataaaacgcgactccacaaaacgacgaaaataaacaacaactactcaactccaattactccaaacgcgcctccaacttctacgccttatacaacacctac

SEQ ID NO: 26437 - DNA, 550 bp, Artificial Sequence
  chemically treated genomic DNA (Homo sapiens) CpG-island No: 26437
atcgtcgcggaaaatttgggatgttagcgagcggtcgtatttcggcgtttgcgtattgtgttcgcgtttttaggtagcgtcgttgcgcgcggagttatcgatcggtcgatttcgagaggttcggtttttttaggtcgtttgttcgtttttagttttcggggtcggttttaggaggcgtttttaggagaggggcgggcgttttattttagagatcgagtggtagggcggttattgtggcggggtttttttttcgtttcgttttagttattttttagtttcggtagtcgttagttcggggtcgtcgtcgtttggggcgggagttgttcggtttcgtcgtcgttttcgtcgtcgttttcgggtttaggtttttcgggtcgtttgtcgtcgttatgaggttgcgggtgcggtttttgaagcggatttggtcgttggaggtgttcgagacggagtcgacgttggggtatttgcgttcgtatttgaggtagtttttgttgtgtatttgggggtataggtacgttggggtcggggttgggcggttcgcggggagtgg

SEQ ID NO: 26438 - DNA, 550 bp, Artificial Sequence
  chemically treated genomic DNA (Homo sapiens) CpG-island No: 26438
ccactccccgcgaaccgcccaaccccgaccccaacgtacctatacccccaaatacacaacaaaaactacctcaaatacgaacgcaaataccccaacgtcgactccgtctcgaacacctccaacgaccaaatccgcttcaaaaaccgcacccgcaacctcataacgacgacaaacgacccgaaaaacctaaacccgaaaacgacgacgaaaacgacgacgaaaccgaacaactcccgccccaaacgacgacgaccccgaactaacgactaccgaaactaaaaaataactaaaacgaaacgaaaaaaaaaccccgccacaataaccgccctaccactcgatctctaaaataaaacgcccgcccctctcctaaaaacgcctcctaaaaccgaccccgaaaactaaaaacgaacaaacgacctaaaaaaaccgaacctctcgaaatcgaccgatcgataactccgcgcgcaacgacgctacctaaaaacgcgaacacaatacgcaaacgccgaaatacgaccgctcgctaacatcccaaattttccgcgacgat

SEQ ID NO: 26439 - DNA, 550 bp, Artificial Sequence
  chemically treated genomic DNA (Homo sapiens) CpG-island No: 26439
ttatttttcgcgggtcgtttagtttcggttttagcgtatttgtatttttaggtgtatagtagggattgttttaggtgcgagcgtaaatgttttagcgtcggtttcgtttcgggtatttttagcggttaggttcgttttagaagtcgtattcgtagttttatgacggcggtaggcggttcgaggggtttggattcggaagcggcgacggggacggcggcggggtcgagtagttttcgttttaaacggcgacgatttcggattggcgattatcggagttgaggggtagttgaggcgaaacggggaaagagtttcgttatagtggtcgttttgttattcggtttttggaatagagcgttcgttttttttttgagggcgttttttggagtcgatttcgagagttggaggcgggtaggcggtttaaaggaatcgggtttttcggggtcggtcgatcgatgatttcgcgcgtaacggcgttgtttgagagcgcgggtatagtgcgtaggcgtcgagatgcggtcgttcgttggtattttagatttttcgcggcggt

SEQ ID NO: 26440 - DNA, 550 bp, Artificial Sequence
  chemically treated genomic DNA (Homo sapiens) CpG-island No: 26440
accgccgcgaaaaatctaaaataccaacgaacgaccgcatctcgacgcctacgcactatacccgcgctctcaaacaacgccgttacgcgcgaaatcatcgatcgaccgaccccgaaaaacccgattcctttaaaccgcctacccgcctccaactctcgaaatcgactccaaaaaacgccctcaaaaaaaaaacgaacgctctattccaaaaaccgaataacaaaacgaccactataacgaaactctttccccgtttcgcctcaactacccctcaactccgataatcgccaatccgaaatcgtcgccgtttaaaacgaaaactactcgaccccgccgccgtccccgtcgccgcttccgaatccaaacccctcgaaccgcctaccgccgtcataaaactacgaatacgacttctaaaacgaacctaaccgctaaaaatacccgaaacgaaaccgacgctaaaacatttacgctcgcacctaaaacaatccctactatacacctaaaaatacaaatacgctaaaaccgaaactaaacgacccgcgaaaaataa

SEQ ID NO: 26441 - DNA, 557 bp, Artificial Sequence
  chemically treated genomic DNA (Homo sapiens) CpG-island No: 26441
ttggtcggcgcgtggttgttattgtacggttcgcgtcgggtttttcgggaggcggggagagtgcgaatagggcggagggaaaggagtacgtcggttgtagttcgggcgagcgggagggcgcgtatttatttttatatatcgcggttaaggagagttagagtagtaggagcgtttgtacgtagagtcgtagatttatgttgttttttgggtcgtcgcggtttcggcgagtcggcgcgggggaggagaggtcgggcgttcggaggttaagaaaggcgcgagtcgcggttggcgcgtgcgggcgtagagttcgggaggtttttcggtcgttgagtgtgcgcgttgagtttcgtcgttttcgttggtcgttttcgtttttttgtagttttttttttcgtcgcggggtagcgtcgcgaagttggtttcggcggtttcgggagcggtagcggcgagtttttttttagcggttggttgttcggtcgcggttgtaattgttcgtgatttcggttgttagagagaatgtttttcgtttattttaggggttgtattttgtagtttgt

SEQ ID NO: 26442 - DNA, 557 bp, Artificial Sequence
  chemically treated genomic DNA (Homo sapiens) CpG-island No: 26442
acaaactacaaaatacaacccctaaaataaacgaaaaacattctctctaacaaccgaaatcacgaacaattacaaccgcgaccgaacaaccaaccgctaaaaaaaaactcgccgctaccgctcccgaaaccgccgaaaccaacttcgcgacgctaccccgcgacgaaaaaaaaaactacaaaaaaacgaaaacgaccaacgaaaacgacgaaactcaacgcgcacactcaacgaccgaaaaacctcccgaactctacgcccgcacgcgccaaccgcgactcgcgcctttcttaacctccgaacgcccgacctctcctcccccgcgccgactcgccgaaaccgcgacgacccaaaaaacaacataaatctacgactctacgtacaaacgctcctactactctaactctccttaaccgcgatatataaaaataaatacgcgccctcccgctcgcccgaactacaaccgacgtactcctttccctccgccctattcgcactctccccgcctcccgaaaaacccgacgcgaaccgtacaataacaaccacgcgccgaccaa

SEQ ID NO: 26443 - DNA, 557 bp, Artificial Sequence
  chemically treated genomic DNA (Homo sapiens) CpG-island No: 26443
ataagttataaaatgtagtttttggagtgagcggggagtattttttttggtagtcggggttacgggtagttgtagtcgcggtcgagtagttagtcgttaagaaagagttcgtcgttgtcgttttcggagtcgtcgaggttagtttcgcggcgttgtttcgcggcgggagaggaggttgtagaagagcggaggcggttagcgggagcggcggggtttagcgcgtatatttagcggtcggggagtttttcgagttttgcgttcgtacgcgttagtcgcggttcgcgttttttttggttttcgggcgttcgattttttttttttcgcgtcggttcgtcggggtcgcggcggtttaaggagtagtatgaatttgcggttttgcgtgtaggcgtttttgttgttttggttttttttgatcgcggtgtgtggaggtgagtgcgcgttttttcgttcgttcgggttgtagtcggcgtgttttttttttttcgttttattcgtatttttttcgtttttcggggagttcggcgcgagtcgtgtagtagtagttacgcgtcggttag

SEQ ID NO: 26444 - DNA, 557 bp, Artificial Sequence
  chemically treated genomic DNA (Homo sapiens) CpG-island No: 26444
ctaaccgacgcgtaactactactacacgactcgcgccgaactccccgaaaaacgaaaaaaatacgaataaaacgaaaaaaaaaaaacacgccgactacaacccgaacgaacgaaaaaacgcgcactcacctccacacaccgcgatcaaaaaaaaccaaaacaacaaaaacgcctacacgcaaaaccgcaaattcatactactccttaaaccgccgcgaccccgacgaaccgacgcgaaaaaaaaaaaatcgaacgcccgaaaaccaaaaaaaacgcgaaccgcgactaacgcgtacgaacgcaaaactcgaaaaactccccgaccgctaaatatacgcgctaaaccccgccgctcccgctaaccgcctccgctcttctacaacctcctctcccgccgcgaaacaacgccgcgaaactaacctcgacgactccgaaaacgacaacgacgaactctttcttaacgactaactactcgaccgcgactacaactacccgtaaccccgactaccaaaaaaaatactccccgctcactccaaaaactacattttataacttat

SEQ ID NO: 26445 - DNA, 981 bp, Artificial Sequence
  chemically treated genomic DNA (Homo sapiens) CpG-island No: 26445
tttttgttcgggtagtcgtcgtatttttttcgggtttttttcgattagttcgacggtagcgggcgaatgaggaagtcggtcgcggaggcggaaatcgggtcgggtgtaaggtttgtagcgggacggttcgattttgatttaggaggacgttttgatagttgttaaacggtgttcgttgttcgttattttcgtgttttagacgttagaaatttttacgggagcggttgtttcgggtttttaattcgtgaggttgcgttttaggggtcgcggttttcggaaggggttaaaaagtttgttcgagtcgggtttgggcgaggcgagggcggggcgcgtgttttagcggttgggggaggtcggttttagtgtttagttttgagatcgcgtcgggggatacggggggcgtcggggagcgtcgggtttcgaggtcgtttttgtatttttaggtttcgttgttgtcggcgtttttttcgagcgttcgcgtgggggtttcggtttttttgggaaggatgcggtgtcgggttttgagtcgtcggcgttcgttttcgttcgcgcgggtggcgggtcgtattgagtttaagaattattagtcggtttggcggtagcgcgtttcgttttcgttcgttcgtcgtcgtttgttcggggcgggatcgcggtggggttcgtttatttgaatttggatttgtttcgggaataggcgttgtttttttcgagaggattttttcgagcgttcgggcggcggtcgggtggggcgagcgtacgaggcgggagttgtagtaggttagttttgtttagtttttcgtgttttgtttaggaatcgcggtgatttgcgcgttttatcgtatttagttcggtttttcgtcgttttttcgtttcgttttcggagtcgcgggattatttttagtcgggagtcggtttcggggcggagtttggggtataatttcgttttttttttgttatatttattgtaggtcgcgtttggtt

SEQ ID NO: 26446 - DNA, 981 bp, Artificial Sequence
  chemically treated genomic DNA (Homo sapiens) CpG-island No: 26446
aaccaaacgcgacctacaataaatataacaaaaaaaaaacgaaattataccccaaactccgccccgaaaccgactcccgactaaaaataatcccgcgactccgaaaacgaaacgaaaaaacgacgaaaaaccgaactaaatacgataaaacgcgcaaatcaccgcgattcctaaacaaaacacgaaaaactaaacaaaactaacctactacaactcccgcctcgtacgctcgccccacccgaccgccgcccgaacgctcgaaaaaatcctctcgaaaaaaacaacgcctattcccgaaacaaatccaaattcaaataaacgaaccccaccgcgatcccgccccgaacaaacgacgacgaacgaacgaaaacgaaacgcgctaccgccaaaccgactaataattcttaaactcaatacgacccgccacccgcgcgaacgaaaacgaacgccgacgactcaaaacccgacaccgcatccttcccaaaaaaaccgaaacccccacgcgaacgctcgaaaaaaacgccgacaacaacgaaacctaaaaatacaaaaacgacctcgaaacccgacgctccccgacgccccccgtatcccccgacgcgatctcaaaactaaacactaaaaccgacctcccccaaccgctaaaacacgcgccccgccctcgcctcgcccaaacccgactcgaacaaactttttaaccccttccgaaaaccgcgacccctaaaacgcaacctcacgaattaaaaacccgaaacaaccgctcccgtaaaaatttctaacgtctaaaacacgaaaataacgaacaacgaacaccgtttaacaactatcaaaacgtcctcctaaatcaaaatcgaaccgtcccgctacaaaccttacacccgacccgatttccgcctccgcgaccgacttcctcattcgcccgctaccgtcgaactaatcgaaaaaaacccgaaaaaaatacgacgactacccgaacaaaaa

SEQ ID NO: 26447 - DNA, 981 bp, Artificial Sequence
  chemically treated genomic DNA (Homo sapiens) CpG-island No: 26447
ggttaggcgcggtttgtagtgggtgtagtaggaagggggcgggattgtgttttaggtttcgtttcggagtcggttttcggttgggaatggtttcgcggtttcgagggcggggcgggaaggcggcgaggagtcgagttgggtgcggtgaggcgcgtagattatcgcggtttttgggtagggtacggaaggttaagtaaggttgatttgttgtagttttcgtttcgtgcgttcgttttattcggtcgtcgttcgagcgttcgagaaagttttttcgggagaagtagcgtttgttttcggggtagatttaggtttaggtgagcgagttttatcgcggtttcgtttcgggtaggcggcggcgggcgggcgggggcgagacgcgttgtcgttaggtcgattggtggtttttgggtttagtgcggttcgttattcgcgcgggcgggggcgaacgtcggcggtttagggttcggtatcgtattttttttagggggatcgggatttttacgcgggcgttcggggagggcgtcggtagtagcgaggtttaggggtgtaggggcggtttcgggattcggcgtttttcggcgtttttcgtgtttttcggcgcggttttaggattgggtattggagtcgattttttttagtcgttggggtacgcgtttcgttttcgtttcgtttaggttcgattcgggtaaattttttaatttttttcgggagtcgcggtttttgggacgtagttttacgggttgggagttcggggtagtcgttttcgtggaagtttttggcgtttgaggtacggaggtaacgggtagcgggtatcgtttggtagttgttagggcgtttttttgagttagagtcggatcgtttcgttgtagattttgtattcggttcggttttcgttttcgcggtcgatttttttattcgttcgttgtcgtcggattggtcggggagggttcgggggaggtgcggcggttgttcggataaggg

SEQ ID NO: 26448 - DNA, 981 bp, Artificial Sequence
  chemically treated genomic DNA (Homo sapiens) CpG-island No: 26448
cccttatccgaacaaccgccgcacctcccccgaaccctccccgaccaatccgacgacaacgaacgaataaaaaaatcgaccgcgaaaacgaaaaccgaaccgaatacaaaatctacaacgaaacgatccgactctaactcaaaaaaacgccctaacaactaccaaacgatacccgctacccgttacctccgtacctcaaacgccaaaaacttccacgaaaacgactaccccgaactcccaacccgtaaaactacgtcccaaaaaccgcgactcccgaaaaaaattaaaaaatttacccgaatcgaacctaaacgaaacgaaaacgaaacgcgtaccccaacgactaaaaaaaatcgactccaatacccaatcctaaaaccgcgccgaaaaacacgaaaaacgccgaaaaacgccgaatcccgaaaccgcccctacacccctaaacctcgctactaccgacgccctccccgaacgcccgcgtaaaaatcccgatccccctaaaaaaaatacgataccgaaccctaaaccgccgacgttcgcccccgcccgcgcgaataacgaaccgcactaaacccaaaaaccaccaatcgacctaacgacaacgcgtctcgcccccgcccgcccgccgccgcctacccgaaacgaaaccgcgataaaactcgctcacctaaacctaaatctaccccgaaaacaaacgctacttctcccgaaaaaactttctcgaacgctcgaacgacgaccgaataaaacgaacgcacgaaacgaaaactacaacaaatcaaccttacttaaccttccgtaccctacccaaaaaccgcgataatctacgcgcctcaccgcacccaactcgactcctcgccgccttcccgccccgccctcgaaaccgcgaaaccattcccaaccgaaaaccgactccgaaacgaaacctaaaacacaatcccgcccccttcctactacacccactacaaaccgcgcctaacc

SEQ ID NO: 26449 - DNA, 1019 bp, Artificial Sequence
  chemically treated genomic DNA (Homo sapiens) CpG-island No: 26449
gggtggagggttttcggtgggtggcgcggcggcggtcgcggcggtgaagttatcgtggggagtggttcgtttgcggcgggtgcgggggtttcgcgggtatttagtggagtagcgggagttcggcgtcgtcgaggggcgggcgatggggcgtcggttcgttttggtaggggtgggtttcgtattggaggcggagttgttgttgggtggggcgcgttttcggcgcggacggaggcggcgggacgttcgtttttacgatcggtttataatgaggcgagcgggtagcgcggagtaggcggcggtcggtcgggtcgggttacgcggcggcgttgttcgggtaggttagggtagggtcgcggggcgttcgagcgaggatatcgcggtttcgttttcgttttttttttcgtttgtcggtcggcgttcgagttcggagtcgtagtcgtagtcggaaatcgggttcgcgcggcggtcgtcgtttcggttaagtcggggtttcgaagttagagtcggagtcgggcgggtcgcggggttatggttgggtcgcggggcgcgttgttggtttggtgtcgtcgttagtgcgagggttatcgcggcgtggagattcgcgatttgagtagtttttttcgggacggtttggttttttgcgttattttgtatcggtatcggttcgatttgttgtgagtgcggggtttcgggcgagcgggcggcgcggggcgggttggggtcgcgatcgtcgtttttttttagtaatacgaagttcgggcggtgataggcgtcgttttcggatacggagacgtcgattttttcgacggtttcggacgtcgggcgggtttttgagatttcggtttagggcgtttttttttcgttcggtcgttttgatttcgttcgtgggatttcgaattttttttcgaggttggttttttcgcggggatattggtttcgtttataaagcgttgattttcgtcgaggatcgttgaatttttaagtttttgatttttttgaaggggtgttgagtttttttt

SEQ ID NO: 26450 - DNA, 1019 bp, Artificial Sequence
  chemically treated genomic DNA (Homo sapiens) CpG-island No: 26450
aaaaaaaactcaacaccccttcaaaaaaatcaaaaacttaaaaattcaacgatcctcgacgaaaatcaacgctttataaacgaaaccaatatccccgcgaaaaaaccaacctcgaaaaaaaattcgaaatcccacgaacgaaatcaaaacgaccgaacgaaaaaaaaacgccctaaaccgaaatctcaaaaacccgcccgacgtccgaaaccgtcgaaaaaatcgacgtctccgtatccgaaaacgacgcctatcaccgcccgaacttcgtattactaaaaaaaaacgacgatcgcgaccccaacccgccccgcgccgcccgctcgcccgaaaccccgcactcacaacaaatcgaaccgataccgatacaaaataacgcaaaaaaccaaaccgtcccgaaaaaaactactcaaatcgcgaatctccacgccgcgataaccctcgcactaacgacgacaccaaaccaacaacgcgccccgcgacccaaccataaccccgcgacccgcccgactccgactctaacttcgaaaccccgacttaaccgaaacgacgaccgccgcgcgaacccgatttccgactacgactacgactccgaactcgaacgccgaccgacaaacgaaaaaaaaaacgaaaacgaaaccgcgatatcctcgctcgaacgccccgcgaccctaccctaacctacccgaacaacgccgccgcgtaacccgacccgaccgaccgccgcctactccgcgctacccgctcgcctcattataaaccgatcgtaaaaacgaacgtcccgccgcctccgtccgcgccgaaaacgcgccccacccaacaacaactccgcctccaatacgaaacccacccctaccaaaacgaaccgacgccccatcgcccgcccctcgacgacgccgaactcccgctactccactaaatacccgcgaaacccccgcacccgccgcaaacgaaccactccccacgataacttcaccgccgcgaccgccgccgcgccacccaccgaaaaccctccaccc

SEQ ID NO: 26451 - DNA, 1019 bp, Artificial Sequence
  chemically treated genomic DNA (Homo sapiens) CpG-island No: 26451
aaagagggtttaatatttttttaaagaggttaagggtttaggggtttagcgattttcggcggaaattagcgttttgtgggcggggttagtgttttcgcggagggattagtttcgggggagagttcgggattttacgggcggggttagggcggtcgggcgggggaggggcgttttgggtcggggttttagggattcgttcggcgttcggggtcgtcgggggggtcggcgttttcgtgttcgggggcggcgtttgttatcgttcgggtttcgtgttattgagggggggcggcggtcgcggttttagttcgtttcgcgtcgttcgttcgttcggggtttcgtatttatagtaggtcgggtcggtgtcggtgtaggatggcgtagaaggttaggtcgtttcggaaggagttgtttaggtcgcggatttttacgtcgcggtagttttcgtattggcggcggtattaggttagtagcgcgtttcgcggtttagttatgatttcgcggttcgttcggtttcggttttggtttcggggtttcggtttggtcgggacggcggtcgtcgcgcgggttcggttttcggttgcggttgcggtttcgagttcgggcgtcgatcggtaggcgaggggaggggcggaggcggggtcgcggtgttttcgttcgggcgtttcgcggttttgttttaatttgttcgagtagcgtcgtcgcgtggttcggttcggtcggtcgtcgtttatttcgcgttgttcgttcgttttattgtgggtcggtcgtgggagcgggcgtttcgtcgttttcgttcgcgtcggaggcgcgttttatttagtagtagtttcgtttttagtgcggagtttatttttattaagacgggtcggcgttttatcgttcgtttttcgacggcgtcgggttttcgttgttttattgggtgttcgcgaagttttcgtattcgtcgtaagcggattattttttacgatgattttatcgtcgcggtcgtcgtcgcgttatttatcgggagttttttattt

SEQ ID NO: 26452 - DNA, 1019 bp, Artificial Sequence
  chemically treated genomic DNA (Homo sapiens) CpG-island No: 26452
aaataaaaaactcccgataaataacgcgacgacgaccgcgacgataaaatcatcgtaaaaaataatccgcttacgacgaatacgaaaacttcgcgaacacccaataaaacaacgaaaacccgacgccgtcgaaaaacgaacgataaaacgccgacccgtcttaataaaaataaactccgcactaaaaacgaaactactactaaataaaacgcgcctccgacgcgaacgaaaacgacgaaacgcccgctcccacgaccgacccacaataaaacgaacgaacaacgcgaaataaacgacgaccgaccgaaccgaaccacgcgacgacgctactcgaacaaattaaaacaaaaccgcgaaacgcccgaacgaaaacaccgcgaccccgcctccgcccctcccctcgcctaccgatcgacgcccgaactcgaaaccgcaaccgcaaccgaaaaccgaacccgcgcgacgaccgccgtcccgaccaaaccgaaaccccgaaaccaaaaccgaaaccgaacgaaccgcgaaatcataactaaaccgcgaaacgcgctactaacctaataccgccgccaatacgaaaactaccgcgacgtaaaaatccgcgacctaaacaactccttccgaaacgacctaaccttctacgccatcctacaccgacaccgacccgacctactataaatacgaaaccccgaacgaacgaacgacgcgaaacgaactaaaaccgcgaccgccgccccccctcaataacacgaaacccgaacgataacaaacgccgcccccgaacacgaaaacgccgacccccccgacgaccccgaacgccgaacgaatccctaaaaccccgacccaaaacgcccctcccccgcccgaccgccctaaccccgcccgtaaaatcccgaactctcccccgaaactaatccctccgcgaaaacactaaccccgcccacaaaacgctaatttccgccgaaaatcgctaaacccctaaacccttaacctctttaaaaaaatattaaaccctcttt

SEQ ID NO: 26453 - DNA, 584 bp, Artificial Sequence
  chemically treated genomic DNA (Homo sapiens) CpG-island No: 26453
aatcggtttcggagggtcgtaggaatttatgaaatacgtcgtttatttgtaatggtttcggtcggtcgggatggtaatagatggtgcgtgtcggggatcgcgttagtagtagtatttttgagaaattaggaaaagaggaaatatgcgcgcgtagcgggcgtcgtcgtaaatacgatcggcgttgtcgtaaattgttttttcgttttttttgggttgggcggaagaatttacgagtcgtaaagcgaaggtttattcggaaattcgttattgcgtttcgttaggcgtttttattagttttcgaggcgtcgagacgcgagaggtgtgattggtattacgttaggcggtattcggggacgtttaaagagggcgtttattattgaaatttggcggtcgcgtaatcgaagttcgaggcggggagcgattggcgtttttttgtgttttataatgtttcgcggcgcgttttagtttttatgtattttatcgttattcgcgatttttcgtttgttttatttgtttgtttaatgtgaaatttagcgtaggggaggttcgtcggtgttttaggcggtttttattgttattttttt

SEQ ID NO: 26454 - DNA, 584 bp, Artificial Sequence
  chemically treated genomic DNA (Homo sapiens) CpG-island No: 26454
aaaaaaataacaataaaaaccgcctaaaacaccgacgaacctcccctacgctaaatttcacattaaacaaacaaataaaacaaacgaaaaatcgcgaataacgataaaatacataaaaactaaaacgcgccgcgaaacattataaaacacaaaaaaacgccaatcgctccccgcctcgaacttcgattacgcgaccgccaaatttcaataataaacgccctctttaaacgtccccgaataccgcctaacgtaataccaatcacacctctcgcgtctcgacgcctcgaaaactaataaaaacgcctaacgaaacgcaataacgaatttccgaataaaccttcgctttacgactcgtaaattcttccgcccaacccaaaaaaaacgaaaaaacaatttacgacaacgccgatcgtatttacgacgacgcccgctacgcgcgcatatttcctcttttcctaatttctcaaaaatactactactaacgcgatccccgacacgcaccatctattaccatcccgaccgaccgaaaccattacaaataaacgacgtatttcataaattcctacgaccctccgaaaccgatt

SEQ ID NO: 26455 - DNA, 584 bp, Artificial Sequence
  chemically treated genomic DNA (Homo sapiens) CpG-island No: 26455
ggaggagtaataataaggatcgtttaagatatcgacggattttttttgcgttgagttttatattaagtaggtaggtagaataggcggggagtcgcgggtgacggtgggatatatgggggttgaggcgcgtcgcgaagtattgtgggatatagaagggcgttagtcgtttttcgtttcgagtttcgattgcgcggtcgttaagttttagtgatgaacgttttttttgggcgttttcggatatcgtttgacgtagtgttaattatatttttcgcgtttcggcgtttcggaggttaatgaggacgtttggcgaaacgtagtaacggattttcgggtggattttcgttttacggttcgtgagttttttcgtttaatttagaggaagcgggagagtagtttacgatagcgtcggtcgtgtttacggcggcgttcgttgcgcgcgtatgttttttttttttttggttttttaagagtgttgttgttaacgcggttttcggtacgtattatttgttgttatttcggtcggtcgaggttattgtaggtgagcggcgtgttttataggtttttgcggtttttcggagtcggtt

SEQ ID NO: 26456 - DNA, 584 bp, Artificial Sequence
  chemically treated genomic DNA (Homo sapiens) CpG-island No: 26456
aaccgactccgaaaaaccgcaaaaacctataaaacacgccgctcacctacaataacctcgaccgaccgaaataacaacaaataatacgtaccgaaaaccgcgttaacaacaacactcttaaaaaaccaaaaaaaaaaaaaacatacgcgcgcaacgaacgccgccgtaaacacgaccgacgctatcgtaaactactctcccgcttcctctaaattaaacgaaaaaactcacgaaccgtaaaacgaaaatccacccgaaaatccgttactacgtttcgccaaacgtcctcattaacctccgaaacgccgaaacgcgaaaaatataattaacactacgtcaaacgatatccgaaaacgcccaaaaaaaacgttcatcactaaaacttaacgaccgcgcaatcgaaactcgaaacgaaaaacgactaacgcccttctatatcccacaatacttcgcgacgcgcctcaacccccatatatcccaccgtcacccgcgactccccgcctattctacctacctacttaatataaaactcaacgcaaaaaaaatccgtcgatatcttaaacgatccttattattactcctcc

SEQ ID NO: 26457 - DNA, 981 bp, Artificial Sequence
  chemically treated genomic DNA (Homo sapiens) CpG-island No: 26457
cgttgcgttttagggtacggtcggtttaggtcgtggtttattcgggattcgcggtttatcggtgcggttgacgcggtacgggaagcggtaggtgtttagtatttttttttcgttttgttcgtcgatgattcggtattggcgtagatacggcgtgagtttggtcgggtttagggcgcgagttagtcgatgtcggacgttttcgattcgtttttatagcgcgttttttttcgttttagatttcgagtcggtttcggtttttttttcggtttttttcgttttcgttcggttcggtatggtcgtgtttttagggtttgcgggtaagaggcgtacgggggtcgattagggttttttagggttagatgtgcggttaagtattttcggggcgtcgttcgtagattcgtcgtcgggggcgcgtttcgagtttttcgcgatttatttcgtacgttatagtcgtttcgggttttcgggttcgtattcgggcggcggtttcgtcggcgtaggggggcggtgttcgtggcgttttcggtttcgttttcgttttcgtagttttttgggttgttcgggtttttttatattgtcgttcgtttcgggtcgtgcgttcggttttcggttatttcgcgcgttcgtttgtacgttttttttttcggtcgttcggttgcgtttttttttgttttttgtttttcgtcggttttttagttcggttcggcggggttttggtcgttcgtttatatttgttcggtttttgggcggggcgggggcgggtaggcgcgtttatatttttcgcgcgtcgcgatatatttttttcgggttacgcgtatcgtttttttacgtttatagcgcgttcgttcgtgcggggttagtcgtttacgttcggcgtagttcgcgggtatttaagttgggtttgtttttttcgggtttttatatgtattgcgggcgcgggagtttttttggagcgtaggatagtttcgcgggggatagtaa

SEQ ID NO: 26458 - DNA, 981 bp, Artificial Sequence
  chemically treated genomic DNA (Homo sapiens) CpG-island No: 26458
ttactatcccccgcgaaactatcctacgctccaaaaaaactcccgcgcccgcaatacatataaaaacccgaaaaaaacaaacccaacttaaatacccgcgaactacgccgaacgtaaacgactaaccccgcacgaacgaacgcgctataaacgtaaaaaaacgatacgcgtaacccgaaaaaaatatatcgcgacgcgcgaaaaatataaacgcgcctacccgcccccgccccgcccaaaaaccgaacaaatataaacgaacgaccaaaaccccgccgaaccgaactaaaaaaccgacgaaaaacaaaaaacaaaaaaaaacgcaaccgaacgaccgaaaaaaaaaacgtacaaacgaacgcgcgaaataaccgaaaaccgaacgcacgacccgaaacgaacgacaatataaaaaaacccgaacaacccaaaaaactacgaaaacgaaaacgaaaccgaaaacgccacgaacaccgcccccctacgccgacgaaaccgccgcccgaatacgaacccgaaaacccgaaacgactataacgtacgaaataaatcgcgaaaaactcgaaacgcgcccccgacgacgaatctacgaacgacgccccgaaaatacttaaccgcacatctaaccctaaaaaaccctaatcgacccccgtacgcctcttacccgcaaaccctaaaaacacgaccataccgaaccgaacgaaaacgaaaaaaaccgaaaaaaaaaccgaaaccgactcgaaatctaaaacgaaaaaaaacgcgctataaaaacgaatcgaaaacgtccgacatcgactaactcgcgccctaaacccgaccaaactcacgccgtatctacgccaataccgaatcatcgacgaacaaaacgaaaaaaaaatactaaacacctaccgcttcccgtaccgcgtcaaccgcaccgataaaccgcgaatcccgaataaaccacgacctaaaccgaccgtaccctaaaacgcaacg

SEQ ID NO: 26459 - DNA, 981 bp, Artificial Sequence
  chemically treated genomic DNA (Homo sapiens) CpG-island No: 26459
ttgttgtttttcgcggggttgttttgcgttttagggaagttttcgcgttcgtagtgtatgtggggattcgagaagggtaagtttagtttgagtgttcgcgggttgcgtcgggcgtgagcggttagtttcgtacgggcgggcgcgttgtgggcgtggggaggcgatgcgcgtggttcggggaaggtgtgtcgcggcgcgcggggggtgtgagcgcgtttgttcgttttcgtttcgtttagaggtcgggtaggtgtgggcgggcggttaggatttcgtcgagtcgggttggagagtcggcgggaaataggaagtagggggaggcgtagtcggacggtcgggagggagggcgtgtagacggacgcgcggggtggtcgggggtcggacgtacgattcggggcgggcggtaatgtggggaggttcgggtagtttaggaggttgcggggacgggggcggagtcgggggcgttacgggtatcgtttttttgcgtcggcggagtcgtcgttcgagtgcggattcgggagttcgaggcgattgtagcgtgcggggtgagtcgcggggagttcggggcgcgttttcgacggcgggtttgcggacgacgtttcgggggtgtttggtcgtatatttagttttagggagttttggtcgattttcgtgcgttttttgttcgtagattttgaggatacggttatgtcgggtcgggcggaggcgggggaggtcgaggaggaggtcggggtcggttcggggtttgaggcggaggaggacgcgttgtgggagcgaatcgagggcgttcggtatcggttggttcgcgttttgaattcggttaagtttacgtcgtatttgcgttagtgtcgggttatcgacgagtaggacgaggaggaggtgttgagtatttatcgtttttcgtgtcgcgttaatcgtatcggtgagtcgcgggtttcgagtgggttacgatttgggtcggtcgtgttttggggcgtagcg

SEQ ID NO: 26460 - DNA, 981 bp, Artificial Sequence
  chemically treated genomic DNA (Homo sapiens) CpG-island No: 26460
cgctacgccccaaaacacgaccgacccaaatcgtaacccactcgaaacccgcgactcaccgatacgattaacgcgacacgaaaaacgataaatactcaacacctcctcctcgtcctactcgtcgataacccgacactaacgcaaatacgacgtaaacttaaccgaattcaaaacgcgaaccaaccgataccgaacgccctcgattcgctcccacaacgcgtcctcctccgcctcaaaccccgaaccgaccccgacctcctcctcgacctcccccgcctccgcccgacccgacataaccgtatcctcaaaatctacgaacaaaaaacgcacgaaaatcgaccaaaactccctaaaactaaatatacgaccaaacacccccgaaacgtcgtccgcaaacccgccgtcgaaaacgcgccccgaactccccgcgactcaccccgcacgctacaatcgcctcgaactcccgaatccgcactcgaacgacgactccgccgacgcaaaaaaacgatacccgtaacgcccccgactccgcccccgtccccgcaacctcctaaactacccgaacctccccacattaccgcccgccccgaatcgtacgtccgacccccgaccaccccgcgcgtccgtctacacgccctccctcccgaccgtccgactacgcctccccctacttcctatttcccgccgactctccaacccgactcgacgaaatcctaaccgcccgcccacacctacccgacctctaaacgaaacgaaaacgaacaaacgcgctcacaccccccgcgcgccgcgacacaccttccccgaaccacgcgcatcgcctccccacgcccacaacgcgcccgcccgtacgaaactaaccgctcacgcccgacgcaacccgcgaacactcaaactaaacttacccttctcgaatccccacatacactacgaacgcgaaaacttccctaaaacgcaaaacaaccccgcgaaaaacaacaa

SEQ ID NO: 26461 - DNA, 824 bp, Artificial Sequence
  chemically treated genomic DNA (Homo sapiens) CpG-island No: 26461
tcgttttttcggggtagttcgtacgtttttcggttggttttgttcggggtggcgagtagaggtttggtttggttttttagtcgcgtttttgttagttttcggcggtcgcgaggacggtgtcggggagggggtcggggagggggtcgggtttcgttcgcgggcgggaggagacgggcgggaggcgggagcgtttatatttcgttttcgttttcggatttagttcgcggagttcgcggttagggcggcgtagatcggtttagcgattttttcgggttgttagtcgggacgcgcggtcgtcgtcgttgtagacgacgagttcgttttcgtttcgcgttttcggggttcgcggagttaggtaatagttcgggcgcgcgggttttcggggcggaggtcgtggaggtcggcgggtttcggcgttcgcggggattttgtattttattaggttttcggggtcggaacggggacgggattcgttcgggagaggcgttttcgggtgtttataggaaggtcgggcgcggtcgcggagtcgcgcgaggaaatttcgagttttcgggtttcgtgtttcgttttaggttggtggagggggtagaggatcggatacggttgagcggttaaaatgcgcgaggagggggcgagtcgaggggtagagcgggggttgttttcgcgtttttttgcgcgggggaaggaagggtcggggcgggtagcgggcgacgcggcggaatgtttttttttcgtcgaggtttacgcggagagcgggaagtggggggtggggggttcggggagatggataggtattttgttttttttttcgatcgtcgtatttt

SEQ ID NO: 26462 - DNA, 824 bp, Artificial Sequence
  chemically treated genomic DNA (Homo sapiens) CpG-island No: 26462
aaaatacgacgatcgaaaaaaaaaacaaaatacctatccatctccccgaaccccccaccccccacttcccgctctccgcgtaaacctcgacgaaaaaaaaacattccgccgcgtcgcccgctacccgccccgacccttccttcccccgcgcaaaaaaacgcgaaaacaacccccgctctacccctcgactcgccccctcctcgcgcattttaaccgctcaaccgtatccgatcctctaccccctccaccaacctaaaacgaaacacgaaacccgaaaactcgaaatttcctcgcgcgactccgcgaccgcgcccgaccttcctataaacacccgaaaacgcctctcccgaacgaatcccgtccccgttccgaccccgaaaacctaataaaatacaaaatccccgcgaacgccgaaacccgccgacctccacgacctccgccccgaaaacccgcgcgcccgaactattacctaactccgcgaaccccgaaaacgcgaaacgaaaacgaactcgtcgtctacaacgacgacgaccgcgcgtcccgactaacaacccgaaaaaatcgctaaaccgatctacgccgccctaaccgcgaactccgcgaactaaatccgaaaacgaaaacgaaatataaacgctcccgcctcccgcccgtctcctcccgcccgcgaacgaaacccgaccccctccccgaccccctccccgacaccgtcctcgcgaccgccgaaaactaacaaaaacgcgactaaaaaaccaaaccaaacctctactcgccaccccgaacaaaaccaaccgaaaaacgtacgaactaccccgaaaaaacga

SEQ ID NO: 26463 - DNA, 824 bp, Artificial Sequence
  chemically treated genomic DNA (Homo sapiens) CpG-island No: 26463
ggaatgcggcggtcggggaggggggtagggtgtttgtttattttttcgggttttttattttttatttttcgtttttcgcgtgggtttcggcggaggggagatatttcgtcgcgtcgttcgttgttcgtttcggtttttttttttttcgcgtaggaaggcgcggagatagttttcgttttgtttttcggttcgtttttttttcgcgtattttggtcgtttagtcgtgttcgattttttgttttttttattagtttggaacgggatacgaagttcgaaagttcggagttttttcgcgcggtttcgcggtcgcgttcggtttttttgtgggtattcgggggcgtttttttcgggcgggtttcgttttcgtttcggtttcgggagtttagtagggtgtagagttttcgcgggcgtcgggattcgtcggtttttacggttttcgtttcgaggattcgcgcgttcgggttgttatttggtttcgcgagtttcgggggcgcgggacgagggcggattcgtcgtttgtagcggcggcggtcgcgcgtttcggttggtagttcgggagagtcgttgggtcggtttgcgtcgttttggtcgcgggtttcgcgggttggattcgggggcgggggcggggtgtgggcgttttcgtttttcgttcgttttttttcgttcgcgggcggggttcggtttttttttcggtttttttttcggtatcgttttcgcggtcgtcgagagttggtagggacgcggttggggggttaggttaggtttttgttcgttatttcggataaggttagtcggggaacgtgcgggttgtttcggggaggcga

SEQ ID NO: 26464 - DNA, 824 bp, Artificial Sequence
  chemically treated genomic DNA (Homo sapiens) CpG-island No: 26464
tcgcctccccgaaacaacccgcacgttccccgactaaccttatccgaaataacgaacaaaaacctaacctaaccccccaaccgcgtccctaccaactctcgacgaccgcgaaaacgataccgaaaaaaaaaccgaaaaaaaaaccgaaccccgcccgcgaacgaaaaaaaacgaacgaaaaacgaaaacgcccacaccccgcccccgcccccgaatccaacccgcgaaacccgcgaccaaaacgacgcaaaccgacccaacgactctcccgaactaccaaccgaaacgcgcgaccgccgccgctacaaacgacgaatccgccctcgtcccgcgcccccgaaactcgcgaaaccaaataacaacccgaacgcgcgaatcctcgaaacgaaaaccgtaaaaaccgacgaatcccgacgcccgcgaaaactctacaccctactaaactcccgaaaccgaaacgaaaacgaaacccgcccgaaaaaaacgcccccgaatacccacaaaaaaaccgaacgcgaccgcgaaaccgcgcgaaaaaactccgaactttcgaacttcgtatcccgttccaaactaataaaaaaaacaaaaaatcgaacacgactaaacgaccaaaatacgcgaaaaaaaaacgaaccgaaaaacaaaacgaaaactatctccgcgccttcctacgcgaaaaaaaaaaaaaccgaaacgaacaacgaacgacgcgacgaaatatctcccctccgccgaaacccacgcgaaaaacgaaaaataaaaaataaaaaacccgaaaaaataaacaaacaccctacccccctccccgaccgccgcattcc

SEQ ID NO: 26465 - DNA, 514 bp, Artificial Sequence
  chemically treated genomic DNA (Homo sapiens) CpG-island No: 26465
cgagttttttagtttgtcgtagagttagtcgttttgggtttcgggtattaatatttttattacgtttttagcggagaagcgtagtagcgtgtggttggcgtttttcgagtgggagattagggcgcggatttttttggcgttttcgtcgtcgttcgggcgttcgttaaaggagttggagcgcgagttttgggcgttgtcgttgtagagcgaggttgtgggcgggagagcgcggcggtacgtgggtaggaagttttttttggcgtttgttttcgattttttttgttgtagttttattttcgcgtttttttcggtttttttgtcgtttcggggcgggggtatttataggtcgacggcgtgcggggtagggagcgacggtttggttttagttgggacgcgggtttcgcgtcgggttcggtgtcgtaggagtcggagtcgtgtcggttgcggggggagttgaatttttttaggggtttcgggggttgcgggggagatgggtaggggagggtggggcggg

SEQ ID NO: 26466 - DNA, 514 bp, Artificial Sequence
  chemically treated genomic DNA (Homo sapiens) CpG-island No: 26466
cccgccccaccctcccctacccatctcccccgcaacccccgaaacccctaaaaaaattcaactccccccgcaaccgacacgactccgactcctacgacaccgaacccgacgcgaaacccgcgtcccaactaaaaccaaaccgtcgctccctaccccgcacgccgtcgacctataaatacccccgccccgaaacgacaaaaaaaccgaaaaaaacgcgaaaataaaactacaacaaaaaaaatcgaaaacaaacgccaaaaaaaacttcctacccacgtaccgccgcgctctcccgcccacaacctcgctctacaacgacaacgcccaaaactcgcgctccaactcctttaacgaacgcccgaacgacgacgaaaacgccaaaaaaatccgcgccctaatctcccactcgaaaaacgccaaccacacgctactacgcttctccgctaaaaacgtaataaaaatattaatacccgaaacccaaaacgactaactctacgacaaactaaaaaactcg

SEQ ID NO: 26467 - DNA, 514 bp, Artificial Sequence
  chemically treated genomic DNA (Homo sapiens) CpG-island No: 26467
ttcgttttatttttttttgtttatttttttcgtagttttcgaggtttttgggagagtttagtttttttcgtagtcggtacggtttcggtttttacggtatcgagttcgacgcgaggttcgcgttttagttagagttagatcgtcgttttttgtttcgtacgtcgtcggtttgtgagtgttttcgtttcggggcggtaggagggtcgggagaggcgcgggggtggggttgtagtaggagggatcgagggtagacgttaggaagaattttttgtttacgtgtcgtcgcgttttttcgtttatagtttcgttttatagcggtagcgtttaaagttcgcgttttaatttttttggcgagcgttcgggcggcggcgggggcgttaggagagttcgcgttttggttttttattcggagggcgttaattatacgttgttgcgttttttcgttggggacgtggtggaggtgttggtgttcgaggtttagaacggttggttttacggtaagttggagggttcg

SEQ ID NO: 26468 - DNA, 514 bp, Artificial Sequence
  chemically treated genomic DNA (Homo sapiens) CpG-island No: 26468
cgaaccctccaacttaccgtaaaaccaaccgttctaaacctcgaacaccaacacctccaccacgtccccaacgaaaaaacgcaacaacgtataattaacgccctccgaataaaaaaccaaaacgcgaactctcctaacgcccccgccgccgcccgaacgctcgccaaaaaaattaaaacgcgaactttaaacgctaccgctataaaacgaaactataaacgaaaaaacgcgacgacacgtaaacaaaaaattcttcctaacgtctaccctcgatccctcctactacaaccccacccccgcgcctctcccgaccctcctaccgccccgaaacgaaaacactcacaaaccgacgacgtacgaaacaaaaaacgacgatctaactctaactaaaacgcgaacctcgcgtcgaactcgataccgtaaaaaccgaaaccgtaccgactacgaaaaaaactaaactctcccaaaaacctcgaaaactacgaaaaaaataaacaaaaaaaaataaaacgaa

SEQ ID NO: 26469 - DNA, 918 bp, Artificial Sequence
  chemically treated genomic DNA (Homo sapiens) CpG-island No: 26469
ttttcgttgtaattttagtcggttttcggagtacgcgggtcggtcgcgcggtcgttggaaatagagtcgcgaatcggtttttcgggttaggttcgttttcgggttttaagttttaatttggtgttcggttcgggttatacgggtttagcgcgggttcggtttttggttttttacgggcgcgggtaggtgaggatcggtcggcgtcgttcgcgcgttttttttatcggttcgggacgcggcgttttcggggatggttcgggtagggacggcggggggattttcggtgcgcgttttaattcgtttttaattcgtttttaaggcggcggtggcgttcgtgtatttggtcgcggggtcgttcgggttattgtattagtagttcgcggtttcgggtcggttcgcgtttatttatttgcggcgggggtcgggtagtcgtatagcgttagtagtagcggttacggcggttcgggtagtgtagtttttatgttgtttagcggtcggacgggttggcgtcgcgtttattcgggttttatagcgcggcggcggcggttgcggcggtttttcgcgcgtgtttttgtattttcgtttttttcgttgggcgtcgcggattaggacgattgggaggagggagtagggcgcgcgtgagcggaagtagcgtcgcgttttcgtttttcgttgacgtagtcgttcgcgttttagggagtcggtcggcggtcgggcgggttttacggttttagcggttcgggttttcgcggttttttttcgcgtttttcgttttgttttgggggcgtcgtcgggaggttcggcgcggggttggggcgcggggttttcgtttcgcggggttcgggggtagatttgggttaggagttcggtgtgttatttgtggagtttttatgagtggggaaattgaggtacggggcg

SEQ ID NO: 26470 - DNA, 918 bp, Artificial Sequence
  chemically treated genomic DNA (Homo sapiens) CpG-island No: 26470
cgccccgtacctcaatttccccactcataaaaactccacaaataacacaccgaactcctaacccaaatctacccccgaaccccgcgaaacgaaaaccccgcgccccaaccccgcgccgaacctcccgacgacgcccccaaaacaaaacgaaaaacgcgaaaaaaaaccgcgaaaacccgaaccgctaaaaccgtaaaacccgcccgaccgccgaccgactccctaaaacgcgaacgactacgtcaacgaaaaacgaaaacgcgacgctacttccgctcacgcgcgccctactccctcctcccaatcgtcctaatccgcgacgcccaacgaaaaaaacgaaaatacaaaaacacgcgcgaaaaaccgccgcaaccgccgccgccgcgctataaaacccgaataaacgcgacgccaacccgtccgaccgctaaacaacataaaaactacactacccgaaccgccgtaaccgctactactaacgctatacgactacccgacccccgccgcaaataaataaacgcgaaccgacccgaaaccgcgaactactaatacaataacccgaacgaccccgcgaccaaatacacgaacgccaccgccgccttaaaaacgaattaaaaacgaattaaaacgcgcaccgaaaatccccccgccgtccctacccgaaccatccccgaaaacgccgcgtcccgaaccgataaaaaaaacgcgcgaacgacgccgaccgatcctcacctacccgcgcccgtaaaaaaccaaaaaccgaacccgcgctaaacccgtataacccgaaccgaacaccaaattaaaacttaaaacccgaaaacgaacctaacccgaaaaaccgattcgcgactctatttccaacgaccgcgcgaccgacccgcgtactccgaaaaccgactaaaattacaacgaaaa

SEQ ID NO: 26471 - DNA, 918 bp, Artificial Sequence
  chemically treated genomic DNA (Homo sapiens) CpG-island No: 26471
cgtttcgtgttttagtttttttatttatagaggttttataggtaatatatcgggtttttggtttagatttgttttcgggtttcgcggggcggaaatttcgcgttttagtttcgcgtcgagtttttcggcggcgtttttagggtagggcgaggagcgcggggaggggtcgcggggattcgggtcgttggggtcgtggggttcgttcggtcgtcggtcggttttttggggcgcgggcggttgcgttagcggggggcggagacgcggcgttgttttcgtttacgcgcgttttgttttttttttttagtcgttttggttcgcggcgtttaacggggaagacgaagatgtagggatacgcgcgaggagtcgtcgtagtcgtcgtcgtcgcgttgtggagttcgagtgagcgcggcgttagttcgttcggtcgttggataatatggaggttgtattgttcgggtcgtcgtggtcgttgttgttggcgttgtgcggttgttcggttttcgtcgtaggtaggtgggcgcgggtcgattcgggatcgcgggttgttagtataatggttcgggcggtttcgcgattaagtgtacgggcgttatcgtcgttttggaagcgagttgggggcgagttggggcgcgtatcggggattttttcgtcgtttttgttcgggttattttcggggacgtcgcgtttcgggtcggtgaggagggcgcgcgggcggcgtcggtcggtttttatttgttcgcgttcgtaggaagttaggagtcgagttcgcgttgggttcgtgtggttcgggtcgggtattaagttgggatttggggttcggaggcgggtttggttcgggaagtcggttcgcgattttgtttttagcggtcgcgcggtcggttcgcgtgtttcgaggatcggttgaggttgtagcgagaa

SEQ ID NO: 26472 - DNA, 918 bp, Artificial Sequence
  chemically treated genomic DNA (Homo sapiens) CpG-island No: 26472
ttctcgctacaacctcaaccgatcctcgaaacacgcgaaccgaccgcgcgaccgctaaaaacaaaatcgcgaaccgacttcccgaaccaaacccgcctccgaaccccaaatcccaacttaatacccgacccgaaccacacgaacccaacgcgaactcgactcctaacttcctacgaacgcgaacaaataaaaaccgaccgacgccgcccgcgcgccctcctcaccgacccgaaacgcgacgtccccgaaaataacccgaacaaaaacgacgaaaaaatccccgatacgcgccccaactcgcccccaactcgcttccaaaacgacgataacgcccgtacacttaatcgcgaaaccgcccgaaccattatactaacaacccgcgatcccgaatcgacccgcgcccacctacctacgacgaaaaccgaacaaccgcacaacgccaacaacaacgaccacgacgacccgaacaatacaacctccatattatccaacgaccgaacgaactaacgccgcgctcactcgaactccacaacgcgacgacgacgactacgacgactcctcgcgcgtatccctacatcttcgtcttccccgttaaacgccgcgaaccaaaacgactaaaaaaaaaaaacaaaacgcgcgtaaacgaaaacaacgccgcgtctccgccccccgctaacgcaaccgcccgcgccccaaaaaaccgaccgacgaccgaacgaaccccacgaccccaacgacccgaatccccgcgacccctccccgcgctcctcgccctaccctaaaaacgccgccgaaaaactcgacgcgaaactaaaacgcgaaatttccgccccgcgaaacccgaaaacaaatctaaaccaaaaacccgatatattacctataaaacctctataaataaaaaaactaaaacacgaaacg

SEQ ID NO: 26473 - DNA, 607 bp, Artificial Sequence
  chemically treated genomic DNA (Homo sapiens) CpG-island No: 26473
tttcgtagattttcgttgaaggagcggtgggcggcgcgtcgcgattttggcgggttatagattatatcgtttgtagggcgttgttggggcgcgtagagcggggttgttttagggtggtttttttaggttggggcgcggcgggcggcggtcgcgggcgcgcgttttattcgggtttcgagtaatcgttatcgtcgttgttaaagttcgttaatatggtggatttggaggtcgtggtggtcgatgttagttatttgatggttatggagaagagtaaggcgatttcggtcgattacgtttgtaagaggatcgttttgttcgaatttacgtattatttgtttcggttcgcgtcggttttcgacgtcgtcgttttttgcggtcgttagcgattttttgcgttcgggagaatcgggagttgagtcgtcgttgtttcggagcgggtgatatagcggagcgggcgatgcggggtcggttttttggttttagtttttgaaatggggtatcggagggcgggtggggggtatttcgggagagagcgttttaaagtgtttggcgtcgcgttttgcgcgtagttagtattttagtaaggggttggttatgatttggttgg

SEQ ID NO: 26474 - DNA, 607 bp, Artificial Sequence
  chemically treated genomic DNA (Homo sapiens) CpG-island No: 26474
ccaaccaaatcataaccaaccccttactaaaatactaactacgcgcaaaacgcgacgccaaacactttaaaacgctctctcccgaaataccccccacccgccctccgataccccatttcaaaaactaaaaccaaaaaaccgaccccgcatcgcccgctccgctatatcacccgctccgaaacaacgacgactcaactcccgattctcccgaacgcaaaaaatcgctaacgaccgcaaaaaacgacgacgtcgaaaaccgacgcgaaccgaaacaaataatacgtaaattcgaacaaaacgatcctcttacaaacgtaatcgaccgaaatcgccttactcttctccataaccatcaaataactaacatcgaccaccacgacctccaaatccaccatattaacgaactttaacaacgacgataacgattactcgaaacccgaataaaacgcgcgcccgcgaccgccgcccgccgcgccccaacctaaaaaaaccaccctaaaacaaccccgctctacgcgccccaacaacgccctacaaacgatataatctataacccgccaaaatcgcgacgcgccgcccaccgctccttcaacgaaaatctacgaaa

SEQ ID NO: 26475 - DNA, 607 bp, Artificial Sequence
  chemically treated genomic DNA (Homo sapiens) CpG-island No: 26475
ttagttaagttataattagttttttgttggggtgttagttgcgcgtagggcgcggcgttaggtattttggagcgttttttttcggagtgttttttattcgtttttcgatgttttattttagagattggagttaggaggtcggtttcgtatcgttcgtttcgttgtgttattcgtttcgggatagcgacggtttagttttcgattttttcggacgtagggggtcgttggcggtcgtagggggcggcggcgtcggggatcggcgcgggtcggggtaggtggtacgtgggttcgggtaggacggtttttttgtaggcgtggtcggtcggggtcgttttgtttttttttatggttattaggtaattgatatcggttattacggtttttaggtttattatgttggcgagttttggtagcggcggtggcggttattcgggattcggatgggacgcgcgttcgcggtcgtcgttcgtcgcgttttaatttgggggagttattttggggtagtttcgttttgcgcgttttagtagcgttttgtaagcggtgtaatttgtagttcgttagggtcgcggcgcgtcgtttatcgtttttttagcgagggtttgcgggg

SEQ ID NO: 26476 - DNA, 607 bp, Artificial Sequence
  chemically treated genomic DNA (Homo sapiens) CpG-island No: 26476
ccccgcaaaccctcgctaaaaaaacgataaacgacgcgccgcgaccctaacgaactacaaattacaccgcttacaaaacgctactaaaacgcgcaaaacgaaactaccccaaaataactcccccaaattaaaacgcgacgaacgacgaccgcgaacgcgcgtcccatccgaatcccgaataaccgccaccgccgctaccaaaactcgccaacataataaacctaaaaaccgtaataaccgatatcaattacctaataaccataaaaaaaaacaaaacgaccccgaccgaccacgcctacaaaaaaaccgtcctacccgaacccacgtaccacctaccccgacccgcgccgatccccgacgccgccgccccctacgaccgccaacgaccccctacgtccgaaaaaatcgaaaactaaaccgtcgctatcccgaaacgaataacacaacgaaacgaacgatacgaaaccgacctcctaactccaatctctaaaataaaacatcgaaaaacgaataaaaaacactccgaaaaaaaacgctccaaaatacctaacgccgcgccctacgcgcaactaacaccccaacaaaaaactaattataacttaactaa

SEQ ID NO: 26477 - DNA, 510 bp, Artificial Sequence
  chemically treated genomic DNA (Homo sapiens) CpG-island No: 26477
ggcggcggcggcggtggcggtagcgcgttttattcgggttcgagtaatcgtcgtcgtcgttaaaattcgttaacgtggcggattcggaggttgtgttggtagatgttagttatttgatggttatggagaagagtaaggcgatttcggtcgttcgcgttagtaagaggatcgttttgttcgattttaggtattagttgtttcggttcgcgttggtttttacgtcgtcgtttttaagcggtcgttagcgattttttgcgttcgggagggtcgggtattgagtcgtcgttgttttgggtgcgggtgatatcgcggaattggcgatgcggggtcggttttttcgttttagtttttgaaatggggtatcggatggtcggtgggggggatttcgggagagagcgttttaaagtgtttagcgcggcgttttgcgcgtagcgagcgttttagggaggggttggttatgatttggttggattagttttatttttgtcgtttttttttttcggttttgtt

SEQ ID NO: 26478 - DNA, 510 bp, Artificial Sequence
  chemically treated genomic DNA (Homo sapiens) CpG-island No: 26478
aacaaaaccgaaaaaaaaaaacgacaaaaataaaactaatccaaccaaatcataaccaacccctccctaaaacgctcgctacgcgcaaaacgccgcgctaaacactttaaaacgctctctcccgaaatcccccccaccgaccatccgataccccatttcaaaaactaaaacgaaaaaaccgaccccgcatcgccaattccgcgatatcacccgcacccaaaacaacgacgactcaatacccgaccctcccgaacgcaaaaaatcgctaacgaccgcttaaaaacgacgacgtaaaaaccaacgcgaaccgaaacaactaatacctaaaatcgaacaaaacgatcctcttactaacgcgaacgaccgaaatcgccttactcttctccataaccatcaaataactaacatctaccaacacaacctccgaatccgccacgttaacgaattttaacgacgacgacgattactcgaacccgaataaaacgcgctaccgccaccgccgccgccgcc

SEQ ID NO: 26479 - DNA, 510 bp, Artificial Sequence
  chemically treated genomic DNA (Homo sapiens) CpG-island No: 26479
gatagggtcggggggagggggcgatagggatggagttggtttagttaagttataattagtttttttttggggcgttcgttgcgcgtagggcgtcgcgttgggtattttggagcgttttttttcggagttttttttatcggttattcgatgttttattttagagattggaacggggaggtcggtttcgtatcgttagtttcgcggtgttattcgtatttaggatagcgacgatttaatgttcgattttttcggacgtaggaggtcgttgacggtcgtttggggacggcggcgtggggattagcgcgggtcggggtagttggtatttgggatcgggtaggacggtttttttgttggcgcgggcggtcggagtcgttttgtttttttttatggttattaggtaattggtatttgttagtatagttttcgggttcgttacgttggcgagttttggcggcggcggcggttattcggattcggatgggacgcgttgtcgttatcgtcgtcgtcgtt

SEQ ID NO: 26480 - DNA, 510 bp, Artificial Sequence
  chemically treated genomic DNA (Homo sapiens) CpG-island No: 26480
aacgacgacgacgataacgacaacgcgtcccatccgaatccgaataaccgccgccgccgccaaaactcgccaacgtaacgaacccgaaaactatactaacaaataccaattacctaataaccataaaaaaaaacaaaacgactccgaccgcccgcgccaacaaaaaaaccgtcctacccgatcccaaataccaactaccccgacccgcgctaatccccacgccgccgtccccaaacgaccgtcaacgacctcctacgtccgaaaaaatcgaacattaaatcgtcgctatcctaaatacgaataacaccgcgaaactaacgatacgaaaccgacctccccgttccaatctctaaaataaaacatcgaataaccgataaaaaaaactccgaaaaaaaacgctccaaaatacccaacgcgacgccctacgcgcaacgaacgccccaaaaaaaaactaattataacttaactaaaccaactccatccctatcgccccctccccccgaccctatc

SEQ ID NO: 26481 - DNA, 541 bp, Artificial Sequence
  chemically treated genomic DNA (Homo sapiens) CpG-island No: 26481
ttttcgcgaaggaggagggcgttggaatcgtggcgcgttcgatttggtcgggcgtaagtcgttggagatttcggtcgagtgggtaggcggtcggattttatgcgggttatttgcggttaggtcgggcgtgcgtgtgagcgcgtgcgtagacgttagttttcgaggttcgggtcgttttttgggtaaggtgcgcgcgtttagcggtttcggttttacgcgttcggatacgcggaatcgtagatcgcggcgtttcggaggtcgcgaaagggatgggcggggtcgggtcgcgggattcgttttttattggtcgggcgtcggggcgaggcggggcgtcggggtggggcggggcgagcgggttttggggggtagacgttggcgttgggcggcgggaggcgcggttcgcggggggtcgaaggagtaggtgggcgacgttcgtaggggcgcgggagggtgtcgttgggatcgttattaggagtttggggttttgttatttttcggagggattagcgattttttcgttttgcgggtgatagtggggtat

SEQ ID NO: 26482 - DNA, 541 bp, Artificial Sequence
  chemically treated genomic DNA (Homo sapiens) CpG-island No: 26482
ataccccactatcacccgcaaaacgaaaaaatcgctaatccctccgaaaaataacaaaaccccaaactcctaataacgatcccaacgacaccctcccgcgcccctacgaacgtcgcccacctactccttcgaccccccgcgaaccgcgcctcccgccgcccaacgccaacgtctaccccccaaaacccgctcgccccgccccaccccgacgccccgcctcgccccgacgcccgaccaataaaaaacgaatcccgcgacccgaccccgcccatccctttcgcgacctccgaaacgccgcgatctacgattccgcgtatccgaacgcgtaaaaccgaaaccgctaaacgcgcgcaccttacccaaaaaacgacccgaacctcgaaaactaacgtctacgcacgcgctcacacgcacgcccgacctaaccgcaaataacccgcataaaatccgaccgcctacccactcgaccgaaatctccaacgacttacgcccgaccaaatcgaacgcgccacgattccaacgccctcctccttcgcgaaaa

SEQ ID NO: 26483 - DNA, 541 bp, Artificial Sequence
  chemically treated genomic DNA (Homo sapiens) CpG-island No: 26483
atgttttattgttattcgtagggcgaagaggtcgttgattttttcgaaaggtggtagaattttaggtttttgatgacggttttagcggtattttttcgcgtttttgcgagcgtcgtttatttgttttttcggtttttcgcgagtcgcgtttttcgtcgtttagcgttagcgtttgttttttagagttcgttcgtttcgttttatttcggcgtttcgtttcgtttcggcgttcggttaatgggaggcgggtttcgcggttcggtttcgtttatttttttcgcggttttcggggcgtcgcggtttgcggtttcgcgtgttcgggcgcgtggggtcggggtcgttgggcgcgcgtattttgtttagaaggcggttcgggtttcggaggttgacgtttgcgtacgcgtttatacgtacgttcggtttggtcgtaggtgattcgtatggggttcggtcgtttgtttattcggtcggggtttttagcggtttgcgttcggttaggtcgagcgcgttacggttttagcgtttttttttttcgcggaag

SEQ ID NO: 26484 - DNA, 541 bp, Artificial Sequence
  chemically treated genomic DNA (Homo sapiens) CpG-island No: 26484
cttccgcgaaaaaaaaaaacgctaaaaccgtaacgcgctcgacctaaccgaacgcaaaccgctaaaaaccccgaccgaataaacaaacgaccgaaccccatacgaatcacctacgaccaaaccgaacgtacgtataaacgcgtacgcaaacgtcaacctccgaaacccgaaccgccttctaaacaaaatacgcgcgcccaacgaccccgaccccacgcgcccgaacacgcgaaaccgcaaaccgcgacgccccgaaaaccgcgaaaaaaataaacgaaaccgaaccgcgaaacccgcctcccattaaccgaacgccgaaacgaaacgaaacgccgaaataaaacgaaacgaacgaactctaaaaaacaaacgctaacgctaaacgacgaaaaacgcgactcgcgaaaaaccgaaaaaacaaataaacgacgctcgcaaaaacgcgaaaaaataccgctaaaaccgtcatcaaaaacctaaaattctaccacctttcgaaaaaatcaacgacctcttcgccctacgaataacaataaaacat

SEQ ID NO: 26485 - DNA, 662 bp, Artificial Sequence
  chemically treated genomic DNA (Homo sapiens) CpG-island No: 26485
agcgtacgtcggcggggtgcggggataggggtttttcgaggtttttcgcgttttttacgtcgcgagggagtgatattagaggttttcgtggatcgattacgtagtaaagttaggtatcgggcgtgtatgcgcggggagtttggttttttttcgggtggaagttcggtaagtattaattttttttaaatttatttaggtagtcggagttgtagaaggagcgtacggaggtcgtgttttagtagtcgcgtttttttatttttcgcggcggggtagtttttaatcggcggggcgttatatggcgtcgggtttcgggggtttgtacggacgcgtgtatagttcggtgggtcgttcggcggaggcggcggatattcgtgggtttcggcgtcgcgttattataatgtattattgtcgttcgttattcggtatatgagcgcgttaatttcgttcgcgtcgcgggagtcgagtttagtttgagcggcggtgttgtttattattttttttcgttttaggagcgcggtttcgtttcgcgcgtcgtttgttggttcgtgcgatttcgcggacgtttatgtaggttttttattttaatgttatattttaatgcgaaaattcgagcgaaagtgttgttttttgtagtaataagttcggcgttgttttattttaaa

SEQ ID NO: 26486 - DNA, 662 bp, Artificial Sequence
  chemically treated genomic DNA (Homo sapiens) CpG-island No: 26486
tttaaaataaaacaacgccgaacttattactacaaaaaacaacactttcgctcgaattttcgcattaaaatataacattaaaataaaaaacctacataaacgtccgcgaaatcgcacgaaccaacaaacgacgcgcgaaacgaaaccgcgctcctaaaacgaaaaaaaataataaacaacaccgccgctcaaactaaactcgactcccgcgacgcgaacgaaattaacgcgctcatataccgaataacgaacgacaataatacattataataacgcgacgccgaaacccacgaatatccgccgcctccgccgaacgacccaccgaactatacacgcgtccgtacaaacccccgaaacccgacgccatataacgccccgccgattaaaaactaccccgccgcgaaaaataaaaaaacgcgactactaaaacacgacctccgtacgctccttctacaactccgactacctaaataaatttaaaaaaaattaatacttaccgaacttccacccgaaaaaaaaccaaactccccgcgcatacacgcccgatacctaactttactacgtaatcgatccacgaaaacctctaatatcactccctcgcgacgtaaaaaacgcgaaaaacctcgaaaaacccctatccccgcaccccgccgacgtacgct

SEQ ID NO: 26487 - DNA, 662 bp, Artificial Sequence
  chemically treated genomic DNA (Homo sapiens) CpG-island No: 26487
tttgagataaagtaacgtcgagtttgttgttgtaggggatagtattttcgttcggattttcgtattaaaatgtgatattgaagtggggagtttgtatgggcgttcgcggggtcgtacggattagtaggcgacgcgcgggacgaggtcgcgtttttggggcgggaggaagtggtaggtagtatcgtcgtttaggttgggttcggttttcgcggcgcggacggggttaacgcgtttatgtatcgggtggcgggcggtagtggtgtattgtggtaacgcggcgtcgggatttacgagtgttcgtcgttttcgtcgggcggtttatcgagttgtgtacgcgttcgtgtaagttttcgggattcggcgttatgtagcgtttcgtcgattggaggttgtttcgtcgcgggaaatgaagggacgcggttgttgggatacggttttcgtgcgttttttttgtagtttcggttgtttgaataaatttaagaagggttagtgtttgtcgggtttttattcggagggaggttaggtttttcgcgtatgtacgttcggtgtttggttttgttgcgtgatcgatttacgggagtttttgatgttattttttcgcggcgtggggagcgcggggagtttcggggaatttttgttttcgtatttcgtcggcgtgcgtt

SEQ ID NO: 26488 - DNA, 662 bp, Artificial Sequence
  chemically treated genomic DNA (Homo sapiens) CpG-island No: 26488
aacgcacgccgacgaaatacgaaaacaaaaattccccgaaactccccgcgctccccacgccgcgaaaaaataacatcaaaaactcccgtaaatcgatcacgcaacaaaaccaaacaccgaacgtacatacgcgaaaaacctaacctccctccgaataaaaacccgacaaacactaacccttcttaaatttattcaaacaaccgaaactacaaaaaaaacgcacgaaaaccgtatcccaacaaccgcgtcccttcatttcccgcgacgaaacaacctccaatcgacgaaacgctacataacgccgaatcccgaaaacttacacgaacgcgtacacaactcgataaaccgcccgacgaaaacgacgaacactcgtaaatcccgacgccgcgttaccacaatacaccactaccgcccgccacccgatacataaacgcgttaaccccgtccgcgccgcgaaaaccgaacccaacctaaacgacgatactacctaccacttcctcccgccccaaaaacgcgacctcgtcccgcgcgtcgcctactaatccgtacgaccccgcgaacgcccatacaaactccccacttcaatatcacattttaatacgaaaatccgaacgaaaatactatcccctacaacaacaaactcgacgttactttatctcaaa

SEQ ID NO: 26489 - DNA, 644 bp, Artificial Sequence
  chemically treated genomic DNA (Homo sapiens) CpG-island No: 26489
gtcgtcgtcgttttttcgtcgtcgcgtttttagtttatttgggtgtagtgtcggttgttatcgttttttcgagtttgggaggagggcggtttcgggattgggtgtgtgttgttcggcggtttcgggttcgtttttttgtcgcgggcgtcgttttagtatcgcggatagcgtttagttcgcgagtttagagagtagtcggatttagaggagtcgtgcgttcgtttcgttcgttcgttcgttagtttgagcgttgtaagggcgcgtcgtgttgcgtttttatttttttagttttttttttatcgttcgaggaggtttttttcgttttttggagtattgttcggagagcgatgagagtcgcgcgaggttatcgatcggttttcggaggattcggtacgttttagttagttttgttttaggttgggattagtttttttttttcgtttagagggttagataaaggcgagtttttcgtggcgggacgtaggcgggtagcggaaggcgtattttagttttttaaaatgttcgagcgtggtttggaattcgatacgatattaagggcgttatcgcgttttaatcgaggttggagagggtcggttttttgtttggatttagtaggggaggggttttcggatggtttacggttt

SEQ ID NO: 26490 - DNA, 644 bp, Artificial Sequence
  chemically treated genomic DNA (Homo sapiens) CpG-island No: 26490
aaaccgtaaaccatccgaaaacccctcccctactaaatccaaacaaaaaaccgaccctctccaacctcgattaaaacgcgataacgcccttaatatcgtatcgaattccaaaccacgctcgaacattttaaaaaactaaaatacgccttccgctacccgcctacgtcccgccacgaaaaactcgcctttatctaaccctctaaacgaaaaaaaaaaactaatcccaacctaaaacaaaactaactaaaacgtaccgaatcctccgaaaaccgatcgataacctcgcgcgactctcatcgctctccgaacaatactccaaaaaacgaaaaaaacctcctcgaacgataaaaaaaaaactaaaaaaataaaaacgcaacacgacgcgcccttacaacgctcaaactaacgaacgaacgaacgaaacgaacgcacgactcctctaaatccgactactctctaaactcgcgaactaaacgctatccgcgatactaaaacgacgcccgcgacaaaaaaacgaacccgaaaccgccgaacaacacacacccaatcccgaaaccgccctcctcccaaactcgaaaaaacgataacaaccgacactacacccaaataaactaaaaacgcgacgacgaaaaaacgacgacgac

SEQ ID NO: 26491 - DNA, 644 bp, Artificial Sequence
  chemically treated genomic DNA (Homo sapiens) CpG-island No: 26491
gagtcgtggattattcgagggttttttttttgttgggtttaggtaaagggtcggttttttttagtttcgattggggcgcgatagcgtttttagtgtcgtgtcgggttttaggttacgttcgggtattttaagaggttgaggtgcgtttttcgttgttcgtttgcgtttcgttacggagagttcgtttttatttagttttttgggcgagagaagaaggttaattttagtttgggataaggttggttgaggcgtgtcggatttttcggggatcgatcggtggtttcgcgcggtttttatcgtttttcgagtagtgttttagggggcggagggagttttttcgggcggtggggaggaggttggaggaatgaggacgtagtacggcgcgtttttgtagcgtttaggttgacgggcgggcgggcggagcgggcgtacggtttttttaggttcggttgttttttgagttcgcgggttggacgttgttcgcggtgttgaagcggcgttcgcggtagggaggcggattcggagtcgtcgggtagtatatatttaatttcgggatcgttttttttttaggttcggagaggcggtggtagtcggtattgtatttagatggattgagagcgcggcggcgggaaggcggcggcggt

SEQ ID NO: 26492 - DNA, 644 bp, Artificial Sequence
  chemically treated genomic DNA (Homo sapiens) CpG-island No: 26492
accgccgccgccttcccgccgccgcgctctcaatccatctaaatacaataccgactaccaccgcctctccgaacctaaaaaaaaaacgatcccgaaattaaatatatactacccgacgactccgaatccgcctccctaccgcgaacgccgcttcaacaccgcgaacaacgtccaacccgcgaactcaaaaaacaaccgaacctaaaaaaaccgtacgcccgctccgcccgcccgcccgtcaacctaaacgctacaaaaacgcgccgtactacgtcctcattcctccaacctcctccccaccgcccgaaaaaactccctccgccccctaaaacactactcgaaaaacgataaaaaccgcgcgaaaccaccgatcgatccccgaaaaatccgacacgcctcaaccaaccttatcccaaactaaaattaaccttcttctctcgcccaaaaaactaaataaaaacgaactctccgtaacgaaacgcaaacgaacaacgaaaaacgcacctcaacctcttaaaatacccgaacgtaacctaaaacccgacacgacactaaaaacgctatcgcgccccaatcgaaactaaaaaaaaccgaccctttacctaaacccaacaaaaaaaaaaccctcgaataatccacgactc

SEQ ID NO: 26493 - DNA, 673 bp, Artificial Sequence
  chemically treated genomic DNA (Homo sapiens) CpG-island No: 26493
acgggcgagggcgttggggttattttcgtcgacgttaggcgtgagttttagaattcgtttttaatcgttcggtttcgtgagcgcggggagtttggttttcgtttgataataaagaaattattacggatagaaggaaagaggagcgaggttgggaagggagcggttttaattcggggttcgttttttttaattttttagcgtagcggtttcgaaagtggggtggggacggggattgaggttgagttcgttttttttttgtttttcgggtttcgcgtttttgaagcgaattgggtttggaggggtgttggggatcgagggagcggcgttggtgggtgatcgagggaaaggtggggttagtttttgggtatcggtcggaggaggattacgaggcggagtcgttgtttgttcgcgttttattcgtttggtttatttaatagtttcgttgtagattcgcggcggtaggagcggcgggttagatggtgattataattcggggcgttatttttttggaatttgatttttaatttcgtttagtaatcggattttcggaagtcgcgatttcgaagtttttagcgtttttttatcgacggcggggtcggggtttttggaagtttcggagtcgtagttttagtttgtagcgtacgttttggtttttagggagtagagaggtaga

SEQ ID NO: 26494 - DNA, 673 bp, Artificial Sequence
  chemically treated genomic DNA (Homo sapiens) CpG-island No: 26494
tctacctctctactccctaaaaaccaaaacgtacgctacaaactaaaactacgactccgaaacttccaaaaaccccgaccccgccgtcgataaaaaaacgctaaaaacttcgaaatcgcgacttccgaaaatccgattactaaacgaaattaaaaatcaaattccaaaaaaataacgccccgaattataatcaccatctaacccgccgctcctaccgccgcgaatctacaacgaaactattaaataaaccaaacgaataaaacgcgaacaaacaacgactccgcctcgtaatcctcctccgaccgatacccaaaaactaaccccacctttccctcgatcacccaccaacgccgctccctcgatccccaacacccctccaaacccaattcgcttcaaaaacgcgaaacccgaaaaacaaaaaaaaaacgaactcaacctcaatccccgtccccaccccactttcgaaaccgctacgctaaaaaattaaaaaaaacgaaccccgaattaaaaccgctcccttcccaacctcgctcctctttccttctatccgtaataatttctttattatcaaacgaaaaccaaactccccgcgctcacgaaaccgaacgattaaaaacgaattctaaaactcacgcctaacgtcgacgaaaataaccccaacgccctcgcccgt

SEQ ID NO: 26495 - DNA, 673 bp, Artificial Sequence
  chemically treated genomic DNA (Homo sapiens) CpG-island No: 26495
tttgtttttttgttttttgggggttaaggcgtgcgttgtaggttggagttgcggtttcgaggtttttaggagtttcggtttcgtcgtcggtggagaaacgttgggggtttcgaggtcgcggttttcggaaattcggttattgagcggagttgggggttaggttttaaagggatagcgtttcgggttgtaattattatttggttcgtcgtttttgtcgtcgcgagtttatagcggagttattgggtggattaagcgggtgaggcgcgggtaggtagcggtttcgtttcgtaattttttttcgatcggtgtttaggggttggttttatttttttttcggttatttattaacgtcgttttttcgatttttagtatttttttaggtttagttcgttttagaggcgcgagattcggaaaataaggaagaagcgagtttagttttaattttcgtttttattttattttcggggtcgttgcgttggagaattgaagggggcggatttcggattaaagtcgttttttttttagtttcgtttttttttttttttgttcgtgatgatttttttattgttaggcgagagttaggtttttcgcgtttacgggatcgggcggttgggagcgggttttggagtttacgtttggcgtcggcggaggtgattttagcgttttcgttcgt

SEQ ID NO: 26496 - DNA, 673 bp, Artificial Sequence
  chemically treated genomic DNA (Homo sapiens) CpG-island No: 26496
acgaacgaaaacgctaaaatcacctccgccgacgccaaacgtaaactccaaaacccgctcccaaccgcccgatcccgtaaacgcgaaaaacctaactctcgcctaacaataaaaaaatcatcacgaacaaaaaaaaaaaaaaacgaaactaaaaaaaaaacgactttaatccgaaatccgcccccttcaattctccaacgcaacgaccccgaaaataaaataaaaacgaaaattaaaactaaactcgcttcttccttattttccgaatctcgcgcctctaaaacgaactaaacctaaaaaaatactaaaaatcgaaaaaacgacgttaataaataaccgaaaaaaaaataaaaccaacccctaaacaccgatcgaaaaaaaattacgaaacgaaaccgctacctacccgcgcctcacccgcttaatccacccaataactccgctataaactcgcgacgacaaaaacgacgaaccaaataataattacaacccgaaacgctatccctttaaaacctaacccccaactccgctcaataaccgaatttccgaaaaccgcgacctcgaaacccccaacgtttctccaccgacgacgaaaccgaaactcctaaaaacctcgaaaccgcaactccaacctacaacgcacgccttaacccccaaaaaacaaaaaaacaaa

SEQ ID NO: 26497 - DNA, 575 bp, Artificial Sequence
  chemically treated genomic DNA (Homo sapiens) CpG-island No: 26497
aatgtgttttttttcggtttttgtattatattaattaatcggcgttaggtcgtagagtcgttttggttttcggcgagaatttaggcgagcgcggcgtacgttgtttcggagttttatcgcggaagttgaggtcgcggatttcgagggcggggtggagaggaatttggaaggatttggattcggtggaacgtattgcgcggacggcgtttgcgttcgtatttagttgtttagttttttttttttaggtttttttttgaaagtcgtttttatgtcggttttttttttttgtttttttgttttttttcggcgagttagcgcgattgtgaattttcgttttcggcggtgtttatgttgatttgaggagtcgcggttgcgagtaggttcggtgttgcgggttggggtaggcggcggtggggtttttggttttggggtattgggaagatcgcgagtcgtgcgtgtgggaaggttttttttcggtttttcgggttatttttgttttcgaggagcggtatattttttatttggcggaggtgttttggggtagttgggtgagtgacgtgatgaatttttgtaga

SEQ ID NO: 26498 - DNA, 575 bp, Artificial Sequence
  chemically treated genomic DNA (Homo sapiens) CpG-island No: 26498
tctacaaaaattcatcacgtcactcacccaactaccccaaaacacctccgccaaataaaaaatataccgctcctcgaaaacaaaaataacccgaaaaaccgaaaaaaaaccttcccacacgcacgactcgcgatcttcccaataccccaaaaccaaaaaccccaccgccgcctaccccaacccgcaacaccgaacctactcgcaaccgcgactcctcaaatcaacataaacaccgccgaaaacgaaaattcacaatcgcgctaactcgccgaaaaaaaacaaaaaaacaaaaaaaaaaaaccgacataaaaacgactttcaaaaaaaaacctaaaaaaaaaaaactaaacaactaaatacgaacgcaaacgccgtccgcgcaatacgttccaccgaatccaaatccttccaaattcctctccaccccgccctcgaaatccgcgacctcaacttccgcgataaaactccgaaacaacgtacgccgcgctcgcctaaattctcgccgaaaaccaaaacgactctacgacctaacgccgattaattaatataatacaaaaaccgaaaaaaaacacatt

SEQ ID NO: 26499 - DNA, 575 bp, Artificial Sequence
  chemically treated genomic DNA (Homo sapiens) CpG-island No: 26499
tttgtagggatttattacgttatttatttaattattttaggatattttcgttagatgagaaatatgtcgtttttcgggagtaaagatgattcggaggatcgggggaggatttttttatacgtacgattcgcgatttttttagtgttttagaattagggattttatcgtcgtttattttaattcgtagtatcgaatttgttcgtagtcgcgattttttaggttagtatggatatcgtcggaaacggaaatttatagtcgcgttgattcgtcggagggaaataagaaggtagaaaaaagagatcggtatggggacggtttttaggggagagtttgaagaaagagggttgaatagttgagtgcggacgtaggcgtcgttcgcgtagtgcgttttatcgggtttaggtttttttagatttttttttatttcgttttcggaattcgcggttttaattttcgcggtgggatttcggagtagcgtgcgtcgcgttcgtttgagttttcgtcgaaggttagggcggttttgcggtttggcgtcggttagttagtgtggtgtaaaagtcggaaggagatatatt

SEQ ID NO: 26500 - DNA, 575 bp, Artificial Sequence
  chemically treated genomic DNA (Homo sapiens) CpG-island No: 26500
aatatatctccttccgacttttacaccacactaactaaccgacgccaaaccgcaaaaccgccctaaccttcgacgaaaactcaaacgaacgcgacgcacgctactccgaaatcccaccgcgaaaattaaaaccgcgaattccgaaaacgaaataaaaaaaaatctaaaaaaacctaaacccgataaaacgcactacgcgaacgacgcctacgtccgcactcaactattcaaccctctttcttcaaactctcccctaaaaaccgtccccataccgatctcttttttctaccttcttatttccctccgacgaatcaacgcgactataaatttccgtttccgacgatatccatactaacctaaaaaatcgcgactacgaacaaattcgatactacgaattaaaataaacgacgataaaatccctaattctaaaacactaaaaaaatcgcgaatcgtacgtataaaaaaatcctcccccgatcctccgaatcatctttactcccgaaaaacgacatatttctcatctaacgaaaatatcctaaaataattaaataaataacgtaataaatccctacaaa

SEQ ID NO: 26501 - DNA, 1495 bp, Artificial Sequence
  chemically treated genomic DNA (Homo sapiens) CpG-island No: 26501
ttcgtttttgagaaatggcgtagtaagcgtttcgcggagagtttggaggcggggcgtttttttttgagttcgcggggtcgtatttcgagttagtcggttagatttgtatttcgcgtagtatttttgttttttttgtgtagcggaaagggtaaaaggtagggattgtaagcgggcgcgtatcgggtaggaagagaggttttgcgtaggtgcgcggattcgggtttttgggttttattttcgtcgcgtatttcggggttcgtattcggtttttgtcgggtttttttcggtcgtatttcgttttcgtatttcgtttttttttaagttttattcggtttaagtcgcgcgtttcgtattgagtttttatacgcgtcgcgtttcggtcgtatttcgcgtagttagagtaagtattggagtttcgttttttttcgtattttattcgttttcggtttcgtttggtttatttttggatcgttttcgtttcgtttcgtttttattcgttttttcggcgtagtcggcgtttatttcgttttagtttcgcgatcgaagtagggcgcgtagtagcgttgagtgtttcggaacgtgcgtcgcgtttttagtgttcgtcgcgttcgtcgcgtttcgggcggggatggggcggttagattgagcgtcgtattcgttatttagattcgtcggttttagtcgtagtttttttagtcgtggttttagcgcgtacgggcgatggcgaaggcgacgttcggtgtcgcggggttgcgtttgttgttgttgttgttgttgtcgttgttaggtaaaggtgagttttgtcggtcgtcggttttcgtaggggttagggcgaagttggcgtcgagtagcggagcgggcgcgtttagaagcgtttttttgtttgtcgtgggtagcgggttgtgcggtcgtcggttattcggtttcggttgggagcgtagtggttgcggcgggcggcgggcgaagggtaggacgtttcgggtcgggcgtttcgggtcggggttgggcgggtttcgggcgggagcggagcgcgggtcgggtcgcgggggtcggtgtttagaattttagttatagtcgtaggttttaatttggtcgcgttttgcgttaaagtcgcgttttggagtaaacgggatagtcgtttcggggtcgatttggcggacgggttagggagtttcgaaagttcgcgattcgtgcggagagttttgtttcggtaggagacggtttcgttttggtttttttttttcgtttagcgttcgtgcgttttttttttagttttgtcgttttggttagtcgagggattcggaggtttttttgaaaagattgtttttttttcgtgcgtttttgtcgttttgtttttaaatatttaaaaatcgtggtttttggggtggtttttttcgaggggtcgtcgtgataggcgttttattcggtagttttggagtcgtgtggcgttgtttggtagagatgttgaagatgcggttataggaggtttagggtt

SEQ ID NO: 26502 - DNA, 1495 bp, Artificial Sequence
  chemically treated genomic DNA (Homo sapiens) CpG-island No: 26502
aaccctaaacctcctataaccgcatcttcaacatctctaccaaacaacgccacacgactccaaaactaccgaataaaacgcctatcacgacgacccctcgaaaaaaaccaccccaaaaaccacgatttttaaatatttaaaaacaaaacgacaaaaacgcacgaaaaaaaaacaatcttttcaaaaaaacctccgaatccctcgactaaccaaaacgacaaaactaaaaaaaaaacgcacgaacgctaaacgaaaaaaaaaaaccaaaacgaaaccgtctcctaccgaaacaaaactctccgcacgaatcgcgaactttcgaaactccctaacccgtccgccaaatcgaccccgaaacgactatcccgtttactccaaaacgcgactttaacgcaaaacgcgaccaaattaaaacctacgactataactaaaattctaaacaccgacccccgcgacccgacccgcgctccgctcccgcccgaaacccgcccaaccccgacccgaaacgcccgacccgaaacgtcctacccttcgcccgccgcccgccgcaaccactacgctcccaaccgaaaccgaataaccgacgaccgcacaacccgctacccacgacaaacaaaaaaacgcttctaaacgcgcccgctccgctactcgacgccaacttcgccctaacccctacgaaaaccgacgaccgacaaaactcacctttacctaacaacgacaacaacaacaacaacaacaaacgcaaccccgcgacaccgaacgtcgccttcgccatcgcccgtacgcgctaaaaccacgactaaaaaaactacgactaaaaccgacgaatctaaataacgaatacgacgctcaatctaaccgccccatccccgcccgaaacgcgacgaacgcgacgaacactaaaaacgcgacgcacgttccgaaacactcaacgctactacgcgccctacttcgatcgcgaaactaaaacgaaataaacgccgactacgccgaaaaaacgaataaaaacgaaacgaaacgaaaacgatccaaaaataaaccaaacgaaaccgaaaacgaataaaatacgaaaaaaaacgaaactccaatacttactctaactacgcgaaatacgaccgaaacgcgacgcgtataaaaactcaatacgaaacgcgcgacttaaaccgaataaaacttaaaaaaaaacgaaatacgaaaacgaaatacgaccgaaaaaaacccgacaaaaaccgaatacgaaccccgaaatacgcgacgaaaataaaacccaaaaacccgaatccgcgcacctacgcaaaacctctcttcctacccgatacgcgcccgcttacaatccctaccttttaccctttccgctacacaaaaaaaacaaaaatactacgcgaaatacaaatctaaccgactaactcgaaatacgaccccgcgaactcaaaaaaaaacgccccgcctccaaactctccgcgaaacgcttactacgccatttctcaaaaacgaa

SEQ ID NO: 26503 - DNA, 1495 bp, Artificial Sequence
  chemically treated genomic DNA (Homo sapiens) CpG-island No: 26503
agttttgggttttttatggtcgtatttttagtatttttgttaggtagcgttatacgattttagggttgtcgggtgggacgtttattacggcggtttttcggggggagttattttagaaattacggtttttaggtgtttaaagatagggcggtaaaaacgtacgagggaaaagtaatttttttaaaagagttttcgaatttttcggttggttaggacggtagagttgggggaggaacgtacggacgttgagcgggaaaaggaaattaggacggagtcgttttttgtcgaaatagaatttttcgtacgaatcgcgggttttcggggttttttgattcgttcgttaggtcggtttcgaaacggttgtttcgtttgttttaggacgcggttttggcgtagggcgcggttagattgagatttgcggttatggttagggttttgagtatcgattttcgcggttcggttcgcgtttcgttttcgttcgagattcgtttagtttcggttcgaggcgttcggttcgaggcgttttgtttttcgttcgtcgttcgtcgtagttattgcgtttttagtcgaggtcgggtggtcggcgatcgtatagttcgttgtttacggtaaatagaaaggcgtttttgaacgcgttcgtttcgttgttcggcgttaatttcgttttggtttttgcgggagtcggcggtcggtagaatttatttttgtttagtagcggtagtagtagtagtaatagtagacgtagtttcgcggtatcggacgtcgttttcgttatcgttcgtgcgcgttggggttacggttggagggattgcggttagggtcggcgggtttggatggcgggtacggcgtttagtttggtcgttttattttcgttcggggcgcggcggacgcgacggatattgggggcgcgacgtacgtttcggggtatttagcgttgttgcgcgttttgtttcggtcgcgggattgaagcgaggtaagcgtcggttgcgtcggaggagcgggtaggggcggggcggggcgggggcggtttaggggtgggttaggcggggtcggaggcgggtggggtgcgggaaggggcggggttttagtgtttgttttggttgcgcggggtgcggtcggggcgcggcgcgtgtaggagtttagtgcgggacgcgcggtttgggtcgggtggggtttggggaggagcggggtgcgggagcggggtgcggtcgaaaagggttcggtaggagtcgggtgcggatttcgaggtgcgcggcggggatggaatttaggagttcgggttcgcgtatttacgtagagtttttttttttattcggtgcgcgttcgtttgtagtttttgttttttgtttttttcgttgtatagagagggtagggatgttacgcgggatgtaggtttggtcgattggttcggggtgcgatttcgcggatttagagaagggcgtttcgtttttaggtttttcgcggagcgtttgttgcgttattttttagaggcgag

SEQ ID NO: 26504 - DNA, 1495 bp, Artificial Sequence
  chemically treated genomic DNA (Homo sapiens) CpG-island No: 26504
ctcgcctctaaaaaataacgcaacaaacgctccgcgaaaaacctaaaaacgaaacgcccttctctaaatccgcgaaatcgcaccccgaaccaatcgaccaaacctacatcccgcgtaacatccctaccctctctatacaacgaaaaaaacaaaaaacaaaaactacaaacgaacgcgcaccgaataaaaaaaaaaactctacgtaaatacgcgaacccgaactcctaaattccatccccgccgcgcacctcgaaatccgcacccgactcctaccgaacccttttcgaccgcaccccgctcccgcaccccgctcctccccaaaccccacccgacccaaaccgcgcgtcccgcactaaactcctacacgcgccgcgccccgaccgcaccccgcgcaaccaaaacaaacactaaaaccccgccccttcccgcaccccacccgcctccgaccccgcctaacccacccctaaaccgcccccgccccgccccgcccctacccgctcctccgacgcaaccgacgcttacctcgcttcaatcccgcgaccgaaacaaaacgcgcaacaacgctaaataccccgaaacgtacgtcgcgcccccaatatccgtcgcgtccgccgcgccccgaacgaaaataaaacgaccaaactaaacgccgtacccgccatccaaacccgccgaccctaaccgcaatccctccaaccgtaaccccaacgcgcacgaacgataacgaaaacgacgtccgataccgcgaaactacgtctactattactactactactaccgctactaaacaaaaataaattctaccgaccgccgactcccgcaaaaaccaaaacgaaattaacgccgaacaacgaaacgaacgcgttcaaaaacgcctttctatttaccgtaaacaacgaactatacgatcgccgaccacccgacctcgactaaaaacgcaataactacgacgaacgacgaacgaaaaacaaaacgcctcgaaccgaacgcctcgaaccgaaactaaacgaatctcgaacgaaaacgaaacgcgaaccgaaccgcgaaaatcgatactcaaaaccctaaccataaccgcaaatctcaatctaaccgcgccctacgccaaaaccgcgtcctaaaacaaacgaaacaaccgtttcgaaaccgacctaacgaacgaatcaaaaaaccccgaaaacccgcgattcgtacgaaaaattctatttcgacaaaaaacgactccgtcctaatttccttttcccgctcaacgtccgtacgttcctcccccaactctaccgtcctaaccaaccgaaaaattcgaaaactcttttaaaaaaattacttttccctcgtacgtttttaccgccctatctttaaacacctaaaaaccgtaatttctaaaataactccccccgaaaaaccgccgtaataaacgtcccacccgacaaccctaaaatcgtataacgctacctaacaaaaatactaaaaatacgaccataaaaaacccaaaact

SEQ ID NO: 26505 - DNA, 743 bp, Artificial Sequence
  chemically treated genomic DNA (Homo sapiens) CpG-island No: 26505
aatttttttagggaaatgtagtgatgcgtttacggttgtcggcggtttagcgttaaggggcgttttatagtttcgcggttcgaagttttcgattcggttgttacgtaggtttcgcggtttcgttcggatttttaggatcggttttcgagcgggatagcgttgtagtttacgagttcgggtaggggcgtttttaggtcggagcggttttttgtttcgggtattttgttgtttttataaacggtttttggaggtatatatacggatattttaaatacgtcggtgatgaatcggtatttagttgttagtggcggagttttttgggcggggtcgcgggcgcgcggcggttttattttttcgcgcgcgtcggaagtggttttttaggcgcggcggcgcgttcgggggtgggtggttgaggcggcggcgggtttaaggcgtgaggcgtcgttcgggtgttttcgcggcgtaggaggcggtggagcgtagagcgggcgagcgcggtgagtatttggttcggtttcgttcgtcggttcgcgattttcgtcggtttcggttcgggcggtgcgggcgtcggggttgcgggtttttgtgtggtcgggtggggtcgtttagcggatcggttttgcggggggttttgttttttagggatgagtttgtcggagtcggtatcggttttagggaaagcgcggttagagacgattggttcgtttgttagtgttgggttttgttttgtttcgttttgtttt

SEQ ID NO: 26506 - DNA, 743 bp, Artificial Sequence
  chemically treated genomic DNA (Homo sapiens) CpG-island No: 26506
aaaacaaaacgaaacaaaacaaaacccaacactaacaaacgaaccaatcgtctctaaccgcgctttccctaaaaccgataccgactccgacaaactcatccctaaaaaacaaaaccccccgcaaaaccgatccgctaaacgaccccacccgaccacacaaaaacccgcaaccccgacgcccgcaccgcccgaaccgaaaccgacgaaaatcgcgaaccgacgaacgaaaccgaaccaaatactcaccgcgctcgcccgctctacgctccaccgcctcctacgccgcgaaaacacccgaacgacgcctcacgccttaaacccgccgccgcctcaaccacccacccccgaacgcgccgccgcgcctaaaaaaccacttccgacgcgcgcgaaaaaataaaaccgccgcgcgcccgcgaccccgcccaaaaaactccgccactaacaactaaataccgattcatcaccgacgtatttaaaatatccgtatatatacctccaaaaaccgtttataaaaacaacaaaatacccgaaacaaaaaaccgctccgacctaaaaacgcccctacccgaactcgtaaactacaacgctatcccgctcgaaaaccgatcctaaaaatccgaacgaaaccgcgaaacctacgtaacaaccgaatcgaaaacttcgaaccgcgaaactataaaacgccccttaacgctaaaccgccgacaaccgtaaacgcatcactacatttccctaaaaaaatt

SEQ ID NO: 26507 - DNA, 743 bp, Artificial Sequence
  chemically treated genomic DNA (Homo sapiens) CpG-island No: 26507
aaaataaaacgaaataaaataaaatttaatattgataagcgaattaatcgtttttggtcgcgttttttttaaaatcggtgtcgatttcggtaggtttatttttgagagatagggtttttcgtaggatcggttcgttaggcgattttattcgattatataggagttcgtagtttcggcgttcgtatcgttcgggtcggagtcggcgggagtcgcggatcggcgggcgaggtcgggttaggtatttatcgcgttcgttcgttttgcgttttatcgttttttgcgtcgcggggatattcgggcggcgttttacgttttgggttcgtcgtcgttttagttatttattttcgggcgcgtcgtcgcgtttgagaggttattttcggcgcgcgcgaggaaatgaagtcgtcgcgcgttcgcggtttcgtttaggaagtttcgttattggtagttgggtatcgatttattatcgacgtgtttaaagtattcgtgtgtgtgtttttaaaaatcgtttgtggagatagtagagtgttcgaggtaggaaatcgtttcggtttggaggcgtttttgttcggattcgtggattgtagcgttgtttcgttcggaagtcgattttgggagttcgagcggggtcgcggggtttgcgtggtagtcgagtcgagggtttcgggtcgcggggttgtggagcgttttttggcgttgggtcgtcggtagtcgtgagcgtattattgtatttttttggaggaatt

SEQ ID NO: 26508 - DNA, 743 bp, Artificial Sequence
  chemically treated genomic DNA (Homo sapiens) CpG-island No: 26508
aattcctccaaaaaaatacaataatacgctcacgactaccgacgacccaacgccaaaaaacgctccacaaccccgcgacccgaaaccctcgactcgactaccacgcaaaccccgcgaccccgctcgaactcccaaaatcgacttccgaacgaaacaacgctacaatccacgaatccgaacaaaaacgcctccaaaccgaaacgatttcctacctcgaacactctactatctccacaaacgatttttaaaaacacacacacgaatactttaaacacgtcgataataaatcgatacccaactaccaataacgaaacttcctaaacgaaaccgcgaacgcgcgacgacttcatttcctcgcgcgcgccgaaaataacctctcaaacgcgacgacgcgcccgaaaataaataactaaaacgacgacgaacccaaaacgtaaaacgccgcccgaatatccccgcgacgcaaaaaacgataaaacgcaaaacgaacgaacgcgataaatacctaacccgacctcgcccgccgatccgcgactcccgccgactccgacccgaacgatacgaacgccgaaactacgaactcctatataatcgaataaaatcgcctaacgaaccgatcctacgaaaaaccctatctctcaaaaataaacctaccgaaatcgacaccgattttaaaaaaaacgcgaccaaaaacgattaattcgcttatcaatattaaattttattttatttcgttttatttt

SEQ ID NO: 26509 - DNA, 666 bp, Artificial Sequence
  chemically treated genomic DNA (Homo sapiens) CpG-island No: 26509
cggttttcggtttttttttgcgggttaacggtagcgttacgcgcgcgagcgcggtttgtaaagtttttagcgttgggcgttacgcggggattgttgtcgtcgttgttagtcgtagtagcgacgcgaattcggggcgttcggttcgggcgcgcgggggcggggacgcgtacgcggcgagggcggcgggtgcgacgggggcggggacgggggcggggacgggggcgaagggggcggggacgggggcgtttcggtttaagcgggattaggagggcgcgttattcgttttcgttgttcgtcggggaatttttcgggttggcgcgtagggaagttttcgaacgcgcgggtataaaagggtagtcggcgttcgcgcgttatagttttgtagttcgtggtagcggcgtagcgttttagttatgtcgcgcggtttttagtttttgtttttgagttgcggtagggttcgcgagcgtttgtttcgtttgtcgtttttcgtttttttacgatattttttttcgtcggtcgtttgtttacgacgcgtttttttttttttgtagtttatagtttggttttcgcgacgtcggaggtgaaggtggtttgtttcgaagatgtggatttgttttgtatcgttttttgggattcgtaggttttttatacggttttttgggttaa

SEQ ID NO: 26510 - DNA, 666 bp, Artificial Sequence
  chemically treated genomic DNA (Homo sapiens) CpG-island No: 26510
ttaacccaaaaaaccgtataaaaaacctacgaatcccaaaaaacgatacaaaacaaatccacatcttcgaaacaaaccaccttcacctccgacgtcgcgaaaaccaaactataaactacaaaaaaaaaaaaacgcgtcgtaaacaaacgaccgacgaaaaaaaatatcgtaaaaaaacgaaaaacgacaaacgaaacaaacgctcgcgaaccctaccgcaactcaaaaacaaaaactaaaaaccgcgcgacataactaaaacgctacgccgctaccacgaactacaaaactataacgcgcgaacgccgactacccttttatacccgcgcgttcgaaaacttccctacgcgccaacccgaaaaattccccgacgaacaacgaaaacgaataacgcgccctcctaatcccgcttaaaccgaaacgcccccgtccccgcccccttcgcccccgtccccgcccccgtccccgcccccgtcgcacccgccgccctcgccgcgtacgcgtccccgcccccgcgcgcccgaaccgaacgccccgaattcgcgtcgctactacgactaacaacgacgacaacaatccccgcgtaacgcccaacgctaaaaactttacaaaccgcgctcgcgcgcgtaacgctaccgttaacccgcaaaaaaaaaccgaaaaccg

SEQ ID NO: 26511 - DNA, 666 bp, Artificial Sequence
  chemically treated genomic DNA (Homo sapiens) CpG-island No: 26511
ttgatttaggagatcgtgtagggaatttgcggattttagggggcggtgtagggtaagtttatattttcggagtaagttatttttattttcggcgtcgcgggagttaggttgtaggttataagaaagagagagcgcgtcgtgagtaagcgatcgacgggagggggtgtcgtggaggggcggggggcgataggcgagataggcgttcgcgagttttatcgtagtttaggagtagaagttggaggtcgcgcgatatggttggagcgttgcgtcgttgttacgagttgtagagttgtggcgcgcgggcgtcggttgtttttttatgttcgcgcgttcgggaatttttttgcgcgttagttcgggggatttttcggcgggtagcggaagcgggtggcgcgtttttttagtttcgtttaggtcggggcgttttcgttttcgtttttttcgttttcgttttcgttttcgttttcgttttcgtcgtattcgtcgttttcgtcgcgtgcgcgttttcgttttcgcgcgttcgggtcgggcgtttcgagttcgcgtcgttgttgcggttggtagcggcgatagtaattttcgcgtgacgtttagcgttgggggttttgtagatcgcgttcgcgcgcgtgacgttgtcgttgattcgtaaaaggaagtcgggaatcg

SEQ ID NO: 26512 - DNA, 666 bp, Artificial Sequence
  chemically treated genomic DNA (Homo sapiens) CpG-island No: 26512
cgattcccgacttccttttacgaatcaacgacaacgtcacgcgcgcgaacgcgatctacaaaacccccaacgctaaacgtcacgcgaaaattactatcgccgctaccaaccgcaacaacgacgcgaactcgaaacgcccgacccgaacgcgcgaaaacgaaaacgcgcacgcgacgaaaacgacgaatacgacgaaaacgaaaacgaaaacgaaaacgaaaacgaaaaaaacgaaaacgaaaacgccccgacctaaacgaaactaaaaaaacgcgccacccgcttccgctacccgccgaaaaatcccccgaactaacgcgcaaaaaaattcccgaacgcgcgaacataaaaaaacaaccgacgcccgcgcgccacaactctacaactcgtaacaacgacgcaacgctccaaccatatcgcgcgacctccaacttctactcctaaactacgataaaactcgcgaacgcctatctcgcctatcgccccccgcccctccacgacaccccctcccgtcgatcgcttactcacgacgcgctctctctttcttataacctacaacctaactcccgcgacgccgaaaataaaaataacttactccgaaaatataaacttaccctacaccgccccctaaaatccgcaaattccctacacgatctcctaaatcaa

SEQ ID NO: 26513 - DNA, 817 bp, Artificial Sequence
  chemically treated genomic DNA (Homo sapiens) CpG-island No: 26513
cgtttttatagcgtcgtttttatgggttttcgtttttttttcgagtcgattttattcgttttcgttttttttaagatgttttttttaggcgtttttcggggtttcgagtattcgtttttttttatagagataggaagtttcgcgcggttcgattcgttttttttagggcgcggagttcggcgcggcggttttgacggggcgcgggttcggtcgcggattagcgttttcgcgtttcgttcgcggcgttttaatcgtcgcggcgatttttgatttcggcggttatttattttttaattcgtcgtatatttcgtttaggttgttacggcgtttttagatttagtttcggtcgggttttcgttatcgtttttgtttcggtagtattgtttagttttgtttagatttttgcggtcgtttttgtcgttagtcgcgatcgtatcgttttcgtcgttttcgttgggttttgtttattggttatcggatatcgagtttcgttttatagttttttcggcgttttcgattgggttagatgagtagagaggcggtttatttcgcgtgaggacgagggaaagttttaggacgcgtattggtgattttttttgttaattaaacggggagtgtttatttaatgggttgcgagggtggcgtagattatttttttaaagtcgttcgttggtggtggtttttgagacgcgtttttcggggttggagttttgcggtttcgtcggtatttaggggtaagagggcgcggtagggtagtatcgtatttgatcggaagtttagggaaggtaattttatagttttttagaaagtttttttt

SEQ ID NO: 26514 - DNA, 817 bp, Artificial Sequence
  chemically treated genomic DNA (Homo sapiens) CpG-island No: 26514
aaaaaaaactttctaaaaaactataaaattaccttccctaaacttccgatcaaatacgatactaccctaccgcgccctcttacccctaaataccgacgaaaccgcaaaactccaaccccgaaaaacgcgtctcaaaaaccaccaccaacgaacgactttaaaaaaataatctacgccaccctcgcaacccattaaataaacactccccgtttaattaacaaaaaaaatcaccaatacgcgtcctaaaactttccctcgtcctcacgcgaaataaaccgcctctctactcatctaacccaatcgaaaacgccgaaaaaactataaaacgaaactcgatatccgataaccaataaacaaaacccaacgaaaacgacgaaaacgatacgatcgcgactaacgacaaaaacgaccgcaaaaatctaaacaaaactaaacaatactaccgaaacaaaaacgataacgaaaacccgaccgaaactaaatctaaaaacgccgtaacaacctaaacgaaatatacgacgaattaaaaaataaataaccgccgaaatcaaaaatcgccgcgacgattaaaacgccgcgaacgaaacgcgaaaacgctaatccgcgaccgaacccgcgccccgtcaaaaccgccgcgccgaactccgcgccctaaaaaaaacgaatcgaaccgcgcgaaacttcctatctctataaaaaaaaacgaatactcgaaaccccgaaaaacgcctaaaaaaaacatcttaaaaaaaacgaaaacgaataaaatcgactcgaaaaaaaaacgaaaacccataaaaacgacgctataaaaacg

SEQ ID NO: 26515 - DNA, 817 bp, Artificial Sequence
  chemically treated genomic DNA (Homo sapiens) CpG-island No: 26515
agaggaaattttttgaaagattgtaggattattttttttgaattttcggttaggtgcggtgttgttttgtcgcgtttttttatttttggatgtcgacgaaatcgtaaaattttagtttcgggaagcgcgttttaaggattattattagcgagcggttttgggagagtaatttgcgttattttcgtagtttattaaataggtatttttcgtttgattgataggagaagttattaatgcgcgttttggggttttttttcgtttttacgcggggtgagtcgtttttttatttatttggtttaatcgggggcgtcggggaggttgtggggcggggttcggtgttcggtagttaatggatagagtttagcgggagcggcgggggcggtgcggtcgcggttggcggtagaagcggtcgtaggggtttgggtagggttgggtagtgttgtcggagtaaaagcggtagcgggagttcggtcggagttgggtttggagacgtcgtggtagtttgaacggagtgtgcgacggattgggaggtgagtggtcgtcgaggttaggggtcgtcgcgacggttggggcgtcgcgggcgggacgcgggggcgttggttcgcggtcgggttcgcgtttcgttagggtcgtcgcgtcgagtttcgcgttttgagggaagcgggtcgggtcgcgcggaattttttgtttttgtgggagggggcgagtgttcggggtttcggggggcgtttggagaagatattttggggaggacgagggcgagtggggtcggttcggggaaggggcgggggtttatgggggcggcgttgtgggagcg

SEQ ID NO: 26516 - DNA, 817 bp, Artificial Sequence
  chemically treated genomic DNA (Homo sapiens) CpG-island No: 26516
cgctcccacaacgccgcccccataaacccccgccccttccccgaaccgaccccactcgccctcgtcctccccaaaatatcttctccaaacgccccccgaaaccccgaacactcgccccctcccacaaaaacaaaaaattccgcgcgacccgacccgcttccctcaaaacgcgaaactcgacgcgacgaccctaacgaaacgcgaacccgaccgcgaaccaacgcccccgcgtcccgcccgcgacgccccaaccgtcgcgacgacccctaacctcgacgaccactcacctcccaatccgtcgcacactccgttcaaactaccacgacgtctccaaacccaactccgaccgaactcccgctaccgcttttactccgacaacactacccaaccctacccaaacccctacgaccgcttctaccgccaaccgcgaccgcaccgcccccgccgctcccgctaaactctatccattaactaccgaacaccgaaccccgccccacaacctccccgacgcccccgattaaaccaaataaataaaaaaacgactcaccccgcgtaaaaacgaaaaaaaaccccaaaacgcgcattaataacttctcctatcaatcaaacgaaaaatacctatttaataaactacgaaaataacgcaaattactctcccaaaaccgctcgctaataataatccttaaaacgcgcttcccgaaactaaaattttacgatttcgtcgacatccaaaaataaaaaaacgcgacaaaacaacaccgcacctaaccgaaaattcaaaaaaaataatcctacaatctttcaaaaaatttcctct

SEQ ID NO: 26517 - DNA, 1413 bp, Artificial Sequence
  chemically treated genomic DNA (Homo sapiens) CpG-island No: 26517
agtgtttcgatttcggtttagcgtcgttcggtaaaatttcggaagttcgagggtgtgagtaggaagtttttgcgaagcggcgcgggaggaggggtgttggaggcggagggtaggtttttttatcgttcgtattttattcgcggtgtttttgtttttgtttcgggattttttttttcgttattcgtagggttgtatttgagcgattcgggttaggggggcgtaaaattttattcgtttattttcgtattaacgtttttacgtaaggcgttttaaaatttaggtggagcggggtaatttcgttaaaagttatttttgtagggcgtatttaaaacggaacgtcgaggtttcggagtcgagcgcgtagttagattgaatcgggtgttcgggtgtcgtcgcggcgtttcgggtattttttatttttattgttttcgaggttttggttttcgtagtttagacgttcggagttttagggtcggcgttttttcgtttcgggtttcgtatttattttgaaggcgacgggtagcgttttgttgtagcgttagtgcgagggtagtacggagtagaggaagttggggttgtcggtgcgtacgagttcgtttgcgtggttcgttagtacgtttattatcgagcgtatttcgggtcgggcgcgtttttcgggttttacggtcgtttgcgcgtttagcgcgtcgttgttttcgtttattttgtcgtcgtcgtcgtcgtaggggaaggtcggggagggaggtgtgaagcggcggttggtgtttgggtttacgggaatacgtataatagcggtcgttagggcgtcgggtaggcggagacggcgcggtttttttcgggggcggtcggcgcgggcgttttttcggtcgtcgttgtcgcgagaagcgggaaagtagaagcggcggggttcgggttttagggcgtagggggcggcgttcggttattattcgttagggttcgttcgttgcgaggtttcgttggttcgacggtcgttcgtagtttgttcggttagtttcgtattttcggcgcgcggtttcgcgtgcggtcgtttttcgtggttgtttcggttgtttgggtcgcggcggggttcgcgcggggttgtgtcgttgtcgtcgtttttcgtttcgaagttcgttcgcggtcgtttcgatttcgcggtcgtagttttagaataaattttttagaattaagtggcggggtcgcggtcgttcgcgcggggttagtattttcggggttcgcggggcggggttggcggagcgacgcgtcgtatagttaatcggcggagtttttatcgcgggtatttcggtggcgttcgcggggaggaacggggtttgtcggaggtcgtttaacggggaggggcggaaggcgttatttcgcggaggaggttttagtgttatagtttagggttttcga

SEQ ID NO: 26518 - DNA, 1413 bp, Artificial Sequence
  chemically treated genomic DNA (Homo sapiens) CpG-island No: 26518
tcgaaaaccctaaactataacactaaaacctcctccgcgaaataacgccttccgcccctccccgttaaacgacctccgacaaaccccgttcctccccgcgaacgccaccgaaatacccgcgataaaaactccgccgattaactatacgacgcgtcgctccgccaaccccgccccgcgaaccccgaaaatactaaccccgcgcgaacgaccgcgaccccgccacttaattctaaaaaatttattctaaaactacgaccgcgaaatcgaaacgaccgcgaacgaacttcgaaacgaaaaacgacgacaacgacacaaccccgcgcgaaccccgccgcgacccaaacaaccgaaacaaccacgaaaaacgaccgcacgcgaaaccgcgcgccgaaaatacgaaactaaccgaacaaactacgaacgaccgtcgaaccaacgaaacctcgcaacgaacgaaccctaacgaataataaccgaacgccgccccctacgccctaaaacccgaaccccgccgcttctactttcccgcttctcgcgacaacgacgaccgaaaaaacgcccgcgccgaccgcccccgaaaaaaaccgcgccgtctccgcctacccgacgccctaacgaccgctattatacgtattcccgtaaacccaaacaccaaccgccgcttcacacctccctccccgaccttcccctacgacgacgacgacgacaaaataaacgaaaacaacgacgcgctaaacgcgcaaacgaccgtaaaacccgaaaaacgcgcccgacccgaaatacgctcgataataaacgtactaacgaaccacgcaaacgaactcgtacgcaccgacaaccccaacttcctctactccgtactaccctcgcactaacgctacaacaaaacgctacccgtcgccttcaaaataaatacgaaacccgaaacgaaaaaacgccgaccctaaaactccgaacgtctaaactacgaaaaccaaaacctcgaaaacaataaaaataaaaaatacccgaaacgccgcgacgacacccgaacacccgattcaatctaactacgcgctcgactccgaaacctcgacgttccgttttaaatacgccctacaaaaataacttttaacgaaattaccccgctccacctaaattttaaaacgccttacgtaaaaacgttaatacgaaaataaacgaataaaattttacgcccccctaacccgaatcgctcaaatacaaccctacgaataacgaaaaaaaaaatcccgaaacaaaaacaaaaacaccgcgaataaaatacgaacgataaaaaaacctaccctccgcctccaacacccctcctcccgcgccgcttcgcaaaaacttcctactcacaccctcgaacttccgaaattttaccgaacgacgctaaaccgaaatcgaaacact

SEQ ID NO: 26519 - DNA, 1413 bp, Artificial Sequence
  chemically treated genomic DNA (Homo sapiens) CpG-island No: 26519
tcgggggttttgggttgtggtattggggtttttttcgcggggtggcgtttttcgttttttttcgttgggcggttttcggtaggtttcgttttttttcgcgaacgttatcgaggtgttcgcgatgggggtttcgtcgattggttgtgcgacgcgtcgtttcgttagtttcgtttcgcgggtttcgggggtattaatttcgcgcgggcggtcgcggtttcgttatttgattttggaggatttgttttggggttgcggtcgcggagtcggggcggtcgcgggcgagtttcggggcgggaggcggcggtagcggtatagtttcgcgcgggtttcgtcgcggtttaggtagtcgggatagttacgaggggcggtcgtacgcggggtcgcgcgtcgaggatgcgggattagtcgggtaggttgcgggcggtcgtcgggttagcgaggtttcgtagcgggcgggttttggcgagtagtggtcgggcgtcgttttttgcgttttgaggttcgggtttcgtcgtttttgttttttcgtttttcgcggtagcggcggtcgaggaggcgttcgcgtcggtcgttttcgggggaagtcgcgtcgttttcgtttgttcggcgttttgacggtcgttgttatgcgtattttcgtagatttaagtattagtcgtcgttttatattttttttttcggtttttttttgcggcggcggcggcggtaagatgggcgagaatagcggcgcgttgagcgcgtaggcggtcgtggggttcggagggcgcgttcggttcgaggtgcgttcgatggtggacgtgttggcggattacgtaggcgagttcgtgcgtatcgatagttttaattttttttgtttcgtgttgttttcgtattggcgttgtaataagacgttgttcgtcgtttttaaggtgagtgcgggattcggggcgggagggcgtcggttttggggtttcgggcgtttgagttgcgggagttagagtttcgggagtagtggggatgggaggtgttcgagacgtcgcggcgatattcgggtattcggtttagtttggttgcgcgttcggtttcgggatttcggcgtttcgttttggatgcgttttgtaggaatgatttttaacggggttgtttcgttttatttgggttttggggcgttttgcgtagagacgttggtgcggaaatgggcggatggggttttgcgtttttttaattcggatcgtttagatatagttttgcgggtaacggagaagaggatttcgggataggggtaaggatatcgcgggtggggtgcgaacggtgaaagggtttatttttcgtttttagtattttttttttcgcgtcgtttcgtaaaagttttttgtttatattttcgggttttcgaaattttatcggacggcgttaggtcgggatcggggtatt

SEQ ID NO: 26520 - DNA, 1413 bp, Artificial Sequence
  chemically treated genomic DNA (Homo sapiens) CpG-island No: 26520
aataccccgatcccgacctaacgccgtccgataaaatttcgaaaacccgaaaatataaacaaaaaacttttacgaaacgacgcgaaaaaaaaaatactaaaaacgaaaaataaaccctttcaccgttcgcaccccacccgcgatatccttacccctatcccgaaatcctcttctccgttacccgcaaaactatatctaaacgatccgaattaaaaaaacgcaaaaccccatccgcccatttccgcaccaacgtctctacgcaaaacgccccaaaacccaaataaaacgaaacaaccccgttaaaaatcattcctacaaaacgcatccaaaacgaaacgccgaaatcccgaaaccgaacgcgcaaccaaactaaaccgaatacccgaatatcgccgcgacgtctcgaacacctcccatccccactactcccgaaactctaactcccgcaactcaaacgcccgaaaccccaaaaccgacgccctcccgccccgaatcccgcactcaccttaaaaacgacgaacaacgtcttattacaacgccaatacgaaaacaacacgaaacaaaaaaaattaaaactatcgatacgcacgaactcgcctacgtaatccgccaacacgtccaccatcgaacgcacctcgaaccgaacgcgccctccgaaccccacgaccgcctacgcgctcaacgcgccgctattctcgcccatcttaccgccgccgccgccgcaaaaaaaaaccgaaaaaaaaaatataaaacgacgactaatacttaaatctacgaaaatacgcataacaacgaccgtcaaaacgccgaacaaacgaaaacgacgcgacttcccccgaaaacgaccgacgcgaacgcctcctcgaccgccgctaccgcgaaaaacgaaaaaacaaaaacgacgaaacccgaacctcaaaacgcaaaaaacgacgcccgaccactactcgccaaaacccgcccgctacgaaacctcgctaacccgacgaccgcccgcaacctacccgactaatcccgcatcctcgacgcgcgaccccgcgtacgaccgcccctcgtaactatcccgactacctaaaccgcgacgaaacccgcgcgaaactataccgctaccgccgcctcccgccccgaaactcgcccgcgaccgccccgactccgcgaccgcaaccccaaaacaaatcctccaaaatcaaataacgaaaccgcgaccgcccgcgcgaaattaatacccccgaaacccgcgaaacgaaactaacgaaacgacgcgtcgcacaaccaatcgacgaaacccccatcgcgaacacctcgataacgttcgcgaaaaaaaacgaaacctaccgaaaaccgcccaacgaaaaaaaacgaaaaacgccaccccgcgaaaaaaaccccaataccacaacccaaaacccccga

SEQ ID NO: 26521 - DNA, 581 bp, Artificial Sequence
  chemically treated genomic DNA (Homo sapiens) CpG-island No: 26521
tgattcggaggatcgggggaggatttttttatacgtacgattcgcgatttttttagtgttttagaattagggattttatcgtcgtttattttaattcgtagtatcgaatttgttcgtagtcgcgattttttaggttagtatggatatcgtcggaaacggaaatttatagtcgcgttgattcgtcggagggaaataagaaggtagaaaaaagagatcggtatggggacggtttttaggggagagtttgaagaaagagggttgaatagttgagtgcggacgtaggcgtcgttcgcgtagtgcgttttatcgggtttaggtttttttagatttttttttatttcgttttcggaattcgcggttttaattttcgcggtgggatttcggagtagcgtgcgtcgcgttcgtttgagttttcgtcgaaggttagggcggttttgcggtttggcgtcggttagttagtgtggtgtaaaagtcggaaggagatatatttggttttggtttttcggtagttatcgtgttaaggacggatggattatcgtttgatttggagtatatttttttttttttaaagattatagatg

SEQ ID NO: 26522 - DNA, 581 bp, Artificial Sequence
  chemically treated genomic DNA (Homo sapiens) CpG-island No: 26522
catctataatctttaaaaaaaaaaaaatatactccaaatcaaacgataatccatccgtccttaacacgataactaccgaaaaaccaaaaccaaatatatctccttccgacttttacaccacactaactaaccgacgccaaaccgcaaaaccgccctaaccttcgacgaaaactcaaacgaacgcgacgcacgctactccgaaatcccaccgcgaaaattaaaaccgcgaattccgaaaacgaaataaaaaaaaatctaaaaaaacctaaacccgataaaacgcactacgcgaacgacgcctacgtccgcactcaactattcaaccctctttcttcaaactctcccctaaaaaccgtccccataccgatctcttttttctaccttcttatttccctccgacgaatcaacgcgactataaatttccgtttccgacgatatccatactaacctaaaaaatcgcgactacgaacaaattcgatactacgaattaaaataaacgacgataaaatccctaattctaaaacactaaaaaaatcgcgaatcgtacgtataaaaaaatcctcccccgatcctccgaatca

SEQ ID NO: 26523 - DNA, 581 bp, Artificial Sequence
  chemically treated genomic DNA (Homo sapiens) CpG-island No: 26523
tatttgtaatttttaaagaggaggaagtgtattttaaattaagcgatagtttattcgtttttggtacggtgattgtcgggaggttaggattaaatgtgttttttttcggtttttgtattatattaattaatcggcgttaggtcgtagagtcgttttggttttcggcgagaatttaggcgagcgcggcgtacgttgtttcggagttttatcgcggaagttgaggtcgcggatttcgagggcggggtggagaggaatttggaaggatttggattcggtggaacgtattgcgcggacggcgtttgcgttcgtatttagttgtttagttttttttttttaggtttttttttgaaagtcgtttttatgtcggttttttttttttgtttttttgttttttttcggcgagttagcgcgattgtgaattttcgttttcggcggtgtttatgttgatttgaggagtcgcggttgcgagtaggttcggtgttgcgggttggggtaggcggcggtggggtttttggttttggggtattgggaagatcgcgagtcgtgcgtgtgggaaggttttttttcggtttttcgggtta

SEQ ID NO: 26524 - DNA, 581 bp, Artificial Sequence
  chemically treated genomic DNA (Homo sapiens) CpG-island No: 26524
taacccgaaaaaccgaaaaaaaaccttcccacacgcacgactcgcgatcttcccaataccccaaaaccaaaaaccccaccgccgcctaccccaacccgcaacaccgaacctactcgcaaccgcgactcctcaaatcaacataaacaccgccgaaaacgaaaattcacaatcgcgctaactcgccgaaaaaaaacaaaaaaacaaaaaaaaaaaaccgacataaaaacgactttcaaaaaaaaacctaaaaaaaaaaaactaaacaactaaatacgaacgcaaacgccgtccgcgcaatacgttccaccgaatccaaatccttccaaattcctctccaccccgccctcgaaatccgcgacctcaacttccgcgataaaactccgaaacaacgtacgccgcgctcgcctaaattctcgccgaaaaccaaaacgactctacgacctaacgccgattaattaatataatacaaaaaccgaaaaaaaacacatttaatcctaacctcccgacaatcaccgtaccaaaaacgaataaactatcgcttaatttaaaatacacttcctcctctttaaaaattacaaata

SEQ ID NO: 26525 - DNA, 634 bp, Artificial Sequence
  chemically treated genomic DNA (Homo sapiens) CpG-island No: 26525
gggtcgatttcgtagtagtatttttagttttgttcgggaagtagaggtcgtcgtcggttatagtcgtgggtgagaaaaagggcgcgaggcggtcggggtttttgtcgggtattttaagtacgcgtcgggtttttttatgatagttgcggttcgggttgtttggggtttgggatttcggcgcggttcggtcgcgagaaaggtaggcgttgttttagtggggaaggggtaaggttgcggtttcggttatcgggcgggggtatagaaacgatttcggcgtcgtttgagcgtttagtttcgtttttgtcgcggttaaaagatattcgagagcgtcggcggttgggggattatagggttttggaatttattaggcggtttcgcggcgtaaaagcgggcggagttagaaaaggggttcggttaggcggttacgttttattttcggagggcggcgggattcggatttcgtttttggtttaaaaattgtgtttgcggagtttaggacgttgggaggagcgttttgcgttttttcggtcgcggttttcgtattaaatcgatttttagagtcgtttttgttttttgtagtggcggaggggcgggtatcgaagttttattaagtcgtaggtttttagtttggggt

SEQ ID NO: 26526 - DNA, 634 bp, Artificial Sequence
  chemically treated genomic DNA (Homo sapiens) CpG-island No: 26526
accccaaactaaaaacctacgacttaataaaacttcgatacccgcccctccgccactacaaaaaacaaaaacgactctaaaaatcgatttaatacgaaaaccgcgaccgaaaaaacgcaaaacgctcctcccaacgtcctaaactccgcaaacacaatttttaaaccaaaaacgaaatccgaatcccgccgccctccgaaaataaaacgtaaccgcctaaccgaaccccttttctaactccgcccgcttttacgccgcgaaaccgcctaataaattccaaaaccctataatcccccaaccgccgacgctctcgaatatcttttaaccgcgacaaaaacgaaactaaacgctcaaacgacgccgaaatcgtttctatacccccgcccgataaccgaaaccgcaaccttaccccttccccactaaaacaacgcctacctttctcgcgaccgaaccgcgccgaaatcccaaaccccaaacaacccgaaccgcaactatcataaaaaaacccgacgcgtacttaaaatacccgacaaaaaccccgaccgcctcgcgccctttttctcacccacgactataaccgacgacgacctctacttcccgaacaaaactaaaaatactactacgaaatcgaccc

SEQ ID NO: 26527 - DNA, 634 bp, Artificial Sequence
  chemically treated genomic DNA (Homo sapiens) CpG-island No: 26527
gttttaggttgaggatttgcgatttggtgggatttcggtgttcgttttttcgttattatagggagtagaggcggttttggaagtcggtttagtgcggagatcgcgatcggaggagcgtagaacgttttttttagcgttttgggtttcgtaggtataatttttaaattagaggcgaaattcgagtttcgtcgtttttcggggatggagcgtggtcgtttagtcgagttttttttttggtttcgttcgtttttgcgtcgcgaggtcgtttggtgagttttagggttttgtggttttttagtcgtcggcgttttcgggtgttttttggtcgcggtaggaacggagttgggcgtttagacggcgtcggggtcgtttttgtgttttcgttcggtggtcggagtcgtagttttgttttttttttattggggtagcgtttgtttttttcgcggtcggatcgcgtcggagttttaggttttaggtagttcgggtcgtagttgttatggagaagttcggcgcgtatttggggtgttcggtaggagtttcggtcgtttcgcgtttttttttttatttacgattgtggtcggcggcggtttttgtttttcggataaagttggagatgttgttgcggagtcggttt

SEQ ID NO: 26528 - DNA, 634 bp, Artificial Sequence
  chemically treated genomic DNA (Homo sapiens) CpG-island No: 26528
aaaccgactccgcaacaacatctccaactttatccgaaaaacaaaaaccgccgccgaccacaatcgtaaataaaaaaaaaaacgcgaaacgaccgaaactcctaccgaacaccccaaatacgcgccgaacttctccataacaactacgacccgaactacctaaaacctaaaactccgacgcgatccgaccgcgaaaaaaacaaacgctaccccaataaaaaaaaaacaaaactacgactccgaccaccgaacgaaaacacaaaaacgaccccgacgccgtctaaacgcccaactccgttcctaccgcgaccaaaaaacacccgaaaacgccgacgactaaaaaaccacaaaaccctaaaactcaccaaacgacctcgcgacgcaaaaacgaacgaaaccaaaaaaaaaactcgactaaacgaccacgctccatccccgaaaaacgacgaaactcgaatttcgcctctaatttaaaaattatacctacgaaacccaaaacgctaaaaaaaacgttctacgctcctccgatcgcgatctccgcactaaaccgacttccaaaaccgcctctactccctataataacgaaaaaacgaacaccgaaatcccaccaaatcgcaaatcctcaacctaaaac

SEQ ID NO: 26529 - DNA, 750 bp, Artificial Sequence
  chemically treated genomic DNA (Homo sapiens) CpG-island No: 26529
attttcggttttcggtacgtacggtttattttggagcgcgcgttttaggttagttaagcgtcgagtcgggttgttgcgggttgggagggcgcgtagggtcggcgttgattgacggggcgcgtagttaggtgatttggggcgttaagttttcgacgcggtggtcgcggtgatcgtcgaggttcggtagacgttgattcgggaacgtagtggggttgatttttcggaataaagttgttgggtcggcggcggcggggcgagagcgtcgagggggagtcggagcgttgtagaggcgcgggtcggagggttggcgttgatttgtattttttttatttggagagcggatttttggttgttcggaggcgagttttttttcggggggtgggggcggtaacgcgcgatttagcggttttgcgttttattttttttttttcgtttttagcgttcggttttaataaaggggtaggttcgtagcggggaggaggaggaggagtcgtcgaaggagcgagtttttttcgcgtataaagttgtggagtcgttttttttcggagtagggaagcgggtagtagtagtcggtcgcgggttttttttcgtcgaggggcgaggaggagtttttggttttagaagtcgattggggaattacggggagcggcgtttttttttttttgggttatttttgtaaacggaaaattttgtagcgtttggtaaagttggtgtttgcgcgttttttttaggtttgcgttttgattgttt

SEQ ID NO: 26530 - DNA, 750 bp, Artificial Sequence
  chemically treated genomic DNA (Homo sapiens) CpG-island No: 26530
aaacaatcaaaacgcaaacctaaaaaaaacgcgcaaacaccaactttaccaaacgctacaaaattttccgtttacaaaaataacccaaaaaaaaaaaaacgccgctccccgtaattccccaatcgacttctaaaaccaaaaactcctcctcgcccctcgacgaaaaaaaacccgcgaccgactactactacccgcttccctactccgaaaaaaaacgactccacaactttatacgcgaaaaaaactcgctccttcgacgactcctcctcctcctccccgctacgaacctacccctttattaaaaccgaacgctaaaaacgaaaaaaaaaaaataaaacgcaaaaccgctaaatcgcgcgttaccgcccccaccccccgaaaaaaaactcgcctccgaacaaccaaaaatccgctctccaaataaaaaaaatacaaatcaacgccaaccctccgacccgcgcctctacaacgctccgactccccctcgacgctctcgccccgccgccgccgacccaacaactttattccgaaaaatcaaccccactacgttcccgaatcaacgtctaccgaacctcgacgatcaccgcgaccaccgcgtcgaaaacttaacgccccaaatcacctaactacgcgccccgtcaatcaacgccgaccctacgcgccctcccaacccgcaacaacccgactcgacgcttaactaacctaaaacgcgcgctccaaaataaaccgtacgtaccgaaaaccgaaaat

SEQ ID NO: 26531 - DNA, 750 bp, Artificial Sequence
  chemically treated genomic DNA (Homo sapiens) CpG-island No: 26531
aaatagttaaagcgtaaatttggaaggggcgcgtaggtattaattttgttaaacgttatagagtttttcgtttgtagaaatgatttaaaagaaggggggcgtcgtttttcgtgattttttaatcggtttttggagttagaggttttttttcgtttttcggcgggagaaagttcgcggtcggttgttgttgttcgtttttttgtttcgaggaaaaacgattttataattttgtgcgcgagagaggttcgttttttcggcggtttttttttttttttttcgttgcgggtttgtttttttgttggagtcgagcgttggaggcggaggagggagggtggggcgtaggatcgttgggtcgcgcgttgtcgtttttatttttcgggaaggggttcgttttcgggtagttaggggttcgttttttagatgagaagggtgtagattagcgttagtttttcggttcgcgtttttgtagcgtttcggttttttttcggcgttttcgtttcgtcgtcgtcggtttagtaattttgtttcggaagattagttttattacgttttcgggttagcgtttgtcgggtttcggcggttatcgcggttatcgcgtcgggaatttggcgttttaagttatttgattgcgcgtttcgttaattagcgtcggttttgcgcgtttttttagttcgtagtagttcggttcggcgtttggttggtttggggcgcgcgttttagagtgaatcgtgcgtgtcgggagtcgggagt

SEQ ID NO: 26532 - DNA, 750 bp, Artificial Sequence
  chemically treated genomic DNA (Homo sapiens) CpG-island No: 26532
actcccgactcccgacacgcacgattcactctaaaacgcgcgccccaaaccaaccaaacgccgaaccgaactactacgaactaaaaaaacgcgcaaaaccgacgctaattaacgaaacgcgcaatcaaataacttaaaacgccaaattcccgacgcgataaccgcgataaccgccgaaacccgacaaacgctaacccgaaaacgtaataaaactaatcttccgaaacaaaattactaaaccgacgacgacgaaacgaaaacgccgaaaaaaaaccgaaacgctacaaaaacgcgaaccgaaaaactaacgctaatctacacccttctcatctaaaaaacgaacccctaactacccgaaaacgaaccccttcccgaaaaataaaaacgacaacgcgcgacccaacgatcctacgccccaccctccctcctccgcctccaacgctcgactccaacaaaaaaacaaacccgcaacgaaaaaaaaaaaaaaaaaccgccgaaaaaacgaacctctctcgcgcacaaaattataaaatcgtttttcctcgaaacaaaaaaacgaacaacaacaaccgaccgcgaactttctcccgccgaaaaacgaaaaaaaacctctaactccaaaaaccgattaaaaaatcacgaaaaacgacgccccccttcttttaaatcatttctacaaacgaaaaactctataacgtttaacaaaattaatacctacgcgccccttccaaatttacgctttaactattt

SEQ ID NO: 26533 - DNA, 730 bp, Artificial Sequence
  chemically treated genomic DNA (Homo sapiens) CpG-island No: 26533
ttttcgagtcggcgtttatttgggggtcggcgtttttcggggttttttagttcggcgtttttatagtttgggtcgtcgcgttttcggtcgtttcggggtttggttggagcggttcggttatgggcggcgttgacgttttgggagtttggttagtcgcgtagaggtttcgtatttcgggtcgtttcgtttgcgtgtgcgcgtttcgtcgaggtttcgagttttcgtttcgtagattcggttttttttttcggtcgggttggagattcgagtttattcgatgcgtttgtttttggatcgcgagggggcgtcgttattaaggcggggtcggtttacgatttcggatagtttcggtcggagttgcgcgttttgttttcgttttttcgcggcgatagggagtcgtatttcgtttcggttcgtttttttttgaggtattttcgttttcgtttcgtttttgtttttgaaggaaaggtatatataggtggtttcgcgggtagtagggggtggcgttgtttttgtgtaatcggtttgggaatttttgtcgcggtttcgttcgcgttgggaatcgcgggcgttgagtcgtttcgagggtgttttagcgtatcgtaggtagagaaaggtaggaggtggcggttggcgattcgattttcgcggtttttgttcgtatttttggggtttagttagggcgaatggtcgtatttattttaagaagttgttttaggttttagatagt

SEQ ID NO: 26534 - DNA, 730 bp, Artificial Sequence
  chemically treated genomic DNA (Homo sapiens) CpG-island No: 26534
actatctaaaacctaaaacaacttcttaaaataaatacgaccattcgccctaactaaaccccaaaaatacgaacaaaaaccgcgaaaatcgaatcgccaaccgccacctcctacctttctctacctacgatacgctaaaacaccctcgaaacgactcaacgcccgcgattcccaacgcgaacgaaaccgcgacaaaaattcccaaaccgattacacaaaaacaacgccaccccctactacccgcgaaaccacctatatatacctttccttcaaaaacaaaaacgaaacgaaaacgaaaatacctcaaaaaaaaacgaaccgaaacgaaatacgactccctatcgccgcgaaaaaacgaaaacaaaacgcgcaactccgaccgaaactatccgaaatcgtaaaccgaccccgccttaataacgacgccccctcgcgatccaaaaacaaacgcatcgaataaactcgaatctccaacccgaccgaaaaaaaaaaccgaatctacgaaacgaaaactcgaaacctcgacgaaacgcgcacacgcaaacgaaacgacccgaaatacgaaacctctacgcgactaaccaaactcccaaaacgtcaacgccgcccataaccgaaccgctccaaccaaaccccgaaacgaccgaaaacgcgacgacccaaactataaaaacgccgaactaaaaaaccccgaaaaacgccgacccccaaataaacgccgactcgaaaa

SEQ ID NO: 26535 - DNA, 730 bp, Artificial Sequence
  chemically treated genomic DNA (Homo sapiens) CpG-island No: 26535
gttgtttgggatttaggataattttttgggatgagtacggttattcgttttggttgagttttaggagtgcgggtaggggtcgcgggggtcgggtcgttagtcgttattttttgtttttttttgtttgcggtgcgttgggatattttcgaggcggtttagcgttcgcggtttttagcgcgggcggggtcgcggtagaggtttttaaatcggttgtatagaaatagcgttattttttattgttcgcggggttatttgtgtgtgttttttttttaaaaataaaggcggggcgggggcggaagtgttttaaaagaaggcgggtcgaagcgaggtgcggttttttgtcgtcgcggaggggcgggggtaggacgcgtaatttcggtcggagttgttcggggtcgtgagtcggtttcgttttggtggcggcgttttttcgcggtttagaggtagacgtatcgggtgggttcgggtttttagttcggtcgggaggagggatcgggtttgcggagcggggattcggggtttcggcggggcgcgtatacgtaggcggggcggttcggggtgcggggtttttgcgcggttgattaggtttttagagcgttagcgtcgtttatggtcgagtcgttttagttagatttcggggcggtcgaggacgcggcggtttaagttgtggagacgtcgggttggaaggtttcggaggacgtcggtttttaggtaggcgtcgattcgggag

SEQ ID NO: 26536 - DNA, 730 bp, Artificial Sequence
  chemically treated genomic DNA (Homo sapiens) CpG-island No: 26536
ctcccgaatcgacgcctacctaaaaaccgacgtcctccgaaaccttccaacccgacgtctccacaacttaaaccgccgcgtcctcgaccgccccgaaatctaactaaaacgactcgaccataaacgacgctaacgctctaaaaacctaatcaaccgcgcaaaaaccccgcaccccgaaccgccccgcctacgtatacgcgccccgccgaaaccccgaatccccgctccgcaaacccgatccctcctcccgaccgaactaaaaacccgaacccacccgatacgtctacctctaaaccgcgaaaaaacgccgccaccaaaacgaaaccgactcacgaccccgaacaactccgaccgaaattacgcgtcctacccccgcccctccgcgacgacaaaaaaccgcacctcgcttcgacccgccttcttttaaaacacttccgcccccgccccgcctttatttttaaaaaaaaaacacacacaaataaccccgcgaacaataaaaaataacgctatttctatacaaccgatttaaaaacctctaccgcgaccccgcccgcgctaaaaaccgcgaacgctaaaccgcctcgaaaatatcccaacgcaccgcaaacaaaaaaaaacaaaaaataacgactaacgacccgacccccgcgacccctacccgcactcctaaaactcaaccaaaacgaataaccgtactcatcccaaaaaattatcctaaatcccaaacaac

SEQ ID NO: 26537 - DNA, 1291 bp, Artificial Sequence
  chemically treated genomic DNA (Homo sapiens) CpG-island No: 26537
tcgaagggtcgataggaaggtgaaaaggatattgttggggcgtttgagtttggagggttttgatgttcgggtgaggaggggggatcgttgtcgtcgtcgtcgtcgtcgtcgtcgtcgtcgtcgttgttgtcgtcgtcgggtgaggaggcggtatcgttgttgtcgtcgtcgtcgtcgtttcggtgtcgggttcggtttttgttgtagtcgttgtgtttgattttagagtcggtttttgcggtaaatttatggtaaagcgaagttattaatttttttagagcgggatcgggcgcgtcggggtgtaggggtcgggggtagcgggggggcgggatgggggtagattcggggaggcggcgggagcggggggttggggggagtttggggggaggaggaggagggggtcggggtcggttatatacgttcgacgtcgtcgtcgtcgtcgtcgtcgttttcgtcgtcgtcgtcgtcggtagtagtagtcgtttcgcgggttagtattatcggttgtcggttttcgtgataacgcgattttagggggggggtcggattcggcgggggtaggaggcggagagatcggattttttacggtaatatttttatgggtcggcggcgggggatttttattttttttttcggaggaagcggcgtttttttcggtagcggggtttaggcgatgtcggtggattttttttatttaacgagtagagtatttaatatggcgttgtggtcgtttttagtagttcggtaggacggttgttcggaaaatttcggattttttcggaatggttcgggaaatcgagggtgggaagttttttcggtttttttcggagattgttaggggtcgggatttttcggagacgttcgggtgcgttttcggtcgtcgttcgggagggtttaggggttaattcgttttttcggtaaagatcggcgagggaggtttcgttggtttatagcggcgcgggtgcggggcggagggaaagattaaaggcgaggtttggtttgcgagagtttttttttgcggtttagtttcgaagaataatggtaatggtttcggagtcggttgttcgttgagtttcgttcgtaggggcggagaggtagcggcgaggcgaaaaatttttggagaaggaatcgtttaatcggaatggaattcgttggatagggatttttcgcggggatttcgcgtaattaatgttattcgtcggtttgtaatttacgtattttatatttattgtgtcgatatttttttagacgttttgagaggtgaatgaggagttttatttttagaggatat

SEQ ID NO: 26538 - DNA, 1291 bp, Artificial Sequence
  chemically treated genomic DNA (Homo sapiens) CpG-island No: 26538
atatcctctaaaaataaaactcctcattcacctctcaaaacgtctaaaaaaatatcgacacaataaatataaaatacgtaaattacaaaccgacgaataacattaattacgcgaaatccccgcgaaaaatccctatccaacgaattccattccgattaaacgattccttctccaaaaatttttcgcctcgccgctacctctccgcccctacgaacgaaactcaacgaacaaccgactccgaaaccattaccattattcttcgaaactaaaccgcaaaaaaaaactctcgcaaaccaaacctcgcctttaatctttccctccgccccgcacccgcgccgctataaaccaacgaaacctccctcgccgatctttaccgaaaaaacgaattaacccctaaaccctcccgaacgacgaccgaaaacgcacccgaacgtctccgaaaaatcccgacccctaacaatctccgaaaaaaaccgaaaaaacttcccaccctcgatttcccgaaccattccgaaaaaatccgaaattttccgaacaaccgtcctaccgaactactaaaaacgaccacaacgccatattaaatactctactcgttaaataaaaaaaatccaccgacatcgcctaaaccccgctaccgaaaaaaacgccgcttcctccgaaaaaaaaaataaaaatcccccgccgccgacccataaaaatattaccgtaaaaaatccgatctctccgcctcctacccccgccgaatccgaccccccccctaaaatcgcgttatcacgaaaaccgacaaccgataatactaacccgcgaaacgactactactaccgacgacgacgacgacgaaaacgacgacgacgacgacgacgacgtcgaacgtatataaccgaccccgaccccctcctcctcctccccccaaactccccccaaccccccgctcccgccgcctccccgaatctacccccatcccgcccccccgctacccccgacccctacaccccgacgcgcccgatcccgctctaaaaaaattaataacttcgctttaccataaatttaccgcaaaaaccgactctaaaatcaaacacaacgactacaacaaaaaccgaacccgacaccgaaacgacgacgacgacgacaacaacgataccgcctcctcacccgacgacgacaacaacgacgacgacgacgacgacgacgacgacgacgacaacgatcccccctcctcacccgaacatcaaaaccctccaaactcaaacgccccaacaatatccttttcaccttcctatcgacccttcga

SEQ ID NO: 26539 - DNA, 1291 bp, Artificial Sequence
  chemically treated genomic DNA (Homo sapiens) CpG-island No: 26539
gtgttttttggaaatggggttttttatttattttttagagcgtttgaggaagtgtcgatataatgggtgtgaaatgcgtgggttataggtcggcgggtggtattggttacgcgaagttttcgcggggggtttttatttaacgggttttatttcggttaagcggttttttttttaggggtttttcgtttcgtcgttgttttttcgtttttgcgagcggggtttagcgaatagtcgatttcggggttattattattgtttttcgaggttgggtcgtaggggaggattttcgtaagttagatttcgtttttggttttttttttcgtttcgtattcgcgtcgttgtaagttagcgaagtttttttcgtcgatttttgtcgaggaagcgagttagtttttgagttttttcgaacggcggtcgaggacgtattcgagcgttttcgaagaatttcgatttttagtagttttcggaaagagtcgaagaggttttttattttcggtttttcgagttatttcgaaaaagttcgaagtttttcgagtagtcgttttgtcggattgttggaggcggttatagcgttatgttggatgttttgttcgttgagtgaagaaaatttatcggtatcgtttgagtttcgttatcgagaagggcgtcgtttttttcggggagggggataaagatttttcgtcgtcggtttatgaggatattgtcgtgaaaggttcggttttttcgttttttgttttcgtcgggttcggttttttttttggggtcgcgttgttacggagatcggtagtcggtggtgttggttcgcggggcggttgttgttgtcggcggcggcggcggcggaggcggcggcggcggcggcggcggcgtcgggcgtgtgtgatcggtttcggtttttttttttttttttttttaggttttttttagtttttcgttttcgtcgttttttcgggtttgtttttatttcgttttttcgttgttttcggtttttgtatttcggcgcgttcggtttcgttttgggggggttggtggtttcgttttgttatgagtttatcgtagaaatcggttttgaaattaggtatagcgattgtagtaggaatcggattcggtatcggagcggcggcggcggcggtagtagcggtatcgtttttttattcggcggcggtagtagcggcggcggcggcggcggcggcggcggcggcggtagcggttttttttttttattcgaatattagggttttttagatttaggcgttttaatagtattttttttatttttttgtcggtttttcgg

SEQ ID NO: 26540 - DNA, 1291 bp, Artificial Sequence
  chemically treated genomic DNA (Homo sapiens) CpG-island No: 26540
ccgaaaaaccgacaaaaaaataaaaaaaatactattaaaacgcctaaatctaaaaaaccctaatattcgaataaaaaaaaaaaaccgctaccgccgccgccgccgccgccgccgccgccgccgctactaccgccgccgaataaaaaaacgataccgctactaccgccgccgccgccgctccgataccgaatccgattcctactacaatcgctatacctaatttcaaaaccgatttctacgataaactcataacaaaacgaaaccaccaacccccccaaaacgaaaccgaacgcgccgaaatacaaaaaccgaaaacaacgaaaaaacgaaataaaaacaaacccgaaaaaacgacgaaaacgaaaaactaaaaaaaacctaaaaaaaaaaaaaaaaaaaaaccgaaaccgatcacacacgcccgacgccgccgccgccgccgccgccgcctccgccgccgccgccgccgacaacaacaaccgccccgcgaaccaacaccaccgactaccgatctccgtaacaacgcgaccccaaaaaaaaaaccgaacccgacgaaaacaaaaaacgaaaaaaccgaacctttcacgacaatatcctcataaaccgacgacgaaaaatctttatccccctccccgaaaaaaacgacgcccttctcgataacgaaactcaaacgataccgataaattttcttcactcaacgaacaaaacatccaacataacgctataaccgcctccaacaatccgacaaaacgactactcgaaaaacttcgaactttttcgaaataactcgaaaaaccgaaaataaaaaacctcttcgactctttccgaaaactactaaaaatcgaaattcttcgaaaacgctcgaatacgtcctcgaccgccgttcgaaaaaactcaaaaactaactcgcttcctcgacaaaaatcgacgaaaaaaacttcgctaacttacaacgacgcgaatacgaaacgaaaaaaaaaaccaaaaacgaaatctaacttacgaaaatcctcccctacgacccaacctcgaaaaacaataataataaccccgaaatcgactattcgctaaaccccgctcgcaaaaacgaaaaaacaacgacgaaacgaaaaacccctaaaaaaaaaaccgcttaaccgaaataaaacccgttaaataaaaaccccccgcgaaaacttcgcgtaaccaataccacccgccgacctataacccacgcatttcacacccattatatcgacacttcctcaaacgctctaaaaaataaataaaaaaccccatttccaaaaaacac

SEQ ID NO: 26541 - DNA, 1050 bp, Artificial Sequence
  chemically treated genomic DNA (Homo sapiens) CpG-island No: 26541
gttcgttcggttttatttcgttcggttttgtttagcgtatttttagatcggggcgtaagggttgtgaggtgtttgagcgaagcgtttgcgtagggtagcggcgcgcggggcggaggttttataattatttcgtcgttgtcgttcggtttttatcgtcgggagggcggttgaggcggtggtggcggcgtcggcggcggtcgggcgttggttgaggggcgttgaggcgggagttgtggcggcgttgggcgtttttggtttttcggtttttgtcggttatgggtttcgagaaggatttcgagtcgtcgcgttttatatcgttatatgcggtcgtattcgattttaagtgtcgtagcggcggtcggcgtcggcgttttattttgtatagcgttttttttgtttcggttcgcggtcgtcgcgttcgggttaagtcgtaggtcgagtcgtcgttttcggttgcgtagtcgtcgttcgtttcggtttttgtcgcggtttagggttcgtcgttcgaggcgttgttcgtcgagtcggtcgtcgaggtcgaggcggaggtcgcggcggcggcggcggagtttgggttcgacgatgaggaggcggcggagggcggtggttcgggcgcggaggaggtggagtgttcgttgtgtttggtgcggttgtcgtttgagcgggtttcgcgtttttttagttgttcgtatcgttcgtgtcgggattgttttcgttattatttgcgtttggagataagcgagagtagggtgtttattagttgtttcgagtgtagcgagcgatttaattcgtacgatattcgtttgttgttcgtcgattcgtcgtttatgtataagtacgaggagtttatgttgcgtcgttatttagtttcggatttcgattgtcgttggtgttcggtttcggattgcgggtgagcgcgggggcgtggcgcgggtggcggcgggttgtagtcgaggggcgtggttgggggtagtagggatttcgcgtgggtgttttaagtagggaaattcgtaaggcggtagtttcggcggggtggtaattattaggtaa

SEQ ID NO: 26542 - DNA, 1050 bp, Artificial Sequence
  chemically treated genomic DNA (Homo sapiens) CpG-island No: 26542
ttacctaataattaccaccccgccgaaactaccgccttacgaatttccctacttaaaacacccacgcgaaatccctactacccccaaccacgcccctcgactacaacccgccgccacccgcgccacgcccccgcgctcacccgcaatccgaaaccgaacaccaacgacaatcgaaatccgaaactaaataacgacgcaacataaactcctcgtacttatacataaacgacgaatcgacgaacaacaaacgaatatcgtacgaattaaatcgctcgctacactcgaaacaactaataaacaccctactctcgcttatctccaaacgcaaataataacgaaaacaatcccgacacgaacgatacgaacaactaaaaaaacgcgaaacccgctcaaacgacaaccgcaccaaacacaacgaacactccacctcctccgcgcccgaaccaccgccctccgccgcctcctcatcgtcgaacccaaactccgccgccgccgccgcgacctccgcctcgacctcgacgaccgactcgacgaacaacgcctcgaacgacgaaccctaaaccgcgacaaaaaccgaaacgaacgacgactacgcaaccgaaaacgacgactcgacctacgacttaacccgaacgcgacgaccgcgaaccgaaacaaaaaaaacgctatacaaaataaaacgccgacgccgaccgccgctacgacacttaaaatcgaatacgaccgcatataacgatataaaacgcgacgactcgaaatccttctcgaaacccataaccgacaaaaaccgaaaaaccaaaaacgcccaacgccgccacaactcccgcctcaacgcccctcaaccaacgcccgaccgccgccgacgccgccaccaccgcctcaaccgccctcccgacgataaaaaccgaacgacaacgacgaaataattataaaacctccgccccgcgcgccgctaccctacgcaaacgcttcgctcaaacacctcacaacccttacgccccgatctaaaaatacgctaaacaaaaccgaacgaaataaaaccgaacgaac

SEQ ID NO: 26543 - DNA, 1050 bp, Artificial Sequence
  chemically treated genomic DNA (Homo sapiens) CpG-island No: 26543
ttgtttgatggttattatttcgtcgaagttgtcgttttgcgggtttttttgtttgggatatttacgcggggtttttgttgtttttagttacgtttttcggttgtagttcgtcgttattcgcgttacgttttcgcgtttattcgtagttcggggtcgggtattagcggtagtcggggttcgaggttaggtagcggcgtagtatgaatttttcgtatttgtgtataagcggcgggtcggcgagtagtaagcggatgtcgtgcgggttgagtcgttcgttgtattcggggtagttgatgggtattttgttttcgtttatttttaggcgtaggtagtggcggaggtagtttcggtacgagcggtgcggatagttgaggaggcgcggggttcgtttaggcggtagtcgtattaggtatagcggatattttatttttttcgcgttcgggttatcgtttttcgtcgtttttttatcgtcgaatttaggtttcgtcgtcgtcgtcgcggttttcgtttcggtttcggcggtcggttcggcgggtagcgtttcgggcggcgggttttgggtcgcggtaggggtcggggcgggcggcggttgcgtagtcgggggcggcggttcggtttgcggtttggttcgggcgcggcggtcgcgggtcgaggtagagaagacgttgtgtaaggtgaggcgtcggcgtcggtcgtcgttgcggtatttagggtcgggtgcggtcgtatgtagcgatgtggagcgcggcgattcggagtttttttcggagtttatggtcggtagaggtcgaggagttaggggcgtttagcgtcgttatagttttcgttttagcgttttttagttagcgttcggtcgtcgtcgacgtcgttattatcgttttaatcgttttttcggcgatagaagtcgagcggtaacgacgaagtgattataaagttttcgtttcgcgcgtcgttgttttgcgtaggcgtttcgtttaaatattttataatttttgcgtttcggtttaggagtgcgttgggtagggtcgagcggggtggggtcgagcgagt

SEQ ID NO: 26544 - DNA, 1050 bp, Artificial Sequence
  chemically treated genomic DNA (Homo sapiens) CpG-island No: 26544
actcgctcgaccccaccccgctcgaccctacccaacgcactcctaaaccgaaacgcaaaaattataaaatatttaaacgaaacgcctacgcaaaacaacgacgcgcgaaacgaaaactttataatcacttcgtcgttaccgctcgacttctatcgccgaaaaaacgattaaaacgataataacgacgtcgacgacgaccgaacgctaactaaaaaacgctaaaacgaaaactataacgacgctaaacgcccctaactcctcgacctctaccgaccataaactccgaaaaaaactccgaatcgccgcgctccacatcgctacatacgaccgcacccgaccctaaataccgcaacgacgaccgacgccgacgcctcaccttacacaacgtcttctctacctcgacccgcgaccgccgcgcccgaaccaaaccgcaaaccgaaccgccgcccccgactacgcaaccgccgcccgccccgacccctaccgcgacccaaaacccgccgcccgaaacgctacccgccgaaccgaccgccgaaaccgaaacgaaaaccgcgacgacgacgacgaaacctaaattcgacgataaaaaaacgacgaaaaacgataacccgaacgcgaaaaaaataaaatatccgctatacctaatacgactaccgcctaaacgaaccccgcgcctcctcaactatccgcaccgctcgtaccgaaactacctccgccactacctacgcctaaaaataaacgaaaacaaaatacccatcaactaccccgaatacaacgaacgactcaacccgcacgacatccgcttactactcgccgacccgccgcttatacacaaatacgaaaaattcatactacgccgctacctaacctcgaaccccgactaccgctaatacccgaccccgaactacgaataaacgcgaaaacgtaacgcgaataacgacgaactacaaccgaaaaacgtaactaaaaacaacaaaaaccccgcgtaaatatcccaaacaaaaaaacccgcaaaacgacaacttcgacgaaataataaccatcaaacaa

SEQ ID NO: 26545 - DNA, 785 bp, Artificial Sequence
  chemically treated genomic DNA (Homo sapiens) CpG-island No: 26545
aggggattagagacggcgttttatttttgtatggtagtagcgtgtttttagtttcgcgtcgtcgggacggtttacgttttgtttcggtttttttcgatggtcgtcgtttatttgtttcggaattcgtcgagcgcgcgttgcgtttcggtgttttggcgttttagtcgggcgcgttcggtttttaggtttcggacgcgttggcggttgttttcgatttggcgggcgagggcgttttcgggttcggttagttcgtttaggcgttggaaggtatttagttgttttcggagttcggtatggcgttgttcgagggcgcgggttcgttggacgtgggcggttacgcgttcgtcgagtttttgtagcgtcgttaggttcgttgttttagtttagttttcgtcggtcgggcgttcgggttcggcggcgcgcgaagtttcgtcggcgtgttcgtattgttttttgcgggtttggaagacgtagttgcgtcggtatatggttgttttggcgcgggcgcgcgggcggcgtcgagtcggttttttaggaggttttcggcgtagttcgtagttcgttaaataaatatcggaggttttcggcgcgttgttgggacgttttagagtcgattagtagttgggcgttacgttgggttcgggcgcgggagaagaaaagagtagcggttcgttttgtgcggcggattagcggtttatatagtttcggggttggaaggttacgttgggtaatgaggtttttgtttcgtgattgtttaggtttgttgtttttgattgaatggaggg

SEQ ID NO: 26546 - DNA, 785 bp, Artificial Sequence
  chemically treated genomic DNA (Homo sapiens) CpG-island No: 26546
ccctccattcaatcaaaaacaacaaacctaaacaatcacgaaacaaaaacctcattacccaacgtaaccttccaaccccgaaactatataaaccgctaatccgccgcacaaaacgaaccgctactcttttcttctcccgcgcccgaacccaacgtaacgcccaactactaatcgactctaaaacgtcccaacaacgcgccgaaaacctccgatatttatttaacgaactacgaactacgccgaaaacctcctaaaaaaccgactcgacgccgcccgcgcgcccgcgccaaaacaaccatataccgacgcaactacgtcttccaaacccgcaaaaaacaatacgaacacgccgacgaaacttcgcgcgccgccgaacccgaacgcccgaccgacgaaaactaaactaaaacaacgaacctaacgacgctacaaaaactcgacgaacgcgtaaccgcccacgtccaacgaacccgcgccctcgaacaacgccataccgaactccgaaaacaactaaataccttccaacgcctaaacgaactaaccgaacccgaaaacgccctcgcccgccaaatcgaaaacaaccgccaacgcgtccgaaacctaaaaaccgaacgcgcccgactaaaacgccaaaacaccgaaacgcaacgcgcgctcgacgaattccgaaacaaataaacgacgaccatcgaaaaaaaccgaaacaaaacgtaaaccgtcccgacgacgcgaaactaaaaacacgctactaccatacaaaaataaaacgccgtctctaatcccct

SEQ ID NO: 26547 - DNA, 785 bp, Artificial Sequence
  chemically treated genomic DNA (Homo sapiens) CpG-island No: 26547
ttttttatttaattaaaagtaataggtttgaataattacggaataaaaattttattgtttagcgtaattttttaatttcggagttgtatgggtcgttaattcgtcgtataaagcgggtcgttgttttttttttttttcgcgttcgggtttagcgtggcgtttaattgttgatcggttttggaacgttttagtagcgcgtcgggggttttcggtgtttatttagcgggttgcgggttgcgtcgggggttttttggagagtcggttcggcgtcgttcgcgcgttcgcgttagagtagttatgtatcggcgtagttacgttttttagattcgtaaggagtagtacgagtacgtcgacgaggtttcgcgcgtcgtcgagttcgagcgttcggtcgacgagggttgggttggggtaacgagtttggcggcgttgtaggggttcggcgagcgcgtggtcgtttacgtttagcgggttcgcgttttcgagtagcgttatgtcgggtttcggaggtagttggatgttttttagcgtttgggcgagttggtcgggttcgaggacgttttcgttcgttaagtcgagagtaatcgttagcgcgttcgggatttggaggtcgagcgcgttcggttggagcgttagggtatcgaggcgtagcgcgcgttcgacgagtttcgaagtaagtaagcggcggttatcgggggaaatcgaggtagggcgtgggtcgtttcggcggcgcggggttgggagtacgttgttattatgtaggggtggagcgtcgtttttggtttttt

SEQ ID NO: 26548 - DNA, 785 bp, Artificial Sequence
  chemically treated genomic DNA (Homo sapiens) CpG-island No: 26548
aaaaaaccaaaaacgacgctccacccctacataataacaacgtactcccaaccccgcgccgccgaaacgacccacgccctacctcgatttcccccgataaccgccgcttacttacttcgaaactcgtcgaacgcgcgctacgcctcgataccctaacgctccaaccgaacgcgctcgacctccaaatcccgaacgcgctaacgattactctcgacttaacgaacgaaaacgtcctcgaacccgaccaactcgcccaaacgctaaaaaacatccaactacctccgaaacccgacataacgctactcgaaaacgcgaacccgctaaacgtaaacgaccacgcgctcgccgaacccctacaacgccgccaaactcgttaccccaacccaaccctcgtcgaccgaacgctcgaactcgacgacgcgcgaaacctcgtcgacgtactcgtactactccttacgaatctaaaaaacgtaactacgccgatacataactactctaacgcgaacgcgcgaacgacgccgaaccgactctccaaaaaacccccgacgcaacccgcaacccgctaaataaacaccgaaaacccccgacgcgctactaaaacgttccaaaaccgatcaacaattaaacgccacgctaaacccgaacgcgaaaaaaaaaaaaaacaacgacccgctttatacgacgaattaacgacccatacaactccgaaattaaaaaattacgctaaacaataaaatttttattccgtaattattcaaacctattacttttaattaaataaaaaa

SEQ ID NO: 26549 - DNA, 931 bp, Artificial Sequence
  chemically treated genomic DNA (Homo sapiens) CpG-island No: 26549
ttcgcgtgcgggcgaggagatttcgggtcgcgtttttagttttagttgggttgcgggcgacgattttttttttttaggcgggatttttcgggtttggcgtcgcgagttaatacggcgtgaggcgtcggcgtcgggtgcgtgtgggaatgtgggtggcggcggtttttattttttagttcgtttatagtattcggggttcggtcggttttttaggttgcgttttatttttaaagtttcgtttgaggtgtggcgtgttagagtaggggttgcgaggagtcgttaagttagtttggtcgggtttttggcgtcgttgggcgtttgtaatgcgcggtaggcgcggggcggggaggggcggggcgtggagaaggcggggtagtgggcgagggcggggcgtgtaggggacggggcggagtagtgggcgaggggcggggcgtgtaggggacggggcggggtagtgggcgagggcggggcgtgtaggggacggggcggggcgtgtaggagacggggcggggtagtgggcgatggacgggattgataggggatggggcggggtagtgggcgaggggcggggcgtgtaggggatggagagggacgggtaggatatggggaggggcgtggaggggtatggacgggcggggcggggtagtggttgagggatcgggggtagggggcggggaagggcgggttagcgatcgagggattgggcgcggcggcggcggcggcggttgggggtacggatagagtagggtagtgcgttagagtggagaggatcgggattgagagggacgagggcgtagggcgttggtggggatagtggacggggtaggagggatagagttagatagtgagtaaggcgtatcggttttagtgcgtagttttcggttttgttttggcgttcggatttgagatatttgagtaggggtatgatagg

SEQ ID NO: 26550 - DNA, 931 bp, Artificial Sequence
  chemically treated genomic DNA (Homo sapiens) CpG-island No: 26550
cctatcatacccctactcaaatatctcaaatccgaacgccaaaacaaaaccgaaaactacgcactaaaaccgatacgccttactcactatctaactctatccctcctaccccgtccactatccccaccaacgccctacgccctcgtccctctcaatcccgatcctctccactctaacgcactaccctactctatccgtacccccaaccgccgccgccgccgccgcgcccaatccctcgatcgctaacccgcccttccccgccccctacccccgatccctcaaccactaccccgccccgcccgtccatacccctccacgcccctccccatatcctacccgtccctctccatcccctacacgccccgcccctcgcccactaccccgccccatcccctatcaatcccgtccatcgcccactaccccgccccgtctcctacacgccccgccccgtcccctacacgccccgccctcgcccactaccccgccccgtcccctacacgccccgcccctcgcccactactccgccccgtcccctacacgccccgccctcgcccactaccccgccttctccacgccccgcccctccccgccccgcgcctaccgcgcattacaaacgcccaacgacgccaaaaacccgaccaaactaacttaacgactcctcgcaacccctactctaacacgccacacctcaaacgaaactttaaaaataaaacgcaacctaaaaaaccgaccgaaccccgaatactataaacgaactaaaaaataaaaaccgccgccacccacattcccacacgcacccgacgccgacgcctcacgccgtattaactcgcgacgccaaacccgaaaaatcccgcctaaaaaaaaaaaatcgtcgcccgcaacccaactaaaactaaaaacgcgacccgaaatctcctcgcccgcacgcgaa

SEQ ID NO: 26551 - DNA, 931 bp, Artificial Sequence
  chemically treated genomic DNA (Homo sapiens) CpG-island No: 26551
tttgttatgtttttgtttaggtgttttaggttcgagcgttaggataaagtcggagattgcgtattaggatcggtgcgttttgtttattgtttgattttattttttttgtttcgtttattgtttttattaacgttttgcgttttcgttttttttagtttcggttttttttattttagcgtattgttttattttgttcgtatttttagtcgtcgtcgtcgtcgtcgcgtttagtttttcggtcgttggttcgttttttttcgttttttgttttcggttttttagttattgtttcgtttcgttcgtttatatttttttacgtttttttttatgttttgttcgtttttttttattttttgtacgtttcgtttttcgtttattgtttcgttttattttttgttagtttcgtttatcgtttattgtttcgtttcgttttttgtacgtttcgtttcgttttttgtacgtttcgttttcgtttattgtttcgtttcgttttttgtacgtttcgtttttcgtttattgtttcgtttcgttttttgtacgtttcgttttcgtttattgtttcgttttttttacgtttcgttttttttcgtttcgcgtttgtcgcgtattgtagacgtttagcggcgttaagaattcggttaagttgatttggcgatttttcgtagtttttgttttggtacgttatattttagacgaggttttgaaagtagggcgtagtttgagaggtcggtcggatttcgagtgttgtaggcgggttgggagatgggggtcgtcgttatttatatttttatacgtattcggcgtcggcgttttacgtcgtgttagttcgcggcgttaagttcggagggtttcgtttgaggaagaaaggtcgtcgttcgtagtttagttggggttggaggcgcgattcggggttttttcgttcgtacgcgga

SEQ ID NO: 26552 - DNA, 931 bp, Artificial Sequence
  chemically treated genomic DNA (Homo sapiens) CpG-island No: 26552
tccgcgtacgaacgaaaaaaccccgaatcgcgcctccaaccccaactaaactacgaacgacgacctttcttcctcaaacgaaaccctccgaacttaacgccgcgaactaacacgacgtaaaacgccgacgccgaatacgtataaaaatataaataacgacgacccccatctcccaacccgcctacaacactcgaaatccgaccgacctctcaaactacgccctactttcaaaacctcgtctaaaatataacgtaccaaaacaaaaactacgaaaaatcgccaaatcaacttaaccgaattcttaacgccgctaaacgtctacaatacgcgacaaacgcgaaacgaaaaaaaacgaaacgtaaaaaaaacgaaacaataaacgaaaacgaaacgtacaaaaaacgaaacgaaacaataaacgaaaaacgaaacgtacaaaaaacgaaacgaaacaataaacgaaaacgaaacgtacaaaaaacgaaacgaaacgtacaaaaaacgaaacgaaacaataaacgataaacgaaactaacaaaaaataaaacgaaacaataaacgaaaaacgaaacgtacaaaaaataaaaaaaaacgaacaaaacataaaaaaaaacgtaaaaaaatataaacgaacgaaacgaaacaataactaaaaaaccgaaaacaaaaaacgaaaaaaaacgaaccaacgaccgaaaaactaaacgcgacgacgacgacgacgactaaaaatacgaacaaaataaaacaatacgctaaaataaaaaaaaccgaaactaaaaaaaacgaaaacgcaaaacgttaataaaaacaataaacgaaacaaaaaaaataaaatcaaacaataaacaaaacgcaccgatcctaatacgcaatctccgactttatcctaacgctcgaacctaaaacacctaaacaaaaacataacaaa

SEQ ID NO: 26553 - DNA, 878 bp, Artificial Sequence
  chemically treated genomic DNA (Homo sapiens) CpG-island No: 26553
gttttcgtcggtcgcgggcggagtttttttcgcggcgttcggcgagtttcggttttcgttttttttttcgttttttcgttttcggatttttttttcgtttttttagcggtcgttatcgtcgtcgtatagtttcgcgcggcgcgagtaggtacgtgcgtttcggtagtggtttcgggtcgggtcgggaagggggcgggagatcgggagggcgaggcggtggcggtcgggttcgcgtttttcgggttgcgtcgtaggagagagattttcgtaggcgagattttcgtaggcgtacgtcggttgtaggaaggcggacgggtatcggagaggacgtattttcgttcgtcggcggtcgggcgtttttcgttttagcgtggtgaggcggggagggaggttcggtataggtacgtacgcggagaggggatcgttgggggcggtaggaggtcgagggtcgggggcggggagtggcggcgaaggacggcgagtttgatttcgcggttcgtcgaaggatatgcgattaggggattcggttttttcgggttttcgtttggttcggttcggtttttcgggtttcgcgtttgtgggtaagggtaggagtagggggtgtggattgggtcggcgggagcgggcgcggtgggtagtcggcgtgttggggttttttgcgcgtaattttgggtataatagcgtggatttgcgtgtgcgtatttgcgcgttttaaggttttgtgtataattcgtgcgtgtgtttatcgattgggttttgtgaagttttatttatagtcgttgtgcgttttttttttcgggtgttagtgcgcgcggcgggtggggtattgggtttttgcgggttttggtggatttggtttgggttttatttttaggggt

SEQ ID NO: 26554 - DNA, 878 bp, Artificial Sequence
  chemically treated genomic DNA (Homo sapiens) CpG-island No: 26554
acccctaaaaataaaacccaaaccaaatccaccaaaacccgcaaaaacccaataccccacccgccgcgcgcactaacacccgaaaaaaaaaacgcacaacgactataaataaaacttcacaaaacccaatcgataaacacacgcacgaattatacacaaaaccttaaaacgcgcaaatacgcacacgcaaatccacgctattatacccaaaattacgcgcaaaaaaccccaacacgccgactacccaccgcgcccgctcccgccgacccaatccacaccccctactcctacccttacccacaaacgcgaaacccgaaaaaccgaaccgaaccaaacgaaaacccgaaaaaaccgaatcccctaatcgcatatccttcgacgaaccgcgaaatcaaactcgccgtccttcgccgccactccccgcccccgaccctcgacctcctaccgcccccaacgatcccctctccgcgtacgtacctataccgaacctccctccccgcctcaccacgctaaaacgaaaaacgcccgaccgccgacgaacgaaaatacgtcctctccgatacccgtccgccttcctacaaccgacgtacgcctacgaaaatctcgcctacgaaaatctctctcctacgacgcaacccgaaaaacgcgaacccgaccgccaccgcctcgccctcccgatctcccgcccccttcccgacccgacccgaaaccactaccgaaacgcacgtacctactcgcgccgcgcgaaactatacgacgacgataacgaccgctaaaaaaacgaaaaaaaaatccgaaaacgaaaaaacgaaaaaaaaaacgaaaaccgaaactcgccgaacgccgcgaaaaaaactccgcccgcgaccgacgaaaac

SEQ ID NO: 26555 - DNA, 878 bp, Artificial Sequence
  chemically treated genomic DNA (Homo sapiens) CpG-island No: 26555
gtttttgggagtgagatttaagttagatttattaagattcgtaggggtttaatattttattcgtcgcgcgtattgatattcggagagagggacgtatagcggttgtgggtgaagttttataaaatttagtcgatagatatacgtacgagttgtatataaagttttggggcgcgtagatacgtatacgtaggtttacgttgttgtatttaaagttgcgcgtagaaagttttagtacgtcggttgtttatcgcgttcgttttcgtcggtttagtttatattttttgtttttgtttttgtttatagacgcgggattcggaaggtcgaatcggattaggcggaggttcggggaggtcgggttttttggtcgtatgtttttcggcgggtcgcgaggttaggttcgtcgtttttcgtcgttatttttcgttttcggttttcggttttttgtcgtttttagcggtttttttttcgcgtgcgtatttgtgtcgggttttttttttcgttttattacgttggggcgaagggcgttcggtcgtcggcgggcgagggtgcgtttttttcggtgttcgttcgtttttttgtagtcggcgtacgtttgcgggggtttcgtttgcgggggttttttttttgcggcgtagttcggagggcgcgggttcggtcgttatcgtttcgttttttcggtttttcgtttttttttcggttcggttcggagttattgtcgaggcgtacgtatttattcgcgtcgcgcggagttgtacggcggcggtggcggtcgttggggaggcgggggggggattcggggacggagggacgggagaaggggcgggggtcggggttcgtcgagcgtcgcggagggagtttcgttcgcggtcggcgagggt

SEQ ID NO: 26556 - DNA, 878 bp, Artificial Sequence
  chemically treated genomic DNA (Homo sapiens) CpG-island No: 26556
accctcgccgaccgcgaacgaaactccctccgcgacgctcgacgaaccccgacccccgccccttctcccgtccctccgtccccgaatcccccccccgcctccccaacgaccgccaccgccgccgtacaactccgcgcgacgcgaataaatacgtacgcctcgacaataactccgaaccgaaccgaaaaaaaaacgaaaaaccgaaaaaacgaaacgataacgaccgaacccgcgccctccgaactacgccgcaaaaaaaaaacccccgcaaacgaaacccccgcaaacgtacgccgactacaaaaaaacgaacgaacaccgaaaaaaacgcaccctcgcccgccgacgaccgaacgcccttcgccccaacgtaataaaacgaaaaaaaaaacccgacacaaatacgcacgcgaaaaaaaaaccgctaaaaacgacaaaaaaccgaaaaccgaaaacgaaaaataacgacgaaaaacgacgaacctaacctcgcgacccgccgaaaaacatacgaccaaaaaacccgacctccccgaacctccgcctaatccgattcgaccttccgaatcccgcgtctataaacaaaaacaaaaacaaaaaatataaactaaaccgacgaaaacgaacgcgataaacaaccgacgtactaaaactttctacgcgcaactttaaatacaacaacgtaaacctacgtatacgtatctacgcgccccaaaactttatatacaactcgtacgtatatctatcgactaaattttataaaacttcacccacaaccgctatacgtccctctctccgaatatcaatacgcgcgacgaataaaatattaaacccctacgaatcttaataaatctaacttaaatctcactcccaaaaac

SEQ ID NO: 26557 - DNA, 511 bp, Artificial Sequence
  chemically treated genomic DNA (Homo sapiens) CpG-island No: 26557
gaagtaatcgtgtgttattattttttaatgtaagaagtagacgagcgcgttttgtttgtaggtgatggtcggcgttgtcgatgcgaatagtatttttaggttcgttatgagcgttcgcgatttcggcgtttggaggaaagaagggggcgggggtagtgtagtgagtcggtttcgcggtcggggtagttataattttgttttttttttgcgttggtttttgtcgagtttatatttgagattaaaatggagacgttcggggacggggcggggcggggaagtcggaagtagttttaatagcgggcgtaattgcgtgaggcgcgtcgggttggtaacgcgagcgtagtattgaaaggtttcgttagggagtgcgagcggggcgtggttttttaaagtcggaagtcgggttttggcggtagtcgataggatcgtttgacgcgggtatagcgttttttaagaggttattttgttgagaggtagattttttatttataaaatggggtatgttaggtcg

SEQ ID NO: 26558 - DNA, 511 bp, Artificial Sequence
  chemically treated genomic DNA (Homo sapiens) CpG-island No: 26558
cgacctaacataccccattttataaataaaaaatctacctctcaacaaaataacctcttaaaaaacgctatacccgcgtcaaacgatcctatcgactaccgccaaaacccgacttccgactttaaaaaaccacgccccgctcgcactccctaacgaaacctttcaatactacgctcgcgttaccaacccgacgcgcctcacgcaattacgcccgctattaaaactacttccgacttccccgccccgccccgtccccgaacgtctccattttaatctcaaatataaactcgacaaaaaccaacgcaaaaaaaaaacaaaattataactaccccgaccgcgaaaccgactcactacactacccccgcccccttctttcctccaaacgccgaaatcgcgaacgctcataacgaacctaaaaatactattcgcatcgacaacgccgaccatcacctacaaacaaaacgcgctcgtctacttcttacattaaaaaataataacacacgattacttc

SEQ ID NO: 26559 - DNA, 511 bp, Artificial Sequence
  chemically treated genomic DNA (Homo sapiens) CpG-island No: 26559
cggtttagtatattttattttgtggatgggaagtttgttttttagtaaggtggttttttggaggacgttgtgttcgcgttaggcgattttgtcgattgtcgttaagattcggttttcggttttgaggggttacgtttcgttcgtattttttggcggaattttttagtgttgcgttcgcgttgttaattcggcgcgttttacgtagttgcgttcgttgttgggattattttcggttttttcgtttcgtttcgttttcgggcgtttttattttggttttaggtgtggattcggtaagaattagcgtaagagggaagtagagttatagttatttcggtcgcggagtcggtttattgtattattttcgttttttttttttttttagacgtcgaagtcgcgggcgtttatggcgggtttggaggtattgttcgtatcggtagcgtcggttattatttgtaggtaggacgcgttcgtttgttttttgtattgggaagtggtgatatacggttatttt

SEQ ID NO: 26560 - DNA, 511 bp, Artificial Sequence
  chemically treated genomic DNA (Homo sapiens) CpG-island No: 26560
aaaataaccgtatatcaccacttcccaatacaaaaaacaaacgaacgcgtcctacctacaaataataaccgacgctaccgatacgaacaatacctccaaacccgccataaacgcccgcgacttcgacgtctaaaaaaaaaaaaaaaacgaaaataatacaataaaccgactccgcgaccgaaataactataactctacttccctcttacgctaattcttaccgaatccacacctaaaaccaaaataaaaacgcccgaaaacgaaacgaaacgaaaaaaccgaaaataatcccaacaacgaacgcaactacgtaaaacgcgccgaattaacaacgcgaacgcaacactaaaaaattccgccaaaaaatacgaacgaaacgtaacccctcaaaaccgaaaaccgaatcttaacgacaatcgacaaaatcgcctaacgcgaacacaacgtcctccaaaaaaccaccttactaaaaaacaaacttcccatccacaaaataaaatatactaaaccg

SEQ ID NO: 26561 - DNA, 612 bp, Artificial Sequence
  chemically treated genomic DNA (Homo sapiens) CpG-island No: 26561
tcgcgtttgcgtattgtagattttgaagtcgtcgagtttttcgtcgaggtgggtggggaaattgttcgggtattcgggttttttatttcgttttcgttgtatgaatgagaggcgcggcgttcgtttttttttcggcgggttcgtttttcgcgaggggtcgtcgggcgtagttagtcgtcgttattttcgtcgcgttttgttcggacggacgttcgtcgttcgtagtttgtcgttcgtcgtagggcgttgacggtttcgtacgtttgtcgttgttatcggcgcgttcgagtaagtgagcgagcgagggcgggagcgtcgcggtcgtcgttttcgggttggggtttgggggatcgagtcgtttcgggttcgggatgttgaggagatcgcgggttcgcgttagttttttatatatatatattttttcggcgtttcggtcggtcgggcgcggtgtgtaggggtgaggcggtgtttttaggttgaggagggacgcggaggagggttcggcgcggtttcgggattggagggtgagttttttataaagggcggagcggggttgttatttggagattacggagggaaggtgcgtgggttttcgtacgttttgttcgttta

SEQ ID NO: 26562 - DNA, 612 bp, Artificial Sequence
  chemically treated genomic DNA (Homo sapiens) CpG-island No: 26562
taaacgaacaaaacgtacgaaaacccacgcaccttccctccgtaatctccaaataacaaccccgctccgccctttataaaaaactcaccctccaatcccgaaaccgcgccgaaccctcctccgcgtccctcctcaacctaaaaacaccgcctcacccctacacaccgcgcccgaccgaccgaaacgccgaaaaaatatatatatataaaaaactaacgcgaacccgcgatctcctcaacatcccgaacccgaaacgactcgatcccccaaaccccaacccgaaaacgacgaccgcgacgctcccgccctcgctcgctcacttactcgaacgcgccgataacaacgacaaacgtacgaaaccgtcaacgccctacgacgaacgacaaactacgaacgacgaacgtccgtccgaacaaaacgcgacgaaaataacgacgactaactacgcccgacgacccctcgcgaaaaacgaacccgccgaaaaaaaaacgaacgccgcgcctctcattcatacaacgaaaacgaaataaaaaacccgaatacccgaacaatttccccacccacctcgacgaaaaactcgacgacttcaaaatctacaatacgcaaacgcga

SEQ ID NO: 26563 - DNA, 612 bp, Artificial Sequence
  chemically treated genomic DNA (Homo sapiens) CpG-island No: 26563
tgggcgagtaggacgtgcgggggtttacgtatttttttttcgtgatttttaggtgatagtttcgtttcgttttttgtgagggatttattttttagtttcggggtcgcgtcggattttttttcgcgtttttttttagtttggagatatcgttttatttttgtatatcgcgttcggtcggtcgaggcgtcgggagagtgtgtgtgtgtgggaggttggcgcgggttcgcggtttttttagtatttcgaattcggagcggttcggttttttaaattttagttcgggggcggcggtcgcggcgttttcgttttcgttcgtttatttattcgggcgcgtcggtggtagcggtagacgtgcgggatcgttagcgttttgcggcgggcggtaggttgcgggcggcgagcgttcgttcggatagagcgcggcggaggtggcggcggttgattgcgttcggcggtttttcgcgaggggcgggttcgtcgggggaggggcgggcgtcgcgttttttatttatgtagcgggggcggggtgagggattcggatgttcgggtagtttttttatttatttcggcggagggttcggcggttttagagtttgtagtgcgtaggcgcgg

SEQ ID NO: 26564 - DNA, 612 bp, Artificial Sequence
  chemically treated genomic DNA (Homo sapiens) CpG-island No: 26564
ccgcgcctacgcactacaaactctaaaaccgccgaaccctccgccgaaataaataaaaaaactacccgaacatccgaatccctcaccccgcccccgctacataaataaaaaacgcgacgcccgcccctcccccgacgaacccgcccctcgcgaaaaaccgccgaacgcaatcaaccgccgccacctccgccgcgctctatccgaacgaacgctcgccgcccgcaacctaccgcccgccgcaaaacgctaacgatcccgcacgtctaccgctaccaccgacgcgcccgaataaataaacgaacgaaaacgaaaacgccgcgaccgccgcccccgaactaaaatttaaaaaaccgaaccgctccgaattcgaaatactaaaaaaaccgcgaacccgcgccaacctcccacacacacacactctcccgacgcctcgaccgaccgaacgcgatatacaaaaataaaacgatatctccaaactaaaaaaaaacgcgaaaaaaaatccgacgcgaccccgaaactaaaaaataaatccctcacaaaaaacgaaacgaaactatcacctaaaaatcacgaaaaaaaaatacgtaaacccccgcacgtcctactcgccca

SEQ ID NO: 26565 - DNA, 1233 bp, Artificial Sequence
  chemically treated genomic DNA (Homo sapiens) CpG-island No: 26565
ttcgatcgtatcgtttagatttcggggtagtttagttcgtcgtttttttcggcgtttcgagtttggttcggttttttttaggtttcggttttttaggttcgtcgtttcgtttagttcgggtttcgcgtattttgttttttatttttatagtgtttaggtagtcgttgttcgtttcgtgtcggtggttgcggtttatgttgaacgtcgagtttcgcgacggtttttttcggtcgggcggttttttaggagcgcggggagcgagtgcgcgattggggatttcggaaagcggttgcggttcgggcgtttttttataggtatttgtagagggggcggtcgtagtttcggcgttcgcgttgagttttattttattagttgtttatacggcgggatcgagggtcggattggtggcgcggtaggcggggaagtagtttttttttttcgggtttcggcggcgacggcgatagcgttggaggagaggagggggcggagcggaggttataagcgtcgtaatttttttttttgtcgtttttttcgcgagttcgcgcgcgcgtattcgagcggattatagtcgcggcgcgtgcgcgcgtttatttgtagttttcgaagatgtcgtaatttttcgcgtttcgtttatatttaatagaaagcgcgtatttgcgttcgcggcgttaattaatcgatatacgtttcgcgcggtgcgtgggcgggttgtttttttaaaatttcgtttattatcgtacgattggttttgcgttacgagggaggggcgggattatttgaagttatggtttttcgtttcgttttaggtcggagagttagaaggcgtatgcgcgggtgttggagttttcgtttcgggaaggtacgcggggaggtcggtcggaagcgcgagcgtatttgaagaagggttcggttgggtgggttttttgcgtacgcgcgagcgcgcgtttggttgttcggtttcgtcggggttcgcgtcgtttagcgcgcgttagttatacgtacggtttaggggattggatgcgtcgttcgttcggttgtcgaggcgttgcggggttattcggttttagtcgggtttttttttcgtttttattttgggatgttgtagtttttaacgacgtttttttatcgttttttatcgttgtttaggcgtttcgttgtaatttttggttgtaaaatttaagttttttcgtttttgtagcggttgttgggggagaagtttagggtttttttggt

SEQ ID NO: 26566 - DNA, 1233 bp, Artificial Sequence
  chemically treated genomic DNA (Homo sapiens) CpG-island No: 26566
accaaaaaaaccctaaacttctcccccaacaaccgctacaaaaacgaaaaaacttaaattttacaaccaaaaattacaacgaaacgcctaaacaacgataaaaaacgataaaaaaacgtcgttaaaaactacaacatcccaaaataaaaacgaaaaaaaaacccgactaaaaccgaataaccccgcaacgcctcgacaaccgaacgaacgacgcatccaatcccctaaaccgtacgtataactaacgcgcgctaaacgacgcgaaccccgacgaaaccgaacaaccaaacgcgcgctcgcgcgtacgcaaaaaacccacccaaccgaacccttcttcaaatacgctcgcgcttccgaccgacctccccgcgtaccttcccgaaacgaaaactccaacacccgcgcatacgccttctaactctccgacctaaaacgaaacgaaaaaccataacttcaaataatcccgcccctccctcgtaacgcaaaaccaatcgtacgataataaacgaaattttaaaaaaacaacccgcccacgcaccgcgcgaaacgtatatcgattaattaacgccgcgaacgcaaatacgcgctttctattaaatataaacgaaacgcgaaaaattacgacatcttcgaaaactacaaataaacgcgcgcacgcgccgcgactataatccgctcgaatacgcgcgcgcgaactcgcgaaaaaaacgacaaaaaaaaaaattacgacgcttataacctccgctccgccccctcctctcctccaacgctatcgccgtcgccgccgaaacccgaaaaaaaaaaactacttccccgcctaccgcgccaccaatccgaccctcgatcccgccgtataaacaactaataaaataaaactcaacgcgaacgccgaaactacgaccgccccctctacaaatacctataaaaaaacgcccgaaccgcaaccgctttccgaaatccccaatcgcgcactcgctccccgcgctcctaaaaaaccgcccgaccgaaaaaaaccgtcgcgaaactcgacgttcaacataaaccgcaaccaccgacacgaaacgaacaacgactacctaaacactataaaaataaaaaacaaaatacgcgaaacccgaactaaacgaaacgacgaacctaaaaaaccgaaacctaaaaaaaaccgaaccaaactcgaaacgccgaaaaaaacgacgaactaaactaccccgaaatctaaacgatacgatcgaa

SEQ ID NO: 26567 - DNA, 1233 bp, Artificial Sequence
  chemically treated genomic DNA (Homo sapiens) CpG-island No: 26567
gttaagagagttttaagttttttttttagtaatcgttgtagaggcgggaaaatttgaattttgtaattaagagttgtagcgggacgtttaagtaacgataaggggcggtggaggggcgtcgttgggggttgtagtattttaaagtggaagcgggaagggggttcggttggaatcgaatagtttcgtagcgtttcggtaatcggacgggcggcgtatttaattttttggatcgtgcgtgtgattggcgcgcgttaagcggcgcgagtttcggcggagtcgggtaattaggcgcgcgttcgcgcgtgcgtaaaaggtttatttagtcgagtttttttttaggtgcgttcgcgttttcggtcggttttttcgcgtgttttttcggggcggaaattttagtattcgcgtatgcgttttttggtttttcggtttgaagcggggcggagggttatggttttaggtgatttcgtttttttttcgtagcgtaggattaatcgtgcggtggtaggcggggttttgaggaggtagttcgtttacgtatcgcgcgaggcgtgtatcgattggttggcgtcgcgggcgtaggtgcgcgttttttattgggtgtgggcggaacgcgagggattgcggtattttcgggggttgtaggtgagcgcgcgtacgcgtcgcggttgtggttcgttcgggtgcgcgcgcgcgggttcgcgggggaggcggtagagggagaggttgcggcgtttgtggttttcgtttcgttttttttttttttttagcgttgtcgtcgtcgtcgtcggggttcggagggagggagttgttttttcgtttgtcgcgttattagttcgattttcggtttcgtcgtgtgagtagttggtggagtggagtttagcgcggacgtcggagttgcggtcgttttttttgtaggtgtttgtgaggaggcgttcgggtcgtaatcgtttttcgagatttttagtcgcgtattcgtttttcgcgtttttgaggggtcgttcggtcggaggaggtcgtcgcggggttcggcgtttagtatgaatcgtagttatcggtacggggcgggtagcggttgtttgggtattatggaggtgaagagtaaggtgcgcggggttcgggttgggcggagcggcgggtttggggggtcggggtttgggagaggtcgggttaggttcggagcgtcgggggaggcgacgggttgagttgtttcggggtttggacggtgcggtcggg

SEQ ID NO: 26568 - DNA, 1233 bp, Artificial Sequence
  chemically treated genomic DNA (Homo sapiens) CpG-island No: 26568
cccgaccgcaccgtccaaaccccgaaacaactcaacccgtcgcctcccccgacgctccgaacctaacccgacctctcccaaaccccgaccccccaaacccgccgctccgcccaacccgaaccccgcgcaccttactcttcacctccataatacccaaacaaccgctacccgccccgtaccgataactacgattcatactaaacgccgaaccccgcgacgacctcctccgaccgaacgacccctcaaaaacgcgaaaaacgaatacgcgactaaaaatctcgaaaaacgattacgacccgaacgcctcctcacaaacacctacaaaaaaaacgaccgcaactccgacgtccgcgctaaactccactccaccaactactcacacgacgaaaccgaaaatcgaactaataacgcgacaaacgaaaaaacaactccctccctccgaaccccgacgacgacgacgacaacgctaaaaaaaaaaaaaaaacgaaacgaaaaccacaaacgccgcaacctctccctctaccgcctcccccgcgaacccgcgcgcgcgcacccgaacgaaccacaaccgcgacgcgtacgcgcgctcacctacaacccccgaaaataccgcaatccctcgcgttccgcccacacccaataaaaaacgcgcacctacgcccgcgacgccaaccaatcgatacacgcctcgcgcgatacgtaaacgaactacctcctcaaaaccccgcctaccaccgcacgattaatcctacgctacgaaaaaaaaacgaaatcacctaaaaccataaccctccgccccgcttcaaaccgaaaaaccaaaaaacgcatacgcgaatactaaaatttccgccccgaaaaaacacgcgaaaaaaccgaccgaaaacgcgaacgcacctaaaaaaaaactcgactaaataaaccttttacgcacgcgcgaacgcgcgcctaattacccgactccgccgaaactcgcgccgcttaacgcgcgccaatcacacgcacgatccaaaaaattaaatacgccgcccgtccgattaccgaaacgctacgaaactattcgattccaaccgaacccccttcccgcttccactttaaaatactacaacccccaacgacgcccctccaccgccccttatcgttacttaaacgtcccgctacaactcttaattacaaaattcaaattttcccgcctctacaacgattactaaaaaaaaaacttaaaactctcttaac

SEQ ID NO: 26569 - DNA, 676 bp, Artificial Sequence
  chemically treated genomic DNA (Homo sapiens) CpG-island No: 26569
atcgtagttcgaagttacgtcgtagggtcggttgggtttggagtttcgtattcgtttggttttttgcgcgtttcgtttagatcgtttttttcggcgttttttcgaattttttttttagttcgcgtttttcgtcggaggcgttcggaaggagcgagacgtcggggtcgtagatttgagttttcgtcgttttggacggagcggggtggcgcggcgtttaggggacgtaaggtttgagtttacgtatcgttggttgtttatttgtttggttagtcggtggtcgtttagcgtttagttacggttcgagtcgggcgtcgcgcgtttgcgcgttcggggggcgggttcgtttttttgtaggacgtagagcgcggggttcgagcgtcgggtatatttgttcggtttaggcgtaggtttaggtttttgtggcgttcgcgtttttttgtttgttttcgaggttttggttgtgcgcgttttatgtttttttaatttaggataggtttgtcgtacgggcgtggcgggtcgagattttttttgttttcgaatttttgtattatagttagtagagcgtagcgggggcgtagggatcgcggagttcgaagagagagtttggagggttatcgagttgagtggttagtgataaaagacgaggttgtatttaggtatgtattttagtcgagtg

SEQ ID NO: 26570 - DNA, 676 bp, Artificial Sequence
  chemically treated genomic DNA (Homo sapiens) CpG-island No: 26570
cactcgactaaaatacatacctaaatacaacctcgtcttttatcactaaccactcaactcgataaccctccaaactctctcttcgaactccgcgatccctacgcccccgctacgctctactaactataatacaaaaattcgaaaacaaaaaaaatctcgacccgccacgcccgtacgacaaacctatcctaaattaaaaaaacataaaacgcgcacaaccaaaacctcgaaaacaaacaaaaaaacgcgaacgccacaaaaacctaaacctacgcctaaaccgaacaaatatacccgacgctcgaaccccgcgctctacgtcctacaaaaaaacgaacccgccccccgaacgcgcaaacgcgcgacgcccgactcgaaccgtaactaaacgctaaacgaccaccgactaaccaaacaaataaacaaccaacgatacgtaaactcaaaccttacgtcccctaaacgccgcgccaccccgctccgtccaaaacgacgaaaactcaaatctacgaccccgacgtctcgctccttccgaacgcctccgacgaaaaacgcgaactaaaaaaaaaattcgaaaaaacgccgaaaaaaacgatctaaacgaaacgcgcaaaaaaccaaacgaatacgaaactccaaacccaaccgaccctacgacgtaacttcgaactacgat

SEQ ID NO: 26571 - DNA, 676 bp, Artificial Sequence
  chemically treated genomic DNA (Homo sapiens) CpG-island No: 26571
tattcggttggggtgtatgtttgggtgtagtttcgttttttgttattaattatttagttcggtagttttttaggtttttttttcgagtttcgcggtttttgcgttttcgttgcgttttgttagttgtgatgtaggggttcgggggtaggaaaaatttcgattcgttacgttcgtgcggtaaatttgttttaggttgagggggtatgaggcgcgtataattagggtttcgaaggtaggtaagagggcgcgggcgttatagaagtttgggtttgcgtttgggtcgggtagatgtgttcggcgttcgggtttcgcgttttgcgttttgtagggaggcggattcgtttttcgaacgcgtaggcgcgcggcgttcggttcggatcgtagttaggcgttgggcggttatcggttggttaggtaggtaagtaattagcggtgcgtgggtttagattttgcgttttttgggcgtcgcgttatttcgtttcgtttagggcggcgagggtttaggtttgcggtttcggcgtttcgtttttttcgagcgttttcggcggggggcgcgggttggggaggaggttcgggaaaacgtcggggaaagcggtttgggcggagcgcgtagggggttaggcgggtgcgggattttaggtttagtcgattttgcggcgtggtttcgggttgcgat

SEQ ID NO: 26572 - DNA, 676 bp, Artificial Sequence
  chemically treated genomic DNA (Homo sapiens) CpG-island No: 26572
atcgcaacccgaaaccacgccgcaaaatcgactaaacctaaaatcccgcacccgcctaaccccctacgcgctccgcccaaaccgctttccccgacgttttcccgaacctcctccccaacccgcgccccccgccgaaaacgctcgaaaaaaacgaaacgccgaaaccgcaaacctaaaccctcgccgccctaaacgaaacgaaataacgcgacgcccaaaaaacgcaaaatctaaacccacgcaccgctaattacttacctacctaaccaaccgataaccgcccaacgcctaactacgatccgaaccgaacgccgcgcgcctacgcgttcgaaaaacgaatccgcctccctacaaaacgcaaaacgcgaaacccgaacgccgaacacatctacccgacccaaacgcaaacccaaacttctataacgcccgcgccctcttacctaccttcgaaaccctaattatacgcgcctcataccccctcaacctaaaacaaatttaccgcacgaacgtaacgaatcgaaatttttcctacccccgaacccctacatcacaactaacaaaacgcaacgaaaacgcaaaaaccgcgaaactcgaaaaaaaaacctaaaaaactaccgaactaaataattaataacaaaaaacgaaactacacccaaacatacaccccaaccgaata

SEQ ID NO: 26573 - DNA, 829 bp, Artificial Sequence
  chemically treated genomic DNA (Homo sapiens) CpG-island No: 26573
gtagtcgtcgcgatcgcgacgcgggtttcgggcgtgttttacgattacgcgttcgtcgtagagttttttgtcgtttagttcgtaaacggcgtcgtcggcgtcgcgggagttttcgaattttacgaagtcgtatttaggggcggtgcgagggtcggataatcgcgggggagtcgttagttaggacgcgtacgtgcgcgcgttcgtattttatcgcgcgttttcgcgacgtcgcgtcgtcgttatttttgaggttttgttacgcggcgtcgcggttttggtcgtttttttttttggagagttttcgtcgttattaggtttgggacgttgggcgcgggcgtttaggttcgatttatttatttttgaggtttatttcgaggaggcggttatagttattgaaaaagcgttggatgtttttttttcggacgttgtagtttaggcgttttatgtagacgcgcggtatgttcgtggcgggcggggatttaagggttggttgtcgaacggcggatcgtaagttagtaatcgcggtgcgggtgcggggacggtaagagttcgaatacgcgttttatattataggggcggtcgagtttagttatataatggcgcgcgcgcgcgttaggttttcgttatatgggcggtcggtggggcggggtttggagcgtgatgttagcgcgtagcggtacgttcgtttcgcgtcgtttttgggttagatggtgattggcgagttcgttgttcgcgacgtttcggtgtagtgcggttttgttagtttttaggatttttttttagttttttttatcgtttttgaaaatataatgtttttaatttagtcgta

SEQ ID NO: 26574 - DNA, 829 bp, Artificial Sequence
  chemically treated genomic DNA (Homo sapiens) CpG-island No: 26574
tacgactaaattaaaaacattatattttcaaaaacgataaaaaaaactaaaaaaaaatcctaaaaactaacaaaaccgcactacaccgaaacgtcgcgaacaacgaactcgccaatcaccatctaacccaaaaacgacgcgaaacgaacgtaccgctacgcgctaacatcacgctccaaaccccgccccaccgaccgcccatataacgaaaacctaacgcgcgcgcgcgccattatataactaaactcgaccgcccctataatataaaacgcgtattcgaactcttaccgtccccgcacccgcaccgcgattactaacttacgatccgccgttcgacaaccaacccttaaatccccgcccgccacgaacataccgcgcgtctacataaaacgcctaaactacaacgtccgaaaaaaaaacatccaacgctttttcaataactataaccgcctcctcgaaataaacctcaaaaataaataaatcgaacctaaacgcccgcgcccaacgtcccaaacctaataacgacgaaaactctccaaaaaaaaaaacgaccaaaaccgcgacgccgcgtaacaaaacctcaaaaataacgacgacgcgacgtcgcgaaaacgcgcgataaaatacgaacgcgcgcacgtacgcgtcctaactaacgactcccccgcgattatccgaccctcgcaccgcccctaaatacgacttcgtaaaattcgaaaactcccgcgacgccgacgacgccgtttacgaactaaacgacaaaaaactctacgacgaacgcgtaatcgtaaaacacgcccgaaacccgcgtcgcgatcgcgacgactac

SEQ ID NO: 26575 - DNA, 829 bp, Artificial Sequence
  chemically treated genomic DNA (Homo sapiens) CpG-island No: 26575
tgcggttggattagagatattgtgtttttaaagacggtggggagggttagagaaaaattttagaagttagtaagatcgtattatatcgaaacgtcgcgggtaacggattcgttagttattatttagtttagggacgacgcgggacggacgtgtcgttgcgcgttgatattacgttttaggtttcgttttatcggtcgtttatatagcgaaagtttggcgcgcgcgcgcgttattgtgtggttggattcggtcgtttttgtggtgtgaggcgcgtgttcgggtttttgtcgttttcgtattcgtatcgcggttattggtttgcggttcgtcgttcgataattagtttttgggttttcgttcgttacggatatgtcgcgcgtttatataggacgtttgagttataacgttcgggagaaggatatttagcgtttttttagtggttatggtcgttttttcgaagtagattttaaaaatgggtgagtcgggtttgggcgttcgcgtttagcgttttaggtttggtggcggcgggaattttttaaggaaagaagcggttaaggtcgcggcgtcgcgtggtagggttttaaagatggcgacggcgcggcgtcgcgggggcgcgcggtggggtacgggcgcgcgtacgtgcgcgttttggttaacgattttttcgcggttgttcggttttcgtatcgtttttaggtacggtttcgtggagttcgaggattttcgcgacgtcgacgacgtcgtttacgagttgaacggtaaggagttttgcggcgagcgcgtgatcgtagagtacgttcggggttcgcgtcgcgatcgcgacggttat

SEQ ID NO: 26576 - DNA, 829 bp, Artificial Sequence
  chemically treated genomic DNA (Homo sapiens) CpG-island No: 26576
ataaccgtcgcgatcgcgacgcgaaccccgaacgtactctacgatcacgcgctcgccgcaaaactccttaccgttcaactcgtaaacgacgtcgtcgacgtcgcgaaaatcctcgaactccacgaaaccgtacctaaaaacgatacgaaaaccgaacaaccgcgaaaaaatcgttaaccaaaacgcgcacgtacgcgcgcccgtaccccaccgcgcgcccccgcgacgccgcgccgtcgccatctttaaaaccctaccacgcgacgccgcgaccttaaccgcttctttccttaaaaaattcccgccgccaccaaacctaaaacgctaaacgcgaacgcccaaacccgactcacccatttttaaaatctacttcgaaaaaacgaccataaccactaaaaaaacgctaaatatccttctcccgaacgttataactcaaacgtcctatataaacgcgcgacatatccgtaacgaacgaaaacccaaaaactaattatcgaacgacgaaccgcaaaccaataaccgcgatacgaatacgaaaacgacaaaaacccgaacacgcgcctcacaccacaaaaacgaccgaatccaaccacacaataacgcgcgcgcgcgccaaactttcgctatataaacgaccgataaaacgaaacctaaaacgtaatatcaacgcgcaacgacacgtccgtcccgcgtcgtccctaaactaaataataactaacgaatccgttacccgcgacgtttcgatataatacgatcttactaacttctaaaatttttctctaaccctccccaccgtctttaaaaacacaatatctctaatccaaccgca

SEQ ID NO: 26577 - DNA, 519 bp, Artificial Sequence
  chemically treated genomic DNA (Homo sapiens) CpG-island No: 26577
gcggtttgcgttacgttcggtttgtttattttcgggttttagttttagacgtagcgatggttcgttaggttttaaagtgcggtttcgtcggtttcgttttcgtttttcggtttttcgttttgtttttcgtttttgggttgtagttttcgtcggtcgcgggtatcgatcgtttttcggagttagcgcgtagtcgtggtttatttttttttcgggttcgttttatggtgatattattttcgggtcgagtgttttcgggtcgttgttggttttcgggtattggttttagtatttttgtagtcggtcggagaggttagagttcgacggggttcggtttcggcggtagtcgcgtttttcgtttgtttttttcggtcgggtcgttttcggcggtagtgttagggtgagtgacgggcggtcgcgggcggaaattgttttcggggtttttttaggcggagggggcgttagatagcggtagggttcggttggttcgggagcggggtatttttacggtaggtaggatta

SEQ ID NO: 26578 - DNA, 519 bp, Artificial Sequence
  chemically treated genomic DNA (Homo sapiens) CpG-island No: 26578
taatcctacctaccgtaaaaataccccgctcccgaaccaaccgaaccctaccgctatctaacgccccctccgcctaaaaaaaccccgaaaacaatttccgcccgcgaccgcccgtcactcaccctaacactaccgccgaaaacgacccgaccgaaaaaaacaaacgaaaaacgcgactaccgccgaaaccgaaccccgtcgaactctaacctctccgaccgactacaaaaatactaaaaccaatacccgaaaaccaacaacgacccgaaaacactcgacccgaaaataatatcaccataaaacgaacccgaaaaaaaaataaaccacgactacgcgctaactccgaaaaacgatcgatacccgcgaccgacgaaaactacaacccaaaaacgaaaaacaaaacgaaaaaccgaaaaacgaaaacgaaaccgacgaaaccgcactttaaaacctaacgaaccatcgctacgtctaaaactaaaacccgaaaataaacaaaccgaacgtaacgcaaaccgc

SEQ ID NO: 26579 - DNA, 519 bp, Artificial Sequence
  chemically treated genomic DNA (Homo sapiens) CpG-island No: 26579
tagttttgtttgtcgtgagggtatttcgttttcgggttagtcgagttttgtcgttgtttggcgtttttttcgtttggggaagtttcgaaggtagttttcgttcgcggtcgttcgttatttattttgatattgtcgtcgaggacggttcggtcgagggaagtaagcgagaggcgcggttgtcgtcggagtcgggtttcgtcgggttttagttttttcggtcggttgtaggggtattgagattagtattcgggggttagtagcgattcggaaatattcggttcggaaatgatgttattatgaggcgggttcgaagagagggtggattacggttgcgcgttggtttcgggaagcggtcgatgttcgcggtcgacggagattataatttagaggcggaggataaagcggaaggtcgaagagcgaggacgaaatcggcggaatcgtattttggagtttaacgagttatcgttgcgtttgagattgggattcggaagtaaataggtcggacgtgacgtaagtcgt

SEQ ID NO: 26580 - DNA, 519 bp, Artificial Sequence
  chemically treated genomic DNA (Homo sapiens) CpG-island No: 26580
acgacttacgtcacgtccgacctatttacttccgaatcccaatctcaaacgcaacgataactcgttaaactccaaaatacgattccgccgatttcgtcctcgctcttcgaccttccgctttatcctccgcctctaaattataatctccgtcgaccgcgaacatcgaccgcttcccgaaaccaacgcgcaaccgtaatccaccctctcttcgaacccgcctcataataacatcatttccgaaccgaatatttccgaatcgctactaacccccgaatactaatctcaatacccctacaaccgaccgaaaaaactaaaacccgacgaaacccgactccgacgacaaccgcgcctctcgcttacttccctcgaccgaaccgtcctcgacgacaatatcaaaataaataacgaacgaccgcgaacgaaaactaccttcgaaacttccccaaacgaaaaaaacgccaaacaacgacaaaactcgactaacccgaaaacgaaataccctcacgacaaacaaaacta

SEQ ID NO: 26581 - DNA, 745 bp, Artificial Sequence
  chemically treated genomic DNA (Homo sapiens) CpG-island No: 26581
tttaggttgagtatgatttcgggtttttaattcgtgcgggttcgtttcgagcgtttttcggtttttttttagttttttttttgtcgttttttttcgatttttttatttaacgttttttttttttttttttcgatcgttgtttagtttagttttcgtgtttgattgtttggttcgttttttttcgttacgcgacgttttttttgggtttaggattcggttttttttttttttttaaggtttcggtagggtcgttatttttcgggggtttgacgagtcggcgcggtttagtttaggttcgtttttttagttttttagttttcggagtagacgttagtcgtaacgttcggttcggttttttttttttgcgtttttcgggtcgggtttttttttatcgtttgtcgcgtttcgatttttagggcgttttttatttattagggcgtagatttaggtttagtttttgttttcgggttttcgttcggcggtttttttagttttcgttcgtttcgtttttttgggatttcgtttcgtataggtcgggttcggtttttattgtttcgattcgtcgttacgttgaagtttttttttttaattaggttgtttgtttgttatttaagaaggggcgggtatagttgtcggtagaggggaaaaacgtcggtcgttttcgtttttttagtggaggttttttaaagaaataggacgttatttttttgcgggttatagggtttgaaggaaggtaattttttag

SEQ ID NO: 26582 - DNA, 745 bp, Artificial Sequence
  chemically treated genomic DNA (Homo sapiens) CpG-island No: 26582
ctaaaaaattaccttccttcaaaccctataacccgcaaaaaaataacgtcctatttctttaaaaaacctccactaaaaaaacgaaaacgaccgacgtttttcccctctaccgacaactatacccgccccttcttaaataacaaacaaacaacctaattaaaaaaaaaaacttcaacgtaacgacgaatcgaaacaataaaaaccgaacccgacctatacgaaacgaaatcccaaaaaaacgaaacgaacgaaaactaaaaaaaccgccgaacgaaaacccgaaaacaaaaactaaacctaaatctacgccctaataaataaaaaacgccctaaaaatcgaaacgcgacaaacgataaaaaaaaacccgacccgaaaaacgcaaaaaaaaaaaaccgaaccgaacgttacgactaacgtctactccgaaaactaaaaaactaaaaaaacgaacctaaactaaaccgcgccgactcgtcaaacccccgaaaaataacgaccctaccgaaaccttaaaaaaaaaaaaaaaaccgaatcctaaacccaaaaaaaacgtcgcgtaacgaaaaaaaacgaaccaaacaatcaaacacgaaaactaaactaaacaacgatcgaaaaaaaaaaaaaaaaaacgttaaataaaaaaatcgaaaaaaaacgacaaaaaaaaaactaaaaaaaaaccgaaaaacgctcgaaacgaacccgcacgaattaaaaacccgaaatcatactcaacctaaa

SEQ ID NO: 26583 - DNA, 745 bp, Artificial Sequence
  chemically treated genomic DNA (Homo sapiens) CpG-island No: 26583
ttgggaaattatttttttttagattttgtagttcgtaggggaatggcgttttgtttttttaagaggtttttattaggggggcggggacggtcggcgttttttttttttatcggtagttgtgttcgtttttttttgagtgatagataagtaatttaattgaagaaagagattttagcgtgacggcgagtcggagtaatagaagtcgggttcggtttgtgcggggcggggttttaagaaggcggggcgggcggaggttggaggagtcgtcgagcggagattcgggagtaggagttgggtttaggtttgcgttttggtgagtgaggggcgttttgggggtcggggcgcggtaggcggtggagaggggttcggttcgaaagacgtagggaagagaggtcgggtcgagcgttgcggttagcgtttgtttcggaggttgaggggttgagagggcgggtttgggttggatcgcgtcggttcgttaggttttcgaggggtggcggttttgtcggggttttaggaagggaggagagatcgggttttggatttagaaggggcgtcgcgtggcggaagagggcgggttaggtagttaggtacgggggttgggttgggtagcggtcggagggagaaggagggaggcgttgggtgggaagatcggggaggggcggtaaggagagggttgggaagaagtcggagagcgttcggggcgggttcgtacgagttgaaagttcggggttatgtttaatttgga

SEQ ID NO: 26584 - DNA, 745 bp, Artificial Sequence
  chemically treated genomic DNA (Homo sapiens) CpG-island No: 26584
tccaaattaaacataaccccgaactttcaactcgtacgaacccgccccgaacgctctccgacttcttcccaaccctctccttaccgcccctccccgatcttcccacccaacgcctccctccttctccctccgaccgctacccaacccaacccccgtacctaactacctaacccgccctcttccgccacgcgacgccccttctaaatccaaaacccgatctctcctcccttcctaaaaccccgacaaaaccgccacccctcgaaaacctaacgaaccgacgcgatccaacccaaacccgccctctcaacccctcaacctccgaaacaaacgctaaccgcaacgctcgacccgacctctcttccctacgtctttcgaaccgaacccctctccaccgcctaccgcgccccgacccccaaaacgcccctcactcaccaaaacgcaaacctaaacccaactcctactcccgaatctccgctcgacgactcctccaacctccgcccgccccgccttcttaaaaccccgccccgcacaaaccgaacccgacttctattactccgactcgccgtcacgctaaaatctctttcttcaattaaattacttatctatcactcaaaaaaaaacgaacacaactaccgataaaaaaaaaaaacgccgaccgtccccgcccccctaataaaaacctcttaaaaaaacaaaacgccattcccctacgaactacaaaatctaaaaaaaaataatttcccaa

SEQ ID NO: 26585 - DNA, 1042 bp, Artificial Sequence
  chemically treated genomic DNA (Homo sapiens) CpG-island No: 26585
gtttcggcgttttttagcgttttatatttcgcggggtttggcgagtttcgtttcgtttacgtagttttttcggttatcgagttcggcgcggttttcgaagattttagattttaggcgttttcgttagttcggtttcgtcgaggagtttcggggcgcgttttcgagtttatcgcgtttcggtcgtttttaggatcgagatacgcggcgtcgttagaaggtttacgagggcgcgggttgcggggcgtacgagggtttagttttttcgtttgcgttttgttcggttttatttggcgcgtagttttaggtttagtttcgtttagtagcggcgttttttcgtcgggtcgcgtcgtttttcgtagtagcggcgtcgttttttcgtcgtttcggtttcggtcggattaggatatttttttagagacgttggttatggttcgtcgcggagcgatatcggtcgggaagcgtcggttgttttcgtgtttgttttcgtgattcgcgtcggcggttacgtgacgcgcgacggggttacgtgatgagcgacggcgattatgtgatttgtaacggtaattatcgaggttcggtcgcgcgggggtttttgggagtcgcgttttcggcgggtcgtggcgtcgttcgttttagagaatcgtcgcggttttgaggatttcgttttgtttacgcgattgtaaaggcggtttcgttgggttgagcgtcgagtgtttgggaggcgaatggtcgttttcgggatttcgggttcgggagtcggggcgagggaagcgttcggggtttgagggtaggagtcggttggaggggtttttttaggttcggtcgttcgcgtcgatcgtgacggagtcgcggtggggaagggaggagggaggtaggggcgagggtaggtttttttttgttataggcggcggttaaagacgtgaaggatgaaattagaagtttcgaagtatgtattcgttttcgtagtaggtattcgggcgagggtcggagtggaggttttttttaggtagttttagagggttttttcgtttaatgagaaaag

SEQ ID NO: 26586 - DNA, 1042 bp, Artificial Sequence
  chemically treated genomic DNA (Homo sapiens) CpG-island No: 26586
cttttctcattaaacgaaaaaaccctctaaaactacctaaaaaaaacctccactccgaccctcgcccgaatacctactacgaaaacgaatacatacttcgaaacttctaatttcatccttcacgtctttaaccgccgcctataacaaaaaaaaacctaccctcgcccctacctccctcctcccttccccaccgcgactccgtcacgatcgacgcgaacgaccgaacctaaaaaaacccctccaaccgactcctaccctcaaaccccgaacgcttccctcgccccgactcccgaacccgaaatcccgaaaacgaccattcgcctcccaaacactcgacgctcaacccaacgaaaccgcctttacaatcgcgtaaacaaaacgaaatcctcaaaaccgcgacgattctctaaaacgaacgacgccacgacccgccgaaaacgcgactcccaaaaacccccgcgcgaccgaacctcgataattaccgttacaaatcacataatcgccgtcgctcatcacgtaaccccgtcgcgcgtcacgtaaccgccgacgcgaatcacgaaaacaaacacgaaaacaaccgacgcttcccgaccgatatcgctccgcgacgaaccataaccaacgtctctaaaaaaatatcctaatccgaccgaaaccgaaacgacgaaaaaacgacgccgctactacgaaaaacgacgcgacccgacgaaaaaacgccgctactaaacgaaactaaacctaaaactacgcgccaaataaaaccgaacaaaacgcaaacgaaaaaactaaaccctcgtacgccccgcaacccgcgccctcgtaaaccttctaacgacgccgcgtatctcgatcctaaaaacgaccgaaacgcgataaactcgaaaacgcgccccgaaactcctcgacgaaaccgaactaacgaaaacgcctaaaatctaaaatcttcgaaaaccgcgccgaactcgataaccgaaaaaactacgtaaacgaaacgaaactcgccaaaccccgcgaaatataaaacgctaaaaaacgccgaaac

SEQ ID NO: 26587 - DNA, 1042 bp, Artificial Sequence
  chemically treated genomic DNA (Homo sapiens) CpG-island No: 26587
ttttttttattaggcgggaggattttttggggttgtttggaggaagtttttatttcgattttcgttcgagtgtttattgcgagggcggatgtatgtttcgggatttttaattttattttttacgtttttagtcgtcgtttatggtaaggaaaggtttgttttcgtttttgtttttttttttttttttttatcgcggtttcgttacgatcggcgcgggcgatcgggtttgggggagtttttttagtcggtttttgtttttaggtttcgggcgtttttttcgtttcgattttcgggttcgaggtttcgggggcggttattcgttttttaagtattcggcgtttagtttaacggggtcgtttttgtagtcgcgtgggtagaacggggtttttagggtcgcggcgattttttagggcgggcggcgttacgattcgtcgggagcgcggtttttaggagttttcgcgcgatcgggtttcggtggttgtcgttgtaggttatatggtcgtcgtcgtttattacgtggtttcgtcgcgcgttacgtggtcgtcggcgcgggttacgagaataaatacgggggtagtcggcgtttttcggtcggtgtcgtttcgcggcgggttatggttaacgtttttaagaaggtgttttggttcggtcgggatcgggacgacgaggaggcggcgtcgttgttgcggaggacggcgcggttcggcggggggacgtcgttgttgaacggggttgggtttggggttgcgcgttaggtgaggtcgggtagggcgtaggcggggaaattgagttttcgtgcgtttcgtagttcgcgttttcgtgagttttttggcggcgtcgcgtgtttcggttttggaggcgatcgaggcgcggtggattcgggaacgcgtttcggggtttttcggcggggtcgggttggcgggggcgtttggggtttggagttttcggaggtcgcgtcgggttcggtggtcgggagggttgcgtgggcgaggcggagttcgttagatttcgcggaatgtggggcgttgaggggcgtcggggt

SEQ ID NO: 26588 - DNA, 1042 bp, Artificial Sequence
  chemically treated genomic DNA (Homo sapiens) CpG-island No: 26588
accccgacgcccctcaacgccccacattccgcgaaatctaacgaactccgcctcgcccacgcaaccctcccgaccaccgaacccgacgcgacctccgaaaactccaaaccccaaacgcccccgccaacccgaccccgccgaaaaaccccgaaacgcgttcccgaatccaccgcgcctcgatcgcctccaaaaccgaaacacgcgacgccgccaaaaaactcacgaaaacgcgaactacgaaacgcacgaaaactcaatttccccgcctacgccctacccgacctcacctaacgcgcaaccccaaacccaaccccgttcaacaacgacgtccccccgccgaaccgcgccgtcctccgcaacaacgacgccgcctcctcgtcgtcccgatcccgaccgaaccaaaacaccttcttaaaaacgttaaccataacccgccgcgaaacgacaccgaccgaaaaacgccgactacccccgtatttattctcgtaacccgcgccgacgaccacgtaacgcgcgacgaaaccacgtaataaacgacgacgaccatataacctacaacgacaaccaccgaaacccgatcgcgcgaaaactcctaaaaaccgcgctcccgacgaatcgtaacgccgcccgccctaaaaaatcgccgcgaccctaaaaaccccgttctacccacgcgactacaaaaacgaccccgttaaactaaacgccgaatacttaaaaaacgaataaccgcccccgaaacctcgaacccgaaaatcgaaacgaaaaaaacgcccgaaacctaaaaacaaaaaccgactaaaaaaactcccccaaacccgatcgcccgcgccgatcgtaacgaaaccgcgataaaaaaaaaaaaaaaaaaacaaaaacgaaaacaaacctttccttaccataaacgacgactaaaaacgtaaaaaataaaattaaaaatcccgaaacatacatccgccctcgcaataaacactcgaacgaaaatcgaaataaaaacttcctccaaacaaccccaaaaaatcctcccgcctaataaaaaaaa

SEQ ID NO: 26589 - DNA, 916 bp, Artificial Sequence
  chemically treated genomic DNA (Homo sapiens) CpG-island No: 26589
gagcgaacgttcggcgttttggagagaatgtgggattcgaggcggagggaagagacggttgatattattttagggtagggacgatcgagatgggagaaattaaggcgagaatttattattcgggcgtagcgaatttagttcgtagttacgtggggaagcgcggttttgtttttaggtttcgttttatttacgcgttaggtttcgtttattttatcgtttttcgttttcgcgtttaggtttcgtttcgttttcgcgtagcgtaggcgtagatgcgttttttcgtttggcgtttttcgtagattcgcgttgagaggttcgcggagattcgttttagaggtttaagaaaattcgcgggagtttcgttcggatttaggaattcgtgttcggggttaatcggttgggtcgcgatcgcgtttcgttcggggtcgcggcggtcgtggggaatcggttgtagcgaatcggtggcgcgcggcgtttgagcgcgttgtagttattcgggagtcgggtttaggtcgggttgggggtcggggatcggggatcgggggttcggttgggtcgggttgggttttaggtttggttgggtcgggtttaggtcgggtaggagttcggtcggggttcgggtataggtcggggttcgggtttggatcgggggcgggttcgcgtgcggtttttttagtttcgaattcgtgtttttcgtaagttgttggtttttaaggggcggaggaatggcgattggagttattttttatcgtttagggagtcgggagggtcggtagttttcgcgggtcgagtttttcgttttgggtgcgaggacgcgtggggtcgcgttgtgttcggggaatatttattagtatttttagtttttatttttttttcgcgttagtggtattttcggttgagataattgagaatgttt

SEQ ID NO: 26590 - DNA, 916 bp, Artificial Sequence
  chemically treated genomic DNA (Homo sapiens) CpG-island No: 26590
aaacattctcaattatctcaaccgaaaataccactaacgcgaaaaaaaaataaaaactaaaaatactaataaatattccccgaacacaacgcgaccccacgcgtcctcgcacccaaaacgaaaaactcgacccgcgaaaactaccgaccctcccgactccctaaacgataaaaaataactccaatcgccattcctccgccccttaaaaaccaacaacttacgaaaaacacgaattcgaaactaaaaaaaccgcacgcgaacccgcccccgatccaaacccgaaccccgacctatacccgaaccccgaccgaactcctacccgacctaaacccgacccaaccaaacctaaaacccaacccgacccaaccgaacccccgatccccgatccccgacccccaacccgacctaaacccgactcccgaataactacaacgcgctcaaacgccgcgcgccaccgattcgctacaaccgattccccacgaccgccgcgaccccgaacgaaacgcgatcgcgacccaaccgattaaccccgaacacgaattcctaaatccgaacgaaactcccgcgaattttcttaaacctctaaaacgaatctccgcgaacctctcaacgcgaatctacgaaaaacgccaaacgaaaaaacgcatctacgcctacgctacgcgaaaacgaaacgaaacctaaacgcgaaaacgaaaaacgataaaataaacgaaacctaacgcgtaaataaaacgaaacctaaaaacaaaaccgcgcttccccacgtaactacgaactaaattcgctacgcccgaataataaattctcgccttaatttctcccatctcgatcgtccctaccctaaaataatatcaaccgtctcttccctccgcctcgaatcccacattctctccaaaacgccgaacgttcgctc

SEQ ID NO: 26591 - DNA, 916 bp, Artificial Sequence
  chemically treated genomic DNA (Homo sapiens) CpG-island No: 26591
gaatatttttagttgttttaatcgggagtgttattggcgcgagagggaggtggaggttagagatgttggtgagtgtttttcgggtatagcgcggttttacgcgttttcgtatttaaggcgggaaattcggttcgcgggagttgtcggttttttcggttttttgagcggtgagaggtggttttagtcgttattttttcgttttttagaaattaatagtttacggggaatacgggttcggggttagaggagtcgtacgcggattcgttttcgatttaggttcggatttcgatttgtattcggatttcgatcggatttttattcgatttggattcgatttaattagatttggagtttaattcgatttaatcggattttcgattttcgattttcgatttttaattcgatttggattcggttttcgggtgattgtagcgcgtttaggcgtcgcgcgttatcgattcgttgtagtcgattttttacggtcgtcgcggtttcggacgaaacgcgatcgcggtttagtcggttggtttcgagtacgagtttttgggttcgggcgaggttttcgcgggtttttttgagtttttggggcgggttttcgcgggttttttagcgcgaatttgcggaggacgttaggcgggagggcgtatttgcgtttgcgttgcgcggggacggggcggagtttggacgcgggagcggggggcggtggggtgggcggggtttgacgcgtgagtggggcggggtttgagggtagggtcgcgtttttttacgtggttgcgagttgggttcgttgcgttcgggtggtgggttttcgttttagttttttttatttcggtcgtttttattttggagtgatgttagtcgtttttttttttcgtttcgggttttatattttttttagaacgtcgagcgttcgttt

SEQ ID NO: 26592 - DNA, 916 bp, Artificial Sequence
  chemically treated genomic DNA (Homo sapiens) CpG-island No: 26592
aaacgaacgctcgacgttctaaaaaaaatataaaacccgaaacgaaaaaaaaaaacgactaacatcactccaaaataaaaacgaccgaaataaaaaaaactaaaacgaaaacccaccacccgaacgcaacgaacccaactcgcaaccacgtaaaaaaacgcgaccctaccctcaaaccccgccccactcacgcgtcaaaccccgcccaccccaccgccccccgctcccgcgtccaaactccgccccgtccccgcgcaacgcaaacgcaaatacgccctcccgcctaacgtcctccgcaaattcgcgctaaaaaacccgcgaaaacccgccccaaaaactcaaaaaaacccgcgaaaacctcgcccgaacccaaaaactcgtactcgaaaccaaccgactaaaccgcgatcgcgtttcgtccgaaaccgcgacgaccgtaaaaaatcgactacaacgaatcgataacgcgcgacgcctaaacgcgctacaatcacccgaaaaccgaatccaaatcgaattaaaaatcgaaaatcgaaaatcgaaaatccgattaaatcgaattaaactccaaatctaattaaatcgaatccaaatcgaataaaaatccgatcgaaatccgaatacaaatcgaaatccgaacctaaatcgaaaacgaatccgcgtacgactcctctaaccccgaacccgtattccccgtaaactattaatttctaaaaaacgaaaaaataacgactaaaaccacctctcaccgctcaaaaaaccgaaaaaaccgacaactcccgcgaaccgaatttcccgccttaaatacgaaaacgcgtaaaaccgcgctatacccgaaaaacactcaccaacatctctaacctccacctccctctcgcgccaataacactcccgattaaaacaactaaaaatattc

SEQ ID NO: 26593 - DNA, 568 bp, Artificial Sequence
  chemically treated genomic DNA (Homo sapiens) CpG-island No: 26593
tcgagtttcgtagtcggtcgagggtggcggcggtagcgttagaggtacggcggtacggcgggggggcggtatatatgttcggattgtgacgtttagtttggttgttgtggtaattttattttatcgtttcggtagcgcgattagttaatagtagagaataagttgggggattagttttgagtcgtcgggtgagggtggggatcggggggcgtttcggtagggggagtcgtcgaggcgttcgcgcgttcgcggattcgacggtcgagcgggtagtcggggtttggcgagttcgggcgtagggggaggcgaggaaatatcgttttcgcgtatttcgggtagagttagtcgtcgtcgttcgtttgcgaaggcgttgggtttcgagtttttaagggcgcggaggtagggtttttagggtagcgcgcggttcgtttttttattcggtttataggcgtcgggatttatttcgttttcggtttcggtttcggtacgtttttaattttttttttaaagaggattagaagaaaaatgtgttttatatttggggaaaagacgttttggagattgtggg

SEQ ID NO: 26594 - DNA, 568 bp, Artificial Sequence
  chemically treated genomic DNA (Homo sapiens) CpG-island No: 26594
cccacaatctccaaaacgtcttttccccaaatataaaacacatttttcttctaatcctctttaaaaaaaaaattaaaaacgtaccgaaaccgaaaccgaaaacgaaataaatcccgacgcctataaaccgaataaaaaaacgaaccgcgcgctaccctaaaaaccctacctccgcgcccttaaaaactcgaaacccaacgccttcgcaaacgaacgacgacgactaactctacccgaaatacgcgaaaacgatatttcctcgcctccccctacgcccgaactcgccaaaccccgactacccgctcgaccgtcgaatccgcgaacgcgcgaacgcctcgacgactccccctaccgaaacgccccccgatccccaccctcacccgacgactcaaaactaatcccccaacttattctctactattaactaatcgcgctaccgaaacgataaaataaaattaccacaacaaccaaactaaacgtcacaatccgaacatatataccgcccccccgccgtaccgccgtacctctaacgctaccgccgccaccctcgaccgactacgaaactcga

SEQ ID NO: 26595 - DNA, 568 bp, Artificial Sequence
  chemically treated genomic DNA (Homo sapiens) CpG-island No: 26595
tttatagtttttagagcgttttttttttaagtgtggaatatattttttttttaattttttttggagagggggttaggaacgtgtcgaggtcggagtcgggagcggggtgggtttcggcgtttgtgaatcgagtgggggagcgggtcgcgcgttgttttgaagattttgttttcgcgtttttgggggttcggggtttagcgttttcgtaggcgagcggcggcggttggttttgttcggggtgcgcgggggcggtgttttttcgtttttttttgcgttcgggttcgttaagtttcgattgttcgttcggtcgtcgggttcgcgggcgcgcggacgtttcgacggttttttttgtcggggcgtttttcggtttttatttttattcggcggtttaggattagttttttaatttgttttttgttgttaattagtcgcgttgtcggaacgatgggatggggttgttatagtaattagattggacgttataattcgggtatgtgtgtcgttttttcgtcgtgtcgtcgtgtttttggcgttgtcgtcgttattttcggtcggttgcgggattcgg

SEQ ID NO: 26596 - DNA, 568 bp, Artificial Sequence
  chemically treated genomic DNA (Homo sapiens) CpG-island No: 26596
ccgaatcccgcaaccgaccgaaaataacgacgacaacgccaaaaacacgacgacacgacgaaaaaacgacacacatacccgaattataacgtccaatctaattactataacaaccccatcccatcgttccgacaacgcgactaattaacaacaaaaaacaaattaaaaaactaatcctaaaccgccgaataaaaataaaaaccgaaaaacgccccgacaaaaaaaaccgtcgaaacgtccgcgcgcccgcgaacccgacgaccgaacgaacaatcgaaacttaacgaacccgaacgcaaaaaaaaacgaaaaaacaccgcccccgcgcaccccgaacaaaaccaaccgccgccgctcgcctacgaaaacgctaaaccccgaacccccaaaaacgcgaaaacaaaatcttcaaaacaacgcgcgacccgctcccccactcgattcacaaacgccgaaacccaccccgctcccgactccgacctcgacacgttcctaaccccctctccaaaaaaaattaaaaaaaaaatatattccacacttaaaaaaaaaacgctctaaaaactataaa

SEQ ID NO: 26597 - DNA, 803 bp, Artificial Sequence
  chemically treated genomic DNA (Homo sapiens) CpG-island No: 26597
cgtagtgatacgcggcggttgcggttttcgcgttggtcgcggtcgggttttggcgtttttgagttcgcgttcggttcgtaggacgtggagattacgtatttttgtaatacgtgcggatagtttttatgcgcgcgttgtcgcgacgagacgtatcgagtacgtatgttcgcgcgttacgatatcgtggttttgggttagcgaagtcgcgacgtgttttagaagtgtagtgagtgaggtttgcggggtcggggatttgggggtgggggcggggcgggtattgatcggagtttttattatcgttcgtcgttttcgtagcgttgtacgtagagttttattttttgttttttatcgataagaagttgttgttgtgtattcgttgttttcgcgatatgtagaagtgcgtataggggacgcgaggggagggggttgggggtcgttggagcgggttttattcgtcgttttttgtagggagagtcgggtatattgcgtggatttggaatcggtttacgtgtagggttgcgagcggttggagtaggcggtgttggtgagcgtaggggtttggcgcgcggggtcgcgcggcggcgatcgcgagtttgattacgttttgtttttaggtcgtgaaggttttgtagacggttacgcgggaggttatcgcgttgttgtaggttatggtggaggaggtgcggtatagcgtcgtcgaggaggaggacgttatttacgtttttttcggtagtatgtaggtgaggggtgggggttgggggataaacgatttagtcgggatttggtgatatagggttggtttt

SEQ ID NO: 26598 - DNA, 803 bp, Artificial Sequence
  chemically treated genomic DNA (Homo sapiens) CpG-island No: 26598
aaaaccaaccctatatcaccaaatcccgactaaatcgtttatcccccaacccccacccctcacctacatactaccgaaaaaaacgtaaataacgtcctcctcctcgacgacgctataccgcacctcctccaccataacctacaacaacgcgataacctcccgcgtaaccgtctacaaaaccttcacgacctaaaaacaaaacgtaatcaaactcgcgatcgccgccgcgcgaccccgcgcgccaaacccctacgctcaccaacaccgcctactccaaccgctcgcaaccctacacgtaaaccgattccaaatccacgcaatatacccgactctccctacaaaaaacgacgaataaaacccgctccaacgacccccaaccccctcccctcgcgtcccctatacgcacttctacatatcgcgaaaacaacgaatacacaacaacaacttcttatcgataaaaaacaaaaaataaaactctacgtacaacgctacgaaaacgacgaacgataataaaaactccgatcaatacccgccccgcccccacccccaaatccccgaccccgcaaacctcactcactacacttctaaaacacgtcgcgacttcgctaacccaaaaccacgatatcgtaacgcgcgaacatacgtactcgatacgtctcgtcgcgacaacgcgcgcataaaaactatccgcacgtattacaaaaatacgtaatctccacgtcctacgaaccgaacgcgaactcaaaaacgccaaaacccgaccgcgaccaacgcgaaaaccgcaaccgccgcgtatcactacg

SEQ ID NO: 26599 - DNA, 803 bp, Artificial Sequence
  chemically treated genomic DNA (Homo sapiens) CpG-island No: 26599
gggattagttttgtgttattaggtttcggttgggtcgtttattttttaatttttattttttatttgtatgttgtcgaagagggcgtggatagcgttttttttttcggcggcgttgtgtcgtattttttttattatggtttgtagtagcgcgatggtttttcgcgtggtcgtttgtagggtttttacggtttggggatagggcgtggttaggttcgcgatcgtcgtcgcgcggtttcgcgcgttaggtttttgcgtttattagtatcgtttgttttagtcgttcgtagttttgtacgtaagtcgattttaggtttacgtagtgtgttcggttttttttgtagaaggcggcgggtgaggttcgttttagcggtttttagtttttttttttcgcgttttttgtacgtatttttgtatgtcgcggaagtagcggatgtataatagtaattttttgtcggtggagaataagaggtagggttttgcgtgtagcgttgcgggggcggcgggcggtggtgagggtttcggttagtgttcgtttcgtttttatttttaagttttcggtttcgtaagttttatttattgtatttttggggtacgtcgcggtttcgttgatttagggttacgatgtcgtggcgcgcgaatatgcgtgttcggtgcgtttcgtcgcggtagcgcgcgtataggggttgttcgtacgtgttgtagaagtacgtggtttttacgttttgcgggtcgagcgcgggtttaggagcgttagagttcgatcgcggttagcgcgggaatcgtagtcgtcgcgtgttattgcg

SEQ ID NO: 26600 - DNA, 803 bp, Artificial Sequence
  chemically treated genomic DNA (Homo sapiens) CpG-island No: 26600
cgcaataacacgcgacgactacgattcccgcgctaaccgcgatcgaactctaacgctcctaaacccgcgctcgacccgcaaaacgtaaaaaccacgtacttctacaacacgtacgaacaacccctatacgcgcgctaccgcgacgaaacgcaccgaacacgcatattcgcgcgccacgacatcgtaaccctaaatcaacgaaaccgcgacgtaccccaaaaatacaataaataaaacttacgaaaccgaaaacttaaaaataaaaacgaaacgaacactaaccgaaaccctcaccaccgcccgccgcccccgcaacgctacacgcaaaaccctacctcttattctccaccgacaaaaaattactattatacatccgctacttccgcgacatacaaaaatacgtacaaaaaacgcgaaaaaaaaaaactaaaaaccgctaaaacgaacctcacccgccgccttctacaaaaaaaaccgaacacactacgtaaacctaaaatcgacttacgtacaaaactacgaacgactaaaacaaacgatactaataaacgcaaaaacctaacgcgcgaaaccgcgcgacgacgatcgcgaacctaaccacgccctatccccaaaccgtaaaaaccctacaaacgaccacgcgaaaaaccatcgcgctactacaaaccataataaaaaaaatacgacacaacgccgccgaaaaaaaaaacgctatccacgccctcttcgacaacatacaaataaaaaataaaaattaaaaaataaacgacccaaccgaaacctaataacacaaaactaatccc

SEQ ID NO: 26601 - DNA, 690 bp, Artificial Sequence
  chemically treated genomic DNA (Homo sapiens) CpG-island No: 26601
ttttgcgatttgaattcgcggatgaagagcgcgcgcgtgggaggttattgcgggttcggggagaaaggtgtttacgcgtcgcgttaagcggatcgtcgttcgtttcgtcggttttcgtcggttttcgtcggtttgtatttggtagcgaggcggtcgatagagtagtagtagtagcgcgttgagttcggttacgtagagcgttagttcggtgcggttttgtaggtcggcgcgcgtgagtagcggtagcgcgagtatcgaggcgtttagtaggaaggtggcgaggttgagacgcgttttagagttcggcggagttcgcgtcgcgtagttcgttatggcgtcgggcggcggattagcgggcggcggcgtcggttgtagttcggagaaacgcgtcggttgcgtttgcgtattgtgtcgtcgatgtcggttcgggaagggtagttgttcgtagttgcgcgtcgtttgttagttttcgcgagaatttcggttcgttttgttgttgttcggaatttggcgggagcgtttcgttcgttcgttttttttcgtttttcggggatattcgggttttgagttagattttgtgtcgggcgggggtcgggaagtggtgggagaagtcgtcgttcgcgtttgtttaaatttagttttaaatttaggaggtttttgttttaagaagtaatgtaaagtttgaaacga

SEQ ID NO: 26602 - DNA, 690 bp, Artificial Sequence
  chemically treated genomic DNA (Homo sapiens) CpG-island No: 26602
tcgtttcaaactttacattacttcttaaaacaaaaacctcctaaatttaaaactaaatttaaacaaacgcgaacgacgacttctcccaccacttcccgacccccgcccgacacaaaatctaactcaaaacccgaatatccccgaaaaacgaaaaaaaacgaacgaacgaaacgctcccgccaaattccgaacaacaacaaaacgaaccgaaattctcgcgaaaactaacaaacgacgcgcaactacgaacaactacccttcccgaaccgacatcgacgacacaatacgcaaacgcaaccgacgcgtttctccgaactacaaccgacgccgccgcccgctaatccgccgcccgacgccataacgaactacgcgacgcgaactccgccgaactctaaaacgcgtctcaacctcgccaccttcctactaaacgcctcgatactcgcgctaccgctactcacgcgcgccgacctacaaaaccgcaccgaactaacgctctacgtaaccgaactcaacgcgctactactactactctatcgaccgcctcgctaccaaatacaaaccgacgaaaaccgacgaaaaccgacgaaacgaacgacgatccgcttaacgcgacgcgtaaacacctttctccccgaacccgcaataacctcccacgcgcgcgctcttcatccgcgaattcaaatcgcaaaa

SEQ ID NO: 26603 - DNA, 690 bp, Artificial Sequence
  chemically treated genomic DNA (Homo sapiens) CpG-island No: 26603
tcgttttaaattttatattgttttttgggataggaattttttgagtttgggattaagtttggatagacgcgggcggcgattttttttattatttttcggttttcgttcggtatagagtttggtttagagttcggatgttttcgaggggcggggaggggcgggcgggcggggcgttttcgttaaatttcggatagtaatagggcgggtcggagttttcgcgagaattggtaggcggcgcgtagttgcgggtagttgtttttttcgggtcggtatcggcggtatagtgcgtaggcgtagtcggcgcgttttttcgggttatagtcggcgtcgtcgttcgttagttcgtcgttcggcgttatggcgggttgcgcggcgcgggtttcgtcgggttttgaggcgcgttttagtttcgttatttttttgttgggcgtttcggtgttcgcgttgtcgttgtttacgcgcgtcggtttgtagggtcgtatcgggttggcgttttacgtggtcgggtttaacgcgttgttgttgttgttttatcggtcgtttcgttattaggtgtaggtcggcgggggtcggcgggggtcggcggggcgggcggcggttcgtttggcgcggcgcgtgggtattttttttttcgggttcgtagtggttttttacgcgcgcgttttttattcgcgagtttaggtcgtagga

SEQ ID NO: 26604 - DNA, 690 bp, Artificial Sequence
  chemically treated genomic DNA (Homo sapiens) CpG-island No: 26604
tcctacgacctaaactcgcgaataaaaaacgcgcgcgtaaaaaaccactacgaacccgaaaaaaaaaatacccacgcgccgcgccaaacgaaccgccgcccgccccgccgacccccgccgacccccgccgacctacacctaataacgaaacgaccgataaaacaacaacaacaacgcgttaaacccgaccacgtaaaacgccaacccgatacgaccctacaaaccgacgcgcgtaaacaacgacaacgcgaacaccgaaacgcccaacaaaaaaataacgaaactaaaacgcgcctcaaaacccgacgaaacccgcgccgcgcaacccgccataacgccgaacgacgaactaacgaacgacgacgccgactataacccgaaaaaacgcgccgactacgcctacgcactataccgccgataccgacccgaaaaaaacaactacccgcaactacgcgccgcctaccaattctcgcgaaaactccgacccgccctattactatccgaaatttaacgaaaacgccccgcccgcccgcccctccccgcccctcgaaaacatccgaactctaaaccaaactctataccgaacgaaaaccgaaaaataataaaaaaaatcgccgcccgcgtctatccaaacttaatcccaaactcaaaaaattcctatcccaaaaaacaatataaaatttaaaacga

SEQ ID NO: 26605 - DNA, 1060 bp, Artificial Sequence
  chemically treated genomic DNA (Homo sapiens) CpG-island No: 26605
ggcgcggcgggtagtgtcggggttggggtcggggggtaacggaggcggaagtttatttagtggattagggcggagcgacgtttgagaatttcgtttaggttttgaggcgggtttcgtttttcgtagttaaagtagaatattgcgaattagagtattttgcggttaattttttattgtttaagaaatattaagttatttacgtgagcgttttttcgttttcggttcgatgcgtttggaattttaggggacgggtttgggaggggtggtggttttgggaacggcgggtgtcggggttcgggcgggggtagtttcgtggtttttttatggcggttcggatttaggagagggggcgggttcggtatttagcggcgggtcgcgagagttgcgcggagggttattggtttgttaatgttttcgagttgaaaggcgcgggcggcggtttatagggaaggattgtaattagaggataaattgtttcgttgtttcgtagttcgagaacgcggggagggggaggttcgtcggggcgcgacgcgcgttaggtttttgtgtagatgtgtagtagttggaagttcgcgtttggcggggcgttcggagtttggtttcgagggggcgggggcgggcgcgggcgtcgttttgtggggttcgtataatgtttttaatattcggttgttttttttgtgttcggtcgcgtcgttcgttcgtttcgcggtgtttttatatcgcgtcgttatcgttttaagttcggagcgagtcgtatggaggacgtttcggttcggtcggttttggcgttttaaagttgttcggcgcgtgttagcgttcgtcgtttggtttcggttttcgtcgtttttttaggttcgggtcggttcggatttggttcgcgggttttgcggttcgggttggatagagttttagagttgttgttgtcgttgtttcggtttgaaagggggagggcgtggcgcgattttttacgttgtttggcgtttgggaacgtcgttattttgggaagggtaggcgggggcgggttggggggagatgttttggtttgatagagttggggggt

SEQ ID NO: 26606 - DNA, 1060 bp, Artificial Sequence
  chemically treated genomic DNA (Homo sapiens) CpG-island No: 26606
accccccaactctatcaaaccaaaacatctccccccaacccgcccccgcctacccttcccaaaataacgacgttcccaaacgccaaacaacgtaaaaaatcgcgccacgccctccccctttcaaaccgaaacaacgacaacaacaactctaaaactctatccaacccgaaccgcaaaacccgcgaaccaaatccgaaccgacccgaacctaaaaaaacgacgaaaaccgaaaccaaacgacgaacgctaacacgcgccgaacaactttaaaacgccaaaaccgaccgaaccgaaacgtcctccatacgactcgctccgaacttaaaacgataacgacgcgatataaaaacaccgcgaaacgaacgaacgacgcgaccgaacacaaaaaaaacaaccgaatattaaaaacattatacgaaccccacaaaacgacgcccgcgcccgcccccgccccctcgaaaccaaactccgaacgccccgccaaacgcgaacttccaactactacacatctacacaaaaacctaacgcgcgtcgcgccccgacgaacctccccctccccgcgttctcgaactacgaaacaacgaaacaatttatcctctaattacaatccttccctataaaccgccgcccgcgcctttcaactcgaaaacattaacaaaccaataaccctccgcgcaactctcgcgacccgccgctaaataccgaacccgccccctctcctaaatccgaaccgccataaaaaaaccacgaaactacccccgcccgaaccccgacacccgccgttcccaaaaccaccacccctcccaaacccgtcccctaaaattccaaacgcatcgaaccgaaaacgaaaaaacgctcacgtaaataacttaatatttcttaaacaataaaaaattaaccgcaaaatactctaattcgcaatattctactttaactacgaaaaacgaaacccgcctcaaaacctaaacgaaattctcaaacgtcgctccgccctaatccactaaataaacttccgcctccgttaccccccgaccccaaccccgacactacccgccgcgcc

SEQ ID NO: 26607 - DNA, 1060 bp, Artificial Sequence
  chemically treated genomic DNA (Homo sapiens) CpG-island No: 26607
gttttttagttttattaagttagggtatttttttttagttcgttttcgtttattttttttaggatagcggcgtttttaggcgttaagtagcgtggagaatcgcgttacgtttttttttttttaggtcgaggtagcggtaatagtagttttggggttttgtttagttcggatcgtagggttcgcgggttagattcgggtcgattcgggtttgggagggcggcgggggtcgagattaggcggcgggcgttggtacgcgtcgggtagttttgaagcgttaggatcggtcgggtcggggcgttttttatgcgattcgtttcgagtttggggcggtggcggcgcggtataaaggtatcgcggggcgggcgggcggcgcggtcgggtataaaaggggtagtcgagtgttaagggtattgtgcgggttttataaagcggcgttcgcgttcgttttcgttttttcggggttaaatttcgggcgtttcgttaggcgcggatttttagttgttgtatatttgtatagaggtttggcgcgcgtcgcgtttcggcgggttttttttttttcgcgttttcgagttgcggggtagcggggtaatttgttttttaattataatttttttttataaatcgtcgttcgcgttttttaattcgagggtattagtaaattaatggtttttcgcgtagttttcgcggttcgtcgttgggtgtcgggttcgtttttttttttgagttcgggtcgttataaaggggttacgaggttgttttcgttcgaatttcgatattcgtcgtttttagggttattattttttttaagttcgttttttgggattttaggcgtatcgggtcgggggcggggggacgtttacgtggatagtttagtgttttttaagtagtggaaaattgatcgtaaaatgttttaattcgtaatgttttgttttggttgcgggaggcgaggttcgttttaaggtttgggcggaatttttaggcgtcgtttcgttttggtttattgaatggattttcgttttcgttgtttttcgattttaatttcgatattgttcgtcgcgtt

SEQ ID NO: 26608 - DNA, 1060 bp, Artificial Sequence
  chemically treated genomic DNA (Homo sapiens) CpG-island No: 26608
aacgcgacgaacaatatcgaaattaaaatcgaaaaacaacgaaaacgaaaatccattcaataaaccaaaacgaaacgacgcctaaaaattccgcccaaaccttaaaacgaacctcgcctcccgcaaccaaaacaaaacattacgaattaaaacattttacgatcaattttccactacttaaaaaacactaaactatccacgtaaacgtccccccgcccccgacccgatacgcctaaaatcccaaaaaacgaacttaaaaaaaataataaccctaaaaacgacgaatatcgaaattcgaacgaaaacaacctcgtaacccctttataacgacccgaactcaaaaaaaaaaacgaacccgacacccaacgacgaaccgcgaaaactacgcgaaaaaccattaatttactaataccctcgaattaaaaaacgcgaacgacgatttataaaaaaaaattataattaaaaaacaaattaccccgctaccccgcaactcgaaaacgcgaaaaaaaaaaaacccgccgaaacgcgacgcgcgccaaacctctatacaaatatacaacaactaaaaatccgcgcctaacgaaacgcccgaaatttaaccccgaaaaaacgaaaacgaacgcgaacgccgctttataaaacccgcacaatacccttaacactcgactaccccttttatacccgaccgcgccgcccgcccgccccgcgatacctttataccgcgccgccaccgccccaaactcgaaacgaatcgcataaaaaacgccccgacccgaccgatcctaacgcttcaaaactacccgacgcgtaccaacgcccgccgcctaatctcgacccccgccgccctcccaaacccgaatcgacccgaatctaacccgcgaaccctacgatccgaactaaacaaaaccccaaaactactattaccgctacctcgacctaaaaaaaaaaaaacgtaacgcgattctccacgctacttaacgcctaaaaacgccgctatcctaaaaaaaataaacgaaaacgaactaaaaaaaaataccctaacttaataaaactaaaaaac

SEQ ID NO: 26609 - DNA, 839 bp, Artificial Sequence
  chemically treated genomic DNA (Homo sapiens) CpG-island No: 26609
gcgcgcggggcggaggcgggcgtttttggtgttgcggtttcggagagcggtttggtttgtttggcgttcgtggggaggcgtcggcggttttaggacgcggagtttagcgagttcgagtgtagcgtggcgtagttcgaggattcggagggggaatttaggaagttgttggtgttgtcgtcgtcgttcgtcgcgcgtagtttttcgggttcgttttacgacgcgtttaggtcggggcgtagagagtcggcgtgcgagtgcgtagaggggcgtggttttgggtttcgttgggcgttgtttgggggcgtcggggttttttcgggatttgcgtcgtcgggggcggcgggcgtagcggggaagggttcgggcgggcggcgtagggtttgtggttcgtattcgaaggcggttagggcgaaggcgtcgggtagtagcgaggtcgaggcggagcgggggtcgggttcggggcggcggcgcgggttgtcggggggcgagtcgcgggtttttcgcgggtcgttatttacggtcgagggtcgtagcgatagtaggttttcggtcgagcggcggcgcgcgcgggatagtggtgcgtttttcgcgaaggttaggaggttggcgcggggtcgttcgggttcggtaggtagtattaggtgcgttagggcggataggtttttgtcggagttttagcgcggtaggaaggcgggtagcgggacggcggtttatacgttcgtatcgtcgtgggagaagcgtcgcgtgggcgggatttgttaggacgcggttggtttttatttcgagttgtttttttgggaaacggggataaatttttttttattttggggaaaggtttt

SEQ ID NO: 26610 - DNA, 839 bp, Artificial Sequence
  chemically treated genomic DNA (Homo sapiens) CpG-island No: 26610
aaaacctttccccaaaataaaaaaaaatttatccccgtttcccaaaaaaacaactcgaaataaaaaccaaccgcgtcctaacaaatcccgcccacgcgacgcttctcccacgacgatacgaacgtataaaccgccgtcccgctacccgccttcctaccgcgctaaaactccgacaaaaacctatccgccctaacgcacctaatactacctaccgaacccgaacgaccccgcgccaacctcctaaccttcgcgaaaaacgcaccactatcccgcgcgcgccgccgctcgaccgaaaacctactatcgctacgaccctcgaccgtaaataacgacccgcgaaaaacccgcgactcgccccccgacaacccgcgccgccgccccgaacccgacccccgctccgcctcgacctcgctactacccgacgccttcgccctaaccgccttcgaatacgaaccacaaaccctacgccgcccgcccgaacccttccccgctacgcccgccgcccccgacgacgcaaatcccgaaaaaaccccgacgcccccaaacaacgcccaacgaaacccaaaaccacgcccctctacgcactcgcacgccgactctctacgccccgacctaaacgcgtcgtaaaacgaacccgaaaaactacgcgcgacgaacgacgacgacaacaccaacaacttcctaaattccccctccgaatcctcgaactacgccacgctacactcgaactcgctaaactccgcgtcctaaaaccgccgacgcctccccacgaacgccaaacaaaccaaaccgctctccgaaaccgcaacaccaaaaacgcccgcctccgccccgcgcgc

SEQ ID NO: 26611 - DNA, 839 bp, Artificial Sequence
  chemically treated genomic DNA (Homo sapiens) CpG-island No: 26611
aaggtttttttttagggtggagaagggtttgttttcgttttttaggagggtagttcggggtaaaagttagtcgcgttttgataggtttcgtttacgcggcgttttttttacgacgatgcggacgtgtgggtcgtcgtttcgttgttcgtttttttgtcgcgttggggtttcggtaaggatttgttcgttttggcgtatttggtgttgtttgtcgggttcgagcggtttcgcgttagttttttggttttcgcggaggacgtattattgtttcgcgcgcgtcgtcgttcggtcgagagtttgttgtcgttgcggttttcggtcgtggatagcggttcgcggggagttcgcgattcgtttttcggtagttcgcgtcgtcgtttcgggttcggttttcgtttcgtttcggtttcgttgttgttcgacgttttcgttttgatcgttttcgagtgcgagttataggttttgcgtcgttcgttcgggttttttttcgttgcgttcgtcgttttcgacggcgtagatttcggagaggtttcgacgtttttaagtagcgtttagcggagtttagggttacgtttttttgcgtattcgtacgtcggttttttgcgtttcggtttgagcgcgtcgtggggcgagttcggggggttgcgcgcggcgggcggcggcggtagtattagtagttttttgagtttttttttcgagttttcgggttacgttacgttgtattcggattcgttgggtttcgcgttttaggatcgtcggcgtttttttacggacgttaggtaggttaggtcgtttttcggggtcgtagtattaaagacgttcgttttcgtttcgcgcgt

SEQ ID NO: 26612 - DNA, 839 bp, Artificial Sequence
  chemically treated genomic DNA (Homo sapiens) CpG-island No: 26612
acgcgcgaaacgaaaacgaacgtctttaatactacgaccccgaaaaacgacctaacctacctaacgtccgtaaaaaaacgccgacgatcctaaaacgcgaaacccaacgaatccgaatacaacgtaacgtaacccgaaaactcgaaaaaaaaactcaaaaaactactaatactaccgccgccgcccgccgcgcgcaaccccccgaactcgccccacgacgcgctcaaaccgaaacgcaaaaaaccgacgtacgaatacgcaaaaaaacgtaaccctaaactccgctaaacgctacttaaaaacgtcgaaacctctccgaaatctacgccgtcgaaaacgacgaacgcaacgaaaaaaaacccgaacgaacgacgcaaaacctataactcgcactcgaaaacgatcaaaacgaaaacgtcgaacaacaacgaaaccgaaacgaaacgaaaaccgaacccgaaacgacgacgcgaactaccgaaaaacgaatcgcgaactccccgcgaaccgctatccacgaccgaaaaccgcaacgacaacaaactctcgaccgaacgacgacgcgcgcgaaacaataatacgtcctccgcgaaaaccaaaaaactaacgcgaaaccgctcgaacccgacaaacaacaccaaatacgccaaaacgaacaaatccttaccgaaaccccaacgcgacaaaaaaacgaacaacgaaacgacgacccacacgtccgcatcgtcgtaaaaaaaacgccgcgtaaacgaaacctatcaaaacgcgactaacttttaccccgaactaccctcctaaaaaacgaaaacaaacccttctccaccctaaaaaaaaacctt

SEQ ID NO: 26613 - DNA, 507 bp, Artificial Sequence
  chemically treated genomic DNA (Homo sapiens) CpG-island No: 26613
agcggcgttgttcgtagttagggttagcgttttcgaggggtagaggcggggtcggcggtggcgaattcgcggttttcggtaggggcggcggcggcggtgggggcggcggtggtagttttttggacgttttggggttcgcggcgtagtcgttaggaatatggtttttaggaagtagcgtcgtttgcgggggagcggaggggttttcgagtgagtcgcgggcggtagggtcgaggcgcgggtagtcggcgcgcgcgggttggcgggtacgtattttttcgttgtgcgttatgttcgggcgtgcggttagcgtttcgtcggggtagcggtttagttgtcggtagtagtttttcgtgttgggttgtttgttgaaggcgcggggtttgcggttggagttttgttttcgtagttcgtcgtggtcgttataggagtttagttgcgggaagatagtgatcggtggggttcgggtatttgttcggtaggcgttttttacgtttttttatttagttt

SEQ ID NO: 26614 - DNA, 507 bp, Artificial Sequence
  chemically treated genomic DNA (Homo sapiens) CpG-island No: 26614
aaactaaataaaaaaacgtaaaaaacgcctaccgaacaaatacccgaaccccaccgatcactatcttcccgcaactaaactcctataacgaccacgacgaactacgaaaacaaaactccaaccgcaaaccccgcgccttcaacaaacaacccaacacgaaaaactactaccgacaactaaaccgctaccccgacgaaacgctaaccgcacgcccgaacataacgcacaacgaaaaaatacgtacccgccaacccgcgcgcgccgactacccgcgcctcgaccctaccgcccgcgactcactcgaaaacccctccgctcccccgcaaacgacgctacttcctaaaaaccatattcctaacgactacgccgcgaaccccaaaacgtccaaaaaactaccaccgccgcccccaccgccgccgccgcccctaccgaaaaccgcgaattcgccaccgccgaccccgcctctacccctcgaaaacgctaaccctaactacgaacaacgccgct

SEQ ID NO: 26615 - DNA, 507 bp, Artificial Sequence
  chemically treated genomic DNA (Homo sapiens) CpG-island No: 26615
gagttgggtggggaggcgtggggggcgtttatcgggtaggtgttcgagttttatcggttattgttttttcgtagttgagtttttgtgacggttacgacgggttgcggaggtaggattttagtcgtaagtttcgcgtttttagtaagtagtttagtacgggggattattatcggtagttgggtcgttgtttcggcgagacgttggtcgtacgttcgggtatggcgtatagcgaggaggtgcgtgttcgttagttcgcgcgcgtcggttgttcgcgtttcggttttgtcgttcgcggtttattcgaaggttttttcgttttttcgtaggcggcgttgttttttgggaattatgtttttaacggttgcgtcgcggattttaaggcgtttagggagttgttatcgtcgtttttatcgtcgtcgtcgtttttgtcggaggtcgcgagttcgttatcgtcggtttcgtttttgtttttcgagagcgttggttttggttgcgggtagcgtcgtt

SEQ ID NO: 26616 - DNA, 507 bp, Artificial Sequence
  chemically treated genomic DNA (Homo sapiens) CpG-island No: 26616
aacgacgctacccgcaaccaaaaccaacgctctcgaaaaacaaaaacgaaaccgacgataacgaactcgcgacctccgacaaaaacgacgacgacgataaaaacgacgataacaactccctaaacgccttaaaatccgcgacgcaaccgttaaaaacataattcccaaaaaacaacgccgcctacgaaaaaacgaaaaaaccttcgaataaaccgcgaacgacaaaaccgaaacgcgaacaaccgacgcgcgcgaactaacgaacacgcacctcctcgctatacgccatacccgaacgtacgaccaacgtctcgccgaaacaacgacccaactaccgataataatcccccgtactaaactacttactaaaaacgcgaaacttacgactaaaatcctacctccgcaacccgtcgtaaccgtcacaaaaactcaactacgaaaaaacaataaccgataaaactcgaacacctacccgataaacgccccccacgcctccccacccaactc

SEQ ID NO: 26617 - DNA, 623 bp, Artificial Sequence
  chemically treated genomic DNA (Homo sapiens) CpG-island No: 26617
gtcggtggcggaggcgtcgtgggtcggtgtggcgtcgttgcgggcgcgggtcgcggcggggagggcggttttttttattaggaagcgtagatagtgtagttttttagcgcgggtcgcgtggtgtacgggtagcgcgtttagcgggtcgcgtagcgagggttttaggaggtttgcggcgtgtagcgattttagtacgtttagttcgttttgtcgcgtcgtttgtagcgtttgttttagggttatggtgtcgcgtgcggcgtcgcgatttcgtatttagcgttttttttaggacgttatgtacgtgtttttgcgggttagaggagttcgcggtgcggtcgtcggggatttgcgggtcgggaggcggagcggttgtgggtttggttttcgtttcgcgttgtttggcgtttcgtttcgtcgcgttttggggtcggagttcgcggacgtcggtttaagattcgggttcgtttttatttcgtttcgtttcgtttcgtagttttcgttcgagtttttcgttcgttttcgtcgcgacgcggggatattcgtgcgattggggtaaggtgtttaggggttttttttttaatttgttttacgtaatagttgagattttagagggtagtaaaatt

SEQ ID NO: 26618 - DNA, 623 bp, Artificial Sequence
  chemically treated genomic DNA (Homo sapiens) CpG-island No: 26618
aattttactaccctctaaaatctcaactattacgtaaaacaaattaaaaaaaaaacccctaaacaccttaccccaatcgcacgaatatccccgcgtcgcgacgaaaacgaacgaaaaactcgaacgaaaactacgaaacgaaacgaaacgaaataaaaacgaacccgaatcttaaaccgacgtccgcgaactccgaccccaaaacgcgacgaaacgaaacgccaaacaacgcgaaacgaaaaccaaacccacaaccgctccgcctcccgacccgcaaatccccgacgaccgcaccgcgaactcctctaacccgcaaaaacacgtacataacgtcctaaaaaaaacgctaaatacgaaatcgcgacgccgcacgcgacaccataaccctaaaacaaacgctacaaacgacgcgacaaaacgaactaaacgtactaaaatcgctacacgccgcaaacctcctaaaaccctcgctacgcgacccgctaaacgcgctacccgtacaccacgcgacccgcgctaaaaaactacactatctacgcttcctaataaaaaaaaccgccctccccgccgcgacccgcgcccgcaacgacgccacaccgacccacgacgcctccgccaccgac

SEQ ID NO: 26619 - DNA, 623 bp, Artificial Sequence
  chemically treated genomic DNA (Homo sapiens) CpG-island No: 26619
agttttgttgttttttggggttttaattgttacgtgaggtaaattaggagagaagtttttgggtattttgttttagtcgtacgagtgttttcgcgtcgcggcgggggcgggcggggaattcgggcggaggttgcggggcggggcggggcggggtgggggcgggttcgagttttaagtcggcgttcgcgggtttcggttttagagcgcggcggagcggagcgttaggtagcgcggagcggaggttaggtttatagtcgtttcgtttttcggttcgtagattttcgacggtcgtatcgcgggtttttttggttcgtaagaatacgtgtatggcgttttggggaaggcgttgagtgcggagtcgcggcgtcgtacgcggtattatggttttggagtaggcgttgtaggcggcgcggtagggcgagttggacgtgttgaggtcgttgtacgtcgtaggttttttggggttttcgttgcgcgattcgttggacgcgttgttcgtgtattacgcggttcgcgttgggaagttgtattgtttgcgttttttggtggaggaagtcgtttttttcgtcgcggttcgcgttcgtaacggcgttatatcggtttacgacgttttcgttatcggt

SEQ ID NO: 26620 - DNA, 623 bp, Artificial Sequence
  chemically treated genomic DNA (Homo sapiens) CpG-island No: 26620
accgataacgaaaacgtcgtaaaccgatataacgccgttacgaacgcgaaccgcgacgaaaaaaacgacttcctccaccaaaaaacgcaaacaatacaacttcccaacgcgaaccgcgtaatacacgaacaacgcgtccaacgaatcgcgcaacgaaaaccccaaaaaacctacgacgtacaacgacctcaacacgtccaactcgccctaccgcgccgcctacaacgcctactccaaaaccataataccgcgtacgacgccgcgactccgcactcaacgccttccccaaaacgccatacacgtattcttacgaaccaaaaaaacccgcgatacgaccgtcgaaaatctacgaaccgaaaaacgaaacgactataaacctaacctccgctccgcgctacctaacgctccgctccgccgcgctctaaaaccgaaacccgcgaacgccgacttaaaactcgaacccgcccccaccccgccccgccccgccccgcaacctccgcccgaattccccgcccgcccccgccgcgacgcgaaaacactcgtacgactaaaacaaaatacccaaaaacttctctcctaatttacctcacgtaacaattaaaaccccaaaaaacaacaaaact

SEQ ID NO: 26621 - DNA, 1289 bp, Artificial Sequence
  chemically treated genomic DNA (Homo sapiens) CpG-island No: 26621
gtcgttatttcgcggtagataggacgtaaaggcggggagcgggattttcgggggcgtcgcggttttttttttcggttttattttgcgtaggaataaaggtaggaggtgggattagcgggcggtcggatttcgcggggcggggcggggcgggcgagtcgtttttttaaagttcggtcgcgggcggggcgcgtattcgtttggtattagttcgggtcgcgttcgggattttatttcggatttcggtttttttttgcgtggggttcgtagttgttatcgttttttcgcggagtatggggttgtttcgtcgggtaggggacgcggcggagttgcgtaaggtgggtatcggggattgggggcggggttggggatttcggggattcgtttaattatcgcgtcgttcgttcgtagagtttgaagtcgttgttggagaagcgtcggcgcgcgcgtattaattagagtttgagttagtttaaggggtttattttgtcgttgttgggtcgggaggtgagcgcgttcgggcggagggtagagggttttggggcgcggagcgggggtagggggacggggtgtttttgcgggaggaatttattagggggtttcgcgcggcgttcgaggcggagtttgggtggggtgggcgcgtcggagcggatttttagtaggttacggcgcgttttatatttagttttcgattagagcgagggtgcgtacggtagtcggttaaagttttgttttggtggttttttgtcgttttttttcgtggtcgggcgtagaattttaattgttcgaagttagagaaggtagacgttttggaaatgatcgtgcgttttttgtaggagttgtttgcgtttttatggtttacggtagcgtttcgtgagtgagttttttttgttttgtcgcgcgttttgtatttcgtattcggtattttatttcgcgttttacgcggtttttcgttcgtagtgttttgcgatagttatcgcgagggttatagcgtttgtgtggcgcgtttggttcgcgtgttgttcgtttgtcgtgttttggagttcgtcgtgagcgcgcgtttgttggagtatttgtggcggagagcggttagcgttattttggacggcgggcgcgttggggattttagtggttcgtttgttttcgttttagcgttcgcgtttgttttagagttcgtattcgtttcggtgttttcgtcgttttcgtttttttgcggttttggtttttggcggtcgtggtagtttttcggtcgatttatagattttgtcgattgtttgggattttggggtatt

SEQ ID NO: 26622 - DNA, 1289 bp, Artificial Sequence
  chemically treated genomic DNA (Homo sapiens) CpG-island No: 26622
aataccccaaaatcccaaacaatcgacaaaatctataaatcgaccgaaaaactaccacgaccgccaaaaaccaaaaccgcaaaaaaacgaaaacgacgaaaacaccgaaacgaatacgaactctaaaacaaacgcgaacgctaaaacgaaaacaaacgaaccactaaaatccccaacgcgcccgccgtccaaaataacgctaaccgctctccgccacaaatactccaacaaacgcgcgctcacgacgaactccaaaacacgacaaacgaacaacacgcgaaccaaacgcgccacacaaacgctataaccctcgcgataactatcgcaaaacactacgaacgaaaaaccgcgtaaaacgcgaaataaaataccgaatacgaaatacaaaacgcgcgacaaaacaaaaaaaactcactcacgaaacgctaccgtaaaccataaaaacgcaaacaactcctacaaaaaacgcacgatcatttccaaaacgtctaccttctctaacttcgaacaattaaaattctacgcccgaccacgaaaaaaaacgacaaaaaaccaccaaaacaaaactttaaccgactaccgtacgcaccctcgctctaatcgaaaactaaatataaaacgcgccgtaacctactaaaaatccgctccgacgcgcccaccccacccaaactccgcctcgaacgccgcgcgaaaccccctaataaattcctcccgcaaaaacaccccgtccccctacccccgctccgcgccccaaaaccctctaccctccgcccgaacgcgctcacctcccgacccaacaacgacaaaataaaccccttaaactaactcaaactctaattaatacgcgcgcgccgacgcttctccaacaacgacttcaaactctacgaacgaacgacgcgataattaaacgaatccccgaaatccccaaccccgcccccaatccccgatacccaccttacgcaactccgccgcgtcccctacccgacgaaacaaccccatactccgcgaaaaaacgataacaactacgaaccccacgcaaaaaaaaaccgaaatccgaaataaaatcccgaacgcgacccgaactaataccaaacgaatacgcgccccgcccgcgaccgaactttaaaaaaacgactcgcccgccccgccccgccccgcgaaatccgaccgcccgctaatcccacctcctacctttattcctacgcaaaataaaaccgaaaaaaaaaaccgcgacgcccccgaaaatcccgctccccgcctttacgtcctatctaccgcgaaataacgac

SEQ ID NO: 26623 - DNA, 1289 bp, Artificial Sequence
  chemically treated genomic DNA (Homo sapiens) CpG-island No: 26623
agtgttttaaggttttaagtagtcggtagggtttgtggatcggtcgaggggttattacggtcgttagaggttagggtcgtagggaggcgagggcggcgagggtatcggagcggatgcgggttttggggtagacgcgggcgttggggcgggggtagacgggttattggaatttttagcgcgttcgtcgtttagggtggcgttggtcgtttttcgttataggtgttttagtaggcgcgcgtttacggcgggttttaggatacggtaggcgggtagtacgcgggttaggcgcgttatataggcgttgtagttttcgcggtagttgtcgtaaggtattgcgggcggagagtcgcgtgaggcgcggggtagggtgtcgggtgcggggtgtagagcgcgcggtagggtagggagggtttatttacggggcgttgtcgtgggttatgaggacgtaggtagtttttgtaggaagcgtacggttatttttaggacgtttgttttttttagtttcgagtagttggagttttgcgttcggttacgaggaagagcgatagagaattattaagatagaattttggtcggttatcgtgcgtattttcgttttagtcgggagttgggtgtggggcgcgtcgtggtttgttgggggttcgtttcgacgcgtttattttatttaggtttcgtttcgggcgtcgcgcggaattttttggtgggtttttttcgtaggagtatttcgtttttttgttttcgtttcgcgttttaggattttttgtttttcgttcgggcgcgtttatttttcggtttagtagcggtaggatgagttttttaagttggtttaggttttggttgatgcgcgcgcgtcggcgtttttttagtagcggttttaggttttgcggacgggcggcgcggtggttagacgggttttcggagtttttagtttcgtttttagttttcggtatttattttgcgtagtttcgtcgcgttttttgttcggcgaggtagttttatgtttcgcggggaagcggtggtagttgcgagttttacgtaaagggaaatcgaggttcgaaatgaggtttcgggcgcggttcgggttggtgttagacgagtgcgcgtttcgttcgcggtcgagttttaagggagcggttcgttcgtttcgtttcgtttcgcggagttcggtcgttcgttggttttattttttgtttttgtttttgcgtagggtggagtcgggaggggagatcgcgacgttttcggggatttcgtttttcgtttttgcgttttgtttatcgcggggtggcggt

SEQ ID NO: 26624 - DNA, 1289 bp, Artificial Sequence
  chemically treated genomic DNA (Homo sapiens) CpG-island No: 26624
accgccaccccgcgataaacaaaacgcaaaaacgaaaaacgaaatccccgaaaacgtcgcgatctcccctcccgactccaccctacgcaaaaacaaaaacaaaaaataaaaccaacgaacgaccgaactccgcgaaacgaaacgaaacgaacgaaccgctcccttaaaactcgaccgcgaacgaaacgcgcactcgtctaacaccaacccgaaccgcgcccgaaacctcatttcgaacctcgatttccctttacgtaaaactcgcaactaccaccgcttccccgcgaaacataaaactacctcgccgaacaaaaaacgcgacgaaactacgcaaaataaataccgaaaactaaaaacgaaactaaaaactccgaaaacccgtctaaccaccgcgccgcccgtccgcaaaacctaaaaccgctactaaaaaaacgccgacgcgcgcgcatcaaccaaaacctaaaccaacttaaaaaactcatcctaccgctactaaaccgaaaaataaacgcgcccgaacgaaaaacaaaaaatcctaaaacgcgaaacgaaaacaaaaaaacgaaatactcctacgaaaaaaacccaccaaaaaattccgcgcgacgcccgaaacgaaacctaaataaaataaacgcgtcgaaacgaacccccaacaaaccacgacgcgccccacacccaactcccgactaaaacgaaaatacgcacgataaccgaccaaaattctatcttaataattctctatcgctcttcctcgtaaccgaacgcaaaactccaactactcgaaactaaaaaaaacaaacgtcctaaaaataaccgtacgcttcctacaaaaactacctacgtcctcataacccacgacaacgccccgtaaataaaccctccctaccctaccgcgcgctctacaccccgcacccgacaccctaccccgcgcctcacgcgactctccgcccgcaataccttacgacaactaccgcgaaaactacaacgcctatataacgcgcctaacccgcgtactacccgcctaccgtatcctaaaacccgccgtaaacgcgcgcctactaaaacacctataacgaaaaacgaccaacgccaccctaaacgacgaacgcgctaaaaattccaataacccgtctacccccgccccaacgcccgcgtctaccccaaaacccgcatccgctccgataccctcgccgccctcgcctccctacgaccctaacctctaacgaccgtaataacccctcgaccgatccacaaaccctaccgactacttaaaaccttaaaacact

SEQ ID NO: 26625 - DNA, 1029 bp, Artificial Sequence
  chemically treated genomic DNA (Homo sapiens) CpG-island No: 26625
gcgcggtagcgaatcggcggcgcgggcggtcgggaacgtttagtataaatatttatcgtcgcgcggagagtgagggtttaagttcgttttgtttcgttatttaggtcgttttagacgtttttttcggggttgttatcgggtcgggcgcggttgtcgcggttagcgggtttttttcgtatcggcgcggtttaatcgttatcgaattttttggaagcggcggttgtttgggtttttacgtcgttagaatcgtacgttcgcgcgagttttttgtagttttggcggtttgggaggcggggttcggggtggggtcggcgcgggggcggggtcggcgcggggaggtcgcgttcgattgttttcggcgcgtaggtttcgttttattagttttatcgttttatttttgttttttttttttatggcgcggttcgggtttatttatttcgcgtcgggtttgttagatatttgcgtttttttgtagtcgttcgtcgtattcgtcgtcgtagtttttagtatgtcgggtttagacgtcgagacgtcgttcgttatttagatttgtcggtaagagagggttcgcgcgtagtttgtagcggttaggcgcgtcggttatcgttttaggtttgtttcgtttggttttgtggtttttattcgtcgaggtcgttttcgttcgtcgatttttcgtacggtttttcgcgtcgtcgtttcggacgttcgttcggtcgggatgcgattcgcgatgtcgtataagtcgggcggttttcgttcgtttttagtcggttttttttggtcgtatttttagggcggcggtcgcgttacgggtcgtttgggcgagaaagttaggtagggacggggcgggcggaggttaatgtatagttttagagttcggcgatcggcgttcgtgggtcgtttcgtttcgggtttcgttcgagtatttcggagttttagtttcgtggttttgtttagttttttcgaggattcgggattattatttcggcggttgtgttgcgttaattaaagtttttagaggtggagggg

SEQ ID NO: 26626 - DNA, 1029 bp, Artificial Sequence
  chemically treated genomic DNA (Homo sapiens) CpG-island No: 26626
cccctccacctctaaaaactttaattaacgcaacacaaccgccgaaataataatcccgaatcctcgaaaaaactaaacaaaaccacgaaactaaaactccgaaatactcgaacgaaacccgaaacgaaacgacccacgaacgccgatcgccgaactctaaaactatacattaacctccgcccgccccgtccctacctaactttctcgcccaaacgacccgtaacgcgaccgccgccctaaaaatacgaccaaaaaaaaccgactaaaaacgaacgaaaaccgcccgacttatacgacatcgcgaatcgcatcccgaccgaacgaacgtccgaaacgacgacgcgaaaaaccgtacgaaaaatcgacgaacgaaaacgacctcgacgaataaaaaccacaaaaccaaacgaaacaaacctaaaacgataaccgacgcgcctaaccgctacaaactacgcgcgaaccctctcttaccgacaaatctaaataacgaacgacgtctcgacgtctaaacccgacatactaaaaactacgacgacgaatacgacgaacgactacaaaaaaacgcaaatatctaacaaacccgacgcgaaataaataaacccgaaccgcgccataaaaaaaaaaaacaaaaataaaacgataaaactaataaaacgaaacctacgcgccgaaaacaatcgaacgcgacctccccgcgccgaccccgcccccgcgccgaccccaccccgaaccccgcctcccaaaccgccaaaactacaaaaaactcgcgcgaacgtacgattctaacgacgtaaaaacccaaacaaccgccgcttccaaaaaattcgataacgattaaaccgcgccgatacgaaaaaaacccgctaaccgcgacaaccgcgcccgacccgataacaaccccgaaaaaaacgtctaaaacgacctaaataacgaaacaaaacgaacttaaaccctcactctccgcgcgacgataaatatttatactaaacgttcccgaccgcccgcgccgccgattcgctaccgcgc

SEQ ID NO: 26627 - DNA, 1029 bp, Artificial Sequence
  chemically treated genomic DNA (Homo sapiens) CpG-island No: 26627
tttttttatttttgggggttttggttagcgtagtataatcgtcgaggtaatgatttcgaattttcgaggaggttaagtaggattacggggttgaggtttcgggatgttcgggcgaggttcgaggcggggcggtttacgggcgtcggtcgtcgggttttggagttgtgtattgattttcgttcgtttcgtttttgtttggttttttcgtttaaacggttcgtggcgcggtcgtcgttttggagatgcggttaggaggagtcggttggaggcgggcgggggtcgttcggtttgtgcggtatcgcgagtcgtatttcggtcgggcgggcgttcggggcggcggcgcggaaggtcgtgcggggaatcggcgggcgggggcggtttcggcgggtggggattatagagttaagcggggtaggtttggggcggtgatcggcgcgtttggtcgttgtaggttgcgcgcgggtttttttttatcggtagatttggatggcggacggcgtttcgacgtttgggttcgatatgttgggggttgcggcggcggatgcggcgggcggttgtagaagggcgtaggtgtttggtaggttcggcgcggaatgaatgagttcgggtcgcgttataaagggggagggtagaggtggagcgatggggttggtgaggcggggtttgcgcgtcgggggtaatcgaacgcggttttttcgcgtcgatttcgttttcgcgtcggttttatttcgagtttcgttttttaggtcgttaaggttgtagagagttcgcgcgggcgtacgattttggcggcgtgggggtttaggtagtcgtcgtttttagaaggttcggtggcggttgggtcgcgtcggtgcggggaaggttcgttagtcgcggtagtcgcgttcgattcggtggtagtttcgagggaagcgtttggggcggtttaagtggcggagtagggcggatttgggtttttatttttcgcgcggcggtaaatatttgtgttgggcgttttcggtcgttcgcgtcgtcgattcgttgtcgcgt

SEQ ID NO: 26628 - DNA, 1029 bp, Artificial Sequence
  chemically treated genomic DNA (Homo sapiens) CpG-island No: 26628
acgcgacaacgaatcgacgacgcgaacgaccgaaaacgcccaacacaaatatttaccgccgcgcgaaaaataaaaacccaaatccgccctactccgccacttaaaccgccccaaacgcttccctcgaaactaccaccgaatcgaacgcgactaccgcgactaacgaaccttccccgcaccgacgcgacccaaccgccaccgaaccttctaaaaacgacgactacctaaacccccacgccgccaaaatcgtacgcccgcgcgaactctctacaaccttaacgacctaaaaaacgaaactcgaaataaaaccgacgcgaaaacgaaatcgacgcgaaaaaaccgcgttcgattacccccgacgcgcaaaccccgcctcaccaaccccatcgctccacctctaccctccccctttataacgcgacccgaactcattcattccgcgccgaacctaccaaacacctacgcccttctacaaccgcccgccgcatccgccgccgcaacccccaacatatcgaacccaaacgtcgaaacgccgtccgccatccaaatctaccgataaaaaaaaacccgcgcgcaacctacaacgaccaaacgcgccgatcaccgccccaaacctaccccgcttaactctataatccccacccgccgaaaccgcccccgcccgccgattccccgcacgaccttccgcgccgccgccccgaacgcccgcccgaccgaaatacgactcgcgataccgcacaaaccgaacgacccccgcccgcctccaaccgactcctcctaaccgcatctccaaaacgacgaccgcgccacgaaccgtttaaacgaaaaaaccaaacaaaaacgaaacgaacgaaaatcaatacacaactccaaaacccgacgaccgacgcccgtaaaccgccccgcctcgaacctcgcccgaacatcccgaaacctcaaccccgtaatcctacttaacctcctcgaaaattcgaaatcattacctcgacgattatactacgctaaccaaaacccccaaaaataaaaaaa

SEQ ID NO: 26629 - DNA, 691 bp, Artificial Sequence
  chemically treated genomic DNA (Homo sapiens) CpG-island No: 26629
gcgcgtcgggtatttttttggttacggtaggtaacgcgtcgtttcgcgttcgggtgttagtttttcgtgttttttgttttcgtacggtcggagttgggtggtagtcgtcgatcgtaggttggttggttggttcgttcgttcgttcgttcgttcgttttttgttgtaagcggtagtttcgggggtggggggggtgtatcgggatagggggagagacggggaggcgtttcgggaggttcgcggagttgggggacgtgggggggtcgcggcggagggagcgtcgagttttttatttgtatttggggcggttttgggtgattttttaagttcgggggaaaaatgtgtgtgtgtttgggatggagcgtcgcgggcgcgtatgcgttgtttaaagttgtcggatttcggatttttcgtttttagttttcgttttcgttcgttgtgattatggaatttttcgcggtcgggcgggcgagtgggtggtatgtaaaattcgggtcggatcgcggggtcgggtttcgttttatttttatatttttagatttgtttttttcggattttttttatttatcgttcgggttgagtttagcgtgtgcgcgcggcgagtcgtacggtttgcggaggagtatttgagcgttcggtttttttttgtaggtttagaggtttttatatttttttttagttgagttgagttga

SEQ ID NO: 26630 - DNA, 691 bp, Artificial Sequence
  chemically treated genomic DNA (Homo sapiens) CpG-island No: 26630
tcaactcaactcaactaaaaaaaaatataaaaacctctaaacctacaaaaaaaaaccgaacgctcaaatactcctccgcaaaccgtacgactcgccgcgcgcacacgctaaactcaacccgaacgataaataaaaaaaatccgaaaaaaacaaatctaaaaatataaaaataaaacgaaacccgaccccgcgatccgacccgaattttacataccacccactcgcccgcccgaccgcgaaaaattccataatcacaacgaacgaaaacgaaaactaaaaacgaaaaatccgaaatccgacaactttaaacaacgcatacgcgcccgcgacgctccatcccaaacacacacacatttttcccccgaacttaaaaaatcacccaaaaccgccccaaatacaaataaaaaactcgacgctccctccgccgcgacccccccacgtcccccaactccgcgaacctcccgaaacgcctccccgtctctccccctatcccgatacaccccccccacccccgaaactaccgcttacaacaaaaaacgaacgaacgaacgaacgaacgaaccaaccaaccaacctacgatcgacgactaccacccaactccgaccgtacgaaaacaaaaaacacgaaaaactaacacccgaacgcgaaacgacgcgttacctaccgtaaccaaaaaaatacccgacgcgc

SEQ ID NO: 26631 - DNA, 691 bp, Artificial Sequence
  chemically treated genomic DNA (Homo sapiens) CpG-island No: 26631
ttaatttaatttagttgggggggggtgtagaagtttttggatttgtaaaagggggtcgagcgtttagatgttttttcgtaggtcgtgcgattcgtcgcgcgtatacgttgagtttagttcgggcggtgggtgggaaggattcgggaggggtaggtttgggggtgtgagggtggagcggagttcggtttcgcgattcggttcgggttttgtatgttatttattcgttcgttcggtcgcggagaattttataattatagcgggcgagagcggagattgggagcgaaaaattcgggattcggtaattttgggtagcgtatgcgcgttcgcggcgttttattttaaatatatatatatttttttttcggatttggaaagttatttaaagtcgttttaagtgtaggtaagagattcggcgtttttttcgtcgcggtttttttacgttttttagtttcgcgggtttttcggggcgttttttcgtttttttttttgtttcggtgtattttttttattttcggggttgtcgtttgtagtagggagcgggcgagcgagcgagcgagcgagttagttagttagtttgcgatcggcggttgttatttaatttcggtcgtgcggaggtagggggtacggagggttggtattcgggcgcggggcggcgcgttgtttgtcgtggttaggggaatgttcggcgcgt

SEQ ID NO: 26632 - DNA, 691 bp, Artificial Sequence
  chemically treated genomic DNA (Homo sapiens) CpG-island No: 26632
acgcgccgaacattcccctaaccacgacaaacaacgcgccgccccgcgcccgaataccaaccctccgtaccccctacctccgcacgaccgaaattaaataacaaccgccgatcgcaaactaactaactaactcgctcgctcgctcgctcgcccgctccctactacaaacgacaaccccgaaaataaaaaaaatacaccgaaacaaaaaaaaaaacgaaaaaacgccccgaaaaacccgcgaaactaaaaaacgtaaaaaaaccgcgacgaaaaaaacgccgaatctcttacctacacttaaaacgactttaaataactttccaaatccgaaaaaaaaatatatatatatttaaaataaaacgccgcgaacgcgcatacgctacccaaaattaccgaatcccgaatttttcgctcccaatctccgctctcgcccgctataattataaaattctccgcgaccgaacgaacgaataaataacatacaaaacccgaaccgaatcgcgaaaccgaactccgctccaccctcacacccccaaacctacccctcccgaatccttcccacccaccgcccgaactaaactcaacgtatacgcgcgacgaatcgcacgacctacgaaaaaacatctaaacgctcgacccccttttacaaatccaaaaacttctacacccccccccaactaaattaaattaa

SEQ ID NO: 26633 - DNA, 858 bp, Artificial Sequence
  chemically treated genomic DNA (Homo sapiens) CpG-island No: 26633
tagatagcgtcgcggttcgttttcggtagtatttttagggattcggattcgtgggcggcgggatttatcggttttaggagttttaatttagggtcgattcgtatttatattttcggcgggttttaggcgttgcgtttatttttatttcgattttagacgcgatttttattcgatttcgtagtttaggcgttgattttggtttttaagtttaagcgttatttcggattttgggcgattcgttgtgattttacggtcggtagtcggagtagagggtttcggttttcgagtttaggcgtaatttttaatttcggggcgtttttttttttttagaggcgcgtggatttcggaattaggtgttattttagattatgggcgtcgcgtttcgattttaggcggaggtcgtcgagagtagagggtcgtggtttttttagtttaggcgttgcgcggaggtcggggggcgcgggggcggcggaggcggcgcgagtttcggcgggaggtttcgagttgtatcgggcgcgggcggggggtcgtaggtcggacgggcgttgatttgtagtgggtcggttttttagtttgcgggggggattcgtttagcgtcgttgtcgtcgttttcgaaatcgacggtatttttagttaaaataatgtagcgcgtatgcgtcgcgtcggcgttttcgttttcggatattttcgcgcgttttcgcggttacgtttttcgcggtttcgtttttagttcgtagatttcggtttcgttttagtttcgcgtttttcgtagtttcgttttcggttcgtagatttcgttttagtttcgcgtttcgttttgttttgttttgttttgttttgttttgttttgttttgttt

SEQ ID NO: 26634 - DNA, 858 bp, Artificial Sequence
  chemically treated genomic DNA (Homo sapiens) CpG-island No: 26634
aaacaaaacaaaacaaaacaaaacaaaacaaaacaaaacaaaacgaaacgcgaaactaaaacgaaatctacgaaccgaaaacgaaactacgaaaaacgcgaaactaaaacgaaaccgaaatctacgaactaaaaacgaaaccgcgaaaaacgtaaccgcgaaaacgcgcgaaaatatccgaaaacgaaaacgccgacgcgacgcatacgcgctacattattttaactaaaaataccgtcgatttcgaaaacgacgacaacgacgctaaacgaatcccccccgcaaactaaaaaaccgacccactacaaatcaacgcccgtccgacctacgaccccccgcccgcgcccgatacaactcgaaacctcccgccgaaactcgcgccgcctccgccgcccccgcgccccccgacctccgcgcaacgcctaaactaaaaaaaccacgaccctctactctcgacgacctccgcctaaaatcgaaacgcgacgcccataatctaaaataacacctaattccgaaatccacgcgcctctaaaaaaaaaaaaacgccccgaaattaaaaattacgcctaaactcgaaaaccgaaaccctctactccgactaccgaccgtaaaatcacaacgaatcgcccaaaatccgaaataacgcttaaacttaaaaaccaaaatcaacgcctaaactacgaaatcgaataaaaatcgcgtctaaaatcgaaataaaaataaacgcaacgcctaaaacccgccgaaaatataaatacgaatcgaccctaaattaaaactcctaaaaccgataaatcccgccgcccacgaatccgaatccctaaaaatactaccgaaaacgaaccgcgacgctatcta

SEQ ID NO: 26635 - DNA, 858 bp, Artificial Sequence
  chemically treated genomic DNA (Homo sapiens) CpG-island No: 26635
gggtagggtagggtagggtagggtagggtagggtagggtagggcggggcgcggggttggggcggggtttgcgggtcgggggcggggttgcggggggcgcggggttggggcggggtcggggtttgcgggttgggggcggggtcgcggggggcgtggtcgcgggggcgcgcggggatattcgggggcgggggcgtcggcgcggcgtatgcgcgttgtattgttttgattgaaaatgtcgtcggtttcgaaagcggcggtagcggcgttgagcgggtttttttcgtagattgagaagtcgatttattataggttagcgttcgttcggtttgcggtttttcgttcgcgttcggtgtagttcggagtttttcgtcggggttcgcgtcgttttcgtcgttttcgcgtttttcggttttcgcgtagcgtttgggttgggggggttacgattttttgttttcggcggttttcgtttgaggtcggagcgcggcgtttatggtttgggatggtatttggtttcggggtttacgcgtttttggggagggaggaacgtttcggggttgggggttgcgtttgggttcggggatcgggattttttgtttcggttgtcgatcgtgaggttatagcgggtcgtttagggttcggggtggcgtttgggtttggggattagggttagcgtttgggttacgaggtcgggtgagggtcgcgtttggagtcgggatgggggtgggcgtagcgtttggggttcgtcgggaatgtgagtacgggtcgattttgggttgaggtttttgaggtcggtgggtttcgtcgtttacgagttcgagtttttggaggtgttgtcggaagcgagtcgcggcgttgtttg

SEQ ID NO: 26636 - DNA, 858 bp, Artificial Sequence
  chemically treated genomic DNA (Homo sapiens) CpG-island No: 26636
caaacaacgccgcgactcgcttccgacaacacctccaaaaactcgaactcgtaaacgacgaaacccaccgacctcaaaaacctcaacccaaaatcgacccgtactcacattcccgacgaaccccaaacgctacgcccacccccatcccgactccaaacgcgaccctcacccgacctcgtaacccaaacgctaaccctaatccccaaacccaaacgccaccccgaaccctaaacgacccgctataacctcacgatcgacaaccgaaacaaaaaatcccgatccccgaacccaaacgcaacccccaaccccgaaacgttcctccctccccaaaaacgcgtaaaccccgaaaccaaataccatcccaaaccataaacgccgcgctccgacctcaaacgaaaaccgccgaaaacaaaaaatcgtaacccccccaacccaaacgctacgcgaaaaccgaaaaacgcgaaaacgacgaaaacgacgcgaaccccgacgaaaaactccgaactacaccgaacgcgaacgaaaaaccgcaaaccgaacgaacgctaacctataataaatcgacttctcaatctacgaaaaaaacccgctcaacgccgctaccgccgctttcgaaaccgacgacattttcaatcaaaacaatacaacgcgcatacgccgcgccgacgcccccgcccccgaatatccccgcgcgcccccgcgaccacgccccccgcgaccccgcccccaacccgcaaaccccgaccccgccccaaccccgcgccccccgcaaccccgcccccgacccgcaaaccccgccccaaccccgcgccccgccctaccctaccctaccctaccctaccctaccctaccctaccc

SEQ ID NO: 26637 - DNA, 676 bp, Artificial Sequence
  chemically treated genomic DNA (Homo sapiens) CpG-island No: 26637
cggcggtagggtgggttcgatttcgggaatcgggtaacggatgaaggtttcgggaagtttagtttatgagttttagcgttcggacggttttggaagagagagagtagtaagcgtttcgttcgttcgtcggtgtttgttttcggtttttcgagattttgaggagtttattcggtcgtcggggtatataagatacgatttattgttgttttgatttttcgattgacgttttggcgcgtcgtgatagcgttattttcgtcgtcggaaatcggaaatcgggcgttatattaggttttcgtttacgattatagaacgtggttttagtagcgtagcggaaatgacgttcggttgcgaagagtttttttcgtcgtaggttcggagtgcgcgatggtatgtcgggaaatgtagtttttcgtttttttcgaataggatcgatatttcggtttttggtttcgaagagaggcgggcgtcgcgggggcggacgttgtttttagagagttgtttgagtttgtttcggagtagttttgaatcgttatgaaggtgcgcggggtttggttggggattcgcgtttttagttttgttcgtttgttttgggttgggcgttcgtatttttttgtcggttttttcgaaggtcgtggtatcgttttatttttttttttttttttttttcgtttagttt

SEQ ID NO: 26638 - DNA, 676 bp, Artificial Sequence
  chemically treated genomic DNA (Homo sapiens) CpG-island No: 26638
aaactaaacgaaaaaaaaaaaaaaaaaaaaataaaacgataccacgaccttcgaaaaaaccgacaaaaaaatacgaacgcccaacccaaaacaaacgaacaaaactaaaaacgcgaatccccaaccaaaccccgcgcaccttcataacgattcaaaactactccgaaacaaactcaaacaactctctaaaaacaacgtccgcccccgcgacgcccgcctctcttcgaaaccaaaaaccgaaatatcgatcctattcgaaaaaaacgaaaaactacatttcccgacataccatcgcgcactccgaacctacgacgaaaaaaactcttcgcaaccgaacgtcatttccgctacgctactaaaaccacgttctataatcgtaaacgaaaacctaatataacgcccgatttccgatttccgacgacgaaaataacgctatcacgacgcgccaaaacgtcaatcgaaaaatcaaaacaacaataaatcgtatcttatataccccgacgaccgaataaactcctcaaaatctcgaaaaaccgaaaacaaacaccgacgaacgaacgaaacgcttactactctctctcttccaaaaccgtccgaacgctaaaactcataaactaaacttcccgaaaccttcatccgttacccgattcccgaaatcgaacccaccctaccgccg

SEQ ID NO: 26639 - DNA, 676 bp, Artificial Sequence
  chemically treated genomic DNA (Homo sapiens) CpG-island No: 26639
gaattaaacggaaaaaaaaaaaaaaaaaaaatagggcggtgttacggttttcggggaagtcggtagagaggtgcgggcgtttagtttagggtaggcgggtagggttgagggcgcggatttttaattaggtttcgcgtatttttatgacggtttagaattgtttcgaggtaaatttagataattttttgaggataacgttcgttttcgcggcgttcgttttttttcggggttagggatcggggtgtcggttttattcgaaagggacggagaattatatttttcggtatgttatcgcgtatttcgggtttgcgacggaaagagtttttcgtagtcgaacgttattttcgttgcgttattgggattacgttttgtagtcgtgagcggaggtttggtatggcgttcggttttcggttttcggcgacggaagtgacgttattacggcgcgttaaggcgttagtcgaggagttaaggtagtaatgaatcgtgttttgtgtgtttcggcggtcgggtgagttttttaaggtttcggagggtcgagggtagatatcggcgggcgggcggagcgtttattgtttttttttttttagggtcgttcgggcgttgaggtttataggttgggtttttcgaagtttttattcgttgttcggttttcgggatcgggtttattttgtcgtcg

SEQ ID NO: 26640 - DNA, 676 bp, Artificial Sequence
  chemically treated genomic DNA (Homo sapiens) CpG-island No: 26640
cgacgacaaaataaacccgatcccgaaaaccgaacaacgaataaaaacttcgaaaaacccaacctataaacctcaacgcccgaacgaccctaaaaaaaaaaaaacaataaacgctccgcccgcccgccgatatctaccctcgaccctccgaaaccttaaaaaactcacccgaccgccgaaacacacaaaacacgattcattactaccttaactcctcgactaacgccttaacgcgccgtaataacgtcacttccgtcgccgaaaaccgaaaaccgaacgccataccaaacctccgctcacgactacaaaacgtaatcccaataacgcaacgaaaataacgttcgactacgaaaaactctttccgtcgcaaacccgaaatacgcgataacataccgaaaaatataattctccgtccctttcgaataaaaccgacaccccgatccctaaccccgaaaaaaaacgaacgccgcgaaaacgaacgttatcctcaaaaaattatctaaatttacctcgaaacaattctaaaccgtcataaaaatacgcgaaacctaattaaaaatccgcgccctcaaccctacccgcctaccctaaactaaacgcccgcacctctctaccgacttccccgaaaaccgtaacaccgccctattttttttttttttttttttccgtttaattc

SEQ ID NO: 26641 - DNA, 673 bp, Artificial Sequence
  chemically treated genomic DNA (Homo sapiens) CpG-island No: 26641
cgcgtagggaaatatgtcgtacgtatttaagggatcggtcgcgaaagttagtgcgtgggcggggtatagcgaacggggttagggttttgtcggggcggggttggcgttcggggcggtcgcgacgtagtttcgtttttagcgttggcgcgagattcgaacgtcgtcggtcgcggttttggcgttttttgaggcgtcgggagtttgcgtcggcgttttgtcggtttcgtttttttagcggttatgaggcggataggtttcgaggaggaggtttgcggcgtgtggttggacgcggcggcgttgaagaggcggaaagtgtaggtgggacgttgggggatgagagggcgttgggaattaggtagggtttggaggcgtaagacgggaggagtttgggggatatttggagatgatgaaagcgaagtcggggatagagaagggaatagcgttggggatttataggcgagagggattgtggtttgaagaaggttgaaaaacggggtttggggaggatgggagggacggaaggaaagagcgtgttgttggggggtttggaggagcggtgcgtagggaggggcggcgaaggtttaggtgtgggagaggcggagggaaagttcgttcggagtagttgaattgattaggttttttaggaggttatagtttttgcgagacgttttag

SEQ ID NO: 26642 - DNA, 673 bp, Artificial Sequence
  chemically treated genomic DNA (Homo sapiens) CpG-island No: 26642
ctaaaacgtctcgcaaaaactataacctcctaaaaaacctaatcaattcaactactccgaacgaactttccctccgcctctcccacacctaaaccttcgccgcccctccctacgcaccgctcctccaaaccccccaacaacacgctctttccttccgtccctcccatcctccccaaaccccgtttttcaaccttcttcaaaccacaatccctctcgcctataaatccccaacgctattcccttctctatccccgacttcgctttcatcatctccaaatatcccccaaactcctcccgtcttacgcctccaaaccctacctaattcccaacgccctctcatcccccaacgtcccacctacactttccgcctcttcaacgccgccgcgtccaaccacacgccgcaaacctcctcctcgaaacctatccgcctcataaccgctaaaaaaacgaaaccgacaaaacgccgacgcaaactcccgacgcctcaaaaaacgccaaaaccgcgaccgacgacgttcgaatctcgcgccaacgctaaaaacgaaactacgtcgcgaccgccccgaacgccaaccccgccccgacaaaaccctaaccccgttcgctataccccgcccacgcactaactttcgcgaccgatcccttaaatacgtacgacatatttccctacgcg

SEQ ID NO: 26643 - DNA, 673 bp, Artificial Sequence
  chemically treated genomic DNA (Homo sapiens) CpG-island No: 26643
ttaggacgtttcgtagggattgtggttttttagggagtttggttagtttaattgtttcgagcgaatttttttttcgttttttttatatttgaattttcgtcgtttttttttgcgtatcgtttttttagattttttaatagtacgtttttttttttcgttttttttattttttttaagtttcgttttttaattttttttagattataatttttttcgtttgtgaatttttaacgttgtttttttttttgttttcgatttcgtttttattatttttaggtgttttttaaatttttttcgttttacgtttttaggttttatttggtttttaacgtttttttattttttagcgttttatttgtatttttcgtttttttagcgtcgtcgcgtttagttatacgtcgtaggtttttttttcggggtttgttcgttttatggtcgttgaggagacgaagtcggtaggacgtcggcgtaggttttcggcgttttagggaacgttagaatcgcggtcggcgacgttcggatttcgcgttaacgttgggggcggggttacgtcgcgatcgtttcgggcgttagtttcgtttcggtaaggttttggtttcgttcgttgtgtttcgtttacgtattaattttcgcggtcggttttttgagtgcgtgcggtatatttttttgcgcg

SEQ ID NO: 26644 - DNA, 673 bp, Artificial Sequence
  chemically treated genomic DNA (Homo sapiens) CpG-island No: 26644
cgcgcaaaaaaatataccgcacgcactcaaaaaaccgaccgcgaaaattaatacgtaaacgaaacacaacgaacgaaaccaaaaccttaccgaaacgaaactaacgcccgaaacgatcgcgacgtaaccccgcccccaacgttaacgcgaaatccgaacgtcgccgaccgcgattctaacgttccctaaaacgccgaaaacctacgccgacgtcctaccgacttcgtctcctcaacgaccataaaacgaacaaaccccgaaaaaaaaacctacgacgtataactaaacgcgacgacgctaaaaaaacgaaaaatacaaataaaacgctaaaaaataaaaaaacgttaaaaaccaaataaaacctaaaaacgtaaaacgaaaaaaatttaaaaaacacctaaaaataataaaaacgaaatcgaaaacaaaaaaaaaaacaacgttaaaaattcacaaacgaaaaaaattataatctaaaaaaaattaaaaaacgaaacttaaaaaaaataaaaaaaacgaaaaaaaaaaacgtactattaaaaaatctaaaaaaacgatacgcaaaaaaaaacgacgaaaattcaaatataaaaaaaacgaaaaaaaaattcgctcgaaacaattaaactaaccaaactccctaaaaaaccacaatccctacgaaacgtcctaa

SEQ ID NO: 26645 - DNA, 530 bp, Artificial Sequence
  chemically treated genomic DNA (Homo sapiens) CpG-island No: 26645
gattacgttcgagtagtttgcgtatattatattacgtagcgcgagtttagttgcgttttttttcgttatattattttgtgcgaaagagttgagtcgcgagtgtcgaatcgtgttgcgacgtcgcgtcgagcgtcgagtacgggtgcgggataggttttggtatagtggaggagcgacgtgtatgggtgagacgggttttcgtagaatttgtgcgttgacgtggcgttgggagggcgagttgcgattttcgggaacggatatgatttgtgttgggtgaagtcgattacgcgtaggtgtcgcgggttgaaggtatgtggcgcgggcgcggataattatgaagtggttgaatattggggtcggttgtcgagtagtttagacgaagagattcggttcggtcggttttattcgttaagagattggggaggtaggatcgacgtgcgtagggtttgtttagttaagtatagtttgagagcgttttgcgatatttgtaatacgattttggtattcgcgtgaagtaatttaatttattt

SEQ ID NO: 26646 - DNA, 530 bp, Artificial Sequence
  chemically treated genomic DNA (Homo sapiens) CpG-island No: 26646
aaataaattaaattacttcacgcgaataccaaaatcgtattacaaatatcgcaaaacgctctcaaactatacttaactaaacaaaccctacgcacgtcgatcctacctccccaatctcttaacgaataaaaccgaccgaaccgaatctcttcgtctaaactactcgacaaccgaccccaatattcaaccacttcataattatccgcgcccgcgccacataccttcaacccgcgacacctacgcgtaatcgacttcacccaacacaaatcatatccgttcccgaaaatcgcaactcgccctcccaacgccacgtcaacgcacaaattctacgaaaacccgtctcacccatacacgtcgctcctccactataccaaaacctatcccgcacccgtactcgacgctcgacgcgacgtcgcaacacgattcgacactcgcgactcaactctttcgcacaaaataatataacgaaaaaaaacgcaactaaactcgcgctacgtaatataatatacgcaaactactcgaacgtaatc

SEQ ID NO: 26647 - DNA, 530 bp, Artificial Sequence
  chemically treated genomic DNA (Homo sapiens) CpG-island No: 26647
gagtaaattgagttattttacgcgaatattagaatcgtgttgtagatatcgtaaaacgtttttaagttgtgtttggttgggtaagttttgcgtacgtcggttttgtttttttaattttttgacggatggggtcggtcgggtcggattttttcgtttaagttgttcggtaatcgattttagtgtttaattattttatggttattcgcgttcgcgttatatgtttttagttcgcggtatttgcgcgtggtcgattttatttaatatagattatattcgttttcgggggtcgtagttcgtttttttaacgttacgttagcgtataagttttgcgaggattcgttttatttatatacgtcgtttttttattatattaggatttgtttcgtattcgtgttcggcgttcggcgcggcgtcgtagtacggttcggtattcgcggtttagttttttcgtatagagtgatgtgacgaggaggagcgtagttgagttcgcgttgcgtggtgtggtgtgcgtagattgttcggacgtagtt

SEQ ID NO: 26648 - DNA, 530 bp, Artificial Sequence
  chemically treated genomic DNA (Homo sapiens) CpG-island No: 26648
aactacgtccgaacaatctacgcacaccacaccacgcaacgcgaactcaactacgctcctcctcgtcacatcactctatacgaaaaaactaaaccgcgaataccgaaccgtactacgacgccgcgccgaacgccgaacacgaatacgaaacaaatcctaatataataaaaaaacgacgtatataaataaaacgaatcctcgcaaaacttatacgctaacgtaacgttaaaaaaacgaactacgacccccgaaaacgaatataatctatattaaataaaatcgaccacgcgcaaataccgcgaactaaaaacatataacgcgaacgcgaataaccataaaataattaaacactaaaatcgattaccgaacaacttaaacgaaaaaatccgacccgaccgaccccatccgtcaaaaaattaaaaaaacaaaaccgacgtacgcaaaacttacccaaccaaacacaacttaaaaacgttttacgatatctacaacacgattctaatattcgcgtaaaataactcaatttactc

SEQ ID NO: 26649 - DNA, 583 bp, Artificial Sequence
  chemically treated genomic DNA (Homo sapiens) CpG-island No: 26649
ttcgtcgcgtcggacggttttagatacgttcgacgtcgttttcgtcgttttttcgtcgtcgtcgtcgtcgtcgttaggaggtttcgcgcgttttttcggtttttttcgggtcgggtcgggcggcgatagcggcgcggttattgtttcgtagtttttttcgggcgcgtaggagaggtcggtcggtcgggcgcggggagggacggtcgggagtcggtgttcgttaacgtttatcgtcgtcgttcgcgttttttttttggtcgtttttaatttttcggagatagcgttgtagttgttgcgttttaggttgtaaatggcgttcgttcggtttggcgttttcggtttcgttttcggtcgggagacggttgagggtcgtacgttcgtggttcgtattttaacgtcgtcgtcgtcgtcgttcgttattaggttggttgtaggttcggggtagtttcgacgttttttcgttttttcgttttttcgttttttgttcgcgttgcgcgtagcggtaattattttttttttattttttttgttaaggggatttacgggcgttttaagaataataattagattattttaaaattgt

SEQ ID NO: 26650 - DNA, 583 bp, Artificial Sequence
  chemically treated genomic DNA (Homo sapiens) CpG-island No: 26650
acaattttaaaataatctaattattattcttaaaacgcccgtaaatccccttaacaaaaaaaataaaaaaaaaataattaccgctacgcgcaacgcgaacaaaaaacgaaaaaacgaaaaaacgaaaaaacgtcgaaactaccccgaacctacaaccaacctaataacgaacgacgacgacgacgacgttaaaatacgaaccacgaacgtacgaccctcaaccgtctcccgaccgaaaacgaaaccgaaaacgccaaaccgaacgaacgccatttacaacctaaaacgcaacaactacaacgctatctccgaaaaattaaaaacgaccaaaaaaaaaacgcgaacgacgacgataaacgttaacgaacaccgactcccgaccgtccctccccgcgcccgaccgaccgacctctcctacgcgcccgaaaaaaactacgaaacaataaccgcgccgctatcgccgcccgacccgacccgaaaaaaaccgaaaaaacgcgcgaaacctcctaacgacgacgacgacgacgacgaaaaaacgacgaaaacgacgtcgaacgtatctaaaaccgtccgacgcgacgaa

SEQ ID NO: 26651 - DNA, 583 bp, Artificial Sequence
  chemically treated genomic DNA (Homo sapiens) CpG-island No: 26651
ataattttaaaataatttaattattgtttttgggacgttcgtaggtttttttggtaggaggggtggagggggaatgattgtcgttgcgcgtagcgcgggtagagggcgagagggcgagagggcgggagggcgtcggggttgtttcggatttgtaattagtttggtagcgggcggcggcggcggcggcgttgggatgcgggttacgggcgtgcggtttttagtcgtttttcggtcgagagcgaggtcggaggcgttaagtcgagcgggcgttatttgtagtttggggcgtagtagttgtagcgttgttttcgaggggttgggaacggttaaggaggaggcgcgggcggcggcggtgggcgttggcgggtatcggttttcggtcgttttttttcgcgttcggtcggtcggttttttttgcgcgttcggaaggggttgcggaataatggtcgcgtcgttgtcgtcgttcggttcggttcggggaaagtcgggaaggcgcgcggagttttttggcggcggcggcggcggcggcgggaaggcggcggggacggcgtcgggcgtgtttggagtcgttcggcgcggcgga

SEQ ID NO: 26652 - DNA, 583 bp, Artificial Sequence
  chemically treated genomic DNA (Homo sapiens) CpG-island No: 26652
tccgccgcgccgaacgactccaaacacgcccgacgccgtccccgccgccttcccgccgccgccgccgccgccgccaaaaaactccgcgcgccttcccgactttccccgaaccgaaccgaacgacgacaacgacgcgaccattattccgcaaccccttccgaacgcgcaaaaaaaaccgaccgaccgaacgcgaaaaaaaacgaccgaaaaccgatacccgccaacgcccaccgccgccgcccgcgcctcctccttaaccgttcccaacccctcgaaaacaacgctacaactactacgccccaaactacaaataacgcccgctcgacttaacgcctccgacctcgctctcgaccgaaaaacgactaaaaaccgcacgcccgtaacccgcatcccaacgccgccgccgccgccgcccgctaccaaactaattacaaatccgaaacaaccccgacgccctcccgccctctcgccctctcgccctctacccgcgctacgcgcaacgacaatcattccccctccacccctcctaccaaaaaaacctacgaacgtcccaaaaacaataattaaattattttaaaattat

SEQ ID NO: 26653 - DNA, 720 bp, Artificial Sequence
  chemically treated genomic DNA (Homo sapiens) CpG-island No: 26653
acgagacggtttttttgagttttaaacgtttgttttcgtataaggagtgtaaggagaagttcggtaagtttaataagaggcgcggttttagcgcggggttgtgggaaatcgagaataattttacggtttaggttttcgattgtttattagttttagagaagggtagcggagacgggttttggtcggagttcgaggtcgtagagggcgacgaggataagtcgatttacgttggtggcggcggcgacgaattggggaagtcggacgacgataagtttattgaggaggagaaggggtcgttgaagaggagcgcgggggattcgtcggaggacgtttttaaacgatttaaggaggtagttttcgattaagaggaggaggcggaggcggagagggcggcggaagcggagagggcggcggcggcggcggcggcgacggtcgtcgacgaggagagttcgtttttcgtggcggtggagaacggtagcgtttttagcgagtcgggtttggtttgcgagtcgttttagttagaggaggaggagtttcgggaggaagaagtcgcggacgaggaggttttttaggagtggtatgtcgaggtatcgggcggcggagatcgcgatagtttgtagttattagcgtttttagaagagtttttgtttcgtttttgttgcggtttggtcgtttttggggaatttgattacggcgtgtaaattgggattgttttttttt

SEQ ID NO: 26654 - DNA, 720 bp, Artificial Sequence
  chemically treated genomic DNA (Homo sapiens) CpG-island No: 26654
aaaaaaaaacaatcccaatttacacgccgtaatcaaattccccaaaaacgaccaaaccgcaacaaaaacgaaacaaaaactcttctaaaaacgctaataactacaaactatcgcgatctccgccgcccgatacctcgacataccactcctaaaaaacctcctcgtccgcgacttcttcctcccgaaactcctcctcctctaactaaaacgactcgcaaaccaaacccgactcgctaaaaacgctaccgttctccaccgccacgaaaaacgaactctcctcgtcgacgaccgtcgccgccgccgccgccgccgccctctccgcttccgccgccctctccgcctccgcctcctcctcttaatcgaaaactacctccttaaatcgtttaaaaacgtcctccgacgaatcccccgcgctcctcttcaacgaccccttctcctcctcaataaacttatcgtcgtccgacttccccaattcgtcgccgccgccaccaacgtaaatcgacttatcctcgtcgccctctacgacctcgaactccgaccaaaacccgtctccgctacccttctctaaaactaataaacaatcgaaaacctaaaccgtaaaattattctcgatttcccacaaccccgcgctaaaaccgcgcctcttattaaacttaccgaacttctccttacactccttatacgaaaacaaacgtttaaaactcaaaaaaaccgtctcgt

SEQ ID NO: 26655 - DNA, 720 bp, Artificial Sequence
  chemically treated genomic DNA (Homo sapiens) CpG-island No: 26655
agggaaaggtagttttagtttgtacgtcgtggttagattttttaagaacggttaggtcgtagtaggaacggggtaggggtttttttggaaacgttggtaattataggttgtcgcgattttcgtcgttcggtgtttcggtatgttatttttgggaggttttttcgttcgcgatttttttttttcggagtttttttttttttggttgaggcggttcgtagattaggttcggttcgttaggggcgttgtcgttttttatcgttacgaggaacggatttttttcgtcgacggtcgtcgtcgtcgtcgtcgtcgtcgtttttttcgttttcgtcgtttttttcgttttcgttttttttttttggtcgggggttgtttttttgggtcgtttgggggcgtttttcggcgggtttttcgcgtttttttttagcggtttttttttttttttagtgggtttgtcgtcgttcggtttttttaattcgtcgtcgtcgttattagcgtgggtcggtttgttttcgtcgttttttgcggtttcgggtttcggttaaggttcgttttcgttgtttttttttgaggttaatgggtagtcggaggtttggatcgtggggttgttttcgattttttatagtttcgcgttgaagtcgcgttttttgttgggtttgtcgaatttttttttgtattttttgtacgggaataggcgtttgggatttaggaaggtcgtttcgt

SEQ ID NO: 26656 - DNA, 720 bp, Artificial Sequence
  chemically treated genomic DNA (Homo sapiens) CpG-island No: 26656
acgaaacgaccttcctaaatcccaaacgcctattcccgtacaaaaaatacaaaaaaaaattcgacaaacccaacaaaaaacgcgacttcaacgcgaaactataaaaaatcgaaaacaaccccacgatccaaacctccgactacccattaacctcaaaaaaaaacaacgaaaacgaaccttaaccgaaacccgaaaccgcaaaaaacgacgaaaacaaaccgacccacgctaataacgacgacgacgaattaaaaaaaccgaacgacgacaaacccactaaaaaaaaaaaaaaaccgctaaaaaaaaacgcgaaaaacccgccgaaaaacgcccccaaacgacccaaaaaaacaacccccgaccaaaaaaaaaaaacgaaaacgaaaaaaacgacgaaaacgaaaaaaacgacgacgacgacgacgacgacgaccgtcgacgaaaaaaatccgttcctcgtaacgataaaaaacgacaacgcccctaacgaaccgaacctaatctacgaaccgcctcaaccaaaaaaaaaaaaactccgaaaaaaaaaaatcgcgaacgaaaaaacctcccaaaaataacataccgaaacaccgaacgacgaaaatcgcgacaacctataattaccaacgtttccaaaaaaacccctaccccgttcctactacgacctaaccgttcttaaaaaatctaaccacgacgtacaaactaaaactacctttccct

SEQ ID NO: 26657 - DNA, 1047 bp, Artificial Sequence
  chemically treated genomic DNA (Homo sapiens) CpG-island No: 26657
attcgtcggttgcgtttcgtttaggttggtcggggtcggtgtgatcgtgtgatttcgtgtatattgcgttcgggttttcgtgaatgatagtagtttgtaatttttagtcggagagtagcggtggttatcgtcgggcggaaagggttataagttagaatgtaaagcgatttcgtttcgggtgtgggggatttcgggttttcggttattttcgaggtcgggcgtgttttgttcgttttttttcgttttgggcgtcggggcgattttattttgcgttttaagttgggggttttttatgttcgtcgtcgtcgagtttttcgtcgtcgaggcgttggtcgcggttttcgggttcgggtcggggtcgtcgtcgtcgtttagtttcgttagttttcggttggtggtcgtgagttcggttcgtaggttggttattttttggttggtcgattggatcgttttatcgatgcggagcgcgagttgtttattgttttttattatgtttaggattttggtttgggggcgagagaggtgataaagagttgtatgatgcgcggggggcgcgcggtcgggtattttcggttttatttgttgtgtttttcgcggttcggtttcgttcgcgtttcgatttttaggtatcggtagcgtcggttttttcggtataggaatgatagcggcgtttttagttttagtcgcggcggtggcgaggcggcggggggaggaggcggaggagaaaaaagaggaggagaaggaggaggaggagtagcgatcgtcgagatttcggcgggcgggcgtcgagagttgttttaagaaggatatcgcgcgttattaggtattttttaaatggagtttattattcgtcgtcggttcgggagggggtttcggtcggaggttgggggtatttttggtttttcgcgttttcgtatttcggagatatatttttcgggggggcggaggcggcggacggtagtcgggagggggttaaggtggcgtttttggcgaggggtaggggtcgtttggatcgaggtcggttttttgtttttttttttgagcggt

SEQ ID NO: 26658 - DNA, 1047 bp, Artificial Sequence
  chemically treated genomic DNA (Homo sapiens) CpG-island No: 26658
accgctcaaaaaaaaaaacaaaaaaccgacctcgatccaaacgacccctacccctcgccaaaaacgccaccttaaccccctcccgactaccgtccgccgcctccgcccccccgaaaaatatatctccgaaatacgaaaacgcgaaaaaccaaaaatacccccaacctccgaccgaaaccccctcccgaaccgacgacgaataataaactccatttaaaaaatacctaataacgcgcgatatccttcttaaaacaactctcgacgcccgcccgccgaaatctcgacgatcgctactcctcctcctccttctcctcctcttttttctcctccgcctcctccccccgccgcctcgccaccgccgcgactaaaactaaaaacgccgctatcattcctataccgaaaaaaccgacgctaccgatacctaaaaatcgaaacgcgaacgaaaccgaaccgcgaaaaacacaacaaataaaaccgaaaatacccgaccgcgcgccccccgcgcatcatacaactctttatcacctctctcgcccccaaaccaaaatcctaaacataataaaaaacaataaacaactcgcgctccgcatcgataaaacgatccaatcgaccaaccaaaaaataaccaacctacgaaccgaactcacgaccaccaaccgaaaactaacgaaactaaacgacgacgacgaccccgacccgaacccgaaaaccgcgaccaacgcctcgacgacgaaaaactcgacgacgacgaacataaaaaacccccaacttaaaacgcaaaataaaatcgccccgacgcccaaaacgaaaaaaaacgaacaaaacacgcccgacctcgaaaataaccgaaaacccgaaatcccccacacccgaaacgaaatcgctttacattctaacttataaccctttccgcccgacgataaccaccgctactctccgactaaaaattacaaactactatcattcacgaaaacccgaacgcaatatacacgaaatcacacgatcacaccgaccccgaccaacctaaacgaaacgcaaccgacgaat

SEQ ID NO: 26659 - DNA, 1047 bp, Artificial Sequence
  chemically treated genomic DNA (Homo sapiens) CpG-island No: 26659
atcgtttaagggaggggatagagggtcggtttcggtttaggcgatttttgtttttcgttaggggcgttattttggttttttttcgattgtcgttcgtcgttttcgttttttcggggggtgtgttttcgaagtacgggggcgcgggaggttaagggtgtttttagttttcgatcgagattttttttcgagtcggcggcgaatggtaggttttatttaaagagtgtttggtggcgcgcggtgttttttttggagtagttttcggcgttcgttcgtcggggtttcggcgatcgttgttttttttttttttttttttttttttttttttttttcgtttttttttttcgtcgtttcgttatcgtcgcggttagggttggaggcgtcgttgttatttttgtgtcggaggaatcggcgttgtcggtgtttgggggtcggggcgcgggcgaagtcgggtcgcggaggatataataggtagagtcgggggtgttcggtcgcgcgtttttcgcgtattatgtagttttttgttatttttttcgtttttaggttaaaattttgagtatgatggaagataataagtagttcgcgtttcgtatcgatggggcggtttagtcggttagttaggaggtgattaatttgcgagtcgaatttacggttattaatcggagattggcggaattgagcggcggcggcggtttcggttcgggttcgggagtcgcggttagcgtttcggcggcgggggattcggcggcgacgaatatggagaatttttagtttggagcgtaaggtaggatcgtttcggcgtttagggcggaggaaggcgagtagagtacgttcggtttcggaggtggtcggggattcggggttttttatattcggggcgaaatcgttttgtattttggtttgtaatttttttcgttcggcggtggttatcgttgtttttcggttgggagttgtaggttgttgttatttacgaaaattcgagcgtagtgtgtacggggttatacggttatatcggtttcggttagtttgagcgaggcgtagtcggcgggt

SEQ ID NO: 26660 - DNA, 1047 bp, Artificial Sequence
  chemically treated genomic DNA (Homo sapiens) CpG-island No: 26660
acccgccgactacgcctcgctcaaactaaccgaaaccgatataaccgtataaccccgtacacactacgctcgaattttcgtaaataacaacaacctacaactcccaaccgaaaaacaacgataaccaccgccgaacgaaaaaaattacaaaccaaaatacaaaacgatttcgccccgaatataaaaaaccccgaatccccgaccacctccgaaaccgaacgtactctactcgccttcctccgccctaaacgccgaaacgatcctaccttacgctccaaactaaaaattctccatattcgtcgccgccgaatcccccgccgccgaaacgctaaccgcgactcccgaacccgaaccgaaaccgccgccgccgctcaattccgccaatctccgattaataaccgtaaattcgactcgcaaattaatcacctcctaactaaccgactaaaccgccccatcgatacgaaacgcgaactacttattatcttccatcatactcaaaattttaacctaaaaacgaaaaaaataacaaaaaactacataatacgcgaaaaacgcgcgaccgaacacccccgactctacctattatatcctccgcgacccgacttcgcccgcgccccgacccccaaacaccgacaacgccgattcctccgacacaaaaataacaacgacgcctccaaccctaaccgcgacgataacgaaacgacgaaaaaaaaaaacgaaaaaaaaaaaaaaaaaaaaaaaaaaaaaaaaaaaacaacgatcgccgaaaccccgacgaacgaacgccgaaaactactccaaaaaaaacaccgcgcgccaccaaacactctttaaataaaacctaccattcgccgccgactcgaaaaaaaatctcgatcgaaaactaaaaacacccttaacctcccgcgcccccgtacttcgaaaacacaccccccgaaaaaacgaaaacgacgaacgacaatcgaaaaaaaaccaaaataacgcccctaacgaaaaacaaaaatcgcctaaaccgaaaccgaccctctatcccctcccttaaacgat

SEQ ID NO: 26661 - DNA, 841 bp, Artificial Sequence
  chemically treated genomic DNA (Homo sapiens) CpG-island No: 26661
gcgtttttcggttttatttcgttttgtttattttcgtttttgtttttttaggttatcgtgtatacgcggggattcgtcgtgtcgtttattgacgcgtttttttttcgttcgtagggacgtattaaggttagtttattaacggtatgcgttatggttacggagtacgttagagcgtgttttacgggatggtcgtggtggtgcgttcgtcgttgcgtacgtcgttgtcgtttttgcgtagcgagtatagtaacggtacggtggtttcggattttttcgtttcgtcggttttcgacggtttcgcgttgttttcgttcgttatttcgcgtggcggtttcgcgtttagttttttggttaatgtcgaggcggtcgcgcgggcgtttaagggcggcggttttttttagcggggcgcgttgttgggtaagttgcggcgcgtagagtcgcgtacgttcgtgggtagttagcgtagtcgtgttagtttttttaagagcgattttagttcgggcgttagcgacgtcgcgtttatcgttagtttgggagaggtcgtcgagggcgtcgacgaggtcgtatttttcgaggtcgatatcgacgttattattatcgagatttatatgggcgagtggaagaacgataaacgttcgggtttcggcgtgagcgaacgttttagtggttttcgttacgagggcgagtggttggataatttgcgttacggttatggttgtattacgttgttcgacggttatcgcgaggagggtaagtatcgttataacgtgttggttaaggatattaagcgtcgtatgttgtagtttaagagtaataaggttcgttagaaagtggagtatag

SEQ ID NO: 26662 - DNA, 841 bp, Artificial Sequence
  chemically treated genomic DNA (Homo sapiens) CpG-island No: 26662
ctatactccactttctaacgaaccttattactcttaaactacaacatacgacgcttaatatccttaaccaacacgttataacgatacttaccctcctcgcgataaccgtcgaacaacgtaatacaaccataaccgtaacgcaaattatccaaccactcgccctcgtaacgaaaaccactaaaacgttcgctcacgccgaaacccgaacgtttatcgttcttccactcgcccatataaatctcgataataataacgtcgatatcgacctcgaaaaatacgacctcgtcgacgccctcgacgacctctcccaaactaacgataaacgcgacgtcgctaacgcccgaactaaaatcgctcttaaaaaaactaacacgactacgctaactacccacgaacgtacgcgactctacgcgccgcaacttacccaacaacgcgccccgctaaaaaaaaccgccgcccttaaacgcccgcgcgaccgcctcgacattaaccaaaaaactaaacgcgaaaccgccacgcgaaataacgaacgaaaacaacgcgaaaccgtcgaaaaccgacgaaacgaaaaaatccgaaaccaccgtaccgttactatactcgctacgcaaaaacgacaacgacgtacgcaacgacgaacgcaccaccacgaccatcccgtaaaacacgctctaacgtactccgtaaccataacgcataccgttaataaactaaccttaatacgtccctacgaacgaaaaaaaaacgcgtcaataaacgacacgacgaatccccgcgtatacacgataacctaaaaaaacaaaaacgaaaataaacaaaacgaaataaaaccgaaaaacgc

SEQ ID NO: 26663 - DNA, 841 bp, Artificial Sequence
  chemically treated genomic DNA (Homo sapiens) CpG-island No: 26663
ttgtgttttattttttggcggattttgttgtttttgagttgtagtatgcggcgtttggtgtttttgattagtacgttgtggcggtatttgtttttttcgcggtggtcgtcgggtagcgtggtgtagttatagtcgtggcgtaggttgtttagttattcgttttcgtagcggaggttattggagcgttcgtttacgtcgaagttcgagcgtttgtcgtttttttattcgtttatgtaggtttcggtggtggtggcgtcgatatcggtttcgaagggtgcggtttcgtcggcgttttcggcggttttttttaggttggcggtggacgcggcgtcgttggcgttcgagttgaggtcgtttttaaggaagttgatacggttgcgttggttatttacggacgtgcgcgattttgcgcgtcgtagtttgtttagtagcgcgtttcgttggaagaggtcgtcgtttttgggcgttcgcgcggtcgtttcggtattggttaggaggttgagcgcgaagtcgttacgcgggatggcgggcgagggtagcgcggggtcgtcggaggtcggcgaggcgggagagttcggggttatcgtgtcgttgttgtgttcgttgcgtagggacgatagcgacgtgcgtagcggcgagcgtattattacggttatttcgtagggtacgttttggcgtatttcgtagttatggcgtatgtcgttggtgaattggttttggtacgtttttgcgggcgaggagagggcgcgttagtaggcggtacgacgggttttcgcgtgtgtacggtggtttgggagggtaagggcgggagtgggtaaggcggggtgggatcgagaggcgt

SEQ ID NO: 26664 - DNA, 841 bp, Artificial Sequence
  chemically treated genomic DNA (Homo sapiens) CpG-island No: 26664
acgcctctcgatcccaccccgccttacccactcccgcccttaccctcccaaaccaccgtacacacgcgaaaacccgtcgtaccgcctactaacgcgccctctcctcgcccgcaaaaacgtaccaaaaccaattcaccaacgacatacgccataactacgaaatacgccaaaacgtaccctacgaaataaccgtaataatacgctcgccgctacgcacgtcgctatcgtccctacgcaacgaacacaacaacgacacgataaccccgaactctcccgcctcgccgacctccgacgaccccgcgctaccctcgcccgccatcccgcgtaacgacttcgcgctcaacctcctaaccaataccgaaacgaccgcgcgaacgcccaaaaacgacgacctcttccaacgaaacgcgctactaaacaaactacgacgcgcaaaatcgcgcacgtccgtaaataaccaacgcaaccgtatcaacttccttaaaaacgacctcaactcgaacgccaacgacgccgcgtccaccgccaacctaaaaaaaaccgccgaaaacgccgacgaaaccgcacccttcgaaaccgatatcgacgccaccaccaccgaaacctacataaacgaataaaaaaacgacaaacgctcgaacttcgacgtaaacgaacgctccaataacctccgctacgaaaacgaataactaaacaacctacgccacgactataactacaccacgctacccgacgaccaccgcgaaaaaaacaaataccgccacaacgtactaatcaaaaacaccaaacgccgcatactacaactcaaaaacaacaaaatccgccaaaaaataaaacacaa

SEQ ID NO: 26665 - DNA, 559 bp, Artificial Sequence
  chemically treated genomic DNA (Homo sapiens) CpG-island No: 26665
ggggcgtcggcgtagcgggttttttatagtcgtttcgcgagagttcgtagttgtacgagcgtgagatttttcggttcgagggtggtttttcgttatcggtcgggacgttttcgtagtttaagcggtttaggttcggggtgtttaaggacggtttgttgagtttaggcgtttggaacggcgagtttagcggtgagggtagtcggttagttatttcgttcgagggcgcgggtcgtcgtagtttcgcgcgtttagttatcgagcgtatggttatcgaggttttgtaggtatcgtttgcgtcgtcgcgggagtcggaggtggcgttttattagggttattatagttatgttgtgcgtattacgtcgttcgagtttttattttttgaggattagttcgagttcgaggttttcgggttcgagttcgcgttttcgttttcggttatcgtttcgttgtaggtttttacgtttcgaggtttcgagtttgtacgcgagattttcgttaagttggagtttaagtttattatttttaaagtcgagtttagggttaaggttcgtaagattga

SEQ ID NO: 26666 - DNA, 559 bp, Artificial Sequence
  chemically treated genomic DNA (Homo sapiens) CpG-island No: 26666
tcaatcttacgaaccttaaccctaaactcgactttaaaaataataaacttaaactccaacttaacgaaaatctcgcgtacaaactcgaaacctcgaaacgtaaaaacctacaacgaaacgataaccgaaaacgaaaacgcgaactcgaacccgaaaacctcgaactcgaactaatcctcaaaaaataaaaactcgaacgacgtaatacgcacaacataactataataaccctaataaaacgccacctccgactcccgcgacgacgcaaacgatacctacaaaacctcgataaccatacgctcgataactaaacgcgcgaaactacgacgacccgcgccctcgaacgaaataactaaccgactaccctcaccgctaaactcgccgttccaaacgcctaaactcaacaaaccgtccttaaacaccccgaacctaaaccgcttaaactacgaaaacgtcccgaccgataacgaaaaaccaccctcgaaccgaaaaatctcacgctcgtacaactacgaactctcgcgaaacgactataaaaaacccgctacgccgacgcccc

SEQ ID NO: 26667 - DNA, 559 bp, Artificial Sequence
  chemically treated genomic DNA (Homo sapiens) CpG-island No: 26667
ttagttttgcgggttttggttttgggttcggttttggggatgatgggtttgggttttagtttggcgggggtttcgcgtgtaggttcggggtttcggagcgtgggggtttgtagcggggcggtggtcggggacgagggcgcggattcggattcggagatttcgggttcgggttggtttttaaagggtgggggttcgggcggcgtggtgcgtatagtatagttgtggtagttttggtaaagcgttattttcggttttcgcgacggcgtaggcggtgtttgtagagtttcgatggttatgcgttcggtggttggacgcgcggggttgcggcggttcgcgttttcggacggagtgattgatcggttgtttttatcgttgggttcgtcgttttaggcgtttgggtttagtaggtcgtttttggatatttcgggtttgggtcgtttgggttgcgggggcgtttcggtcggtgacggggagttattttcgggtcgaggggttttacgttcgtgtagttgcgggttttcgcggggcggttgtgggaggttcgttgcgtcggcgtttt

SEQ ID NO: 26668 - DNA, 559 bp, Artificial Sequence
  chemically treated genomic DNA (Homo sapiens) CpG-island No: 26668
aaaacgccgacgcaacgaacctcccacaaccgccccgcgaaaacccgcaactacacgaacgtaaaacccctcgacccgaaaataactccccgtcaccgaccgaaacgcccccgcaacccaaacgacccaaacccgaaatatccaaaaacgacctactaaacccaaacgcctaaaacgacgaacccaacgataaaaacaaccgatcaatcactccgtccgaaaacgcgaaccgccgcaaccccgcgcgtccaaccaccgaacgcataaccatcgaaactctacaaacaccgcctacgccgtcgcgaaaaccgaaaataacgctttaccaaaactaccacaactatactatacgcaccacgccgcccgaacccccaccctttaaaaaccaacccgaacccgaaatctccgaatccgaatccgcgccctcgtccccgaccaccgccccgctacaaacccccacgctccgaaaccccgaacctacacgcgaaacccccgccaaactaaaacccaaacccatcatccccaaaaccgaacccaaaaccaaaacccgcaaaactaa

SEQ ID NO: 26669 - DNA, 667 bp, Artificial Sequence
  chemically treated genomic DNA (Homo sapiens) CpG-island No: 26669
gagatggtttttgagagtttttcggggttgtcgcgtatattcgtttgttgtagggaaattagaaagtaggcggggagcggagcgacgaataaggtcggagaggaggttataaattttttttttttttacgcgtacgttaaaaatttattaggcgataatttggcgggtcgggatggagacgagatagtggaaaatcgtttcgtttttaaaattttcgcggtgaagtgatgaagtgggaatagagttggtttcgtcgtttttggcgcggttggggtttcgaatttttttcgatttgggaaacgttggtcgcggaagcgtgggttaggttagtcgcgggagttcgttttggttttttatttttttttttttatatttaagcgtaaatgtggaaagtcgagcgttttagaaaagttacgtaaaacgggaggtcggtgtattttagtggggttgtcgcgcgttcgttatttcggttattgggggttcgtattttcgggtttgtcgcggttatttttaggaagtcggaaattaaagatggttggaggttaggtttcgaaaggttagggcgaagatcggtaggcggcgtagttcgggtagaaaaggcgaaatttagaaaagaaaaaaattttaaagggaaatattgagttttttttttttatttttttgggtt

SEQ ID NO: 26670 - DNA, 667 bp, Artificial Sequence
  chemically treated genomic DNA (Homo sapiens) CpG-island No: 26670
aacccaaaaaaataaaaaaaaaaaactcaatatttccctttaaaatttttttcttttctaaatttcgccttttctacccgaactacgccgcctaccgatcttcgccctaacctttcgaaacctaacctccaaccatctttaatttccgacttcctaaaaataaccgcgacaaacccgaaaatacgaacccccaataaccgaaataacgaacgcgcgacaaccccactaaaatacaccgacctcccgttttacgtaacttttctaaaacgctcgactttccacatttacgcttaaatataaaaaaaaaaaaataaaaaaccaaaacgaactcccgcgactaacctaacccacgcttccgcgaccaacgtttcccaaatcgaaaaaaattcgaaaccccaaccgcgccaaaaacgacgaaaccaactctattcccacttcatcacttcaccgcgaaaattttaaaaacgaaacgattttccactatctcgtctccatcccgacccgccaaattatcgcctaataaatttttaacgtacgcgtaaaaaaaaaaaaaatttataacctcctctccgaccttattcgtcgctccgctccccgcctactttctaatttccctacaacaaacgaatatacgcgacaaccccgaaaaactctcaaaaaccatctc

SEQ ID NO: 26671 - DNA, 667 bp, Artificial Sequence
  chemically treated genomic DNA (Homo sapiens) CpG-island No: 26671
ggtttagagaggtgggggaggagggtttaatgtttttttttaaaattttttttttttttggatttcgttttttttgttcgggttgcgtcgtttgtcgattttcgttttaatttttcggggtttgatttttagttatttttgattttcgattttttaaaaataatcgcggtaagttcgagggtgcgagtttttagtggtcggggtggcgggcgcgcggtagttttattggggtgtatcggtttttcgttttgcgtggtttttttggagcgttcggttttttatatttgcgtttgggtgtgaaaggggagaggtggggggttagagcgaattttcgcggttgatttggtttacgttttcgcggttagcgttttttagatcgaggggagttcgggattttagtcgcgttaggaacggcggggttaattttgtttttattttattattttatcgcggaggttttaggagcgaggcggttttttattatttcgtttttatttcggttcgttaaattgtcgtttgataagtttttagcgtgcgcgtggggggaggggggatttgtagtttttttttcggttttgttcgtcgtttcgtttttcgtttgttttttaatttttttgtagtagacgggtgtgcgcggtaatttcggaggatttttagagattatttt

SEQ ID NO: 26672 - DNA, 667 bp, Artificial Sequence
  chemically treated genomic DNA (Homo sapiens) CpG-island No: 26672
aaaataatctctaaaaatcctccgaaattaccgcgcacacccgtctactacaaaaaaattaaaaaacaaacgaaaaacgaaacgacgaacaaaaccgaaaaaaaaactacaaatcccccctccccccacgcgcacgctaaaaacttatcaaacgacaatttaacgaaccgaaataaaaacgaaataataaaaaaccgcctcgctcctaaaacctccgcgataaaataataaaataaaaacaaaattaaccccgccgttcctaacgcgactaaaatcccgaactcccctcgatctaaaaaacgctaaccgcgaaaacgtaaaccaaatcaaccgcgaaaattcgctctaaccccccacctctcccctttcacacccaaacgcaaatataaaaaaccgaacgctccaaaaaaaccacgcaaaacgaaaaaccgatacaccccaataaaactaccgcgcgcccgccaccccgaccactaaaaactcgcaccctcgaacttaccgcgattatttttaaaaaatcgaaaatcaaaaataactaaaaatcaaaccccgaaaaattaaaacgaaaatcgacaaacgacgcaacccgaacaaaaaaaacgaaatccaaaaaaaaaaaaaattttaaaaaaaaacattaaaccctcctcccccacctctctaaacc

SEQ ID NO: 26673 - DNA, 716 bp, Artificial Sequence
  chemically treated genomic DNA (Homo sapiens) CpG-island No: 26673
ttcgtcgcggcgattattcggatttatcgcgggcgttacgtcgtcgtcgggtttgcgcgtttcgaggcggagttaggattaggatattcgttagcgtagggtagtttttagttttcgtcgttagttcgcggtttttgtcgcgatttcgtttattgcgggttttttcgttcgttttcgcggtcgggaggtttggatttattttcgggataaggtgattcggtaagtgcgtttaagcggtcgttcgcgattttttcgagcgagcgagcgtgcggggcggtgcggcgttcgtttttgttttttcgttgttaggttttttttttttttgttttttttttagcgtcgttttgttttttacgttttttttcgttttgcgtttttcgtttgcgttttcggttgtttcgagcgtcgggcgcggggtagcggcggtagttcgagcggcggggagtcgggagttgcggcgtcggggcggagtttaattttttcggttttcgggagaggaaggggtgcggggagattttcgtcgcgttcgtttggtcggtaggttgggcgaggggcgttttggggcgagtcgttttttttcgtttgtcgagtttgtcgacgcgcgtgttggaggtagcgggcgcgggtttcgggggaggagggtagggaagagaaggagggcgtagttcgcgcgaaggtggttattaattttggtttagattagggaggttttagcg

SEQ ID NO: 26674 - DNA, 716 bp, Artificial Sequence
  chemically treated genomic DNA (Homo sapiens) CpG-island No: 26674
cgctaaaacctccctaatctaaaccaaaattaataaccaccttcgcgcgaactacgccctccttctcttccctaccctcctcccccgaaacccgcgcccgctacctccaacacgcgcgtcgacaaactcgacaaacgaaaaaaaacgactcgccccaaaacgcccctcgcccaacctaccgaccaaacgaacgcgacgaaaatctccccgcaccccttcctctcccgaaaaccgaaaaaattaaactccgccccgacgccgcaactcccgactccccgccgctcgaactaccgccgctaccccgcgcccgacgctcgaaacaaccgaaaacgcaaacgaaaaacgcaaaacgaaaaaaaacgtaaaaaacaaaacgacgctaaaaaaaaaacaaaaaaaaaaaaaacctaacaacgaaaaaacaaaaacgaacgccgcaccgccccgcacgctcgctcgctcgaaaaaatcgcgaacgaccgcttaaacgcacttaccgaatcaccttatcccgaaaataaatccaaacctcccgaccgcgaaaacgaacgaaaaaacccgcaataaacgaaatcgcgacaaaaaccgcgaactaacgacgaaaactaaaaactaccctacgctaacgaatatcctaatcctaactccgcctcgaaacgcgcaaacccgacgacgacgtaacgcccgcgataaatccgaataatcgccgcgacgaa

SEQ ID NO: 26675 - DNA, 716 bp, Artificial Sequence
  chemically treated genomic DNA (Homo sapiens) CpG-island No: 26675
cgttagggtttttttggtttgggttaaagttggtggttattttcgcgcgggttgcgtttttttttttttttttgtttttttttttcggggttcgcgttcgttgtttttagtacgcgcgtcggtaggttcggtaagcgaagaggagcggttcgttttagggcgtttttcgtttagtttgtcggttaggcgagcgcgacgagagttttttcgtatttttttttttttcgggggtcgagagggttgggtttcgtttcggcgtcgtagttttcgatttttcgtcgttcgggttgtcgtcgttgtttcgcgttcggcgttcggggtagtcgggggcgtaggcggagagcgtagggcggggagaggcgtggggagtagagcggcgttgaggggagggtagaggaggagagagtttggtagcggaggagtagaggcgggcgtcgtatcgtttcgtacgttcgttcgttcgggagagtcgcgggcggtcgtttgggcgtatttgtcgggttattttgtttcggaggtaagtttagatttttcggtcgcgggggcgggcggaggggttcgtagtgggcggggtcgcggtaggggtcgcgagttggcggcgggagttggaggttgttttgcgttggcgggtgttttagttttggtttcgtttcggagcgcgtagattcggcggcggcgtggcgttcgcggtaagttcgggtggtcgtcgcgacgag

SEQ ID NO: 26676 - DNA, 716 bp, Artificial Sequence
  chemically treated genomic DNA (Homo sapiens) CpG-island No: 26676
ctcgtcgcgacgaccacccgaacttaccgcgaacgccacgccgccgccgaatctacgcgctccgaaacgaaaccaaaactaaaacacccgccaacgcaaaacaacctccaactcccgccgccaactcgcgacccctaccgcgaccccgcccactacgaacccctccgcccgcccccgcgaccgaaaaatctaaacttacctccgaaacaaaataacccgacaaatacgcccaaacgaccgcccgcgactctcccgaacgaacgaacgtacgaaacgatacgacgcccgcctctactcctccgctaccaaactctctcctcctctaccctcccctcaacgccgctctactccccacgcctctccccgccctacgctctccgcctacgcccccgactaccccgaacgccgaacgcgaaacaacgacgacaacccgaacgacgaaaaatcgaaaactacgacgccgaaacgaaacccaaccctctcgacccccgaaaaaaaaaaaaatacgaaaaaactctcgtcgcgctcgcctaaccgacaaactaaacgaaaaacgccctaaaacgaaccgctcctcttcgcttaccgaacctaccgacgcgcgtactaaaaacaacgaacgcgaaccccgaaaaaaaaaaacaaaaaaaaaaaaaaaaacgcaacccgcgcgaaaataaccaccaactttaacccaaaccaaaaaaaccctaacg

SEQ ID NO: 26677 - DNA, 548 bp, Artificial Sequence
  chemically treated genomic DNA (Homo sapiens) CpG-island No: 26677
tggtaaatggtcgtttagttttcggatttgtcgatttgttcgaattttttttttatttttatgacgggttagggcggttgttgcgtttttttttcggtttattgcgtcgtttgtcgttttaggtcgcgtcgcgtttttagtttcgaggttcgttgtaattttcgatttttgtagttatcgtcgttttagtcgttgttgtttttttatgttaatcggtagtcggaattacgtattacgtttgttaggggtttcgtttttgaagtagaaggattaattagcgatcgagaatttcgataagtattttcgcggggaggagtcgggggcggtgttaggggaagtggttttagtatcgcgagatatttaatagcgcgcgttttttttttcgttttggggttttgggttcgggcgcggcgcgcgtttgttgtttaggcgatttcgggagtttcgtttacggcgcgtgggttttttaggttcgggagggtattgagttttagtttcgattcggttcgttgagttatagagtgagtggttttaaagtagttatgtat

SEQ ID NO: 26678 - DNA, 548 bp, Artificial Sequence
  chemically treated genomic DNA (Homo sapiens) CpG-island No: 26678
atacataactactttaaaaccactcactctataactcaacgaaccgaatcgaaactaaaactcaataccctcccgaacctaaaaaacccacgcgccgtaaacgaaactcccgaaatcgcctaaacaacaaacgcgcgccgcgcccgaacccaaaaccccaaaacgaaaaaaaaaacgcgcgctattaaatatctcgcgatactaaaaccacttcccctaacaccgcccccgactcctccccgcgaaaatacttatcgaaattctcgatcgctaattaatccttctacttcaaaaacgaaacccctaacaaacgtaatacgtaattccgactaccgattaacataaaaaaacaacaacgactaaaacgacgataactacaaaaatcgaaaattacaacgaacctcgaaactaaaaacgcgacgcgacctaaaacgacaaacgacgcaataaaccgaaaaaaaaacgcaacaaccgccctaacccgtcataaaaataaaaaaaaaattcgaacaaatcgacaaatccgaaaactaaacgaccatttacca

SEQ ID NO: 26679 - DNA, 548 bp, Artificial Sequence
  chemically treated genomic DNA (Homo sapiens) CpG-island No: 26679
gtgtatgattattttaaggttatttattttgtgatttaacgggtcgggtcggggttggaatttaatgttttttcgggtttggagagtttacgcgtcgtgggcggggttttcggggtcgtttaggtaataggcgcgcgtcgcgttcgagtttagagttttaaagcggaggagggaacgcgcgttattagatatttcgcggtgttggggttattttttttagtatcgttttcggttttttttcgcggaagtgtttgtcgaaattttcgatcgttgattggtttttttgttttaggggcggagtttttggtaggcgtgatgcgtagtttcggttgtcggttgatatgaagaagtagtagcggttagggcggcggtagttgtaggggtcggggattgtagcgggtttcggggttaagagcgcgacgcggtttagagcggtagacggcgtagtgggtcgagaaggaggcgtagtagtcgttttggttcgttatggagatggaaaaggagttcgagtagatcgataagttcgggagttgggcggttatttatta

SEQ ID NO: 26680 - DNA, 548 bp, Artificial Sequence
  chemically treated genomic DNA (Homo sapiens) CpG-island No: 26680
taataaataaccgcccaactcccgaacttatcgatctactcgaactccttttccatctccataacgaaccaaaacgactactacgcctccttctcgacccactacgccgtctaccgctctaaaccgcgtcgcgctcttaaccccgaaacccgctacaatccccgacccctacaactaccgccgccctaaccgctactacttcttcatatcaaccgacaaccgaaactacgcatcacgcctaccaaaaactccgcccctaaaacaaaaaaaccaatcaacgatcgaaaatttcgacaaacacttccgcgaaaaaaaaccgaaaacgatactaaaaaaaataaccccaacaccgcgaaatatctaataacgcgcgttccctcctccgctttaaaactctaaactcgaacgcgacgcgcgcctattacctaaacgaccccgaaaaccccgcccacgacgcgtaaactctccaaacccgaaaaaacattaaattccaaccccgacccgacccgttaaatcacaaaataaataaccttaaaataatcatacac

SEQ ID NO: 26681 - DNA, 588 bp, Artificial Sequence
  chemically treated genomic DNA (Homo sapiens) CpG-island No: 26681
gatcgttcgttcgtttttagtttggatttcgttgtttagtagtttcggttggttcgcgtcgcgtttttttcgttttggtagttttggtattggtaggacgttcgtagttttttattttagagggcgtcgggcgggtacgcgttgggggcgacgggggtggggcgggggaggcggggcgacgtagcgcggggcggtcggcggttggtgttcgtagttcgcgcgttcgttttttcggttacgtgatttttgggtttcgtttagatcgggagtttcgcgcggatttttggtgcgatttcgttttattgagcgttcgggtcgggattttttcggtgtttttgtggggtagagtttcgttgtgtagaagaggcgagttgaggtacggtggtaggcggggcgtttaagtagttagcgtcgcgtttggtcgttcgttcgcgcgggaaagcgttgttttttttttttcggatggaattggaacggtagttttcgtagcgttcgaattgtgcggtttttgattttattgttgtatttatagtgcgtagagtataggggtacgcggtatattatttgaatgaataatttttttatttt

SEQ ID NO: 26682 - DNA, 588 bp, Artificial Sequence
  chemically treated genomic DNA (Homo sapiens) CpG-island No: 26682
aaaataaaaaaattattcattcaaataatataccgcgtacccctatactctacgcactataaatacaacaataaaatcaaaaaccgcacaattcgaacgctacgaaaactaccgttccaattccatccgaaaaaaaaaaaacaacgctttcccgcgcgaacgaacgaccaaacgcgacgctaactacttaaacgccccgcctaccaccgtacctcaactcgcctcttctacacaacgaaactctaccccacaaaaacaccgaaaaaatcccgacccgaacgctcaataaaacgaaatcgcaccaaaaatccgcgcgaaactcccgatctaaacgaaacccaaaaatcacgtaaccgaaaaaacgaacgcgcgaactacgaacaccaaccgccgaccgccccgcgctacgtcgccccgcctcccccgccccacccccgtcgcccccaacgcgtacccgcccgacgccctctaaaataaaaaactacgaacgtcctaccaataccaaaactaccaaaacgaaaaaaacgcgacgcgaaccaaccgaaactactaaacaacgaaatccaaactaaaaacgaacgaacgatc

SEQ ID NO: 26683 - DNA, 588 bp, Artificial Sequence
  chemically treated genomic DNA (Homo sapiens) CpG-island No: 26683
aggataagaaagttatttatttaaataatgtatcgcgtgtttttgtgttttgcgtattgtgggtatagtagtgaaattaaggatcgtatagttcgggcgttacgagagttgtcgttttaattttattcgaaggaagggagataacgttttttcgcgcggacgagcggttaggcgcggcgttaattgtttggacgtttcgtttgttatcgtgttttagttcgttttttttgtataacgggattttgttttatagggatatcgggaaggtttcgattcgagcgtttagtgggacggggtcgtattaagagttcgcgcggaattttcgatttgggcggggtttaaaggttacgtggtcgggaaggcgggcgcgcgggttgcgagtattaatcgtcggtcgtttcgcgttgcgtcgtttcgtttttttcgttttattttcgtcgtttttagcgcgtgttcgttcggcgttttttagggtggaaggttgcgggcgttttattagtgttaggattgttagagcgggaggagcgcggcgcgggttagtcgggattgttggatagcggggtttaggttagaggcgagcgagcggtt

SEQ ID NO: 26684 - DNA, 588 bp, Artificial Sequence
  chemically treated genomic DNA (Homo sapiens) CpG-island No: 26684
aaccgctcgctcgcctctaacctaaaccccgctatccaacaatcccgactaacccgcgccgcgctcctcccgctctaacaatcctaacactaataaaacgcccgcaaccttccaccctaaaaaacgccgaacgaacacgcgctaaaaacgacgaaaataaaacgaaaaaaacgaaacgacgcaacgcgaaacgaccgacgattaatactcgcaacccgcgcgcccgccttcccgaccacgtaacctttaaaccccgcccaaatcgaaaattccgcgcgaactcttaatacgaccccgtcccactaaacgctcgaatcgaaaccttcccgatatccctataaaacaaaatcccgttatacaaaaaaaacgaactaaaacacgataacaaacgaaacgtccaaacaattaacgccgcgcctaaccgctcgtccgcgcgaaaaaacgttatctcccttccttcgaataaaattaaaacgacaactctcgtaacgcccgaactatacgatccttaatttcactactatacccacaatacgcaaaacacaaaaacacgcgatacattatttaaataaataactttcttatcct

SEQ ID NO: 26685 - DNA, 605 bp, Artificial Sequence
  chemically treated genomic DNA (Homo sapiens) CpG-island No: 26685
gcgtttcgcgaattcgcggacgtgtaggtttcgagttatttttattgttgggttgcgtgatttagcggttcgaggagagaaattttttaaaatcgggggatcgagacggggtttaatttaaatttaggtgggagaatgagtttataagcgcgcgtttttgtagttgcggaggcgcgcgttcgtttattttcgggcgtttgaagtcgtagcggttgtagagtttcgagttcgtggatgcggcgcgcgtcgcggtttgggtttgcgcgagaggttgtcgttcgcgtcgggtttgggtttacgcgtgtttggtttgggtttgtcggtgtaatagtagttgtcgttatcggttttaggtcgcgtcgagcgagtcgtcgagaggggcgggaagaggggagaggttcgagattagggagcgggatttaaagggggtttttcgcgttcgataggttcgtcggggttagttttcgaggcggggagagggagcggggttttttaaggatcgtatgttcgcgatagtatatttgagttttggtaggttatttgggtcgttttttttcggaaattttgcggggtttttaagtaaggtttataatgggaaattttat

SEQ ID NO: 26686 - DNA, 605 bp, Artificial Sequence
  chemically treated genomic DNA (Homo sapiens) CpG-island No: 26686
ataaaatttcccattataaaccttacttaaaaaccccgcaaaatttccgaaaaaaaacgacccaaataacctaccaaaactcaaatatactatcgcgaacatacgatccttaaaaaaccccgctccctctccccgcctcgaaaactaaccccgacgaacctatcgaacgcgaaaaaccccctttaaatcccgctccctaatctcgaacctctcccctcttcccgcccctctcgacgactcgctcgacgcgacctaaaaccgataacgacaactactattacaccgacaaacccaaaccaaacacgcgtaaacccaaacccgacgcgaacgacaacctctcgcgcaaacccaaaccgcgacgcgcgccgcatccacgaactcgaaactctacaaccgctacgacttcaaacgcccgaaaataaacgaacgcgcgcctccgcaactacaaaaacgcgcgcttataaactcattctcccacctaaatttaaattaaaccccgtctcgatcccccgattttaaaaaatttctctcctcgaaccgctaaatcacgcaacccaacaataaaaataactcgaaacctacacgtccgcgaattcgcgaaacgc

SEQ ID NO: 26687 - DNA, 605 bp, Artificial Sequence
  chemically treated genomic DNA (Homo sapiens) CpG-island No: 26687
ataaagttttttattgtaaattttgtttggaaatttcgtaaggttttcgaaagaaggcggtttaggtggtttgttagggtttaaatgtgttatcgcgaatatgcggtttttgaaggatttcgtttttttttttcgtttcgaaggttaatttcggcggatttgtcgggcgcggaaagttttttttaggtttcgttttttggtttcggatttttttttttttttcgtttttttcggcgattcgttcggcgcggtttaggatcggtggcgataattgttgttgtatcggtaggtttaggttagatacgcgtaggtttaggttcgacgcgggcggtagtttttcgcgtaggtttagatcgcggcgcgcgtcgtatttacgggttcgaggttttgtaatcgttgcgattttaggcgttcgagggtgggcgggcgcgcgttttcgtagttgtaggggcgcgcgtttgtgggtttatttttttatttaggtttaaattgaatttcgtttcggtttttcggttttgagaggttttttttttcgagtcgttgagttacgtagtttaatagtaggagtggttcgaggtttatacgttcgcgagttcgcggggcgt

SEQ ID NO: 26688 - DNA, 605 bp, Artificial Sequence
  chemically treated genomic DNA (Homo sapiens) CpG-island No: 26688
acgccccgcgaactcgcgaacgtataaacctcgaaccactcctactattaaactacgtaactcaacgactcgaaaaaaaaaacctctcaaaaccgaaaaaccgaaacgaaattcaatttaaacctaaataaaaaaataaacccacaaacgcgcgcccctacaactacgaaaacgcgcgcccgcccaccctcgaacgcctaaaatcgcaacgattacaaaacctcgaacccgtaaatacgacgcgcgccgcgatctaaacctacgcgaaaaactaccgcccgcgtcgaacctaaacctacgcgtatctaacctaaacctaccgatacaacaacaattatcgccaccgatcctaaaccgcgccgaacgaatcgccgaaaaaaacgaaaaaaaaaaaaaaatccgaaaccaaaaaacgaaacctaaaaaaaactttccgcgcccgacaaatccgccgaaattaaccttcgaaacgaaaaaaaaaaacgaaatccttcaaaaaccgcatattcgcgataacacatttaaaccctaacaaaccacctaaaccgccttctttcgaaaaccttacgaaatttccaaacaaaatttacaataaaaaactttat

SEQ ID NO: 26689 - DNA, 684 bp, Artificial Sequence
  chemically treated genomic DNA (Homo sapiens) CpG-island No: 26689
gaaatttattttttatttattatttatagtcgcggttagttagggaggtataaagattaaatttagcgttaatatttttcgatatttatattttagagaaatttacgcgcgggtgtttaaagtaaatgaggttttatttttagtaaggaattttagagtttatgaattttcgttgtagcgtcgcggagggtttgcgcgtcgtttcgtggacgggtttcggtcggcggggaggatttggtggttggtgtttgcgggggcgggagggggcggaggagaaaggacggttttttagggtcgttcgagtcgcgggaagtacgtcgcgtatttttttttggttttcgcggttcggtttttttgttttcggtttttaaattagttgttgatttgggtggtggtgaggtcggtggtttcggttagttttcgttttttacgcggcgatgggtagggattgtgcgcgtattattttcgtaggatatttttcgatttttttttgaagtagtagttggttttttcgtcgttttagatggtgcgcggtagtggaaattttcggcgtattcgatatttgtttacggcgtttaggggtcggtcgcgtagtttttcggtttttacgtaatgcgtttttagttatagttgttgtagtttggggtggttgtgaggcgagaattggtggttttttaggatttt

SEQ ID NO: 26690 - DNA, 684 bp, Artificial Sequence
  chemically treated genomic DNA (Homo sapiens) CpG-island No: 26690
aaaatcctaaaaaaccaccaattctcgcctcacaaccaccccaaactacaacaactataactaaaaacgcattacgtaaaaaccgaaaaactacgcgaccgacccctaaacgccgtaaacaaatatcgaatacgccgaaaatttccactaccgcgcaccatctaaaacgacgaaaaaaccaactactacttcaaaaaaaaatcgaaaaatatcctacgaaaataatacgcgcacaatccctacccatcgccgcgtaaaaaacgaaaactaaccgaaaccaccgacctcaccaccacccaaatcaacaactaatttaaaaaccgaaaacaaaaaaaccgaaccgcgaaaaccaaaaaaaaatacgcgacgtacttcccgcgactcgaacgaccctaaaaaaccgtcctttctcctccgccccctcccgcccccgcaaacaccaaccaccaaatcctccccgccgaccgaaacccgtccacgaaacgacgcgcaaaccctccgcgacgctacaacgaaaattcataaactctaaaattccttactaaaaataaaacctcatttactttaaacacccgcgcgtaaatttctctaaaatataaatatcgaaaaatattaacgctaaatttaatctttatacctccctaactaaccgcgactataaataataaataaaaaataaatttc

SEQ ID NO: 26691 - DNA, 684 bp, Artificial Sequence
  chemically treated genomic DNA (Homo sapiens) CpG-island No: 26691
aagattttggagagttattagttttcgttttataattattttaaattgtagtaattgtggttgaaggcgtattacgtggaggtcgagaagttgcgcggtcgatttttgggcgtcgtgggtaaatatcgggtgcgtcgaaaatttttattgtcgcgtattatttgggacggcgaggagattagttattgttttaaggagaagtcgaggggtgttttgcgggagtggtacgcgtataatttttatttatcgtcgcgtgagaagcgggagttggtcgaggttatcggttttattattatttaggttagtaattggtttaagaatcggaggtaaagagatcgggtcgcggaggttaaggaaaggtacgcggcgtgtttttcgcgattcgggcgattttaggaagtcgttttttttttttcgttttttttcgttttcgtaggtattagttattaagtttttttcgtcggtcggagttcgtttacggggcggcgcgtaggtttttcgcggcgttgtagcgaaagtttatgaattttgaggttttttgttaaggatggggttttatttgttttgagtattcgcgcgtgggtttttttgggatgtgagtgtcgggaaatattggcgttagatttggtttttatgtttttttggttggtcgcggttatgagtggtgggtggagagtgagtttt

SEQ ID NO: 26692 - DNA, 684 bp, Artificial Sequence
  chemically treated genomic DNA (Homo sapiens) CpG-island No: 26692
aaaactcactctccacccaccactcataaccgcgaccaaccaaaaaaacataaaaaccaaatctaacgccaatatttcccgacactcacatcccaaaaaaacccacgcgcgaatactcaaaacaaataaaaccccatccttaacaaaaaacctcaaaattcataaactttcgctacaacgccgcgaaaaacctacgcgccgccccgtaaacgaactccgaccgacgaaaaaaacttaataactaatacctacgaaaacgaaaaaaaacgaaaaaaaaaaaacgacttcctaaaatcgcccgaatcgcgaaaaacacgccgcgtacctttccttaacctccgcgacccgatctctttacctccgattcttaaaccaattactaacctaaataataataaaaccgataacctcgaccaactcccgcttctcacgcgacgataaataaaaattatacgcgtaccactcccgcaaaacacccctcgacttctccttaaaacaataactaatctcctcgccgtcccaaataatacgcgacaataaaaattttcgacgcacccgatatttacccacgacgcccaaaaatcgaccgcgcaacttctcgacctccacgtaatacgccttcaaccacaattactacaatttaaaataattataaaacgaaaactaataactctccaaaatctt

SEQ ID NO: 26693 - DNA, 922 bp, Artificial Sequence
  chemically treated genomic DNA (Homo sapiens) CpG-island No: 26693
tgtcgcggtggaaggcgattatcgttttggttttgagtacgttttcgtttttgtgtaggtggtcgtaggcgggtagtgattataggaatttgtttaggcgttttaggttttcgttttgttgtagaatttcgtatacgtacgttatttgtttttgcgtaaagttaaacgacggtagtatcgatatggttggggtttgtcggggcgtacggtttaggcgtacgcggtagggagtagagtcgagaggtagggggcggcggtcgtagggaggggggcgcggttgtttttaattttttttttaggttttgtaaaggcgaaaatcggagtcggaatttggcggtgggcggttaaggaagagaaggcggaggagtaggggaggttttggatacggaacggtcggcgtatttagtagtttttaaggttttgttgttttcgatttttcgttcggtggatgttgttagttgtcggggaatttggtttttgtttttttcgtagcggttttaaagcgcgtagcgttttcggtacgttgattggttgtcggcggcgtttattcggggttggttagttagcgcgtcgttcggttgggtagagaggtcgtatcgtttagagcggggagggcgaggttgcggagttgggggttgggggtgttgtcggggttgcgcgggtagggagtggtgggaggagaaggaagaggaaaggtgggaagttagttggggtttgagggagttgcgttgcggaggtgtggggaggtagggagtgggtgagcgcgttaggattttgtaacgcgggattcgtcgttagtattatttaaggggagtcgcgtataatttcgtataaattaatgattttaaattttaatttttttttttttttttcgtatttttgtttttattttttgtagatttgttttttttcggtgagttta

SEQ ID NO: 26694 - DNA, 922 bp, Artificial Sequence
  chemically treated genomic DNA (Homo sapiens) CpG-island No: 26694
taaactcaccgaaaaaaaacaaatctacaaaaaataaaaacaaaaatacgaaaaaaaaaaaaaaaaattaaaatttaaaatcattaatttatacgaaattatacgcgactccccttaaataatactaacgacgaatcccgcgttacaaaatcctaacgcgctcacccactccctacctccccacacctccgcaacgcaactccctcaaaccccaactaacttcccacctttcctcttccttctcctcccaccactccctacccgcgcaaccccgacaacacccccaacccccaactccgcaacctcgccctccccgctctaaacgatacgacctctctacccaaccgaacgacgcgctaactaaccaaccccgaataaacgccgccgacaaccaatcaacgtaccgaaaacgctacgcgctttaaaaccgctacgaaaaaaacaaaaaccaaattccccgacaactaacaacatccaccgaacgaaaaatcgaaaacaacaaaaccttaaaaactactaaatacgccgaccgttccgtatccaaaacctcccctactcctccgccttctcttccttaaccgcccaccgccaaattccgactccgattttcgcctttacaaaacctaaaaaaaaaattaaaaacaaccgcgcccccctccctacgaccgccgccccctacctctcgactctactccctaccgcgtacgcctaaaccgtacgccccgacaaaccccaaccatatcgatactaccgtcgtttaactttacgcaaaaacaaataacgtacgtatacgaaattctacaacaaaacgaaaacctaaaacgcctaaacaaattcctataatcactacccgcctacgaccacctacacaaaaacgaaaacgtactcaaaaccaaaacgataatcgccttccaccgcgaca

SEQ ID NO: 26695 - DNA, 922 bp, Artificial Sequence
  chemically treated genomic DNA (Homo sapiens) CpG-island No: 26695
tgagtttatcgggagagggtaagtttgtaagggatgaggataagagtacggagggagaggggaggaattaaggtttggagttattgatttgtgcggagttgtgcgcgattttttttaggtgatattggcgacgggtttcgcgttgtagggttttgacgcgtttatttattttttatttttttatattttcgtagcgtagtttttttagattttaattggttttttatttttttttttttttttttttttattattttttattcgcgtagtttcggtaatatttttaatttttagtttcgtagtttcgtttttttcgttttgggcggtgcggtttttttgtttagtcgggcggcgcgttggttggttagtttcggataggcgtcgtcggtagttaattagcgtgtcggggacgttgcgcgttttaaggtcgttgcggggagaatagaaattaagtttttcggtaattagtagtatttatcgggcgggaggtcggaggtagtaaggttttaaaggttattgagtgcgtcggtcgtttcgtgtttagaattttttttattttttcgtttttttttttttggtcgtttatcgttaagtttcgatttcggttttcgtttttgtaaagtttaaggaggaggttaggaatagtcgcgtttttttttttgcggtcgtcgttttttgtttttcggttttgttttttgtcgcgtgcgtttgggtcgtgcgtttcggtaggttttagttatgtcgatgttgtcgtcgtttggttttacgtaggagtaagtggcgtgcgtgtgcgaggttttgtagtaaggcggaaatttggagcgtttgggtaggtttttgtggttattgttcgtttgcgattatttgtataagaacgagagcgtatttaaggttaaggcggtggtcgttttttatcgcggta

SEQ ID NO: 26696 - DNA, 922 bp, Artificial Sequence
  chemically treated genomic DNA (Homo sapiens) CpG-island No: 26696
taccgcgataaaaaacgaccaccgccttaaccttaaatacgctctcgttcttatacaaataatcgcaaacgaacaataaccacaaaaacctacccaaacgctccaaatttccgccttactacaaaacctcgcacacgcacgccacttactcctacgtaaaaccaaacgacgacaacatcgacataactaaaacctaccgaaacgcacgacccaaacgcacgcgacaaaaaacaaaaccgaaaaacaaaaaacgacgaccgcaaaaaaaaaaacgcgactattcctaacctcctccttaaactttacaaaaacgaaaaccgaaatcgaaacttaacgataaacgaccaaaaaaaaaaaaacgaaaaaataaaaaaaattctaaacacgaaacgaccgacgcactcaataacctttaaaaccttactacctccgacctcccgcccgataaatactactaattaccgaaaaacttaatttctattctccccgcaacgaccttaaaacgcgcaacgtccccgacacgctaattaactaccgacgacgcctatccgaaactaaccaaccaacgcgccgcccgactaaacaaaaaaaccgcaccgcccaaaacgaaaaaaacgaaactacgaaactaaaaattaaaaatattaccgaaactacgcgaataaaaaataataaaaaaaaaaaaaaaaaaaaaaataaaaaaccaattaaaatctaaaaaaactacgctacgaaaatataaaaaaataaaaaataaataaacgcgtcaaaaccctacaacgcgaaacccgtcgccaatatcacctaaaaaaaatcgcgcacaactccgcacaaatcaataactccaaaccttaattcctcccctctccctccgtactcttatcctcatcccttacaaacttaccctctcccgataaactca

SEQ ID NO: 26697 - DNA, 581 bp, Artificial Sequence
  chemically treated genomic DNA (Homo sapiens) CpG-island No: 26697
cgttatttttatttattaattttcgtgtaggttcgggtttacgtttcgcggattgattttgagttttagtataattcgttgtgttaggtgcgcgcgcgtagttaagtattcgcgcgcggacgtcggggaggttttatcgttcggtgtgttggcggtttcgttcgttggttcgtagagcggggtttcgtagagttgggttttattcgtcgtttcgtcgtttgtattagaaatttttttttcgggttgtgcgggagtttttgggcgtcgcgtttgcgtcggggtcgatttcgtttaggtttgtagttagaggtcgcgttatttcgtcgggttggttcggcgttttttggggttgttttttcgggcggtgtatggggtttataggcgtcggggtttgagggaagaggggtcggggtttgaagggcggggattataacgaggcgcggggaggttagtggagcggagagtcggcgtaggcgcgcgcggcgcggtcggaggagaaagagggcgttgtttttttggtaaaggagttttcgtttggtcggtaggaatcgaaataataataataataaaaaaaaaagaaa

SEQ ID NO: 26698 - DNA, 581 bp, Artificial Sequence
  chemically treated genomic DNA (Homo sapiens) CpG-island No: 26698
tttcttttttttttattattattattatttcgattcctaccgaccaaacgaaaactcctttaccaaaaaaacaacgccctctttctcctccgaccgcgccgcgcgcgcctacgccgactctccgctccactaacctccccgcgcctcgttataatccccgcccttcaaaccccgacccctcttccctcaaaccccgacgcctataaaccccatacaccgcccgaaaaaacaaccccaaaaaacgccgaaccaacccgacgaaataacgcgacctctaactacaaacctaaacgaaatcgaccccgacgcaaacgcgacgcccaaaaactcccgcacaacccgaaaaaaaaatttctaatacaaacgacgaaacgacgaataaaacccaactctacgaaaccccgctctacgaaccaacgaacgaaaccgccaacacaccgaacgataaaacctccccgacgtccgcgcgcgaatacttaactacgcgcgcgcacctaacacaacgaattatactaaaactcaaaatcaatccgcgaaacgtaaacccgaacctacacgaaaattaataaataaaaataacg

SEQ ID NO: 26699 - DNA, 581 bp, Artificial Sequence
  chemically treated genomic DNA (Homo sapiens) CpG-island No: 26699
ttttttttttttttgttgttgttgttgtttcggtttttgtcggttaggcgaaaatttttttgttaggaagatagcgttttttttttttttcggtcgcgtcgcgcgcgtttgcgtcggtttttcgttttattgattttttcgcgtttcgttgtggttttcgttttttaggtttcggtttttttttttttaagtttcgacgtttgtgggttttatgtatcgttcgagggaataattttagagagcgtcgggttagttcggcgagatagcgcgatttttggttataagtttgggcggagtcggtttcggcgtagacgcggcgtttaagagttttcgtatagttcggggagggagtttttggtgtaggcggcggggcgacgggtgaggtttagttttgcgagatttcgttttgcgagttagcgggcggggtcgttagtatatcgggcggtgaagttttttcggcgttcgcgcgcggatatttggttgcgcgcgcgtatttggtatagcgagttatattgaggtttaggattagttcgcgaaacgtggattcgggtttgtacgagggttgatgggtgagggtggcg

SEQ ID NO: 26700 - DNA, 581 bp, Artificial Sequence
  chemically treated genomic DNA (Homo sapiens) CpG-island No: 26700
cgccaccctcacccatcaaccctcgtacaaacccgaatccacgtttcgcgaactaatcctaaacctcaatataactcgctataccaaatacgcgcgcgcaaccaaatatccgcgcgcgaacgccgaaaaaacttcaccgcccgatatactaacgaccccgcccgctaactcgcaaaacgaaatctcgcaaaactaaacctcacccgtcgccccgccgcctacaccaaaaactccctccccgaactatacgaaaactcttaaacgccgcgtctacgccgaaaccgactccgcccaaacttataaccaaaaatcgcgctatctcgccgaactaacccgacgctctctaaaattattccctcgaacgatacataaaacccacaaacgtcgaaacttaaaaaaaaaaaaaccgaaacctaaaaaacgaaaaccacaacgaaacgcgaaaaaatcaataaaacgaaaaaccgacgcaaacgcgcgcgacgcgaccgaaaaaaaaaaaaaacgctatcttcctaacaaaaaaattttcgcctaaccgacaaaaaccgaaacaacaacaacaacaaaaaaaaaaaaaa

SEQ ID NO: 26701 - DNA, 583 bp, Artificial Sequence
  chemically treated genomic DNA (Homo sapiens) CpG-island No: 26701
tttgtgtgggtgtggggaaggtgtggaaggaatcgtttaggttcgtgtgggtgtggagaaggtgtggaaggaattcgtttaggttcgtgtgggtgtggagaaggtgtggaaggaattcgtttaggttcgtgtgggtgtgtataaggtgtggaaggaattcgtttaggttcgtgtgggtgtggaggtgtggaaggaatcgtttaggtttgtgtgggtgtggagaaggtttggaaggaattcgtttaggttcgtgtgggtgtggagaaggtgtggaaggaatcgtttaggtttgtgtgggtgtggggaaggtgtggaaggaatttatttaggttcgtgtgggtgtggaggtgtggaaggaatcgtttaggttcgtgtgggtgtggagaatgggtgtggggaaggtgtggaaggaatcgtttaggttcgtgtgggtgtggagaaggtgtggaaggaatttatttaggttcgtgtgggtgtggggaaggtgtggaaggaatcgtttaggttcgtgtaggtgtggagaagttacggaaggatatatgtttgggggattggaatagggggagatgattagttttttttt

SEQ ID NO: 26702 - DNA, 583 bp, Artificial Sequence
  chemically treated genomic DNA (Homo sapiens) CpG-island No: 26702
aaaaaaaaactaatcatctccccctattccaatcccccaaacatatatccttccgtaacttctccacacctacacgaacctaaacgattccttccacaccttccccacacccacacgaacctaaataaattccttccacaccttctccacacccacacgaacctaaacgattccttccacaccttccccacacccattctccacacccacacgaacctaaacgattccttccacacctccacacccacacgaacctaaataaattccttccacaccttccccacacccacacaaacctaaacgattccttccacaccttctccacacccacacgaacctaaacgaattccttccaaaccttctccacacccacacaaacctaaacgattccttccacacctccacacccacacgaacctaaacgaattccttccacaccttatacacacccacacgaacctaaacgaattccttccacaccttctccacacccacacgaacctaaacgaattccttccacaccttctccacacccacacgaacctaaacgattccttccacaccttccccacacccacacaaa

SEQ ID NO: 26703 - DNA, 583 bp, Artificial Sequence
  chemically treated genomic DNA (Homo sapiens) CpG-island No: 26703
aaggaaaagttaattatttttttttattttagttttttaggtatgtattttttcgtagtttttttatatttatacgaatttagacgattttttttatattttttttatatttatacgaatttagatgaattttttttatattttttttatatttatacgaatttagacgattttttttatattttttttatatttattttttatatttatacgaatttagacgattttttttatatttttatatttatacgaatttagatgaattttttttatattttttttatatttatataaatttagacgattttttttatattttttttatatttatacgaatttagacgaattttttttagattttttttatatttatatagatttagacgattttttttatatttttatatttatacgaatttagacgaattttttttatattttgtgtatatttatacgaatttagacgaattttttttatattttttttatatttatacgaatttagacgaattttttttatattttttttatatttatacgaatttagacgattttttttatattttttttatatttatataga

SEQ ID NO: 26704 - DNA, 583 bp, Artificial Sequence
  chemically treated genomic DNA (Homo sapiens) CpG-island No: 26704
tctatataaatataaaaaaaatataaaaaaaatcgtctaaattcgtataaatataaaaaaaatataaaaaaaattcgtctaaattcgtataaatataaaaaaaatataaaaaaaattcgtctaaattcgtataaatatacacaaaatataaaaaaaattcgtctaaattcgtataaatataaaaatataaaaaaaatcgtctaaatctatataaatataaaaaaaatctaaaaaaaattcgtctaaattcgtataaatataaaaaaaatataaaaaaaatcgtctaaatttatataaatataaaaaaaatataaaaaaaattcatctaaattcgtataaatataaaaatataaaaaaaatcgtctaaattcgtataaatataaaaaataaatataaaaaaaatataaaaaaaatcgtctaaattcgtataaatataaaaaaaatataaaaaaaattcatctaaattcgtataaatataaaaaaaatataaaaaaaatcgtctaaattcgtataaatataaaaaaactacgaaaaaatacatacctaaaaaactaaaataaaaaaaaataattaacttttcctt

SEQ ID NO: 26705 - DNA, 668 bp, Artificial Sequence
  chemically treated genomic DNA (Homo sapiens) CpG-island No: 26705
ttttagcgcggagttttaaaggcgttaagtcgggtagtcgggtcgttttgaatttgcgggttgtatacgttcgtcgggagttgtagcgttcggagtttagtagagcggtcgtcggtcgtagtcgtaaacgcgtggggtgtagggtcgcgttatcgcgggggaaagatacgaagaggagttgaggaatcgagcgggtagagattacgagaggttttaggtcgacgtcgcgcgcgcgggttcggaagagacggttacgtgatatcgatttgttggttttattgttgttttatatgtacgtcggttattgtggtcgtcgttagtagtatcgagaggtttagtattattttcgagtttttagatatttttacgttggcggtcgcggtttttttttttcgttcgttcgaggcgtagaggtcgtcgtagagtgcgtatcgtcgtttgtattgtttaggttcgatttttcgagcgtagagttttagtcgtcgcgtgcgtcgttcgtcgttgttaggcgtgagtaatcgagagtcgagtatagagcggcgtttaggttttacgaatttttggttttattaggggttttttgtatatttcgtaggcgatagcgttagattattttcgatttaaattttaggagtttcggtttaaattggtttcggtattttattagg

SEQ ID NO: 26706 - DNA, 668 bp, Artificial Sequence
  chemically treated genomic DNA (Homo sapiens) CpG-island No: 26706
cctaataaaataccgaaaccaatttaaaccgaaactcctaaaatttaaatcgaaaataatctaacgctatcgcctacgaaatatacaaaaaacccctaataaaaccaaaaattcgtaaaacctaaacgccgctctatactcgactctcgattactcacgcctaacaacgacgaacgacgcacgcgacgactaaaactctacgctcgaaaaatcgaacctaaacaatacaaacgacgatacgcactctacgacgacctctacgcctcgaacgaacgaaaaaaaaaaaccgcgaccgccaacgtaaaaatatctaaaaactcgaaaataatactaaacctctcgatactactaacgacgaccacaataaccgacgtacatataaaacaacaataaaaccaacaaatcgatatcacgtaaccgtctcttccgaacccgcgcgcgcgacgtcgacctaaaacctctcgtaatctctacccgctcgattcctcaactcctcttcgtatctttcccccgcgataacgcgaccctacaccccacgcgtttacgactacgaccgacgaccgctctactaaactccgaacgctacaactcccgacgaacgtatacaacccgcaaattcaaaacgacccgactacccgacttaacgcctttaaaactccgcgctaaaa

SEQ ID NO: 26707 - DNA, 668 bp, Artificial Sequence
  chemically treated genomic DNA (Homo sapiens) CpG-island No: 26707
tttggtaaggtgtcggggttagtttgggtcgggatttttagaatttgaatcgggggtggtttaacgttgtcgtttgcggggtgtgtaggaggtttttagtgaagttaagagttcgtagagtttgggcgtcgttttatgttcggttttcgattgtttacgtttggtagcggcgagcggcgtacgcgacggttggggttttgcgttcgaggggtcgagtttgggtagtataggcggcggtgcgtattttgcggcggtttttgcgtttcgggcgggcgggagagagaggtcgcggtcgttagcgtggggatgtttaggagttcgaaggtggtgttgggtttttcggtgttgttgacggcggttatagtggtcggcgtatatgtgaagtagtagtgggattagtaggtcggtgttacgtgatcgtttttttcgggttcgcgcgcgcggcgtcgatttggggtttttcgtggtttttgttcgttcggttttttagttttttttcgtgtttttttttcgcggtggcgcggttttgtattttacgcgtttgcggttgcggtcggcggtcgttttgttgggtttcgggcgttgtagttttcggcgggcgtgtgtagttcgtagatttaggacgattcggttgttcggtttagcgtttttggagtttcgcgttgaag

SEQ ID NO: 26708 - DNA, 668 bp, Artificial Sequence
  chemically treated genomic DNA (Homo sapiens) CpG-island No: 26708
cttcaacgcgaaactccaaaaacgctaaaccgaacaaccgaatcgtcctaaatctacgaactacacacgcccgccgaaaactacaacgcccgaaacccaacaaaacgaccgccgaccgcaaccgcaaacgcgtaaaatacaaaaccgcgccaccgcgaaaaaaaaacacgaaaaaaaactaaaaaaccgaacgaacaaaaaccacgaaaaaccccaaatcgacgccgcgcgcgcgaacccgaaaaaaacgatcacgtaacaccgacctactaatcccactactacttcacatatacgccgaccactataaccgccgtcaacaacaccgaaaaacccaacaccaccttcgaactcctaaacatccccacgctaacgaccgcgacctctctctcccgcccgcccgaaacgcaaaaaccgccgcaaaatacgcaccgccgcctatactacccaaactcgacccctcgaacgcaaaaccccaaccgtcgcgtacgccgctcgccgctaccaaacgtaaacaatcgaaaaccgaacataaaacgacgcccaaactctacgaactcttaacttcactaaaaacctcctacacaccccgcaaacgacaacgttaaaccacccccgattcaaattctaaaaatcccgacccaaactaaccccgacaccttaccaaa

SEQ ID NO: 26709 - DNA, 896 bp, Artificial Sequence
  chemically treated genomic DNA (Homo sapiens) CpG-island No: 26709
tggatattcgttttggtagatgttaatttgtgcgttcgaggttgtttttgttcgtttttagtgcgtttattgtataacgcgttttttgttttatttttacgacgttcgttttgttcggtgttcgagttagcgtttcgattcgggtcgttttaatatttatattattttatttgacgaatttggtgttttttttgaggttgtcggatacgtatacgggtttgagttgtaaggcgtgtatttcgggttgagtttcggttatttgggtttatttgggtttcgggcggttcgggcgagcgcggtagggattggggatcgtgcgcggggcgcggggcgcggggcgcgggtttttttttttgtttcggaggcgttcgattttgtttttcgtcggttttttcggtttttcggttttcgtattttttttcggcgtcgtttagtaggtagagcgcgcgggggcgtagcgttcggttatgtttcgggcgggacgcgaggtttggagttcgcggtggatgaggagtttcggaaggcgaagagaagtcgagtcggttagtcgaggttgttagtcgcggcggattttgttttttcgtcgtcgtcgttttaaagcgtattatttagtatattttttatatatagagggagagagcgagtgatatacgttcggcgttttttttaatcgttttttttttttttttttttttttttttttcgtttttttttttcgttattttcgttcgttgggttttttttttttttcgcggtttttagtttaattttgtacgttgggttaggcgttaggaagcggggacgtagcggtattttttggttttcgagttttattgtagttaacgtttgtttttcgtattcgttttgagtatgtttcgtgttttggttgtagaggt

SEQ ID NO: 26710 - DNA, 896 bp, Artificial Sequence
  chemically treated genomic DNA (Homo sapiens) CpG-island No: 26710
acctctacaaccaaaacacgaaacatactcaaaacgaatacgaaaaacaaacgttaactacaataaaactcgaaaaccaaaaaataccgctacgtccccgcttcctaacgcctaacccaacgtacaaaattaaactaaaaaccgcgaaaaaaaaaaaaaacccaacgaacgaaaataacgaaaaaaaaaaacgaaaaaaaaaaaaaaaaaaaaaaaaaaaaaacgattaaaaaaaacgccgaacgtatatcactcgctctctccctctatatataaaaaatatactaaataatacgctttaaaacgacgacgacgaaaaaacaaaatccgccgcgactaacaacctcgactaaccgactcgacttctcttcgccttccgaaactcctcatccaccgcgaactccaaacctcgcgtcccgcccgaaacataaccgaacgctacgcccccgcgcgctctacctactaaacgacgccgaaaaaaaatacgaaaaccgaaaaaccgaaaaaaccgacgaaaaacaaaatcgaacgcctccgaaacaaaaaaaaaaacccgcgccccgcgccccgcgccccgcgcacgatccccaatccctaccgcgctcgcccgaaccgcccgaaacccaaataaacccaaataaccgaaactcaacccgaaatacacgccttacaactcaaacccgtatacgtatccgacaacctcaaaaaaaacaccaaattcgtcaaataaaataatataaatattaaaacgacccgaatcgaaacgctaactcgaacaccgaacaaaacgaacgtcgtaaaaataaaacaaaaaacgcgttatacaataaacgcactaaaaacgaacaaaaacaacctcgaacgcacaaattaacatctaccaaaacgaatatcca

SEQ ID NO: 26711 - DNA, 896 bp, Artificial Sequence
  chemically treated genomic DNA (Homo sapiens) CpG-island No: 26711
atttttgtaattagggtacggggtatgtttagagcgaatgcgggaggtaggcgttggttgtaatggggttcgggagttaggaggtgtcgttgcgttttcgttttttggcgtttgatttagcgtgtaaagttgggttgggagtcgcggggggaaggaaggatttagcgagcgagggtggcggggaaggggggcgggggggaggaggagggaggagggaaaagagcggttagggggggcgtcgggcgtgtgttattcgttttttttttttgtgtatagaggatgtgttgaatggtgcgttttgaggcggcggcggcggaggagtagaattcgtcgcgattggtagtttcggttgatcggttcggttttttttcgtttttcgaggttttttatttatcgcgggttttagatttcgcgtttcgttcggggtatggtcgggcgttgcgttttcgcgcgttttgtttgttgagcggcgtcggagggaggtgcggaggtcgggaggtcggggaggtcggcggggagtagagtcgagcgttttcggagtagagaaaggagttcgcgtttcgcgtttcgcgtttcgcgtacggtttttagtttttgtcgcgttcgttcgggtcgttcggagtttagatgagtttagatggtcggggtttaattcggagtgtacgttttgtaatttaagttcgtgtgcgtgttcgatagttttaagaagggtattaaattcgttaagtgggatgatgtaagtattggggcggttcgagtcggggcgttggttcgggtatcgggtagggcgggcgtcgtgggggtggggtaaggggcgcgttatgtaatgggcgtattgggagcgggtaggggtagtttcgggcgtataggttggtatttgttaaagcggatgttta

SEQ ID NO: 26712 - DNA, 896 bp, Artificial Sequence
  chemically treated genomic DNA (Homo sapiens) CpG-island No: 26712
taaacatccgctttaacaaataccaacctatacgcccgaaactacccctacccgctcccaatacgcccattacataacgcgccccttaccccacccccacgacgcccgccctacccgatacccgaaccaacgccccgactcgaaccgccccaatacttacatcatcccacttaacgaatttaatacccttcttaaaactatcgaacacgcacacgaacttaaattacaaaacgtacactccgaattaaaccccgaccatctaaactcatctaaactccgaacgacccgaacgaacgcgacaaaaactaaaaaccgtacgcgaaacgcgaaacgcgaaacgcgaactcctttctctactccgaaaacgctcgactctactccccgccgacctccccgacctcccgacctccgcacctccctccgacgccgctcaacaaacaaaacgcgcgaaaacgcaacgcccgaccataccccgaacgaaacgcgaaatctaaaacccgcgataaataaaaaacctcgaaaaacgaaaaaaaaccgaaccgatcaaccgaaactaccaatcgcgacgaattctactcctccgccgccgccgcctcaaaacgcaccattcaacacatcctctatacacaaaaaaaaaaaacgaataacacacgcccgacgccccccctaaccgctcttttccctcctccctcctcctcccccccgccccccttccccgccaccctcgctcgctaaatccttccttccccccgcgactcccaacccaactttacacgctaaatcaaacgccaaaaaacgaaaacgcaacgacacctcctaactcccgaaccccattacaaccaacgcctacctcccgcattcgctctaaacataccccgtaccctaattacaaaaat

SEQ ID NO: 26713 - DNA, 937 bp, Artificial Sequence
  chemically treated genomic DNA (Homo sapiens) CpG-island No: 26713
cgtttcgggggcggcgcgggagttttcgtagaatcgggcgggcgtttcggttggcgcgggcggggggcgcgttttttttatttgcggtttcggtttttaggttatttttttacgcggcggcggtcgggattgagttgatattatttaggtcggtcgggtttgaatgaggaggagcgggcgcggagaggagggggcggggagggcggagggagggagggaggcgtcgcggagtttttttcggttttttgtgcggatatttttcggatttcgcgttcgtattcggttttttaaaagatacggggagtcgcgggcgaggggtgtagttattcgtcgaggcgtttagtgttttcgcgtttttaagatttatttttaataaaaaggagcgttttttatttttattttcgttcggaggatttagggtttaggtttatttcgggcgcggagttaagtgttggcgtcgggggtttttagagtcgtcggggcgtagcgagttcggcgttgggtaattgttgggttagaaattgtttaggtagtagttgttgtgtttttttttggtttcgtcgttcggagacgtttcgttttttgtttttaacggtcgcgtcggtttcgttttttgttttgaacggtcgttcggtttcgttttagcgtttacgtgattagtataggcgcgttttcgtttcgttcgtcgtcgtagatttcgttttcggaatgcgagcgagcggcgagcgcgcgtattgttagtttttgttcggcgattttttcgtacgcgcgcgtcgtgttatttttttcgtattttttttttcgttattcggtttaacgtggcgggcgcgcgtcgcggtagtagtcgtgataggtattcggcgggggggggggggagggggttggttcgcgagggtgtgcgtaggtatagattcgggttttgttttcgtcgtttttt

SEQ ID NO: 26714 - DNA, 937 bp, Artificial Sequence
  chemically treated genomic DNA (Homo sapiens) CpG-island No: 26714
aaaaaacgacgaaaacaaaacccgaatctatacctacgcacaccctcgcgaaccaaccccctcccccccccccccgccgaatacctatcacgactactaccgcgacgcgcgcccgccacgttaaaccgaataacgaaaaaaaaaatacgaaaaaaataacacgacgcgcgcgtacgaaaaaatcgccgaacaaaaactaacaatacgcgcgctcgccgctcgctcgcattccgaaaacgaaatctacgacgacgaacgaaacgaaaacgcgcctatactaatcacgtaaacgctaaaacgaaaccgaacgaccgttcaaaacaaaaaacgaaaccgacgcgaccgttaaaaacaaaaaacgaaacgtctccgaacgacgaaaccaaaaaaaaacacaacaactactacctaaacaatttctaacccaacaattacccaacgccgaactcgctacgccccgacgactctaaaaacccccgacgccaacacttaactccgcgcccgaaataaacctaaaccctaaatcctccgaacgaaaataaaaataaaaaacgctcctttttattaaaaataaatcttaaaaacgcgaaaacactaaacgcctcgacgaataactacacccctcgcccgcgactccccgtatcttttaaaaaaccgaatacgaacgcgaaatccgaaaaatatccgcacaaaaaaccgaaaaaaactccgcgacgcctccctccctccctccgccctccccgccccctcctctccgcgcccgctcctcctcattcaaacccgaccgacctaaataatatcaactcaatcccgaccgccgccgcgtaaaaaaataacctaaaaaccgaaaccgcaaataaaaaaaacgcgccccccgcccgcgccaaccgaaacgcccgcccgattctacgaaaactcccgcgccgcccccgaaacg

SEQ ID NO: 26715 - DNA, 937 bp, Artificial Sequence
  chemically treated genomic DNA (Homo sapiens) CpG-island No: 26715
agggggcggcggggataggattcgggtttgtgtttgcgtatattttcgcgggttaattttttttttttttttttcgtcgggtatttgttacggttattgtcgcggcgcgcgttcgttacgttaagtcggatggcgggaggaggggtgcggggagggtggtacggcgcgcgcgtgcgggggagtcgtcgagtaagaattggtagtgcgcgcgttcgtcgttcgttcgtatttcggaggcggagtttgcggcggcgggcggaacgggggcgcgtttatgttagttacgtgggcgttggggcggggtcgggcggtcgtttaaggtagggggcggggtcggcgcggtcgttgaaggtagggggcggggcgttttcgagcggcggggttaagggagggtataatagttgttatttgaatagtttttgatttaatagttatttagcgtcggattcgttgcgtttcggcggttttagggattttcggcgttaatatttagtttcgcgttcgaggtgagtttaggttttaaatttttcgggcgggggtaggggtgggggacgtttttttttgttgggggtgggttttggaggcgcgaaggtattaggcgtttcggcggatggttgtatttttcgttcgcggtttttcgtgttttttggggggtcgggtgcgggcgcggaattcgggaggtgttcgtataaaaggtcgagaaaaatttcgcgacgttttttttttttttttcgtttttttcgttttttttttttcgcgttcgtttttttttatttaaattcggtcggtttgagtggtgttagtttagtttcggtcgtcgtcgcgtgaggaaatggtttaggagtcggagtcgtaggtaaagggggcgcgtttttcgttcgcgttagtcggggcgttcgttcggttttgcggaggttttcgcgtcgttttcgaggcg

SEQ ID NO: 26716 - DNA, 937 bp, Artificial Sequence
  chemically treated genomic DNA (Homo sapiens) CpG-island No: 26716
cgcctcgaaaacgacgcgaaaacctccgcaaaaccgaacgaacgccccgactaacgcgaacgaaaaacgcgccccctttacctacgactccgactcctaaaccatttcctcacgcgacgacgaccgaaactaaactaacaccactcaaaccgaccgaatttaaataaaaaaaaacgaacgcgaaaaaaaaaaaacgaaaaaaacgaaaaaaaaaaaaaaaacgtcgcgaaatttttctcgaccttttatacgaacacctcccgaattccgcgcccgcacccgaccccccaaaaaacacgaaaaaccgcgaacgaaaaatacaaccatccgccgaaacgcctaataccttcgcgcctccaaaacccacccccaacaaaaaaaaacgtcccccacccctacccccgcccgaaaaatttaaaacctaaactcacctcgaacgcgaaactaaatattaacgccgaaaatccctaaaaccgccgaaacgcaacgaatccgacgctaaataactattaaatcaaaaactattcaaataacaactattataccctcccttaaccccgccgctcgaaaacgccccgccccctaccttcaacgaccgcgccgaccccgccccctaccttaaacgaccgcccgaccccgccccaacgcccacgtaactaacataaacgcgcccccgttccgcccgccgccgcaaactccgcctccgaaatacgaacgaacgacgaacgcgcgcactaccaattcttactcgacgactcccccgcacgcgcgcgccgtaccaccctccccgcacccctcctcccgccatccgacttaacgtaacgaacgcgcgccgcgacaataaccgtaacaaatacccgacgaaaaaaaaaaaaaaaaaattaacccgcgaaaatatacgcaaacacaaacccgaatcctatccccgccgccccct

SEQ ID NO: 26717 - DNA, 827 bp, Artificial Sequence
  chemically treated genomic DNA (Homo sapiens) CpG-island No: 26717
gcggcgtttttcgacgttatacgcgtttgttcgtatttagttacgcgtttggggttattttttatatttaggattgaaatttcgttcgcgagatcgcggggcgcggaggagggtcgaaatttaaggtttaggtttagggttcgttttcgcgcgttcgcgttggcgttcgcgcgtttttttcgtaggggttagtaagattgcgtttattttcgtttcggttgttttttattcgttcgttgttttggggtattaggttcgcggtcgcgtttttacgtttcggttggagttttgcggcgggtattggcgagcgcggtttcgttttttggtttagttaatcgcgagttacgtcgattagcgagggggaggtgtcgggcggaaggtttgggtcggtgcgcgggggcgggtgaggtggttttattcgttcgaggggggggcgtggtcggcgtcggtttttgcggtcgagtagagttgcggcgtgggaaagagtcgttaggagtagatcgcgtcgtcgtcggagtcgcgtttgtttaggttcggggagggaggaggcgggcgttagggtgttgcgtttcgttcggcgttcgagttttcggtcgggttgtgtttcgcgcggttttcgtcgggatgaagcgtttttgcgaggagacgattttcgagagcgatatggacgagattatcgacgtggggagcgagaataattattcggggtgagcgcgggtttcgcgggagcggttcgtagttcgggagtttggggtagttttgtgaatgcgtggttttttggaaatttcgaggttggttttcgtagtatttaggtagagagggaaagt

SEQ ID NO: 26718 - DNA, 827 bp, Artificial Sequence
  chemically treated genomic DNA (Homo sapiens) CpG-island No: 26718
actttccctctctacctaaatactacgaaaaccaacctcgaaatttccaaaaaaccacgcattcacaaaactaccccaaactcccgaactacgaaccgctcccgcgaaacccgcgctcaccccgaataattattctcgctccccacgtcgataatctcgtccatatcgctctcgaaaatcgtctcctcgcaaaaacgcttcatcccgacgaaaaccgcgcgaaacacaacccgaccgaaaactcgaacgccgaacgaaacgcaacaccctaacgcccgcctcctccctccccgaacctaaacaaacgcgactccgacgacgacgcgatctactcctaacgactctttcccacgccgcaactctactcgaccgcaaaaaccgacgccgaccacgcccccccctcgaacgaataaaaccacctcacccgcccccgcgcaccgacccaaaccttccgcccgacacctccccctcgctaatcgacgtaactcgcgattaactaaaccaaaaaacgaaaccgcgctcgccaatacccgccgcaaaactccaaccgaaacgtaaaaacgcgaccgcgaacctaataccccaaaacaacgaacgaataaaaaacaaccgaaacgaaaataaacgcaatcttactaacccctacgaaaaaaacgcgcgaacgccaacgcgaacgcgcgaaaacgaaccctaaacctaaaccttaaatttcgaccctcctccgcgccccgcgatctcgcgaacgaaatttcaatcctaaatataaaaaataaccccaaacgcgtaactaaatacgaacaaacgcgtataacgtcgaaaaacgccgc

SEQ ID NO: 26719 - DNA, 827 bp, Artificial Sequence
  chemically treated genomic DNA (Homo sapiens) CpG-island No: 26719
attttttttttttatttagatgttgcggagattagtttcgggatttttagggagttacgtatttataaagttattttaagttttcgagttgcgggtcgttttcgcggagttcgcgtttatttcgagtaattgttttcgttttttacgtcgatggtttcgtttatgtcgttttcggaggtcgttttttcgtaggggcgttttatttcggcgaagatcgcgcggggtatagttcggtcggaagttcggacgtcgagcggggcgtagtattttgacgttcgtttttttttttttcgggtttgggtaggcgcggtttcggcggcggcgcggtttgtttttagcggtttttttttacgtcgtaattttgttcggtcgtaagagtcggcgtcggttacgtttttttttcgagcgggtggggttattttattcgttttcgcgtatcggtttaggtttttcgttcggtatttttttttcgttggtcggcgtggttcgcgattggttgggttagggggcggggtcgcgttcgttaatgttcgtcgtaaggttttagtcgaggcgtgggaacgcggtcgcggatttggtattttagagtagcgagcgggtggggagtagtcggggcgagaatgagcgtaattttgttaatttttgcggagggagcgcgcgggcgttaacgcgggcgcgcgggggcgggttttggatttggattttgggtttcggttttttttcgcgtttcgcggtttcgcgggcgaagttttagttttgagtgtaaagaataattttaagcgcgtggttaagtgcgagtaggcgcgtgtgacgtcgggaggcgtcgt

SEQ ID NO: 26720 - DNA, 827 bp, Artificial Sequence
  chemically treated genomic DNA (Homo sapiens) CpG-island No: 26720
acgacgcctcccgacgtcacacgcgcctactcgcacttaaccacgcgcttaaaattattctttacactcaaaactaaaacttcgcccgcgaaaccgcgaaacgcgaaaaaaaaccgaaacccaaaatccaaatccaaaacccgcccccgcgcgcccgcgttaacgcccgcgcgctccctccgcaaaaattaacaaaattacgctcattctcgccccgactactccccacccgctcgctactctaaaataccaaatccgcgaccgcgttcccacgcctcgactaaaaccttacgacgaacattaacgaacgcgaccccgccccctaacccaaccaatcgcgaaccacgccgaccaacgaaaaaaaaataccgaacgaaaaacctaaaccgatacgcgaaaacgaataaaataaccccacccgctcgaaaaaaaaacgtaaccgacgccgactcttacgaccgaacaaaattacgacgtaaaaaaaaaccgctaaaaacaaaccgcgccgccgccgaaaccgcgcctacccaaacccgaaaaaaaaaaaaacgaacgtcaaaatactacgccccgctcgacgtccgaacttccgaccgaactataccccgcgcgatcttcgccgaaataaaacgcccctacgaaaaaacgacctccgaaaacgacataaacgaaaccatcgacgtaaaaaacgaaaacaattactcgaaataaacgcgaactccgcgaaaacgacccgcaactcgaaaacttaaaataactttataaatacgtaactccctaaaaatcccgaaactaatctccgcaacatctaaataaaaaaaaaaaat

SEQ ID NO: 26721 - DNA, 899 bp, Artificial Sequence
  chemically treated genomic DNA (Homo sapiens) CpG-island No: 26721
ggcggttcgttggggtagtaaggcgttcgtattcgggaggcgttataaagggtcgaggtttgcggaggtcgtacgcgtagtttttcggggcggagtcgtcgggatcgcggtagcggaggttgtagtagtcgcgggtagtcggggtgtttagttttttagttcggaggtcgcggggggcggggaggatgtcgtaattgtagttcgagcggtagagttcggcgcgagtttttaggttttcgtaatcgttgtgaggcgtagcgcgcgttattggtcgggaggagttagaggcgggcgtttgtatagcgtcgcgttattcgtgattgttcgtttttagtcgggttcgggatttcgtagcggtttatgttttgacggggggcgtagttgcggggttggcgaggcgtcgcgcgtgggaagaggtttaagatatttcgattgcggcggttgcgtatattcgattcggacgcggggtttcgcgggcgcgcgtttcggagttttcgttttttttttttgttttttttcggcgtacggtttttttttgatttttttttttattcgtcgagaggatgcgtttttcggcgtttagtagtagaggttatcgtttttagaaatgtatgcgatcgatttttttttttcggattttaggagtcggcgttttcgttttgtaggtaggtggtgaggcggggtttagttttcgtcgtcgttcgtcgttgatgttgtcgtcgagaggtcgcgagtagggtttaggatcggttaaatttgtttttcgtcgggggttcggtggagcgttcggaggtgtgttaatggcgttgggcgtagttttttgtgaatttgaaaatttttgtttgagttcgggaggtcgagcgggggcgaaggagagattgattttttttcgtttattt

SEQ ID NO: 26722 - DNA, 899 bp, Artificial Sequence
  chemically treated genomic DNA (Homo sapiens) CpG-island No: 26722
aaataaacgaaaaaaaatcaatctctccttcgcccccgctcgacctcccgaactcaaacaaaaattttcaaattcacaaaaaactacgcccaacgccattaacacacctccgaacgctccaccgaacccccgacgaaaaacaaatttaaccgatcctaaaccctactcgcgacctctcgacgacaacatcaacgacgaacgacgacgaaaactaaaccccgcctcaccacctacctacaaaacgaaaacgccgactcctaaaatccgaaaaaaaaaaatcgatcgcatacatttctaaaaacgataacctctactactaaacgccgaaaaacgcatcctctcgacgaataaaaaaaaaaatcaaaaaaaaaccgtacgccgaaaaaaaacaaaaaaaaaaaacgaaaactccgaaacgcgcgcccgcgaaaccccgcgtccgaatcgaatatacgcaaccgccgcaatcgaaatatcttaaacctcttcccacgcgcgacgcctcgccaaccccgcaactacgccccccgtcaaaacataaaccgctacgaaatcccgaacccgactaaaaacgaacaatcacgaataacgcgacgctatacaaacgcccgcctctaactcctcccgaccaataacgcgcgctacgcctcacaacgattacgaaaacctaaaaactcgcgccgaactctaccgctcgaactacaattacgacatcctccccgccccccgcgacctccgaactaaaaaactaaacaccccgactacccgcgactactacaacctccgctaccgcgatcccgacgactccgccccgaaaaactacgcgtacgacctccgcaaacctcgaccctttataacgcctcccgaatacgaacgccttactaccccaacgaaccgcc

SEQ ID NO: 26723 - DNA, 899 bp, Artificial Sequence
  chemically treated genomic DNA (Homo sapiens) CpG-island No: 26723
gggtgggcggggaagggttaatttttttttcgttttcgttcggtttttcgagtttaagtagaggtttttaggtttatagggggttacgtttagcgttattagtatattttcgagcgttttatcgagttttcggcgggaggtaagtttggtcggttttggattttgttcgcggtttttcggcggtagtattagcggcgggcggcggcgagggttgggtttcgttttattatttatttatagggcgggggcgtcggtttttggggttcgggagaaggggatcggtcgtatgtatttttgggagcggtggtttttgttgttgggcgtcggggagcgtattttttcggcgggtggaaggaggggttaggggaggatcgtacgtcgaggaggagtaagaggaggaggcgggagtttcgaggcgcgcgttcgcggggtttcgcgttcggatcgggtgtgcgtagtcgtcgtagtcggggtgttttaggtttttttttacgcgcgacgtttcgttagtttcgtagttgcgtttttcgttagggtatgggtcgttacggggtttcgggttcggttgaaggcgggtagttacgggtggcgcgacgttgtgtagacgttcgtttttagtttttttcggttagtggcgcgcgttgcgttttatagcggttgcgggggtttgggagttcgcgtcgggttttgtcgttcggattgtagttgcggtatttttttcgtttttcgcgattttcgagttgggaggttgggtatttcggttattcgcggttgttgtagttttcgttgtcgcgatttcggcggtttcgtttcggagagttgcgcgtgcggttttcgtaggtttcggttttttgtggcgtttttcgagtgcgggcgttttgttgttttagcgaatcgtt

SEQ ID NO: 26724 - DNA, 899 bp, Artificial Sequence
  chemically treated genomic DNA (Homo sapiens) CpG-island No: 26724
aacgattcgctaaaacaacaaaacgcccgcactcgaaaaacgccacaaaaaaccgaaacctacgaaaaccgcacgcgcaactctccgaaacgaaaccgccgaaatcgcgacaacgaaaactacaacaaccgcgaataaccgaaatacccaacctcccaactcgaaaatcgcgaaaaacgaaaaaaataccgcaactacaatccgaacgacaaaacccgacgcgaactcccaaacccccgcaaccgctataaaacgcaacgcgcgccactaaccgaaaaaaactaaaaacgaacgtctacacaacgtcgcgccacccgtaactacccgccttcaaccgaacccgaaaccccgtaacgacccataccctaacgaaaaacgcaactacgaaactaacgaaacgtcgcgcgtaaaaaaaaacctaaaacaccccgactacgacgactacgcacacccgatccgaacgcgaaaccccgcgaacgcgcgcctcgaaactcccgcctcctcctcttactcctcctcgacgtacgatcctcccctaacccctccttccacccgccgaaaaaatacgctccccgacgcccaacaacaaaaaccaccgctcccaaaaatacatacgaccgatccccttctcccgaaccccaaaaaccgacgcccccgccctataaataaataataaaacgaaacccaaccctcgccgccgcccgccgctaatactaccgccgaaaaaccgcgaacaaaatccaaaaccgaccaaacttacctcccgccgaaaactcgataaaacgctcgaaaatatactaataacgctaaacgtaaccccctataaacctaaaaacctctacttaaactcgaaaaaccgaacgaaaacgaaaaaaaaattaacccttccccgcccaccc

SEQ ID NO: 26725 - DNA, 610 bp, Artificial Sequence
  chemically treated genomic DNA (Homo sapiens) CpG-island No: 26725
tagtcgcgtatcgcgtttcgtagagtagtttcgtattaaaagtatttttgatgtatttggaaagcgtaagcgagagtttcgtttgtgttatttggaggcggtcgttttttttaggagcgtagcgagcgagagcgaaatcgagaggcggtaatatttttaggagttgcgagcgcgtttagatagtaaatagcgatttcgttttttttagatttttgtcgtttgcgtttattatttttttttcgcgattttttttgcgtcgttgttattttagttgcggtggtttcgaattggcggtttttgttgttatatacgttcgtgtttttggagttttagtagttgtgcggggaaaatgtttttagtattttttttatatcgggtttttttgcgttttcggggtttagagcggtacgttcgttatattttttttatttgtatagggcgtcgttttttttgttttttttcgttcgtagggtacgtagttgattagtttagtagttagtgcgggacgattgtcggtgagcgtgaggttttgggttgtatgtgcggatattgtgtgcgttcgtagatgcgtgtatttatatatatatttaatttatgtacgttttttttt

SEQ ID NO: 26726 - DNA, 610 bp, Artificial Sequence
  chemically treated genomic DNA (Homo sapiens) CpG-island No: 26726
aaaaaaaaacgtacataaattaaatatatatataaatacacgcatctacgaacgcacacaatatccgcacatacaacccaaaacctcacgctcaccgacaatcgtcccgcactaactactaaactaatcaactacgtaccctacgaacgaaaaaaaacaaaaaaaacgacgccctatacaaataaaaaaaatataacgaacgtaccgctctaaaccccgaaaacgcaaaaaaacccgatataaaaaaaatactaaaaacattttccccgcacaactactaaaactccaaaaacacgaacgtatataacaacaaaaaccgccaattcgaaaccaccgcaactaaaataacaacgacgcaaaaaaaatcgcgaaaaaaaaataataaacgcaaacgacaaaaatctaaaaaaaacgaaatcgctatttactatctaaacgcgctcgcaactcctaaaaatattaccgcctctcgatttcgctctcgctcgctacgctcctaaaaaaaacgaccgcctccaaataacacaaacgaaactctcgcttacgctttccaaatacatcaaaaatacttttaatacgaaactactctacgaaacgcgatacgcgacta

SEQ ID NO: 26727 - DNA, 610 bp, Artificial Sequence
  chemically treated genomic DNA (Homo sapiens) CpG-island No: 26727
gggagggggcgtatataaattaaatgtatgtataaatatacgtatttacgggcgtatatagtattcgtatatatagtttaggattttacgtttatcggtagtcgtttcgtattaattgttgggttagttagttgcgtgttttgcgggcgggggagggtagagggggcggcgttttatgtagatgaggagggtgtggcgaacgtgtcgttttgggtttcggaagcgtagagaagttcggtataaaaaaagtattgaagatatttttttcgtataattgttaaagttttagagatacgagcgtgtgtggtagtaagagtcgttagttcgggattatcgtagttggggtggtagcggcgtaggaggggtcgcggggagggagtggtgagcgtaggcggtaggggtttgggaaagacgaagtcgttatttgttgtttgagcgcgttcgtagtttttggaagtgttgtcgtttttcggtttcgttttcgttcgttgcgtttttagaaggggcggtcgtttttaggtgatatagacgggattttcgtttgcgttttttagatgtattagagatatttttggtgcggggttgttttgcggggcgcggtgcgcggttg

SEQ ID NO: 26728 - DNA, 610 bp, Artificial Sequence
  chemically treated genomic DNA (Homo sapiens) CpG-island No: 26728
caaccgcgcaccgcgccccgcaaaacaaccccgcaccaaaaatatctctaatacatctaaaaaacgcaaacgaaaatcccgtctatatcacctaaaaacgaccgccccttctaaaaacgcaacgaacgaaaacgaaaccgaaaaacgacaacacttccaaaaactacgaacgcgctcaaacaacaaataacgacttcgtctttcccaaacccctaccgcctacgctcaccactccctccccgcgacccctcctacgccgctaccaccccaactacgataatcccgaactaacgactcttactaccacacacgctcgtatctctaaaactttaacaattatacgaaaaaaatatcttcaatactttttttataccgaacttctctacgcttccgaaacccaaaacgacacgttcgccacaccctcctcatctacataaaacgccgccccctctaccctcccccgcccgcaaaacacgcaactaactaacccaacaattaatacgaaacgactaccgataaacgtaaaatcctaaactatatatacgaatactatatacgcccgtaaatacgtatatttatacatacatttaatttatatacgccccctccc

SEQ ID NO: 26729 - DNA, 723 bp, Artificial Sequence
  chemically treated genomic DNA (Homo sapiens) CpG-island No: 26729
tcgggtatcgtttcgggatcgattgggggcgtttttttcgtcggttttttttgtttttagtgtcgagttcgcggttttgttttttttttaggtttcgtttttttttttaggtttcgtttttcgttcgggtcgaggcgcgcggtcgcgcgtgcgttcgttcgttcgttttcgtttcgcgtatgcgtcgcgttcgttcgcgggagggtatggcgggggtcgtgtcgggcgttattatggacgaggattattacgggagcgcggtcgagtggggcgattaggttgacggcggttaggtgaggcggggtattgggcgtattttagagagaatcgttcgttttcgtcgtcggcgggtcggttttattttcggagaggtcgcgcggcgcgaggttgcgggcgtgcggggggtgtgcgcgcgtacggttcgcgcggttatcgtgtggtttaagtatagttcgtttcgttttcgttcgttcggggtttcgcggcgcggtcgtcggggttttcgttttttcgtttgtaggattttggggtgggggtgaggcgtcggaggttttggcgcggggcggttcgaggtttttagtattttttcgtttcggttaggttcggcgtcggttttgcgattttcgcggcgggcgggatattaacgttaaggtggagggttgggttcggagtttatagatttttaaataaaaataaagtggaaaaattttatagtagtattat

SEQ ID NO: 26730 - DNA, 723 bp, Artificial Sequence
  chemically treated genomic DNA (Homo sapiens) CpG-island No: 26730
ataatactactataaaatttttccactttatttttatttaaaaatctataaactccgaacccaaccctccaccttaacgttaatatcccgcccgccgcgaaaatcgcaaaaccgacgccgaacctaaccgaaacgaaaaaatactaaaaacctcgaaccgccccgcgccaaaacctccgacgcctcacccccaccccaaaatcctacaaacgaaaaaacgaaaaccccgacgaccgcgccgcgaaaccccgaacgaacgaaaacgaaacgaactatacttaaaccacacgataaccgcgcgaaccgtacgcgcgcacaccccccgcacgcccgcaacctcgcgccgcgcgacctctccgaaaataaaaccgacccgccgacgacgaaaacgaacgattctctctaaaatacgcccaataccccgcctcacctaaccgccgtcaacctaatcgccccactcgaccgcgctcccgtaataatcctcgtccataataacgcccgacacgacccccgccataccctcccgcgaacgaacgcgacgcatacgcgaaacgaaaacgaacgaacgaacgcacgcgcgaccgcgcgcctcgacccgaacgaaaaacgaaacctaaaaaaaaaaacgaaacctaaaaaaaaaacaaaaccgcgaactcgacactaaaaacaaaaaaaaccgacgaaaaaaacgcccccaatcgatcccgaaacgatacccga

SEQ ID NO: 26731 - DNA, 723 bp, Artificial Sequence
  chemically treated genomic DNA (Homo sapiens) CpG-island No: 26731
atgatgttgttgtgaagtttttttattttatttttgtttaaaagtttgtgagtttcggatttaattttttattttagcgttggtgtttcgttcgtcgcgggggtcgtagggtcggcgtcgggtttggtcggagcgagggggtattgggggtttcgggtcgtttcgcgttagagttttcggcgttttatttttattttaaggttttgtaggcgaggaggcggggatttcggcggtcgcgtcgcgggatttcgggcgggcgggggcggggcgggttgtgtttgaattatacggtgatcgcgcgggtcgtgcgcgcgtatatttttcgtacgttcgtagtttcgcgtcgcgcggttttttcgggagtggggtcggttcgtcggcggcggagacgaacgattttttttagggtgcgtttagtgtttcgttttatttggtcgtcgttagtttggtcgttttattcggtcgcgttttcgtagtagttttcgtttatgatggcgttcggtacggttttcgttatgttttttcgcgagcgagcgcggcgtatgcgcgaggcggggacgggcgggcgggcgtacgcgcggtcgcgcgtttcggttcgggcgggaggcggggtttggaagaaggggcggggtttggaggaagggtagggtcgcgggttcggtattgggaataaaggggatcggcggaaggaacgtttttagtcgatttcggagcgatgttcgg

SEQ ID NO: 26732 - DNA, 723 bp, Artificial Sequence
  chemically treated genomic DNA (Homo sapiens) CpG-island No: 26732
ccgaacatcgctccgaaatcgactaaaaacgttccttccgccgatcccctttattcccaataccgaacccgcgaccctacccttcctccaaaccccgccccttcttccaaaccccgcctcccgcccgaaccgaaacgcgcgaccgcgcgtacgcccgcccgcccgtccccgcctcgcgcatacgccgcgctcgctcgcgaaaaaacataacgaaaaccgtaccgaacgccatcataaacgaaaactactacgaaaacgcgaccgaataaaacgaccaaactaacgacgaccaaataaaacgaaacactaaacgcaccctaaaaaaaatcgttcgtctccgccgccgacgaaccgaccccactcccgaaaaaaccgcgcgacgcgaaactacgaacgtacgaaaaatatacgcgcgcacgacccgcgcgatcaccgtataattcaaacacaacccgccccgcccccgcccgcccgaaatcccgcgacgcgaccgccgaaatccccgcctcctcgcctacaaaaccttaaaataaaaataaaacgccgaaaactctaacgcgaaacgacccgaaacccccaataccccctcgctccgaccaaacccgacgccgaccctacgacccccgcgacgaacgaaacaccaacgctaaaataaaaaattaaatccgaaactcacaaacttttaaacaaaaataaaataaaaaaacttcacaacaacatcat

SEQ ID NO: 26733 - DNA, 523 bp, Artificial Sequence
  chemically treated genomic DNA (Homo sapiens) CpG-island No: 26733
ttcggcggaagtagaggtcgttttgcgtcgcgttcgttagtagtacgagtagtagaagcggtcgttattttggttcgcgtttcgttatggtttcgcgtcggtttttgggtttcgtttcggatttcgtttcgagttttagatttcgcgtcggttttcgttttggatttcgtttcggtttcggtttcggtttagtattcggtcgatttcgtattttgggtttttgtttcgttcggtttttaaggttgcggcggttaggtcgggatattttttcggggcggggttgttttatcgttgtttttgtttcgttcggtgatttttgtttttttcgttcggtttcgcgtttcgttttttttttggtttcggggtatttgaattcgcgggttaggcgcgaggtcgtcgggtagattttagtttgatttcgtcgtcggtcgtcgttttgagcgcgggattgttcggttggatttatttgtcggggtttttggtttcggggtggggggtcgtaggtttatgggtttttttggtt

SEQ ID NO: 26734 - DNA, 523 bp, Artificial Sequence
  chemically treated genomic DNA (Homo sapiens) CpG-island No: 26734
aaccaaaaaaacccataaacctacgaccccccaccccgaaaccaaaaaccccgacaaataaatccaaccgaacaatcccgcgctcaaaacgacgaccgacgacgaaatcaaactaaaatctacccgacgacctcgcgcctaacccgcgaattcaaataccccgaaaccaaaaaaaaaacgaaacgcgaaaccgaacgaaaaaaacaaaaatcaccgaacgaaacaaaaacaacgataaaacaaccccgccccgaaaaaatatcccgacctaaccgccgcaaccttaaaaaccgaacgaaacaaaaacccaaaatacgaaatcgaccgaatactaaaccgaaaccgaaaccgaaacgaaatccaaaacgaaaaccgacgcgaaatctaaaactcgaaacgaaatccgaaacgaaacccaaaaaccgacgcgaaaccataacgaaacgcgaaccaaaataacgaccgcttctactactcgtactactaacgaacgcgacgcaaaacgacctctacttccgccgaa

SEQ ID NO: 26735 - DNA, 523 bp, Artificial Sequence
  chemically treated genomic DNA (Homo sapiens) CpG-island No: 26735
ggttaagggggtttatgagtttgcggttttttatttcgaagttaggaatttcggtaaatgagtttagtcggatagtttcgcgtttagggcggcggtcggcggcggggttaggttggggtttgttcggcgatttcgcgtttggttcgcgagtttaggtgtttcggagttagggagggagcggggcgcggagtcgggcggggagggtaggggttatcgggcggggtaggagtagcgatgggatagtttcgtttcgggggagtgtttcggtttggtcgtcgtagttttaagggtcgggcggggtaggggtttaaagtgcggggtcggtcgggtgttgggtcgaggtcgaggtcggggcgggatttagagcgggagtcggcgcgggatttgggattcggagcgggattcggagcgggatttaggagtcggcgcggggttatggcgaggcgcgggttagggtggcggtcgtttttgttgttcgtgttgttggcgggcgcggcgtagggcggtttttattttcgtcggg

SEQ ID NO: 26736 - DNA, 523 bp, Artificial Sequence
  chemically treated genomic DNA (Homo sapiens) CpG-island No: 26736
cccgacgaaaataaaaaccgccctacgccgcgcccgccaacaacacgaacaacaaaaacgaccgccaccctaacccgcgcctcgccataaccccgcgccgactcctaaatcccgctccgaatcccgctccgaatcccaaatcccgcgccgactcccgctctaaatcccgccccgacctcgacctcgacccaacacccgaccgaccccgcactttaaacccctaccccgcccgacccttaaaactacgacgaccaaaccgaaacactcccccgaaacgaaactatcccatcgctactcctaccccgcccgataacccctaccctccccgcccgactccgcgccccgctccctccctaactccgaaacacctaaactcgcgaaccaaacgcgaaatcgccgaacaaaccccaacctaaccccgccgccgaccgccgccctaaacgcgaaactatccgactaaactcatttaccgaaattcctaacttcgaaataaaaaaccgcaaactcataaacccccttaacc

SEQ ID NO: 26737 - DNA, 565 bp, Artificial Sequence
  chemically treated genomic DNA (Homo sapiens) CpG-island No: 26737
ttgtagcgaaagcggagttcgtcgggtcgaatcgttaagacgtcggtaatgtcggtttagtcgggcggtttagtcgtaggaagattagattatagaagcggaagaggcggggcgtgcggatttgttaattatcgttttttattcggtttcgtttttgagtacggtttttgttgttttgtcgcggaagtttttcggcgtcgggagttaatgggcgcgcgcggtttggattgcgggtgttaatttcggggcgggtcggtcggtcgcgtttatttattggttttaagagttttcggggcgtgtgtttttcgatttttcgtattatttcggcggggacgacgggggtaagaaggtcggggtgttttcgttcgttaaggattattgagtcgcgtgttttcgggaagcgaggacgcgaggcggcgcgggtacggtcgtttcgagggtttggttttgcgttcgttttagggaaacggcgtcggtttttttaaatttgtggatagataagcgtgttttgagagttgagatttagaaaggtttttagggtattttttttttcggagtgatatta

SEQ ID NO: 26738 - DNA, 565 bp, Artificial Sequence
  chemically treated genomic DNA (Homo sapiens) CpG-island No: 26738
taatatcactccgaaaaaaaaaataccctaaaaacctttctaaatctcaactctcaaaacacgcttatctatccacaaatttaaaaaaaccgacgccgtttccctaaaacgaacgcaaaaccaaaccctcgaaacgaccgtacccgcgccgcctcgcgtcctcgcttcccgaaaacacgcgactcaataatccttaacgaacgaaaacaccccgaccttcttacccccgtcgtccccgccgaaataatacgaaaaatcgaaaaacacacgccccgaaaactcttaaaaccaataaataaacgcgaccgaccgacccgccccgaaattaacacccgcaatccaaaccgcgcgcgcccattaactcccgacgccgaaaaacttccgcgacaaaacaacaaaaaccgtactcaaaaacgaaaccgaataaaaaacgataattaacaaatccgcacgccccgcctcttccgcttctataatctaatcttcctacgactaaaccgcccgactaaaccgacattaccgacgtcttaacgattcgacccgacgaactccgctttcgctacaa

SEQ ID NO: 26739 - DNA, 565 bp, Artificial Sequence
  chemically treated genomic DNA (Homo sapiens) CpG-island No: 26739
tagtgttatttcgagaaagggggtgttttaagagtttttttaaattttagtttttaggatacgtttgtttgtttatagatttaaaaaagtcggcgtcgtttttttgaagcgggcgtaaagttaggttttcggggcggtcgtgttcgcgtcgtttcgcgttttcgtttttcgaaagtacgcggtttagtggtttttagcgagcggggatatttcggtttttttgttttcgtcgttttcgtcggggtaatacggaaggtcgggggatatacgtttcgggagtttttggagttaataggtgggcgcggtcggtcggttcgtttcgggattggtattcgtagtttagatcgcgcgcgtttattggttttcggcgtcggggggttttcgcggtagggtagtaggggtcgtgtttaggggcggggtcgggtaggaggcggtgattggtaggttcgtacgtttcgtttttttcgtttttgtggtttgatttttttgcggttgaatcgttcggttgagtcgatattgtcggcgttttggcgattcggttcgacgagtttcgttttcgttatag

SEQ ID NO: 26740 - DNA, 565 bp, Artificial Sequence
  chemically treated genomic DNA (Homo sapiens) CpG-island No: 26740
ctataacgaaaacgaaactcgtcgaaccgaatcgccaaaacgccgacaatatcgactcaaccgaacgattcaaccgcaaaaaaatcaaaccacaaaaacgaaaaaaacgaaacgtacgaacctaccaatcaccgcctcctacccgaccccgcccctaaacacgacccctactaccctaccgcgaaaaccccccgacgccgaaaaccaataaacgcgcgcgatctaaactacgaataccaatcccgaaacgaaccgaccgaccgcgcccacctattaactccaaaaactcccgaaacgtatatcccccgaccttccgtattaccccgacgaaaacgacgaaaacaaaaaaaccgaaatatccccgctcgctaaaaaccactaaaccgcgtactttcgaaaaacgaaaacgcgaaacgacgcgaacacgaccgccccgaaaacctaactttacgcccgcttcaaaaaaacgacgccgacttttttaaatctataaacaaacaaacgtatcctaaaaactaaaatttaaaaaaactcttaaaacaccccctttctcgaaataacacta

SEQ ID NO: 26741 - DNA, 533 bp, Artificial Sequence
  chemically treated genomic DNA (Homo sapiens) CpG-island No: 26741
tttgtgtgcggggtgggggggggtggtggagagcgggggcggggatttagcgcgtgtatgtaaaggtgtagttcgtgtgttaggcgttgggtgcgcgcgcggtgtttgttcgggtgcgcgcgcgcgtcgttgttcgtttgttcgtcggttcgtttgttcgtttgttggggttgtttcgtgggtttgacgggcgagcgggcgcggaggagttttgttcggaattatatagatattatcgtggaaatagtagcgtaggttacggcgtcgcgggttttgtattagacgttgggttttagaggtgggtgaatttttagcgggggttgtataagttgtatcgatacgcgtgttgtttttttttcgtttagtttagtagcgcgtgtgtttgcgtgtgtgtgtgtgagagatagagagagagagagagatttcgcgcgcgcgtacgcgagtcgagggggtaggtagtttattatttttagtttgggttttgttggtttggggtcggttgagtggttaaagtggtcgaggtggttaatttt

SEQ ID NO: 26742 - DNA, 533 bp, Artificial Sequence
  chemically treated genomic DNA (Homo sapiens) CpG-island No: 26742
aaaattaaccacctcgaccactttaaccactcaaccgaccccaaaccaacaaaacccaaactaaaaataataaactacctaccccctcgactcgcgtacgcgcgcgcgaaatctctctctctctctctatctctcacacacacacacgcaaacacacgcgctactaaactaaacgaaaaaaaaacaacacgcgtatcgatacaacttatacaacccccgctaaaaattcacccacctctaaaacccaacgtctaatacaaaacccgcgacgccgtaacctacgctactatttccacgataatatctatataattccgaacaaaactcctccgcgcccgctcgcccgtcaaacccacgaaacaaccccaacaaacgaacaaacgaaccgacgaacaaacgaacaacgacgcgcgcgcgcacccgaacaaacaccgcgcgcgcacccaacgcctaacacacgaactacacctttacatacacgcgctaaatccccgcccccgctctccaccacccccccccaccccgcacacaaa

SEQ ID NO: 26743 - DNA, 533 bp, Artificial Sequence
  chemically treated genomic DNA (Homo sapiens) CpG-island No: 26743
aggattagttatttcggttattttggttatttaatcggttttaaattaataggatttaaattaaaaataataagttatttgttttttcggttcgcgtgcgcgcgcgcgagatttttttttttttttttgttttttatatatatatacgtaggtatacgcgttattgagttgagcggggaagaggtagtacgcgtgtcggtgtagtttgtgtagttttcgttgaaaatttatttatttttagagtttagcgtttggtgtagggttcgcggcgtcgtgatttgcgttgttgtttttacgatggtatttatgtgatttcggatagagttttttcgcgttcgttcgttcgttaaatttacggagtagttttagtaggcgagtaggcgggtcggcgggtaggcgggtagcggcgcgcgcgcgtattcgagtagatatcgcgcgcgtatttagcgtttagtatacgggttgtatttttatatatacgcgttgaattttcgttttcgttttttattatttttttttatttcgtatataag

SEQ ID NO: 26744 - DNA, 533 bp, Artificial Sequence
  chemically treated genomic DNA (Homo sapiens) CpG-island No: 26744
cttatatacgaaataaaaaaaaataataaaaaacgaaaacgaaaattcaacgcgtatatataaaaatacaacccgtatactaaacgctaaatacgcgcgcgatatctactcgaatacgcgcgcgcgccgctacccgcctacccgccgacccgcctactcgcctactaaaactactccgtaaatttaacgaacgaacgaacgcgaaaaaactctatccgaaatcacataaataccatcgtaaaaacaacaacgcaaatcacgacgccgcgaaccctacaccaaacgctaaactctaaaaataaataaattttcaacgaaaactacacaaactacaccgacacgcgtactacctcttccccgctcaactcaataacgcgtatacctacgtatatatatataaaaaacaaaaaaaaaaaaaaaaatctcgcgcgcgcgcacgcgaaccgaaaaaacaaataacttattatttttaatttaaatcctattaatttaaaaccgattaaataaccaaaataaccgaaataactaatcct

SEQ ID NO: 26745 - DNA, 607 bp, Artificial Sequence
  chemically treated genomic DNA (Homo sapiens) CpG-island No: 26745
cgtattcgtgcgtcgagagtttttaagttcgtttttttttattttttcggtttagcgtttattttttcgaatcgcggtcgttgggagcggggttcgatttcgtgatgtcgcgtgggtgtcggttagagaagagtttcggaggtcggggcggtcggcgggcgtgcggtgagcgtttcggggcgggggtcggggcgggatcgagcgttgttatcggggttggatttttcgatttttattcggattttttttcggttttttcggtcgattcggtgttgttcggcgattacgtgacgcgggttgtttttgatttttattttcgagcgggtagggggcgggggtcggagggggtgttagatgtaggatttacgagggtcggggcggttgtttggcgttttcgaggcggtgattttcgggaaataaagttcggggggaaattaataagttattcggggttagagacgaaatagcgttgggggtcgggagaggcggtagagagaatgtgggagataaagattcgcgttcgcggcggtttcgagggttttgggaacgttttggttgggttcgagagggtttttaggtttttttatttttgggtttgtgatagttt

SEQ ID NO: 26746 - DNA, 607 bp, Artificial Sequence
  chemically treated genomic DNA (Homo sapiens) CpG-island No: 26746
aaactatcacaaacccaaaaataaaaaaacctaaaaaccctctcgaacccaaccaaaacgttcccaaaaccctcgaaaccgccgcgaacgcgaatctttatctcccacattctctctaccgcctctcccgacccccaacgctatttcgtctctaaccccgaataacttattaatttccccccgaactttatttcccgaaaatcaccgcctcgaaaacgccaaacaaccgccccgaccctcgtaaatcctacatctaacaccccctccgacccccgccccctacccgctcgaaaataaaaatcaaaaacaacccgcgtcacgtaatcgccgaacaacaccgaatcgaccgaaaaaaccgaaaaaaaatccgaataaaaatcgaaaaatccaaccccgataacaacgctcgatcccgccccgacccccgccccgaaacgctcaccgcacgcccgccgaccgccccgacctccgaaactcttctctaaccgacacccacgcgacatcacgaaatcgaaccccgctcccaacgaccgcgattcgaaaaaataaacgctaaaccgaaaaaataaaaaaaaacgaacttaaaaactctcgacgcacgaatacg

SEQ ID NO: 26747 - DNA, 607 bp, Artificial Sequence
  chemically treated genomic DNA (Homo sapiens) CpG-island No: 26747
gagttgttataagtttaggggtggaagagtttggaggttttttcgagtttagttagagcgtttttagggttttcggagtcgtcgcgggcgcgggtttttgttttttatattttttttgtcgtttttttcgatttttagcgttgtttcgtttttgatttcgaataatttgttggttttttttcgggttttgtttttcgggggttatcgtttcggggacgttaggtagtcgtttcggttttcgtgggttttgtatttgatatttttttcggttttcgttttttattcgttcggagataggggttaaaggtagttcgcgttacgtggtcgtcgagtagtatcgaatcggtcgggagggtcgagggagaattcgggtggaagtcgagaaatttagtttcgatagtagcgttcggtttcgtttcggttttcgtttcggggcgtttatcgtacgttcgtcggtcgtttcggttttcggagtttttttttggtcggtatttacgcggtattacgggatcgaatttcgtttttagcggtcgcgattcggggaggtaggcgttgggtcgaggaggtaaggggagacgggtttgggggttttcggcgtacgggtacg

SEQ ID NO: 26748 - DNA, 607 bp, Artificial Sequence
  chemically treated genomic DNA (Homo sapiens) CpG-island No: 26748
cgtacccgtacgccgaaaacccccaaacccgtctccccttacctcctcgacccaacgcctacctccccgaatcgcgaccgctaaaaacgaaattcgatcccgtaataccgcgtaaataccgaccaaaaaaaaactccgaaaaccgaaacgaccgacgaacgtacgataaacgccccgaaacgaaaaccgaaacgaaaccgaacgctactatcgaaactaaatttctcgacttccacccgaattctccctcgaccctcccgaccgattcgatactactcgacgaccacgtaacgcgaactacctttaacccctatctccgaacgaataaaaaacgaaaaccgaaaaaaatatcaaatacaaaacccacgaaaaccgaaacgactacctaacgtccccgaaacgataacccccgaaaaacaaaacccgaaaaaaaaccaacaaattattcgaaatcaaaaacgaaacaacgctaaaaatcgaaaaaaacgacaaaaaaaatataaaaaacaaaaacccgcgcccgcgacgactccgaaaaccctaaaaacgctctaactaaactcgaaaaaacctccaaactcttccacccctaaacttataacaactc

SEQ ID NO: 26749 - DNA, 688 bp, Artificial Sequence
  chemically treated genomic DNA (Homo sapiens) CpG-island No: 26749
aaagcgcgggtttgattatcggacgtggagacgttgtcgttgcgtttttggcggtcgagcgtaggcggcggacggttgggagttagcggggtagcgggttcggggtttttgggcggtaggaacggtacgttcgttaggagtaggtagggtgttcgagcggtcgtcggcggttgcgtgtcgaagttatagaggaggtcgagttttagcggtagggttttacgcgttaggttggagtcgttaagtttcgggttcgggtacggcgcgattgtcggattttcgtagttagatttttgttttgggttagcgggcgtcggtagttcggtttttaagtttagtaggttcgtgatggcgaagtttcgggggcgcgagtttttaggggaatcgttaggtattagcgttttgttgttagtgcgttcgtcggaaagcgagtttcggtcggttatggttttttagtaagtaaggcgcgagtttttttggatttcgtttgcggagggtttagtttagaggaagttttataggattgggttgtcggtcgggcgcgggaggtttgaagggttttaattagttgggcgcgggcgcgtcgtcgtttcggatttcgcgagatggggacgttattagttttttttttttcggttatcgtttatttagttgtagtttttttagttatttttttttttttttttttttt

SEQ ID NO: 26750 - DNA, 688 bp, Artificial Sequence
  chemically treated genomic DNA (Homo sapiens) CpG-island No: 26750
aaaaaaaaaaaaaaaaaaaaaataactaaaaaaactacaactaaataaacgataaccgaaaaaaaaaaaactaataacgtccccatctcgcgaaatccgaaacgacgacgcgcccgcgcccaactaattaaaacccttcaaacctcccgcgcccgaccgacaacccaatcctataaaacttcctctaaactaaaccctccgcaaacgaaatccaaaaaaactcgcgccttacttactaaaaaaccataaccgaccgaaactcgctttccgacgaacgcactaacaacaaaacgctaatacctaacgattcccctaaaaactcgcgcccccgaaacttcgccatcacgaacctactaaacttaaaaaccgaactaccgacgcccgctaacccaaaacaaaaatctaactacgaaaatccgacaatcgcgccgtacccgaacccgaaacttaacgactccaacctaacgcgtaaaaccctaccgctaaaactcgacctcctctataacttcgacacgcaaccgccgacgaccgctcgaacaccctacctactcctaacgaacgtaccgttcctaccgcccaaaaaccccgaacccgctaccccgctaactcccaaccgtccgccgcctacgctcgaccgccaaaaacgcaacgacaacgtctccacgtccgataatcaaacccgcgcttt

SEQ ID NO: 26751 - DNA, 688 bp, Artificial Sequence
  chemically treated genomic DNA (Homo sapiens) CpG-island No: 26751
agaagagaggaggagaaggaggtgattgaggggattgtagttgggtgggcggtaatcgaggggaggggaattggtggcgtttttatttcgcggggttcggaacggcgacgcgttcgcgtttagttgattggagttttttaggtttttcgcgttcgatcggtagtttaattttataaagttttttttaagttgggtttttcgtaaacgggatttagagaggttcgcgttttgtttgttaaggaattatgatcggtcgggattcgtttttcgacgggcgtattagtagtagggcgttggtgtttggcggtttttttaggggttcgcgttttcggggtttcgttattacggatttgttgggtttggaggtcgagttgtcggcgttcgttggtttaggatagggatttggttgcgagggttcggtagtcgcgtcgtgttcgggttcggggtttgacggttttagtttggcgcgtggggttttatcgttgggattcggttttttttgtggtttcggtacgtagtcgtcggcggtcgttcgagtattttgtttgtttttagcggacgtgtcgtttttgtcgtttaggggtttcgagttcgttgtttcgttggtttttagtcgttcgtcgtttgcgttcggtcgttagaagcgtagcgatagcgtttttacgttcggtaattaggttcgcgtttt

SEQ ID NO: 26752 - DNA, 688 bp, Artificial Sequence
  chemically treated genomic DNA (Homo sapiens) CpG-island No: 26752
aaaacgcgaacctaattaccgaacgtaaaaacgctatcgctacgcttctaacgaccgaacgcaaacgacgaacgactaaaaaccaacgaaacaacgaactcgaaacccctaaacgacaaaaacgacacgtccgctaaaaacaaacaaaatactcgaacgaccgccgacgactacgtaccgaaaccacaaaaaaaaccgaatcccaacgataaaaccccacgcgccaaactaaaaccgtcaaaccccgaacccgaacacgacgcgactaccgaaccctcgcaaccaaatccctatcctaaaccaacgaacgccgacaactcgacctccaaacccaacaaatccgtaataacgaaaccccgaaaacgcgaacccctaaaaaaaccgccaaacaccaacgccctactactaatacgcccgtcgaaaaacgaatcccgaccgatcataattccttaacaaacaaaacgcgaacctctctaaatcccgtttacgaaaaacccaacttaaaaaaaactttataaaattaaactaccgatcgaacgcgaaaaacctaaaaaactccaatcaactaaacgcgaacgcgtcgccgttccgaaccccgcgaaataaaaacgccaccaattcccctcccctcgattaccgcccacccaactacaatcccctcaatcacctccttctcctcctctcttct

SEQ ID NO: 26753 - DNA, 515 bp, Artificial Sequence
  chemically treated genomic DNA (Homo sapiens) CpG-island No: 26753
gggaggatatttttatagttttttatagtgagaaacgttttttattcgacgttgcgtttatttgtgttttcgttgttgtcggggttttggtatttatttgcgcgttttatgtggtggggatttatttagagtttagcgttaagttatacgggcgttttatttagcgttagttaagattagggaagcgttttttgtcgtttaggagacgtttgtaagagataaaaagttagtttacgatttatttataattttcgtgttttcggggtgttttcgtagttgttaaatttacgggtcgcgtttaggggaagttttcgcgttttggcggttaaaagaatgggttttttttagtttttttttatcggatattatttgtaaatttattgttagaggcgtagttttcgcgaacgttttcgtttcgggcggtttttaggagtcgttttgggtttttaaattcgttgagggtttcgaatttgtttttattagttaggattattcgggatttaattaatgaataa

SEQ ID NO: 26754 - DNA, 515 bp, Artificial Sequence
  chemically treated genomic DNA (Homo sapiens) CpG-island No: 26754
ttattcattaattaaatcccgaataatcctaactaataaaaacaaattcgaaaccctcaacgaatttaaaaacccaaaacgactcctaaaaaccgcccgaaacgaaaacgttcgcgaaaactacgcctctaacaataaatttacaaataatatccgataaaaaaaaactaaaaaaaacccattcttttaaccgccaaaacgcgaaaacttcccctaaacgcgacccgtaaatttaacaactacgaaaacaccccgaaaacacgaaaattataaataaatcgtaaactaactttttatctcttacaaacgtctcctaaacgacaaaaaacgcttccctaatcttaactaacgctaaataaaacgcccgtataacttaacgctaaactctaaataaatccccaccacataaaacgcgcaaataaataccaaaaccccgacaacaacgaaaacacaaataaacgcaacgtcgaataaaaaacgtttctcactataaaaaactataaaaatatcctccc

SEQ ID NO: 26755 - DNA, 515 bp, Artificial Sequence
  chemically treated genomic DNA (Homo sapiens) CpG-island No: 26755
ttatttattagttaaatttcgggtaattttggttgatgaagatagattcggaatttttaacggatttagggatttaaaacgatttttgggggtcgttcggggcgggaacgttcgcgggagttgcgtttttggtaatagatttgtaggtggtattcggtagggggaagttggaaggagtttatttttttggtcgttaggacgcggaggttttttttaaacgcggttcgtaggtttggtaattgcgagggtatttcggggatacgaggattgtgggtggatcgtgggttagttttttattttttgtagacgttttttaaacggtaagaagcgtttttttggttttggttgacgttgagtgaagcgttcgtataatttgacgttgggttttgggtggatttttattatatagggcgcgtaagtggatattagagtttcggtaatagcggggatatagatgagcgtagcgtcgggtggggggcgttttttattgtaggaggttatgaaaatgttttttt

SEQ ID NO: 26756 - DNA, 515 bp, Artificial Sequence
  chemically treated genomic DNA (Homo sapiens) CpG-island No: 26756
aaaaaaacattttcataacctcctacaataaaaaacgccccccacccgacgctacgctcatctatatccccgctattaccgaaactctaatatccacttacgcgccctatataataaaaatccacccaaaacccaacgtcaaattatacgaacgcttcactcaacgtcaaccaaaaccaaaaaaacgcttcttaccgtttaaaaaacgtctacaaaaaataaaaaactaacccacgatccacccacaatcctcgtatccccgaaataccctcgcaattaccaaacctacgaaccgcgtttaaaaaaaacctccgcgtcctaacgaccaaaaaaataaactccttccaacttccccctaccgaataccacctacaaatctattaccaaaaacgcaactcccgcgaacgttcccgccccgaacgacccccaaaaatcgttttaaatccctaaatccgttaaaaattccgaatctatcttcatcaaccaaaattacccgaaatttaactaataaataa

SEQ ID NO: 26757 - DNA, 1186 bp, Artificial Sequence
  chemically treated genomic DNA (Homo sapiens) CpG-island No: 26757
tcggcgattagggattggggacggggttcgagcgtttttcgttaggttagtcgtatttgtggttatgttaggggcgtcgatggtaaggaaagggcgagtatcggttttagtttcgaaatttggttttttcgggtcgcgattttaattcgtagttttttacgtaggttcgggtttagcggtttttttcggaggaagggcggagatcgtatttattgaggggcggtcggtcgtagggaggagggaggtcgaatttttcggttcgggcgttttaagttggagttagcgtaggttcgtagtcgtttttttcggttcggcggttcggttttcgttagttagttcgtcggttattcgtcggtcgttttgcgggtttcgcgtttttgtttattttttgcgggcgtttcggcgttcgcgtttacgtacgcgatttcgggagtaatgcgttcgcgttttttttatattcgggagtatcgggcgcgcggtgtttcggatttagtcgttatcgtcgtcgatttttattcggtgttttcgtcgttcggcggttttttgtttcggtcgtcgttttttttttcgttgttcgtatcggttttagcgtcgtttttcgtagttttcgttttcgcgtttttatttcgatcggtttgggttgtttttttttagtcgtcgtaattgtagttcggtttttcgtttttttttttcggtttttttttttttaataattttttttacgtattttggtttcggcgtcgtttttttcgtcgcgcgttcggatgtgaggtggttgtagcggtgtcgggcgaaaaagaagtatcgtcgcgcgtttttcggacgttagtttttgcgcgggtcggggggtgggaaggtggtggcggcgaggaggaggttacggtggggatagcggaaattcgttttcgtgcgcgtaggcggtcgtcgtgggtagtttagaggttatcgtcgtcgcgtttttacgcgcgttgtagggtagagcggacggtatttgggattcgcgattcgcggtacgttattttttcggaggcggtggttagatggggttgggttggcggttagtacggtttgtggcgcgacgatcgttgtatttgtatggttcgtataggtagagaatcgtggggtttcggtagtgggaatttgagataggagattggggtttttcgagtttttttagtgcgggttt

SEQ ID NO: 26758 - DNA, 1186 bp, Artificial Sequence
  chemically treated genomic DNA (Homo sapiens) CpG-island No: 26758
aaacccgcactaaaaaaactcgaaaaaccccaatctcctatctcaaattcccactaccgaaaccccacgattctctacctatacgaaccatacaaatacaacgatcgtcgcgccacaaaccgtactaaccgccaacccaaccccatctaaccaccgcctccgaaaaaataacgtaccgcgaatcgcgaatcccaaataccgtccgctctaccctacaacgcgcgtaaaaacgcgacgacgataacctctaaactacccacgacgaccgcctacgcgcacgaaaacgaatttccgctatccccaccgtaacctcctcctcgccgccaccaccttcccaccccccgacccgcgcaaaaactaacgtccgaaaaacgcgcgacgatacttctttttcgcccgacaccgctacaaccacctcacatccgaacgcgcgacgaaaaaaacgacgccgaaaccaaaatacgtaaaaaaaattattaaaaaaaaaaaaaccgaaaaaaaaaaacgaaaaaccgaactacaattacgacgactaaaaaaaaacaacccaaaccgatcgaaataaaaacgcgaaaacgaaaactacgaaaaacgacgctaaaaccgatacgaacaacgaaaaaaaaaacgacgaccgaaacaaaaaaccgccgaacgacgaaaacaccgaataaaaatcgacgacgataacgactaaatccgaaacaccgcgcgcccgatactcccgaatataaaaaaaacgcgaacgcattactcccgaaatcgcgtacgtaaacgcgaacgccgaaacgcccgcaaaaaataaacaaaaacgcgaaacccgcaaaacgaccgacgaataaccgacgaactaactaacgaaaaccgaaccgccgaaccgaaaaaaacgactacgaacctacgctaactccaacttaaaacgcccgaaccgaaaaattcgacctccctcctccctacgaccgaccgcccctcaataaatacgatctccgcccttcctccgaaaaaaaccgctaaacccgaacctacgtaaaaaactacgaattaaaatcgcgacccgaaaaaaccaaatttcgaaactaaaaccgatactcgccctttccttaccatcgacgcccctaacataaccacaaatacgactaacctaacgaaaaacgctcgaaccccgtccccaatccctaatcgccga

SEQ ID NO: 26759 - DNA, 1186 bp, Artificial Sequence
  chemically treated genomic DNA (Homo sapiens) CpG-island No: 26759
gaattcgtattgggaaggttcggaagattttaattttttattttaaatttttattgtcgaagttttacggttttttgtttatgcgaattatgtaaatatagcggtcgtcgcgttataggtcgtgttagtcgttagtttagttttatttagttatcgttttcgggagagtggcgtgtcgcgagtcgcgggttttaagtgtcgttcgttttgttttgtagcgcgcgtgggaacgcggcggcggtggtttttgggttgtttacggcgatcgtttgcgcgtacgggagcgggttttcgttatttttatcgtggtttttttttcgtcgttattatttttttatttttcggttcgcgtaggggttggcgttcgggaagcgcgcggcgatgtttttttttcgttcggtatcgttgtagttattttatattcgggcgcgcggcggggaaggcggcgtcggggttagggtgcgtggagggagttattaagggggagggggtcgaagaggaggggcggagggtcgggttgtagttacggcggttgaagagagatagtttaagtcggtcggggtgggggcgcgagagcgaaggttgcggggagcggcgttgggatcggtgcgggtagcggggaggggagcggcggtcgaggtaaagggtcgtcgagcggcggaggtatcgagtaagggtcggcggcggtggcggttgggttcggggtatcgcgcgttcggtgttttcgggtgtagaaggggcgcgggcgtattgttttcggggtcgcgtgcgtgagcgcgggcgtcggggcgttcgtagggggtgggtaggggcgcgaggttcgtaaggcggtcggcgggtagtcggcgggttggttggcggggatcgagtcgtcgggtcggggaggacggttgcgggtttgcgttagttttagtttgaagcgttcgggtcgggagattcggttttttttttttttgcggtcggtcgttttttagtgagtacggttttcgtttttttttcgaaggaggtcgttgggttcgggtttgcgtgaggggttgcgggttggggtcgcggttcggggaagttaagtttcggagttgaagtcggtgttcgttttttttttgttatcggcgtttttgatatggttataggtgcggttggtttggcgaggggcgttcgggtttcgtttttagtttttgatcgtcgg

SEQ ID NO: 26760 - DNA, 1186 bp, Artificial Sequence
  chemically treated genomic DNA (Homo sapiens) CpG-island No: 26760
ccgacgatcaaaaactaaaaacgaaacccgaacgcccctcgccaaaccaaccgcacctataaccatatcaaaaacgccgataacaaaaaaaaaacgaacaccgacttcaactccgaaacttaacttccccgaaccgcgaccccaacccgcaacccctcacgcaaacccgaacccaacgacctccttcgaaaaaaaaacgaaaaccgtactcactaaaaaacgaccgaccgcaaaaaaaaaaaaaaccgaatctcccgacccgaacgcttcaaactaaaactaacgcaaacccgcaaccgtcctccccgacccgacgactcgatccccgccaaccaacccgccgactacccgccgaccgccttacgaacctcgcgcccctacccaccccctacgaacgccccgacgcccgcgctcacgcacgcgaccccgaaaacaatacgcccgcgccccttctacacccgaaaacaccgaacgcgcgataccccgaacccaaccgccaccgccgccgacccttactcgatacctccgccgctcgacgaccctttacctcgaccgccgctcccctccccgctacccgcaccgatcccaacgccgctccccgcaaccttcgctctcgcgcccccaccccgaccgacttaaactatctctcttcaaccgccgtaactacaacccgaccctccgcccctcctcttcgaccccctcccccttaataactccctccacgcaccctaaccccgacgccgccttccccgccgcgcgcccgaatataaaataactacaacgataccgaacgaaaaaaaaacatcgccgcgcgcttcccgaacgccaacccctacgcgaaccgaaaaataaaaaaataataacgacgaaaaaaaaaccacgataaaaataacgaaaacccgctcccgtacgcgcaaacgatcgccgtaaacaacccaaaaaccaccgccgccgcgttcccacgcgcgctacaaaacaaaacgaacgacacttaaaacccgcgactcgcgacacgccactctcccgaaaacgataactaaataaaactaaactaacgactaacacgacctataacgcgacgaccgctatatttacataattcgcataaacaaaaaaccgtaaaacttcgacaataaaaatttaaaataaaaaattaaaatcttccgaaccttcccaatacgaattc

SEQ ID NO: 26761 - DNA, 740 bp, Artificial Sequence
  chemically treated genomic DNA (Homo sapiens) CpG-island No: 26761
ttcgaagtgcgttatttattcgattgaggttgcgtaagtttcggggtttgggcggggtggttttcgtgcgcgtcgcgtcgtcgtggagacgagggcgggttcgcgcgagattggcgtttagaggcgcgcgaagcgttgaggcgggcgtggatcgcgcgggagttaagaagtaggtttcggatcgtcgtatatcgtcgggtttttttttaacgttaggttcgatggttcggtttttttaggtacgaggttcggttttaacgtttttatttttttttgggttcggttttttcggtagtgagttcggtaaggattttagtcgggttttttcgagttcggtgaaatttgttcgagttttcgtttttttttttgaaagtgtaggtgatgttgtttatttgcgggtttgtggtgcgggaatggaggaagtgcgataagagggcgtaggacggggttcggagtttgttattttttttcgtcgcgttttttcggttttttgtttttcgttttgggggtatcgtatttttttaggcgtttagtgcgtttttggtcggtgttcgagtttacgtaatgttttttagcgtgcgcggatttaaattaggggtttttttttttcggtttcgtggtttaggagcggaagggttggtatatgggcgattttatttttattgagttcgtagggagtaacgtagtaaataaatttggaagtttttttcgcgtgggaggtgggtatttgtttttatggg

SEQ ID NO: 26762 - DNA, 740 bp, Artificial Sequence
  chemically treated genomic DNA (Homo sapiens) CpG-island No: 26762
cccataaaaacaaatacccacctcccacgcgaaaaaaacttccaaatttatttactacgttactccctacgaactcaataaaaataaaatcgcccatataccaacccttccgctcctaaaccacgaaaccgaaaaaaaaaaacccctaatttaaatccgcgcacgctaaaaaacattacgtaaactcgaacaccgaccaaaaacgcactaaacgcctaaaaaaatacgatacccccaaaacgaaaaacaaaaaaccgaaaaaacgcgacgaaaaaaaataacaaactccgaaccccgtcctacgccctcttatcgcacttcctccattcccgcaccacaaacccgcaaataaacaacatcacctacactttcaaaaaaaaaaacgaaaactcgaacaaatttcaccgaactcgaaaaaacccgactaaaatccttaccgaactcactaccgaaaaaaccgaacccaaaaaaaaataaaaacgttaaaaccgaacctcgtacctaaaaaaaccgaaccatcgaacctaacgttaaaaaaaaacccgacgatatacgacgatccgaaacctacttcttaactcccgcgcgatccacgcccgcctcaacgcttcgcgcgcctctaaacgccaatctcgcgcgaacccgccctcgtctccacgacgacgcgacgcgcacgaaaaccaccccgcccaaaccccgaaacttacgcaacctcaatcgaataaataacgcacttcgaa

SEQ ID NO: 26763 - DNA, 740 bp, Artificial Sequence
  chemically treated genomic DNA (Homo sapiens) CpG-island No: 26763
tttataaaaataggtatttattttttacgcggggaaggtttttaggtttgtttattgcgttattttttgcgggtttagtgggagtaaggtcgtttatatattagttttttcgtttttgggttacggagtcgggaggaggaaatttttgatttggattcgcgtacgttaaggggtattgcgtggattcgagtatcggttaggagcgtattagacgtttgggaggatgcggtgtttttagggcggaagataagaagtcgagaagacgcggcgggagaggatggtaggtttcgggtttcgttttgcgtttttttgtcgtattttttttattttcgtattatagattcgtaggtagataatattatttgtatttttaggggaggaagcggaggttcggatagattttatcgggttcggaggaattcgattgaggtttttgtcgggtttattgtcggaaaggtcgagtttagaagagggtggggacgttagggtcgggtttcgtatttggggaagtcgagttatcgggtttgacgttgggagaaaattcggcggtatacggcgattcgggatttgttttttaattttcgcgcggtttacgttcgttttagcgtttcgcgcgtttttagacgttagtttcgcgcgggttcgttttcgtttttacggcgacgcggcgcgtacgaggattatttcgtttagatttcggggtttgcgtagttttagtcgggtaggtggcgtatttcggg

SEQ ID NO: 26764 - DNA, 740 bp, Artificial Sequence
  chemically treated genomic DNA (Homo sapiens) CpG-island No: 26764
cccgaaatacgccacctacccgactaaaactacgcaaaccccgaaatctaaacgaaataatcctcgtacgcgccgcgtcgccgtaaaaacgaaaacgaacccgcgcgaaactaacgtctaaaaacgcgcgaaacgctaaaacgaacgtaaaccgcgcgaaaattaaaaaacaaatcccgaatcgccgtataccgccgaattttctcccaacgtcaaacccgataactcgacttccccaaatacgaaacccgaccctaacgtccccaccctcttctaaactcgacctttccgacaataaacccgacaaaaacctcaatcgaattcctccgaacccgataaaatctatccgaacctccgcttcctcccctaaaaatacaaataatattatctacctacgaatctataatacgaaaataaaaaaaatacgacaaaaaaacgcaaaacgaaacccgaaacctaccatcctctcccgccgcgtcttctcgacttcttatcttccgccctaaaaacaccgcatcctcccaaacgtctaatacgctcctaaccgatactcgaatccacgcaataccccttaacgtacgcgaatccaaatcaaaaatttcctcctcccgactccgtaacccaaaaacgaaaaaactaatatataaacgaccttactcccactaaacccgcaaaaaataacgcaataaacaaacctaaaaaccttccccgcgtaaaaaataaatacctatttttataaa

SEQ ID NO: 26765 - DNA, 739 bp, Artificial Sequence
  chemically treated genomic DNA (Homo sapiens) CpG-island No: 26765
agggatagcgtcggttttttttgttagttttttttaggttcgggtagtttcgttttttttcgtttcggtcggtcgataggagttgtttcggtattgcgttttttcgcggtcgtagaacgtttattttcgatagcgcgcggggttaaggggcggtgatagtcgtgcggcgggggcggagatgttattagttggggtgttatttagttcgggaggtgatacgcgttttttcgttcgggcggtcgtttggtcgtttatttttcgttagtacgttcggcgacgtttttcgtttcgttattttataatttttcgtttagcggtgtttttttagtttcggttggcgttttattttatttttttttttttttttatataatcgttatcggcgttttatcgcgttttatttttcgtcgttttcgtttcggttttcgggattttttcggtttcgggcgattgttgatatttatttgttatgtttcggattttatcgtagagggaggtgtattacggtcgcgagaaggtcggggacggtattttagagtagataaagggcgtcgttatgttagagtcgggcggaatcgatttcgtaggtttttcggttgtaattttcggcgtatgcgtagcgttttcgttaggagagcgtttatagatagacgtatgcgtttagttatttaaaagttttattttatagtatttcggcgtttagagttgtttttattgtatttttgttttggtttttttt

SEQ ID NO: 26766 - DNA, 739 bp, Artificial Sequence
  chemically treated genomic DNA (Homo sapiens) CpG-island No: 26766
aaaaaaaaccaaaacaaaaatacaataaaaacaactctaaacgccgaaatactataaaataaaacttttaaataactaaacgcatacgtctatctataaacgctctcctaacgaaaacgctacgcatacgccgaaaattacaaccgaaaaacctacgaaatcgattccgcccgactctaacataacgacgccctttatctactctaaaataccgtccccgaccttctcgcgaccgtaatacacctccctctacgataaaatccgaaacataacaaataaatatcaacaatcgcccgaaaccgaaaaaatcccgaaaaccgaaacgaaaacgacgaaaaataaaacgcgataaaacgccgataacgattatataaaaaaaaaaaaaaaaataaaataaaacgccaaccgaaactaaaaaaacaccgctaaacgaaaaattataaaataacgaaacgaaaaacgtcgccgaacgtactaacgaaaaataaacgaccaaacgaccgcccgaacgaaaaaacgcgtatcacctcccgaactaaataacaccccaactaataacatctccgcccccgccgcacgactatcaccgccccttaaccccgcgcgctatcgaaaataaacgttctacgaccgcgaaaaaacgcaataccgaaacaactcctatcgaccgaccgaaacgaaaaaaaacgaaactacccgaacctaaaaaaaactaacaaaaaaaaccgacgctatccct

SEQ ID NO: 26767 - DNA, 739 bp, Artificial Sequence
  chemically treated genomic DNA (Homo sapiens) CpG-island No: 26767
aagagaaattaaggtaggggtataatgaggataattttgagcgtcgaagtattgtaaggtggaatttttggatagttaggcgtatgcgtttgtttatgggcgtttttttagcgaggacgttgcgtatgcgtcggaagttgtagtcgggaagtttgcgaggtcggtttcgttcgattttaatatggcggcgttttttgtttgttttggagtgtcgttttcggttttttcgcggtcgtgatgtatttttttttgcggtggggttcgggatatggtaggtgagtgttaataatcgttcggggtcggggaagtttcgggagtcggggcggaggcggcggaggatggggcgcggtgggacgtcggtgacggttgtgtgggggaggggagggaagtggaatgggacgttaatcggggttgaggggatatcgttgggcgggagattgtggggtggcggggcggggggcgtcgtcgggcgtgttggcggggagtgggcggttaggcgatcgttcgggcgagggggcgcgtgttatttttcgggttggatgatattttagttggtagtattttcgttttcgtcgtacggttgttatcgttttttgatttcgcgcgttgtcgagggtgggcgttttgcggtcgcgagggagcgtagtgtcggggtagtttttgtcggtcggtcggggcgggagggagcggggttgttcgggtttaggaggagttgatagaggaggtcgacgttgttttt

SEQ ID NO: 26768 - DNA, 739 bp, Artificial Sequence
  chemically treated genomic DNA (Homo sapiens) CpG-island No: 26768
aaaaacaacgtcgacctcctctatcaactcctcctaaacccgaacaaccccgctccctcccgccccgaccgaccgacaaaaactaccccgacactacgctccctcgcgaccgcaaaacgcccaccctcgacaacgcgcgaaatcaaaaaacgataacaaccgtacgacgaaaacgaaaatactaccaactaaaatatcatccaacccgaaaaataacacgcgccccctcgcccgaacgatcgcctaaccgcccactccccgccaacacgcccgacgacgccccccgccccgccaccccacaatctcccgcccaacgatatcccctcaaccccgattaacgtcccattccacttccctcccctcccccacacaaccgtcaccgacgtcccaccgcgccccatcctccgccgcctccgccccgactcccgaaacttccccgaccccgaacgattattaacactcacctaccatatcccgaaccccaccgcaaaaaaaaatacatcacgaccgcgaaaaaaccgaaaacgacactccaaaacaaacaaaaaacgccgccatattaaaatcgaacgaaaccgacctcgcaaacttcccgactacaacttccgacgcatacgcaacgtcctcgctaaaaaaacgcccataaacaaacgcatacgcctaactatccaaaaattccaccttacaatacttcgacgctcaaaattatcctcattatacccctaccttaatttctctt

SEQ ID NO: 26769 - DNA, 1158 bp, Artificial Sequence
  chemically treated genomic DNA (Homo sapiens) CpG-island No: 26769
gcgttagaaagcggaatttttcgggttagtcgcgcggtggttatttttttgggagttggggaggaggttgcggaggttggttcggttttttcgggcgtcgtttttcggatcgggtgcgcggggtttttcggaacgtgtgttttaggttttttcgcgttagtgttcgtagttttcgtttggtcgcggcggcgtttcgggcgcgggtgtaggcgcgcggcgcgtaggcggggggcgttgtggttttggcgcggggatcgagtcgttcggttagattcgtttttttttttttttcgttagttcgttcgtttgttcgttttttacgcgtcgtgtcgtcgggaagtcgggcggagatagagcgtttgggatttacggcgttcggatcgttgttttttaatagcgtagggtagagcggttggcgtcgtcggagcgcggagttacgattttttttggtcgtttttgtttattggtcgtgcggttcggaatcgttattttttagggtcggggacgcgttcgtagttgtcggtgatagtttttttttatcgtaatttttcggggcggaggggcggtcgggtcgggttttgttagttcgcgatcgtaagttcgcgttcgcggatcgatgttttcgtagtagggggatttcgcgtttttcgatcgttgcgaggcgttttcggtgtcgtcgcgtcgggagcgcggtggacgcgggggacgcgggtttggggagtcggggggtcgggggcgtgcggggggtgtcgaggggcgcggcgttaagtgcgtgttggtcggcgacggcgcggtgggtaagacgagtttggtggtgagttatattattaacggttattttatcgagtatatttttattgttttcgataattttttcggtgagttggtcggggggtcggggtcgggggcgcgtggtcgcggtttatttaggggaaggaaggtggcgcgagggtcgcgaggtttttaagggggttgtagggtttcgggcgcggttttagttgggaagtcggataaatgaggagtgtaggacgttttttgagttttagggatcgggtaagcgcggagttaatacgaaaggattacggcggagtgggtttggagagaggagggcggagcggtagttagagttttgttaaaaaaaaaaaaaaaaaaaatttt

SEQ ID NO: 26770 - DNA, 1158 bp, Artificial Sequence
  chemically treated genomic DNA (Homo sapiens) CpG-island No: 26770
aaaattttttttttttttttttttaacaaaactctaactaccgctccgccctcctctctccaaacccactccgccgtaatcctttcgtattaactccgcgcttacccgatccctaaaactcaaaaaacgtcctacactcctcatttatccgacttcccaactaaaaccgcgcccgaaaccctacaacccccttaaaaacctcgcgaccctcgcgccaccttccttcccctaaataaaccgcgaccacgcgcccccgaccccgaccccccgaccaactcaccgaaaaaattatcgaaaacaataaaaatatactcgataaaataaccgttaataatataactcaccaccaaactcgtcttacccaccgcgccgtcgccgaccaacacgcacttaacgccgcgcccctcgacaccccccgcacgcccccgaccccccgactccccaaacccgcgtcccccgcgtccaccgcgctcccgacgcgacgacaccgaaaacgcctcgcaacgatcgaaaaacgcgaaatccccctactacgaaaacatcgatccgcgaacgcgaacttacgatcgcgaactaacaaaacccgacccgaccgcccctccgccccgaaaaattacgataaaaaaaaactatcaccgacaactacgaacgcgtccccgaccctaaaaaataacgattccgaaccgcacgaccaataaacaaaaacgaccaaaaaaaatcgtaactccgcgctccgacgacgccaaccgctctaccctacgctattaaaaaacaacgatccgaacgccgtaaatcccaaacgctctatctccgcccgacttcccgacgacacgacgcgtaaaaaacgaacaaacgaacgaactaacgaaaaaaaaaaaaaaacgaatctaaccgaacgactcgatccccgcgccaaaaccacaacgccccccgcctacgcgccgcgcgcctacacccgcgcccgaaacgccgccgcgaccaaacgaaaactacgaacactaacgcgaaaaaacctaaaacacacgttccgaaaaaccccgcgcacccgatccgaaaaacgacgcccgaaaaaaccgaaccaacctccgcaacctcctccccaactcccaaaaaaataaccaccgcgcgactaacccgaaaaattccgctttctaacgc

SEQ ID NO: 26771 - DNA, 1158 bp, Artificial Sequence
  chemically treated genomic DNA (Homo sapiens) CpG-island No: 26771
gagattttttttttttttttttttggtaaggttttgattgtcgtttcgtttttttttttttaagtttatttcgtcgtggttttttcgtgttagtttcgcgtttgttcggtttttgagatttaggaaacgttttgtattttttatttgttcggttttttagttggagtcgcgttcggggttttgtagtttttttgggaatttcgcgattttcgcgttatttttttttttttgggtggatcgcggttacgcgttttcggtttcggtttttcggttagtttatcggagaagttgtcgaaggtagtagggatgtattcggtggggtagtcgttggtggtgtagtttattattaggttcgttttgtttatcgcgtcgtcgtcgattagtacgtatttgacgtcgcgtttttcggtatttttcgtacgttttcggtttttcggttttttaggttcgcgtttttcgcgtttatcgcgttttcgacgcggcggtatcggaggcgtttcgtagcggtcggggaacgcggggtttttttgttgcgggggtatcgattcgcgagcgcgggtttgcggtcgcgggttagtagggttcggttcgatcgttttttcgtttcggagggttgcggtagggaggagttgttatcgatagttgcgggcgcgttttcggttttggagagtggcggtttcgggtcgtacggttagtagataaaggcggttagggagggtcgtggtttcgcgtttcggcggcgttagtcgttttgttttgcgttgttggaggatagcggttcgagcgtcgtggattttaagcgttttgttttcgttcggtttttcggcgatacgacgcgtggggggcgggtaggcgggcgggttggcggggagggaaaagaggcgggtttggtcgagcggttcggttttcgcgttaagattatagcgtttttcgtttgcgcgtcgcgcgtttgtattcgcgttcgaggcgtcgtcgcgattaggcggggattgcgaatattggcgcgggaggatttggaatatacgtttcgggggatttcgcgtattcggttcgggaagcgacgttcgaaggagtcgggttagttttcgtagttttttttttagtttttaagagggtgattatcgcgcgattggttcgggaggtttcgttttttggcgt

SEQ ID NO: 26772 - DNA, 1158 bp, Artificial Sequence
  chemically treated genomic DNA (Homo sapiens) CpG-island No: 26772
acgccaaaaaacgaaacctcccgaaccaatcgcgcgataatcaccctcttaaaaactaaaaaaaaaactacgaaaactaacccgactccttcgaacgtcgcttcccgaaccgaatacgcgaaatcccccgaaacgtatattccaaatcctcccgcgccaatattcgcaatccccgcctaatcgcgacgacgcctcgaacgcgaatacaaacgcgcgacgcgcaaacgaaaaacgctataatcttaacgcgaaaaccgaaccgctcgaccaaacccgcctcttttccctccccgccaacccgcccgcctacccgccccccacgcgtcgtatcgccgaaaaaccgaacgaaaacaaaacgcttaaaatccacgacgctcgaaccgctatcctccaacaacgcaaaacaaaacgactaacgccgccgaaacgcgaaaccacgaccctccctaaccgcctttatctactaaccgtacgacccgaaaccgccactctccaaaaccgaaaacgcgcccgcaactatcgataacaactcctccctaccgcaaccctccgaaacgaaaaaacgatcgaaccgaaccctactaacccgcgaccgcaaacccgcgctcgcgaatcgatacccccgcaacaaaaaaaccccgcgttccccgaccgctacgaaacgcctccgataccgccgcgtcgaaaacgcgataaacgcgaaaaacgcgaacctaaaaaaccgaaaaaccgaaaacgtacgaaaaataccgaaaaacgcgacgtcaaatacgtactaatcgacgacgacgcgataaacaaaacgaacctaataataaactacaccaccaacgactaccccaccgaatacatccctactaccttcgacaacttctccgataaactaaccgaaaaaccgaaaccgaaaacgcgtaaccgcgatccacccaaaaaaaaaaaaataacgcgaaaatcgcgaaattcccaaaaaaactacaaaaccccgaacgcgactccaactaaaaaaccgaacaaataaaaaatacaaaacgtttcctaaatctcaaaaaccgaacaaacgcgaaactaacacgaaaaaaccacgacgaaataaacttaaaaaaaaaaaaacgaaacgacaatcaaaaccttaccaaaaaaaaaaaaaaaaaaaatctc

SEQ ID NO: 26773 - DNA, 972 bp, Artificial Sequence
  chemically treated genomic DNA (Homo sapiens) CpG-island No: 26773
ttttgatcgattttagttcgtttatcgtcggttttttaggcgatagtagttttttggggggcgcgggcggcggcggcggcggcggttgttcgggaggcggtttcgcgtttttagcgttttcggcggcggcgtcgcgcgtgtcgtttacgatgacgttgtaggtcgcggtcgtttcggggttcgtcggggcgttcgggtttgggtcgtcggcggcgggcgggttgtagtggtcgtttttgtagtcgtcgtaggttttgcgtttcgcggcgttcggttcgcgtttcgttttgacgtgcgcgtgtagcgcgcggtggattacgttgtgtagtcgggttcggtggtttacggttaggtcgatgacgtcgttttgcgggttttgtagtacgtttgggaagtcgagttggtcgttcgcgttcggggggttcggggggttgtcggcgcgtcgcgttaggtttattatttcgtttcggttatgttcggcgggcgtgggcgttaggtttagggtttggttcgagtagtcggggggcgagttcgcggatttggacgagttttgtttggagtttcggggggatagggagtgttcgtttggtttgtcgttcgtcgtcgcggagtcgttaggggcgttcggaatgaagtttttttcgttgttggagaattcgttggggggtttggagtcgttgacgtgagggatagggatggggatggggatgggtatcggtaggggtacgattacggggtacggtacgagtagggtcgggggcggtattagcggggtaagcgacggtagttcgaaatttattatttggggtatcggtatcgggttatttggtattatgtttattggcgggaagggaagattcggtagcggggcgttcggaggcggcgggggtagtaggtttggggggttttcgggtatggtgggggtgttcggggggtggatgtggggcgatagtatgggtcggtgtatggggt

SEQ ID NO: 26774 - DNA, 972 bp, Artificial Sequence
  chemically treated genomic DNA (Homo sapiens) CpG-island No: 26774
accccatacaccgacccatactatcgccccacatccaccccccgaacacccccaccatacccgaaaaccccccaaacctactacccccgccgcctccgaacgccccgctaccgaatcttcccttcccgccaataaacataataccaaataacccgataccgataccccaaataataaatttcgaactaccgtcgcttaccccgctaataccgcccccgaccctactcgtaccgtaccccgtaatcgtacccctaccgatacccatccccatccccatccctatccctcacgtcaacgactccaaaccccccaacgaattctccaacaacgaaaaaaacttcattccgaacgcccctaacgactccgcgacgacgaacgacaaaccaaacgaacactccctatccccccgaaactccaaacaaaactcgtccaaatccgcgaactcgccccccgactactcgaaccaaaccctaaacctaacgcccacgcccgccgaacataaccgaaacgaaataataaacctaacgcgacgcgccgacaaccccccgaaccccccgaacgcgaacgaccaactcgacttcccaaacgtactacaaaacccgcaaaacgacgtcatcgacctaaccgtaaaccaccgaacccgactacacaacgtaatccaccgcgcgctacacgcgcacgtcaaaacgaaacgcgaaccgaacgccgcgaaacgcaaaacctacgacgactacaaaaacgaccactacaacccgcccgccgccgacgacccaaacccgaacgccccgacgaaccccgaaacgaccgcgacctacaacgtcatcgtaaacgacacgcgcgacgccgccgccgaaaacgctaaaaacgcgaaaccgcctcccgaacaaccgccgccgccgccgccgcccgcgccccccaaaaaactactatcgcctaaaaaaccgacgataaacgaactaaaatcgatcaaaa

SEQ ID NO: 26775 - DNA, 972 bp, Artificial Sequence
  chemically treated genomic DNA (Homo sapiens) CpG-island No: 26775
gttttatgtatcggtttatgttatcgttttatatttatttttcgagtatttttattatgttcgggaattttttaggtttgttgttttcgtcgttttcgggcgtttcgttgtcgagtttttttttttcgttagtgagtatgatgttaaatggttcgatgtcggtgttttagatgatgaatttcgggttgtcgtcgtttgtttcgttggtgtcgttttcgattttgttcgtgtcgtatttcgtgatcgtgtttttatcggtgtttatttttatttttatttttattttttacgttagcgattttaagttttttaacgggttttttagtaacggggagaattttatttcgaacgtttttggcgatttcgcggcggcgggcggtaagttaagcggatattttttgttttttcgggattttaagtagggttcgtttaagttcgcggattcgtttttcggttgttcgggttaggttttgagtttggcgtttacgttcgtcgagtatggtcggagcgaggtggtggatttgacgcggcgcgtcggtagtttttcgggtttttcgggcgcgggcggttagttcggttttttaggcgtgttgtagggttcgtaggacggcgttatcgatttgatcgtgggttatcgagttcggttgtataacgtgatttatcgcgcgttgtacgcgtacgttaaggcggagcgcgagtcgagcgtcgcggagcgtaggatttgcggcggttgtagggacggttattgtagttcgttcgtcgtcggcgatttaggttcgggcgtttcggcgggtttcgaggcggtcgcggtttgtaacgttatcgtgaacggtacgcgcggcgtcgtcgtcgagggcgttaagagcgcggagtcgtttttcgagtagtcgtcgtcgtcgtcgtcgttcgcgttttttaagaagttgttgtcgtttgaggaatcggcggtgagcgagttagagtcggttaagg

SEQ ID NO: 26776 - DNA, 972 bp, Artificial Sequence
  chemically treated genomic DNA (Homo sapiens) CpG-island No: 26776
ccttaaccgactctaactcgctcaccgccgattcctcaaacgacaacaacttcttaaaaaacgcgaacgacgacgacgacgacgactactcgaaaaacgactccgcgctcttaacgccctcgacgacgacgccgcgcgtaccgttcacgataacgttacaaaccgcgaccgcctcgaaacccgccgaaacgcccgaacctaaatcgccgacgacgaacgaactacaataaccgtccctacaaccgccgcaaatcctacgctccgcgacgctcgactcgcgctccgccttaacgtacgcgtacaacgcgcgataaatcacgttatacaaccgaactcgataacccacgatcaaatcgataacgccgtcctacgaaccctacaacacgcctaaaaaaccgaactaaccgcccgcgcccgaaaaacccgaaaaactaccgacgcgccgcgtcaaatccaccacctcgctccgaccatactcgacgaacgtaaacgccaaactcaaaacctaacccgaacaaccgaaaaacgaatccgcgaacttaaacgaaccctacttaaaatcccgaaaaaacaaaaaatatccgcttaacttaccgcccgccgccgcgaaatcgccaaaaacgttcgaaataaaattctccccgttactaaaaaacccgttaaaaaacttaaaatcgctaacgtaaaaaataaaaataaaaataaaaataaacaccgataaaaacacgatcacgaaatacgacacgaacaaaatcgaaaacgacaccaacgaaacaaacgacgacaacccgaaattcatcatctaaaacaccgacatcgaaccatttaacatcatactcactaacgaaaaaaaaaaactcgacaacgaaacgcccgaaaacgacgaaaacaacaaacctaaaaaattcccgaacataataaaaatactcgaaaaataaatataaaacgataacataaaccgatacataaaac

SEQ ID NO: 26777 - DNA, 661 bp, Artificial Sequence
  chemically treated genomic DNA (Homo sapiens) CpG-island No: 26777
gcggaaagggaggggttttttacgggttttgttgatttgtttaattttacgttattcggaggtttttacggatggcggataagagggagggggagggggtgggggtttcggttcgtgttttttttttttttttcgttttcgttttcgtcggagttatttgattcgtagcgaagttgtcggtttcgttgcgcgtcggtttttgtgcgtatcgaggcggtcgtcgggaatcgggagttcgagttggttcggtagcgtcgtcgtttttattttcgcgtttttttttatttttttattgttttcggagttggtaaataaataaatttataaataaattattcgtgtgtttcggagaggcggcggcgtgggcggcggcggagagaaggcgtcgggtaaggcgagattaggttttcgcggagcgggggaagtatagattttagttcgggttcggtagtagtaagttgatttttatgaaatttacgaagttcgcggggttatcgaaaaggtttttatcggagcggattttgcggggcgggcggggtagaggttgtaggcgggttttttttttcgcgcggtttttatcggtcggtttcgtttttaagttttggacggttttttttttagttcgtttggttgggggtcgttgtatatcgggggtggaagt

SEQ ID NO: 26778 - DNA, 661 bp, Artificial Sequence
  chemically treated genomic DNA (Homo sapiens) CpG-island No: 26778
acttccacccccgatatacaacgacccccaaccaaacgaactaaaaaaaaaaccgtccaaaacttaaaaacgaaaccgaccgataaaaaccgcgcgaaaaaaaaaacccgcctacaacctctaccccgcccgccccgcaaaatccgctccgataaaaaccttttcgataaccccgcgaacttcgtaaatttcataaaaatcaacttactactaccgaacccgaactaaaatctatacttcccccgctccgcgaaaacctaatctcgccttacccgacgccttctctccgccgccgcccacgccgccgcctctccgaaacacacgaataatttatttataaatttatttatttaccaactccgaaaacaataaaaaaataaaaaaaaacgcgaaaataaaaacgacgacgctaccgaaccaactcgaactcccgattcccgacgaccgcctcgatacgcacaaaaaccgacgcgcaacgaaaccgacaacttcgctacgaatcaaataactccgacgaaaacgaaaacgaaaaaaaaaaaaaaaacacgaaccgaaacccccaccccctccccctccctcttatccgccatccgtaaaaacctccgaataacgtaaaattaaacaaatcaacaaaacccgtaaaaaacccctccctttccgc

SEQ ID NO: 26779 - DNA, 661 bp, Artificial Sequence
  chemically treated genomic DNA (Homo sapiens) CpG-island No: 26779
atttttattttcggtgtgtagcggtttttagttaggcgggttgggggaagggtcgtttagggtttgggggcggagtcggtcggtaggagtcgcgcgggaaggggagttcgtttgtagtttttgtttcgttcgtttcgtagagttcgtttcggtggggattttttcggtggtttcgcgagtttcgtaggttttataaaagttaatttattgttgtcgggttcgggttggggtttgtgtttttttcgtttcgcgggggtttagtttcgttttgttcggcgtttttttttcgtcgtcgtttacgtcgtcgttttttcggagtatacggataatttgtttgtggatttgtttatttgttagtttcggggatagtgggggagtgaaaaggggcgcgaaggtgggggcggcggcgttgtcgggttagttcgggttttcggttttcggcggtcgtttcggtgcgtataaaggtcggcgcgtagcggggtcggtaatttcgttacgggttaggtggtttcggcgggggcgggagcgggaggaggggaggaaatacgggtcgagatttttatttttttttttttttttttgttcgttattcgtgaaagttttcgaatagcgtgggattaaataaattaatagaattcgtggagaattttttttttttcgt

SEQ ID NO: 26780 - DNA, 661 bp, Artificial Sequence
  chemically treated genomic DNA (Homo sapiens) CpG-island No: 26780
acgaaaaaaaaaaaattctccacgaattctattaatttatttaatcccacgctattcgaaaactttcacgaataacgaacaaaaaaaaaaaaaaaaaaataaaaatctcgacccgtatttcctcccctcctcccgctcccgcccccgccgaaaccacctaacccgtaacgaaattaccgaccccgctacgcgccgacctttatacgcaccgaaacgaccgccgaaaaccgaaaacccgaactaacccgacaacgccgccgcccccaccttcgcgccccttttcactcccccactatccccgaaactaacaaataaacaaatccacaaacaaattatccgtatactccgaaaaaacgacgacgtaaacgacgacgaaaaaaaaacgccgaacaaaacgaaactaaacccccgcgaaacgaaaaaaacacaaaccccaacccgaacccgacaacaataaattaacttttataaaacctacgaaactcgcgaaaccaccgaaaaaatccccaccgaaacgaactctacgaaacgaacgaaacaaaaactacaaacgaactccccttcccgcgcgactcctaccgaccgactccgcccccaaaccctaaacgacccttcccccaacccgcctaactaaaaaccgctacacaccgaaaataaaaat

SEQ ID NO: 26781 - DNA, 1382 bp, Artificial Sequence
  chemically treated genomic DNA (Homo sapiens) CpG-island No: 26781
  unsure (1357..1358, 1378)
tcggtgaggtatcgtcgggatcggtgttcgggtaacgttatcgcgcgttttagtgataatcggtcggtgtcggagcggagcgcgaatacgcgcggaggtagcgtcggcgacggcgacggcggcgggcgcggggatagttgtatcggggtcgggtcgggttagtaggagttgggcgtttgtagcgtggatttcgtggatattcggttcgtagtcggtttgcggcgttcggggatttgtttggtttttttttcggggttttcgcgttttttttcgtttagggtagtagcgcgcggggttttcgggagtcgaagagtaggcgggaattggcggcggcgcgggaggcgtagggagcggaggcggtagtagcggttttcgtcgggattggtaattacgttcggggtcgggtcggggcgagtcgggtaagcggtttttttgggttttttcgtttttttttttacgaatagttcgagcgttttttcgcgggttcgttgcgcgcggagaggacgagttcgttgggttgtaaaaagagacgagtttttatttttgagtatcgagattcgtttttttaatcgtattcggtgcgcgtttttgggtcggtacgggtagggcgacggtaggggaaggtagttgcggaggagttcgcgtcgtttagtcggagcggttttgcgtttttcggagtttcgcgggaggcggtcgggtgcgtacgcgtttattatttttattttcggaattcgttttcgcgattttcgggcgttttagttttaggaacgttcggagggacgtatttgggggtttattttttgtcgcggaaaggggagaagtgtgggttttttcgagtcgggggcggattgggatagtatagtcggttgagcgtagcgttttcgttttgttcgttacgcggcgaagacgtttgagcgttcgcgtttttcgggcgaggattttacgtaagttcgagtcggtttcgattttggtttcgacgttcgtcgttcgttttagttttgagggtttttttgcgtgtttatagcggattttgatttaatgtttatataattaaggtacgcggtgaatgttaagagaggcgttttcgtcgttttttttttatggaaatggttcgcgagttcgttcggtttagcgtttttttcgcgggaggaaggcgagttcggttttcggcggttattcgcgtcgcggataaattcggcgaataatgcgttcgtttagagtgcggtttagttgtcgggtcggggatttggtcgcgggatataaaggggttcgtacgtttttggcgtcgcggggcgggtgggggcggtcgagggcggtcgaggggggagtttgcggtcggggttaggttttttggggnnttttcggggggggggggggntttt

SEQ ID NO: 26782 - DNA, 1382 bp, Artificial Sequence
  chemically treated genomic DNA (Homo sapiens) CpG-island No: 26782
  unsure (5, 25..)
aaaanccccccccccccccgaaaannccccaaaaaacctaaccccgaccgcaaactcccccctcgaccgccctcgaccgcccccacccgccccgcgacgccaaaaacgtacgaacccctttatatcccgcgaccaaatccccgacccgacaactaaaccgcactctaaacgaacgcattattcgccgaatttatccgcgacgcgaataaccgccgaaaaccgaactcgccttcctcccgcgaaaaaaacgctaaaccgaacgaactcgcgaaccatttccataaaaaaaaaacgacgaaaacgcctctcttaacattcaccgcgtaccttaattatataaacattaaatcaaaatccgctataaacacgcaaaaaaaccctcaaaactaaaacgaacgacgaacgtcgaaaccaaaatcgaaaccgactcgaacttacgtaaaatcctcgcccgaaaaacgcgaacgctcaaacgtcttcgccgcgtaacgaacaaaacgaaaacgctacgctcaaccgactatactatcccaatccgcccccgactcgaaaaaacccacacttctcccctttccgcgacaaaaaataaacccccaaatacgtccctccgaacgttcctaaaactaaaacgcccgaaaatcgcgaaaacgaattccgaaaataaaaataataaacgcgtacgcacccgaccgcctcccgcgaaactccgaaaaacgcaaaaccgctccgactaaacgacgcgaactcctccgcaactaccttcccctaccgtcgccctacccgtaccgacccaaaaacgcgcaccgaatacgattaaaaaaacgaatctcgatactcaaaaataaaaactcgtctctttttacaacccaacgaactcgtcctctccgcgcgcaacgaacccgcgaaaaaacgctcgaactattcgtaaaaaaaaaaacgaaaaaacccaaaaaaaccgcttacccgactcgccccgacccgaccccgaacgtaattaccaatcccgacgaaaaccgctactaccgcctccgctccctacgcctcccgcgccgccgccaattcccgcctactcttcgactcccgaaaaccccgcgcgctactaccctaaacgaaaaaaaacgcgaaaaccccgaaaaaaaaaccaaacaaatccccgaacgccgcaaaccgactacgaaccgaatatccacgaaatccacgctacaaacgcccaactcctactaacccgacccgaccccgatacaactatccccgcgcccgccgccgtcgccgtcgccgacgctacctccgcgcgtattcgcgctccgctccgacaccgaccgattatcactaaaacgcgcgataacgttacccgaacaccgatcccgacgatacctcaccga

SEQ ID NO: 26783 - DNA, 1382 bp, Artificial Sequence
  chemically treated genomic DNA (Homo sapiens) CpG-island No: 26783
  unsure (5, 25..)
ggggntttttttttttttcgggggnnttttaaaaagtttggtttcggtcgtaggtttttttttcggtcgttttcggtcgtttttattcgtttcgcgacgttagaggcgtgcgggtttttttgtgtttcgcggttagattttcggttcggtagttgggtcgtattttgggcgggcgtattgttcgtcggatttgttcgcggcgcgaatggtcgtcgggggtcgggttcgtttttttttcgcgggaggggcgttgggtcggacgggttcgcgggttatttttatgagaaaggagcggcggaggcgttttttttggtatttatcgcgtgttttaattgtatagatattaaattaaggttcgttgtgaatacgtagaggggtttttagggttggggcgggcggcgagcgtcggggttagggtcgggatcggttcgggtttgcgtggggttttcgttcgaggggcgcgaacgtttaggcgttttcgtcgcgtggcgggtagggcgggggcgttgcgtttagtcgattgtgttgttttagttcgttttcgattcggaggagtttatatttttttttttttcgcggtagagagtgggtttttaagtgcgttttttcgggcgtttttggagttggggcgttcgggaatcgcgaagacggatttcgggggtgggggtggtgagcgcgtgcgtattcggtcgtttttcgcggggtttcgaggggcgtagaatcgtttcgattgggcggcgcgagttttttcgtagttgtttttttttgtcgtcgttttgttcgtgtcgatttaggagcgcgtatcgaatgcggttaaaagaacgaatttcgatgtttaaagatgaaaattcgtttttttttataatttagcgagttcgtttttttcgcgcgtagcgggttcgcgagaaggcgttcgagttgttcgtggagagaaagacggggagatttagagaggtcgtttgttcggttcgtttcggttcggtttcgagcgtaattattagtttcggcgggagtcgttgttgtcgttttcgttttttgcgtttttcgcgtcgtcgttagttttcgtttgtttttcggttttcgggggtttcgcgcgttgttgttttgggcggagaagggcgcgggaatttcgagaagggagttaggtaagttttcgagcgtcgtaggtcggttgcgagtcgagtgtttacggggtttacgttgtaggcgtttagtttttgttagttcggttcggtttcgatgtaattgttttcgcgttcgtcgtcgtcgtcgtcgtcgacgttgttttcgcgcgtattcgcgtttcgtttcggtatcggtcgattattattggggcgcgcggtgacgttattcggatatcggtttcgacggtgttttatcga

SEQ ID NO: 26784 - DNA, 1382 bp, Artificial Sequence
  chemically treated genomic DNA (Homo sapiens) CpG-island No: 26784
  unsure (1357..1358, 1378)
tcgataaaacaccgtcgaaaccgatatccgaataacgtcaccgcgcgccccaataataatcgaccgataccgaaacgaaacgcgaatacgcgcgaaaacaacgtcgacgacgacgacgacgacgaacgcgaaaacaattacatcgaaaccgaaccgaactaacaaaaactaaacgcctacaacgtaaaccccgtaaacactcgactcgcaaccgacctacgacgctcgaaaacttacctaactcccttctcgaaattcccgcgcccttctccgcccaaaacaacaacgcgcgaaacccccgaaaaccgaaaaacaaacgaaaactaacgacgacgcgaaaaacgcaaaaaacgaaaacgacaacaacgactcccgccgaaactaataattacgctcgaaaccgaaccgaaacgaaccgaacaaacgacctctctaaatctccccgtctttctctccacgaacaactcgaacgccttctcgcgaacccgctacgcgcgaaaaaaacgaactcgctaaattataaaaaaaaacgaattttcatctttaaacatcgaaattcgttcttttaaccgcattcgatacgcgctcctaaatcgacacgaacaaaacgacgacaaaaaaaaacaactacgaaaaaactcgcgccgcccaatcgaaacgattctacgcccctcgaaaccccgcgaaaaacgaccgaatacgcacgcgctcaccacccccacccccgaaatccgtcttcgcgattcccgaacgccccaactccaaaaacgcccgaaaaaacgcacttaaaaacccactctctaccgcgaaaaaaaaaaaaatataaactcctccgaatcgaaaacgaactaaaacaacacaatcgactaaacgcaacgcccccgccctacccgccacgcgacgaaaacgcctaaacgttcgcgcccctcgaacgaaaaccccacgcaaacccgaaccgatcccgaccctaaccccgacgctcgccgcccgccccaaccctaaaaacccctctacgtattcacaacgaaccttaatttaatatctatacaattaaaacacgcgataaataccaaaaaaaacgcctccgccgctcctttctcataaaaataacccgcgaacccgtccgacccaacgcccctcccgcgaaaaaaaaacgaacccgacccccgacgaccattcgcgccgcgaacaaatccgacgaacaatacgcccgcccaaaatacgacccaactaccgaaccgaaaatctaaccgcgaaacacaaaaaaacccgcacgcctctaacgtcgcgaaacgaataaaaacgaccgaaaacgaccgaaaaaaaaacctacgaccgaaaccaaactttttaaaanncccccgaaaaaaaaaaaaancccc

SEQ ID NO: 26785 - DNA, 1240 bp, Artificial Sequence
  chemically treated genomic DNA (Homo sapiens) CpG-island No: 26785
cggttttagacgtagttttttggatcgtttttttttcgtttttttttattttagttcgcgtcggtcgtttcgggatttcgtttatttttattattttgtttttttgttttttgtatcgtcgtaggtcgggacgtggggtatatataattcgggggaagagggaaatataaagttatttattagagaattggtttttaacgggtcgcgagtttcgtcggtttcgacgcgcggttacgtgcgatttcggtttcgagatttcggtttcgtttgggttcggttttcgcgatttcgggttttgcgttttagttttaggattttaatttagatttcgcgtttcggtttcggtcgcggtttttgtaattcggtttcgttatttgggtgtttacgttggtggtcgatatgttttatgaataattagacgcggggtcggggcgttcgtcggttcgggttttttttagaggtcgggtttgttattttagttcgcgcggtttcgggtttcgtcgttaatttttcgggcgtcggtcgggcggcggcggcggttgttgggcgcgcgggtttttggcgaggcggtagcggcggtgagttcgggacgcggacgtattgaggaggcgtcgattttaatggcggcggcggcggcgatagtagcggcgacggcggcggtaggggacgagattgcgcggcgttagcgtgtacgcggggtaggtcgggagcgtcgcgtcgggtcgttatatttcgcgtttgcgcgttttcgttttacgggatggatttcgtttttaggttttagtttcgtgcggcggggcggggatcgtagtcggttgggcggggaagttttgagtcggggaagttacgtggggcgtgttcggaggcgtcgcggggtttggcgggaaggggttggcgggttgttgttaggtgtatagtcgtttatatatatttcggttatagtcgtattttcgacgcgttatcggtattgaggtttttgtagttttttttaaggttcgaagattaaacgttgttttggttcgatagttgggttacgggtttgttcggggtcggtttgtttttttttcgcgcgtaaatatttgttcgtttagagtttcgagttttcgcgtgttttaggtcgcgcgtttcggtttttgtcgcgggatttgcgggttttgttcgttttgcggttttggtttttagtcgtagcggagttttgggttcggtttcggaggttagttgttgtgtggatgtatttttg

SEQ ID NO: 26786 - DNA, 1240 bp, Artificial Sequence
  chemically treated genomic DNA (Homo sapiens) CpG-island No: 26786
caaaaatacatccacacaacaactaacctccgaaaccgaacccaaaactccgctacgactaaaaaccaaaaccgcaaaacgaacaaaacccgcaaatcccgcgacaaaaaccgaaacgcgcgacctaaaacacgcgaaaactcgaaactctaaacgaacaaatatttacgcgcgaaaaaaaaacaaaccgaccccgaacaaacccgtaacccaactatcgaaccaaaacaacgtttaatcttcgaaccttaaaaaaaactacaaaaacctcaataccgataacgcgtcgaaaatacgactataaccgaaatatatataaacgactatacacctaacaacaacccgccaaccccttcccgccaaaccccgcgacgcctccgaacacgccccacgtaacttccccgactcaaaacttccccgcccaaccgactacgatccccgccccgccgcacgaaactaaaacctaaaaacgaaatccatcccgtaaaacgaaaacgcgcaaacgcgaaatataacgacccgacgcgacgctcccgacctaccccgcgtacacgctaacgccgcgcaatctcgtcccctaccgccgccgtcgccgctactatcgccgccgccgccgccattaaaatcgacgcctcctcaatacgtccgcgtcccgaactcaccgccgctaccgcctcgccaaaaacccgcgcgcccaacaaccgccgccgccgcccgaccgacgcccgaaaaattaacgacgaaacccgaaaccgcgcgaactaaaataacaaacccgacctctaaaaaaaacccgaaccgacgaacgccccgaccccgcgtctaattattcataaaacatatcgaccaccaacgtaaacacccaaataacgaaaccgaattacaaaaaccgcgaccgaaaccgaaacgcgaaatctaaattaaaatcctaaaactaaaacgcaaaacccgaaatcgcgaaaaccgaacccaaacgaaaccgaaatctcgaaaccgaaatcgcacgtaaccgcgcgtcgaaaccgacgaaactcgcgacccgttaaaaaccaattctctaataaataactttatatttccctcttcccccgaattatatataccccacgtcccgacctacgacgatacaaaaaacaaaaaaacaaaataataaaaataaacgaaatcccgaaacgaccgacgcgaactaaaataaaaaaaaacgaaaaaaaaacgatccaaaaaactacgtctaaaaccg

SEQ ID NO: 26787 - DNA, 1240 bp, Artificial Sequence
  chemically treated genomic DNA (Homo sapiens) CpG-island No: 26787
taggggtgtatttatataatagttgattttcgggatcgggtttagggtttcgttgcggttgaaggttagggtcgtaaagcgaataaagttcgtaggtttcgcggtaagggtcgaggcgcgcgatttggaatacgcgggggttcggagttttgggcgggtaggtgtttgcgcgcgggggaagggtagatcgatttcggatagattcgtagtttagttgtcggattagaatagcgtttagttttcggattttggggaaaattatagaggttttagtgtcggtagcgcgtcgggggtgcggttgtggtcggggtgtgtgtgggcggttgtatatttggtagtagttcgttagttttttttcgttaggtttcgcggcgttttcggatacgttttacgtgattttttcggtttagggttttttcgtttagtcggttgcggttttcgtttcgtcgtacgagattgggatttgagagcgaaatttatttcgtaagacgggagcgcgtaggcgcgaagtgtggcggttcggcgcggcgttttcggtttgtttcgcgtgtacgttgacgtcgcgtagtttcgttttttgtcgtcgtcgtcgtcgttgttgtcgtcgtcgtcgtcgttattggagtcgacgtttttttagtgcgttcgcgtttcgggtttatcgtcgttgtcgtttcgttaggggttcgcgcgtttagtagtcgtcgtcgtcgttcggtcggcgttcggggaattggcggcggggttcggggtcgcgcgagttagggtgataggttcggtttttaggggaggttcgagtcggcgggcgtttcggtttcgcgtttagttgtttatgaagtatgtcggttattagcgtggatatttaggtagcggggtcgggttataggggtcgcggtcggggtcgaggcgcggggtttgggttgaggttttggggttggaacgtagagttcggggtcgcggaggtcgggtttaggcgggatcggggtttcggggtcggggtcgtacgtgatcgcgcgtcggggtcggcggagttcgcggttcgttggagattagttttttggtgaataattttgtgttttttttttttttcgggttgtgtgtattttacgtttcggtttgcggcggtgtagagaataaaaggataagataataaaggtgagcggagtttcgggacggtcggcgcgggttggagtggaggaggacggggaaggaacggtttaggaagttgcgtttggaatcg

SEQ ID NO: 26788 - DNA, 1240 bp, Artificial Sequence
  chemically treated genomic DNA (Homo sapiens) CpG-island No: 26788
cgattccaaacgcaacttcctaaaccgttccttccccgtcctcctccactccaacccgcgccgaccgtcccgaaactccgctcacctttattatcttatccttttattctctacaccgccgcaaaccgaaacgtaaaatacacacaacccgaaaaaaaaaaaaaacacaaaattattcaccaaaaaactaatctccaacgaaccgcgaactccgccgaccccgacgcgcgatcacgtacgaccccgaccccgaaaccccgatcccgcctaaacccgacctccgcgaccccgaactctacgttccaaccccaaaacctcaacccaaaccccgcgcctcgaccccgaccgcgacccctataacccgaccccgctacctaaatatccacgctaataaccgacatacttcataaacaactaaacgcgaaaccgaaacgcccgccgactcgaacctcccctaaaaaccgaacctatcaccctaactcgcgcgaccccgaaccccgccgccaattccccgaacgccgaccgaacgacgacgacgactactaaacgcgcgaacccctaacgaaacgacaacgacgataaacccgaaacgcgaacgcactaaaaaaacgtcgactccaataacgacgacgacgacgacaacaacgacgacgacgacgacaaaaaacgaaactacgcgacgtcaacgtacacgcgaaacaaaccgaaaacgccgcgccgaaccgccacacttcgcgcctacgcgctcccgtcttacgaaataaatttcgctctcaaatcccaatctcgtacgacgaaacgaaaaccgcaaccgactaaacgaaaaaaccctaaaccgaaaaaatcacgtaaaacgtatccgaaaacgccgcgaaacctaacgaaaaaaaactaacgaactactaccaaatatacaaccgcccacacacaccccgaccacaaccgcacccccgacgcgctaccgacactaaaacctctataattttccccaaaatccgaaaactaaacgctattctaatccgacaactaaactacgaatctatccgaaatcgatctacccttcccccgcgcgcaaacacctacccgcccaaaactccgaacccccgcgtattccaaatcgcgcgcctcgacccttaccgcgaaacctacgaactttattcgctttacgaccctaaccttcaaccgcaacgaaaccctaaacccgatcccgaaaatcaactattatataaatacaccccta

SEQ ID NO: 26789 - DNA, 699 bp, Artificial Sequence
  chemically treated genomic DNA (Homo sapiens) CpG-island No: 26789
gtttatttttttttcggttttttgtttatttttttttcggttttttgtttatttttttttcggttcggcgtttatttttttttcggttttttgtttatttttttttcggtttttcgtttattttttttttggttttttagtttttcgtttatttttttttcggttttttatttatttttttttcggtttttcgtttattttttttcgggtttttcgtttatttttttttcggtttttcgtttattttttttcgggtttttcgtttattttttttcgggtttttcgtttatttttttttcggtttttcgtttattttttttcgggtttttcgtttattttttttcgggtttttcgtttatttttttttcggtttttcgtttattttttttcgggtttttcgtttatttttttttcggtttttcgtttattttttttcgggtttttcgtttatttttttttcggtttttcgtttattttttttcgggtttttcgtttattttttttcgggtttttcgtttatttttttttcggtttttcgtttattttttttcgggtttttcgtttatttttttttcgttttttcgtttatttttttttcgttttttcgtttatttttttttcggtttttcgtttattttttttttggttttttagtttttcgtttatttttttttcggttttttgtttattttttttttg

SEQ ID NO: 26790 - DNA, 699 bp, Artificial Sequence
  chemically treated genomic DNA (Homo sapiens) CpG-island No: 26790
caaaaaaaaaataaacaaaaaaccgaaaaaaaaataaacgaaaaactaaaaaaccaaaaaaaaaataaacgaaaaaccgaaaaaaaaataaacgaaaaaacgaaaaaaaaataaacgaaaaaacgaaaaaaaaataaacgaaaaacccgaaaaaaaataaacgaaaaaccgaaaaaaaaataaacgaaaaacccgaaaaaaaataaacgaaaaacccgaaaaaaaataaacgaaaaaccgaaaaaaaaataaacgaaaaacccgaaaaaaaataaacgaaaaaccgaaaaaaaaataaacgaaaaacccgaaaaaaaataaacgaaaaaccgaaaaaaaaataaacgaaaaacccgaaaaaaaataaacgaaaaacccgaaaaaaaataaacgaaaaaccgaaaaaaaaataaacgaaaaacccgaaaaaaaataaacgaaaaacccgaaaaaaaataaacgaaaaaccgaaaaaaaaataaacgaaaaacccgaaaaaaaataaacgaaaaaccgaaaaaaaaataaataaaaaaccgaaaaaaaaataaacgaaaaactaaaaaaccaaaaaaaaaataaacgaaaaaccgaaaaaaaaataaacaaaaaaccgaaaaaaaaataaacgccgaaccgaaaaaaaaataaacaaaaaaccgaaaaaaaaataaacaaaaaaccgaaaaaaaaataaac

SEQ ID NO: 26791 - DNA, 699 bp, Artificial Sequence
  chemically treated genomic DNA (Homo sapiens) CpG-island No: 26791
taggagagggatggatagggagtcgggagagggatggacggggagttggggagttaggagagggatggacggggagtcgggagagggatggacggggagacgggagagggatggacggggagacgggagagggatggacggggagttcggagagggatggacggggagtcgggagagggatggacggggagttcggagagggatggacggggagttcggagagggatggacggggagtcgggagagggatggacggggagttcggagagggatggacggggagtcgggagagggatggacggggagttcggagagggatggacggggagtcgggagagggatggacggggagttcggagagggatggacggggagttcggagagggatggacggggagtcgggagagggatggacggggagttcggagagggatggacggggagttcggagagggatggacggggagtcgggagagggatggacggggagttcggagagggatggacggggagtcggaagagggatggatggggagtcgggagagggatggacggggagttggggagttaggagagggatggacggggagtcgggagagggatggatagggagtcgggagagggatggacgtcgagtcgggagagggatggatagggagtcgggagagggatggatagggagtcgggagagggatggat

SEQ ID NO: 26792 - DNA, 699 bp, Artificial Sequence
  chemically treated genomic DNA (Homo sapiens) CpG-island No: 26792
atccatccctctcccgactccctatccatccctctcccgactccctatccatccctctcccgactcgacgtccatccctctcccgactccctatccatccctctcccgactccccgtccatccctctcctaactccccaactccccgtccatccctctcccgactccccatccatccctcttccgactccccgtccatccctctccgaactccccgtccatccctctcccgactccccgtccatccctctccgaactccccgtccatccctctccgaactccccgtccatccctctcccgactccccgtccatccctctccgaactccccgtccatccctctccgaactccccgtccatccctctcccgactccccgtccatccctctccgaactccccgtccatccctctcccgactccccgtccatccctctccgaactccccgtccatccctctcccgactccccgtccatccctctccgaactccccgtccatccctctccgaactccccgtccatccctctcccgactccccgtccatccctctccgaactccccgtccatccctctcccgtctccccgtccatccctctcccgtctccccgtccatccctctcccgactccccgtccatccctctcctaactccccaactccccgtccatccctctcccgactccctatccatccctctccta

SEQ ID NO: 26793 - DNA, 870 bp, Artificial Sequence
  chemically treated genomic DNA (Homo sapiens) CpG-island No: 26793
gcgtgaggaaacggggatttgttcggggtagtagatttttagcggtgaagacgtagagtatcgggttgacgttagaattgaagaaggttaaggtcgtagttttcgttcgcgtcgtttggtcggtttcgtttagtttcgttaaggtttttttcggtggagttagcgttgcgatcgtttgtagaaggttgattgcgtggtagggggtttagagtaagtcgaaggtaagtacgatggcgtttattagtcggtttattcgcgtttcgtgtcgttcggagttttagcgggcgtttcgtagtcgtgttagcgttacgttgtagtagtcgagtattagttcgaaaggaagtacgaaagcggttagagtttttaggtttaggtgggcggcggcgtggatcggcgacgggtggtatagttggtatacgcggtttttttataggtggcggtagacggcggtcgggacggcgagtaatagggcggttagttagatcgttagtagtaggcggcgggttagggtcgggttgcgtagtcgaggcgttaggaaggggcgggtgattgcgaggtagcgttgtaggttgagtaggtcggtgagtagtacgttggcgtatatgttgagcgcgtatacgtagtatatcgttttgtagttcgtttggtttagcggttaggtttgtcgggttaggaaggttataaagagcggcgtgagtagtagtatcgcgtcgtcggttagcgttaggtgtagtataagcgtggtcgttagcggtcgttttcgtgtaggtcgttagttcgttaagttttatattacgaagtcgttgttaggtagttttagtagcgtcgttagtagtaggaaggttgtgtttgtggttcgcgaagtttttt

SEQ ID NO: 26794 - DNA, 870 bp, Artificial Sequence
  chemically treated genomic DNA (Homo sapiens) CpG-island No: 26794
aaaaaacttcgcgaaccacaaacacaaccttcctactactaacgacgctactaaaactacctaacaacgacttcgtaatataaaacttaacgaactaacgacctacacgaaaacgaccgctaacgaccacgcttatactacacctaacgctaaccgacgacgcgatactactactcacgccgctctttataaccttcctaacccgacaaacctaaccgctaaaccaaacgaactacaaaacgatatactacgtatacgcgctcaacatatacgccaacgtactactcaccgacctactcaacctacaacgctacctcgcaatcacccgccccttcctaacgcctcgactacgcaacccgaccctaacccgccgcctactactaacgatctaactaaccgccctattactcgccgtcccgaccgccgtctaccgccacctataaaaaaaccgcgtataccaactataccacccgtcgccgatccacgccgccgcccacctaaacctaaaaactctaaccgctttcgtacttcctttcgaactaatactcgactactacaacgtaacgctaacacgactacgaaacgcccgctaaaactccgaacgacacgaaacgcgaataaaccgactaataaacgccatcgtacttaccttcgacttactctaaaccccctaccacgcaatcaaccttctacaaacgatcgcaacgctaactccaccgaaaaaaaccttaacgaaactaaacgaaaccgaccaaacgacgcgaacgaaaactacgaccttaaccttcttcaattctaacgtcaacccgatactctacgtcttcaccgctaaaaatctactaccccgaacaaatccccgtttcctcacgc

SEQ ID NO: 26795 - DNA, 870 bp, Artificial Sequence
  chemically treated genomic DNA (Homo sapiens) CpG-island No: 26795
ggaagatttcgcgggttataggtatagtttttttgttgttggcggcgttgttggggttgtttggtaacggtttcgtggtgtggagtttggcgggttggcggtttgtacgggggcgatcgttggcggttacgtttgtgttgtatttggcgttggtcgacggcgcggtgttgttgtttacgtcgttttttgtggtttttttgattcggtaggtttggtcgttgggttaggcgggttgtaaggcggtgtattacgtgtgcgcgtttagtatgtacgttagcgtgttgtttatcggtttgtttagtttgtagcgttgtttcgtagttattcgtttttttttggcgtttcggttgcgtagttcggttttggttcgtcgtttgttgttggcggtttggttggtcgttttgttgttcgtcgtttcggtcgtcgtttatcgttatttgtggagggatcgcgtatgttagttgtgttattcgtcgtcggtttacgtcgtcgtttatttgagtttggagattttgatcgttttcgtgttttttttcgggttgatgttcggttgttatagcgtgacgttggtacggttgcggggcgttcgttggggtttcgggcggtacggggcgcgggtgggtcggttggtgagcgttatcgtgtttgttttcggtttgttttgggttttttattacgtagttaattttttgtaggcggtcgtagcgttggttttatcggaaggggttttggcgaagttgggcggagtcggttaggcggcgcgagcgggaattacggttttggttttttttagttttagcgttaattcggtgttttacgtttttatcgttggagatttgttgtttcgggtaggttttcgtttttttacgt

SEQ ID NO: 26796 - DNA, 870 bp, Artificial Sequence
  chemically treated genomic DNA (Homo sapiens) CpG-island No: 26796
acgtaaaaaaacgaaaacctacccgaaacaacaaatctccaacgataaaaacgtaaaacaccgaattaacgctaaaactaaaaaaaaccaaaaccgtaattcccgctcgcgccgcctaaccgactccgcccaacttcgccaaaaccccttccgataaaaccaacgctacgaccgcctacaaaaaattaactacgtaataaaaaacccaaaacaaaccgaaaacaaacacgataacgctcaccaaccgacccacccgcgccccgtaccgcccgaaaccccaacgaacgccccgcaaccgtaccaacgtcacgctataacaaccgaacatcaacccgaaaaaaaacacgaaaacgatcaaaatctccaaactcaaataaacgacgacgtaaaccgacgacgaataacacaactaacatacgcgatccctccacaaataacgataaacgacgaccgaaacgacgaacaacaaaacgaccaaccaaaccgccaacaacaaacgacgaaccaaaaccgaactacgcaaccgaaacgccaaaaaaaaacgaataactacgaaacaacgctacaaactaaacaaaccgataaacaacacgctaacgtacatactaaacgcgcacacgtaatacaccgccttacaacccgcctaacccaacgaccaaacctaccgaatcaaaaaaaccacaaaaaacgacgtaaacaacaacaccgcgccgtcgaccaacgccaaatacaacacaaacgtaaccgccaacgatcgcccccgtacaaaccgccaacccgccaaactccacaccacgaaaccgttaccaaacaaccccaacaacgccgccaacaacaaaaaaactatacctataacccgcgaaatcttcc

SEQ ID NO: 26797 - DNA, 789 bp, Artificial Sequence
  chemically treated genomic DNA (Homo sapiens) CpG-island No: 26797
ggtgggcgcggggtatgattatcgtcgtcgtatttatgattgttttttttattatgtaattcgatgtttttgagagtttttaatttagttagtttttttcggtgggcgcggggtatgattatcgtcgtcgtatttatgattgttttttttattatgtaattcgtaggataggtgtcggtagcgttttgggttattttcggcgaggatcgttttcgttggagcgcgacgatgatcggtttgtcgtttgcggtattcggaattttgtacgttttcgtttaagttttcgttattggtttcgttattaaacgtttcggcgagaagtaggttattatcgtcggtatggcggtcgacgcgttgggttacgttttgttggcgttcgcgacgcgaggttggatggttttttttattatgatttttttcgttttcggcggtatcgggatgttcgcgttgtaggttatgttgtttaggtaggtagatgacgattattagggatagttttaaggatcgttcgcggtttttattagtttaatttcgattattggatcgttgatcgttacggcgatttatgtcgtttcggcgagtatatggaacgggttggtatggattgtaggcgtcgttttatattttgtttgttttttcgcgttgcgtcgcggtgtatggagtcgggttatttcgatttgaatggaagtcggcggtatttcgttaacggatttattattttaagaattggagttaattaatttttgcggagaattgtgaatgcgtaaattaatttttggtagaatatat

SEQ ID NO: 26798 - DNA, 789 bp, Artificial Sequence
  chemically treated genomic DNA (Homo sapiens) CpG-island No: 26798
atatattctaccaaaaattaatttacgcattcacaattctccgcaaaaattaattaactccaattcttaaaataataaatccgttaacgaaataccgccgacttccattcaaatcgaaataacccgactccatacaccgcgacgcaacgcgaaaaaacaaacaaaatataaaacgacgcctacaatccataccaacccgttccatatactcgccgaaacgacataaatcgccgtaacgatcaacgatccaataatcgaaattaaactaataaaaaccgcgaacgatccttaaaactatccctaataatcgtcatctacctacctaaacaacataacctacaacgcgaacatcccgataccgccgaaaacgaaaaaaatcataataaaaaaaaccatccaacctcgcgtcgcgaacgccaacaaaacgtaacccaacgcgtcgaccgccataccgacgataataacctacttctcgccgaaacgtttaataacgaaaccaataacgaaaacttaaacgaaaacgtacaaaattccgaataccgcaaacgacaaaccgatcatcgtcgcgctccaacgaaaacgatcctcgccgaaaataacccaaaacgctaccgacacctatcctacgaattacataataaaaaaaacaatcataaatacgacgacgataatcataccccgcgcccaccgaaaaaaactaactaaattaaaaactctcaaaaacatcgaattacataataaaaaaaacaatcataaatacgacgacgataatcataccccgcgcccacc

SEQ ID NO: 26799 - DNA, 789 bp, Artificial Sequence
  chemically treated genomic DNA (Homo sapiens) CpG-island No: 26799
atatgttttgttaagggttggtttgcgtatttatagtttttcgtaagaattgattggttttaatttttggagtggtgaattcgttagcgaggtgtcgtcggtttttatttaggtcgaggtggttcggttttatgtatcgcgacgtaacgcggggaggtagataaggtatagggcggcgtttataatttatgttaattcgttttatgtgttcgtcgaggcggtataaatcgtcgtgacgattagcggtttaatgatcgaagttaggttggtaagagtcgcgagcgatttttgaagttgtttttgatggtcgttatttatttgtttggatagtatggtttgtaacgcgggtatttcgatgtcgtcggaagcgagaagaattataatggggaaggttatttagtttcgcgtcgcgaacgttagtaagacgtagtttagcgcgtcggtcgttatgtcggcgataatggtttgtttttcgtcgaaacgtttggtggcgggattagtgacgaaggtttgagcgagggcgtgtaagatttcgaatatcgtaagcgataggtcgattatcgtcgcgttttagcgaaagcggttttcgtcgaaaatgatttagagcgttgtcggtatttgttttacgagttgtatgataaagaagatagttataagtgcggcgacgatagttatgtttcgcgtttatcggaaggagttgattgggttgaaggtttttaagggtatcgagttgtatgataaagaagatagttataagtgcggcgacgatagttatgtttcgcgtttatt

SEQ ID NO: 26800 - DNA, 789 bp, Artificial Sequence
  chemically treated genomic DNA (Homo sapiens) CpG-island No: 26800
aataaacgcgaaacataactatcgtcgccgcacttataactatcttctttatcatacaactcgatacccttaaaaaccttcaacccaatcaactccttccgataaacgcgaaacataactatcgtcgccgcacttataactatcttctttatcatacaactcgtaaaacaaataccgacaacgctctaaatcattttcgacgaaaaccgctttcgctaaaacgcgacgataatcgacctatcgcttacgatattcgaaatcttacacgccctcgctcaaaccttcgtcactaatcccgccaccaaacgtttcgacgaaaaacaaaccattatcgccgacataacgaccgacgcgctaaactacgtcttactaacgttcgcgacgcgaaactaaataaccttccccattataattcttctcgcttccgacgacatcgaaatacccgcgttacaaaccatactatccaaacaaataaataacgaccatcaaaaacaacttcaaaaatcgctcgcgactcttaccaacctaacttcgatcattaaaccgctaatcgtcacgacgatttataccgcctcgacgaacacataaaacgaattaacataaattataaacgccgccctataccttatctacctccccgcgttacgtcgcgatacataaaaccgaaccacctcgacctaaataaaaaccgacgacacctcgctaacgaattcaccactccaaaaattaaaaccaatcaattcttacgaaaaactataaatacgcaaaccaacccttaacaaaacatat

SEQ ID NO: 26801 - DNA, 616 bp, Artificial Sequence
  chemically treated genomic DNA (Homo sapiens) CpG-island No: 26801
agttcgggtgtagcgggttttttttatcgcgtaggtcgttaaatgtttgggtgatcgttcgtagcggtcgttcgtcgcgtttcgagtttttgttttttggtaggcgcgggcgtattagggagggttagcgcgaggaggacggcgtagggaatgggtagggggcgcgcggtgtcggtagcggtatttgggtaggtaaggatcgcggtaatcggaataggacgggttcgggaagcggtaatcgcgacgtagttttgcgggttttaggggcgcgagttgggaatttttttttattcgaaatttcgttagatttatttgtagtagtacgcggaagatgtattagtcgatgatgagtagtttagtcgaggtcgtcgttattgtcgttatggttttaagaatggtaggtgggtggtcgagaaagagggtttgtcgagattcgttggtttcggagttcgttgttgggcgtattgtcgtagtcgcggtggtcgcgttttaagtattcgttcgttatttaagtgcgtatgcgcgttttggggggtgtttatgaggaggggtggttgggggcgttttttattcgttaggagaggaaaaaaataatttatttgttttttttatatcg

SEQ ID NO: 26802 - DNA, 616 bp, Artificial Sequence
  chemically treated genomic DNA (Homo sapiens) CpG-island No: 26802
cgatataaaaaaaacaaataaattatttttttcctctcctaacgaataaaaaacgcccccaaccacccctcctcataaacaccccccaaaacgcgcatacgcacttaaataacgaacgaatacttaaaacgcgaccaccgcgactacgacaatacgcccaacaacgaactccgaaaccaacgaatctcgacaaaccctctttctcgaccacccacctaccattcttaaaaccataacgacaataacgacgacctcgactaaactactcatcatcgactaatacatcttccgcgtactactacaaataaatctaacgaaatttcgaataaaaaaaaattcccaactcgcgcccctaaaacccgcaaaactacgtcgcgattaccgcttcccgaacccgtcctattccgattaccgcgatccttacctacccaaataccgctaccgacaccgcgcgccccctacccattccctacgccgtcctcctcgcgctaaccctccctaatacgcccgcgcctaccaaaaaacaaaaactcgaaacgcgacgaacgaccgctacgaacgatcacccaaacatttaacgacctacgcgataaaaaaaacccgctacacccgaact

SEQ ID NO: 26803 - DNA, 616 bp, Artificial Sequence
  chemically treated genomic DNA (Homo sapiens) CpG-island No: 26803
cggtatggaaagagtagatggattatttttttttttttttggcgaatgaggagcgtttttagttatttttttttataaatattttttaaggcgcgtatgcgtatttaggtggcgggcgggtatttaaggcgcggttatcgcggttgcggtagtgcgtttaatagcggatttcgagattagcggatttcggtaaattttttttttcgattatttatttattatttttggaattatggcggtagtggcggcggtttcggttgaattgtttattatcggttggtatatttttcgcgtgttgttgtaggtaagtttgacggggtttcgggtgggagagggtttttaattcgcgtttttagaattcgtaagattgcgtcgcgattgtcgtttttcggattcgttttatttcgattgtcgcgatttttgtttgtttaagtgtcgttgtcggtatcgcgcgttttttgtttattttttgcgtcgtttttttcgcgttgattttttttagtgcgttcgcgtttgttagggaataaagattcggggcgcggcgggcgatcgttgcggacgattatttaggtatttagcgatttacgcggtaagaaaaattcgttatattcggatt

SEQ ID NO: 26804 - DNA, 616 bp, Artificial Sequence
  chemically treated genomic DNA (Homo sapiens) CpG-island No: 26804
aatccgaatataacgaatttttcttaccgcgtaaatcgctaaatacctaaataatcgtccgcaacgatcgcccgccgcgccccgaatctttattccctaacaaacgcgaacgcactaaaaaaaatcaacgcgaaaaaaacgacgcaaaaaataaacaaaaaacgcgcgataccgacaacgacacttaaacaaacaaaaatcgcgacaatcgaaataaaacgaatccgaaaaacgacaatcgcgacgcaatcttacgaattctaaaaacgcgaattaaaaaccctctcccacccgaaaccccgtcaaacttacctacaacaacacgcgaaaaatataccaaccgataataaacaattcaaccgaaaccgccgccactaccgccataattccaaaaataataaataaataatcgaaaaaaaaaatttaccgaaatccgctaatctcgaaatccgctattaaacgcactaccgcaaccgcgataaccgcgccttaaatacccgcccgccacctaaatacgcatacgcgccttaaaaaatatttataaaaaaaaataactaaaaacgctcctcattcgccaaaaaaaaaaaaaaataatccatctactctttccataccg

SEQ ID NO: 26805 - DNA, 884 bp, Artificial Sequence
  chemically treated genomic DNA (Homo sapiens) CpG-island No: 26805
taggggttggcgggcgttttacgttttttttcgttcgttttttttttagtcgttttttattaggaatatagcgacgtggttagcgttcgcgaattgcggcggtagtagcgcgaggaggagggttcgggggacgaggtcgagggcgtagaggaggggtcggggtcgtcgcgggttaattttttttttagtagtttttttcgggcgtagcgttcggcgcgaggttttattttttcgttgtggtaggatattttcgacgtacgcggtagcggcgttttggttacgttgagtttgcgggattgtaagttgtaggaggtgggcgcgcgcggggattcggcggggcgggggcgggtcggggagtacgcggttcggggatttagcgggaatcgggttatagagggagggggatatataaagggggttgttggcgcgattgttcgcgcggaaggttggttttaggatttgattatacgaggtcgtttggaagcgaggatagtaagtcgttgagcgagaggcgaggggagtcgggtttgggtgcgggtagggggcggagttagcgggacgaaatttaggataggatagggtcggatgaggagcggaattattggaagagtaaacgtttggtgggcgcggaataaggcggggttaggattaggggcgggatttggggggtgggcggggttttgggaagaacgcgtcggggcggggtttaggagaggggcgggatcgaggataggaaaggtttgtataatttttcgcggcgggacgtgggtcgtcgggttcgttcggcgttagattaggagtggggttagagaaggggcgaggacgcgaggtgtggcgttttggggtttggggatgtgaggttagggttttcgaggtgaattggt

SEQ ID NO: 26806 - DNA, 884 bp, Artificial Sequence
  chemically treated genomic DNA (Homo sapiens) CpG-island No: 26806
accaattcacctcgaaaaccctaacctcacatccccaaaccccaaaacgccacacctcgcgtcctcgccccttctctaaccccactcctaatctaacgccgaacgaacccgacgacccacgtcccgccgcgaaaaattatacaaacctttcctatcctcgatcccgcccctctcctaaaccccgccccgacgcgttcttcccaaaaccccgcccaccccccaaatcccgcccctaatcctaaccccgccttattccgcgcccaccaaacgtttactcttccaataattccgctcctcatccgaccctatcctatcctaaatttcgtcccgctaactccgccccctacccgcacccaaacccgactcccctcgcctctcgctcaacgacttactatcctcgcttccaaacgacctcgtataatcaaatcctaaaaccaaccttccgcgcgaacaatcgcgccaacaaccccctttatatatccccctccctctataacccgattcccgctaaatccccgaaccgcgtactccccgacccgcccccgccccgccgaatccccgcgcgcgcccacctcctacaacttacaatcccgcaaactcaacgtaaccaaaacgccgctaccgcgtacgtcgaaaatatcctaccacaacgaaaaaataaaacctcgcgccgaacgctacgcccgaaaaaaactactaaaaaaaaaattaacccgcgacgaccccgacccctcctctacgccctcgacctcgtcccccgaaccctcctcctcgcgctactaccgccgcaattcgcgaacgctaaccacgtcgctatattcctaataaaaaacgactaaaaaaaaaacgaacgaaaaaaaacgtaaaacgcccgccaaccccta

SEQ ID NO: 26807 - DNA, 884 bp, Artificial Sequence
  chemically treated genomic DNA (Homo sapiens) CpG-island No: 26807
attagtttatttcggaggttttggttttatatttttagattttaggacgttatatttcgcgttttcgttttttttttagttttatttttaatttggcgtcgggcgggttcggcgatttacgtttcgtcgcgggaaattgtgtaagttttttttgttttcgatttcgttttttttttaagtttcgtttcgacgcgttttttttagagtttcgtttattttttaggtttcgtttttgattttggtttcgttttgtttcgcgtttattaggcgtttgtttttttaatggtttcgttttttattcggttttgttttattttaggtttcgtttcgttggtttcgttttttattcgtatttaagttcggtttttttcgtttttcgtttagcggtttgttgttttcgtttttagacggtttcgtgtagttaggttttagagttaatttttcgcgcggatagtcgcgttagtaattttttttgtgtgtttttttttttttatggttcggttttcgttaagttttcggatcgcgtatttttcggttcgttttcgtttcgtcgggttttcgcgcgcgtttattttttgtagtttgtagtttcgtaggtttagcgtggttaggacgtcgttgtcgcgtacgtcggggatattttgttatagcgagaaggtggagtttcgcgtcgagcgttgcgttcggaaggagttgttgggggagaggttggttcgcggcggtttcggttttttttttgcgttttcggtttcgtttttcgggttttttttttcgcgttgttgtcgtcgtagttcgcgggcgttggttacgtcgttgtatttttgatagaggacggttgggggaaagacgggcgggggagagcgtggggcgttcgttagtttttg

SEQ ID NO: 26808 - DNA, 884 bp, Artificial Sequence
  chemically treated genomic DNA (Homo sapiens) CpG-island No: 26808
caaaaactaacgaacgccccacgctctcccccgcccgtctttcccccaaccgtcctctatcaaaaatacaacgacgtaaccaacgcccgcgaactacgacgacaacaacgcgaaaaaaaaaacccgaaaaacgaaaccgaaaacgcaaaaaaaaaaccgaaaccgccgcgaaccaacctctcccccaacaactccttccgaacgcaacgctcgacgcgaaactccaccttctcgctataacaaaatatccccgacgtacgcgacaacgacgtcctaaccacgctaaacctacgaaactacaaactacaaaaaataaacgcgcgcgaaaacccgacgaaacgaaaacgaaccgaaaaatacgcgatccgaaaacttaacgaaaaccgaaccataaaaaaaaaaaaacacacaaaaaaaattactaacgcgactatccgcgcgaaaaattaactctaaaacctaactacacgaaaccgtctaaaaacgaaaacaacaaaccgctaaacgaaaaacgaaaaaaaccgaacttaaatacgaataaaaaacgaaaccaacgaaacgaaacctaaaataaaacaaaaccgaataaaaaacgaaaccattaaaaaaacaaacgcctaataaacgcgaaacaaaacgaaaccaaaatcaaaaacgaaacctaaaaaataaacgaaactctaaaaaaaacgcgtcgaaacgaaacttaaaaaaaaaacgaaatcgaaaacaaaaaaaacttacacaatttcccgcgacgaaacgtaaatcgccgaacccgcccgacgccaaattaaaaataaaactaaaaaaaaaacgaaaacgcgaaatataacgtcctaaaatctaaaaatataaaaccaaaacctccgaaataaactaat

SEQ ID NO: 26809 - DNA, 838 bp, Artificial Sequence
  chemically treated genomic DNA (Homo sapiens) CpG-island No: 26809
cgagcgtagtatttagcgtagtggttttaggttgtttagagcgttttttatttgcgggttcgacgcgtttcgtgtttcgttacgatcgcgggcgtatatcgcgcggaattgtaggcgcggttcgggatttgggttttgttcgggatacgtttagttagcgcggatttggaacgattcgttgtttagtattagcggtatcggtagtggttcgtgtgttatcgggtcggtttttagtattgggttcggtgcggtacgggcgtcgcggaacggaaatacgttcgtcgttattttggagcgcgcgtttagtttcgtttttcggcgtagtgttcgtttagacgtcgcgaaatcgcgttttcgacgttacgtcgcgcgatttaggtttttaagtatttcgatgtttttttttttttcgaagttcggttagcgtttttatttgattcgtttttggttgttaaggttgtttttaggatcgttgagacgtatttattttggttgcgaaattttacgttttttaattttttttttaatagtttatgagtgtttacgtttttttattttagtcgggacgttcggtttggaagtttcgttttaaagtttatcgtcgttaggtttcgtttttttttggttgttagttttagcgtcgcgttcggtggagtttcgtttttttgtttggttacgttttattgtcgggcgcgtatcgtcggtcgggcgcgtattttcgatcgtcggcggtttcgttttcgcgtggttgtttcgtttttagttttgcgttttggttagaagggttttttattttttgacgttttttttacgttaagaaattttaaattttgtcgat

SEQ ID NO: 26810 - DNA, 838 bp, Artificial Sequence
  chemically treated genomic DNA (Homo sapiens) CpG-island No: 26810
atcgacaaaatttaaaatttcttaacgtaaaaaaaacgtcaaaaaataaaaaacccttctaaccaaaacgcaaaactaaaaacgaaacaaccacgcgaaaacgaaaccgccgacgatcgaaaatacgcgcccgaccgacgatacgcgcccgacaataaaacgtaaccaaacaaaaaaacgaaactccaccgaacgcgacgctaaaactaacaaccaaaaaaaaacgaaacctaacgacgataaactttaaaacgaaacttccaaaccgaacgtcccgactaaaataaaaaaacgtaaacactcataaactattaaaaaaaaaattaaaaaacgtaaaatttcgcaaccaaaataaatacgtctcaacgatcctaaaaacaaccttaacaaccaaaaacgaatcaaataaaaacgctaaccgaacttcgaaaaaaaaaaaaacatcgaaatacttaaaaacctaaatcgcgcgacgtaacgtcgaaaacgcgatttcgcgacgtctaaacgaacactacgccgaaaaacgaaactaaacgcgcgctccaaaataacgacgaacgtatttccgttccgcgacgcccgtaccgcaccgaacccaatactaaaaaccgacccgataacacacgaaccactaccgataccgctaatactaaacaacgaatcgttccaaatccgcgctaactaaacgtatcccgaacaaaacccaaatcccgaaccgcgcctacaattccgcgcgatatacgcccgcgatcgtaacgaaacacgaaacgcgtcgaacccgcaaataaaaaacgctctaaacaacctaaaaccactacgctaaatactacgctcg

SEQ ID NO: 26811 - DNA, 838 bp, Artificial Sequence
  chemically treated genomic DNA (Homo sapiens) CpG-island No: 26811
gtcggtagagtttgagattttttaacgtaaaggaagcgttaaaagataaaggatttttttagttaggacgtaagattgagggcgagatagttacgcggaggcggggtcgtcggcggtcgaaggtgcgcgttcggtcgacggtgcgcgttcggtaatggggcgtggttaggtagagaggcggggttttatcgagcgcggcgttgaagttggtagttagaaaggggcggggtttggcgacgataggttttggggcggggtttttaaatcgggcgtttcggttagagtgaaggggcgtgggtatttataggttattgggggagaggttaagaaacgtagaatttcgtagttagaatgggtacgttttagcgattttgaaagtagttttgatagttagaggcgagttaagtggaaacgttggtcgggtttcgagaagggagggggtatcgaggtatttaaaggtttgaatcgcgcggcgtgacgtcgggggcgcggtttcgcggcgtttgggcggatattgcgtcgaggggcggggttggacgcgcgttttaagatggcggcgaacgtgttttcgtttcgcgacgttcgtgtcgtatcggatttagtgttggaggtcggttcggtggtatacgggttattgtcggtatcgttggtgttggataacgggtcgttttaagttcgcgttggttgggcgtgtttcgggtaggatttaggtttcgagtcgcgtttgtagtttcgcgcggtgtgcgttcgcggtcgtggcggggtacggggcgcgtcgggttcgtaggtggggaacgttttgggtagtttggagttattgcgttggatgttgcgttcg

SEQ ID NO: 26812 - DNA, 838 bp, Artificial Sequence
  chemically treated genomic DNA (Homo sapiens) CpG-island No: 26812
cgaacgcaacatccaacgcaataactccaaactacccaaaacgttccccacctacgaacccgacgcgccccgtaccccgccacgaccgcgaacgcacaccgcgcgaaactacaaacgcgactcgaaacctaaatcctacccgaaacacgcccaaccaacgcgaacttaaaacgacccgttatccaacaccaacgataccgacaataacccgtataccaccgaaccgacctccaacactaaatccgatacgacacgaacgtcgcgaaacgaaaacacgttcgccgccatcttaaaacgcgcgtccaaccccgcccctcgacgcaatatccgcccaaacgccgcgaaaccgcgcccccgacgtcacgccgcgcgattcaaacctttaaatacctcgataccccctcccttctcgaaacccgaccaacgtttccacttaactcgcctctaactatcaaaactactttcaaaatcgctaaaacgtacccattctaactacgaaattctacgtttcttaacctctcccccaataacctataaatacccacgccccttcactctaaccgaaacgcccgatttaaaaaccccgccccaaaacctatcgtcgccaaaccccgcccctttctaactaccaacttcaacgccgcgctcgataaaaccccgcctctctacctaaccacgccccattaccgaacgcgcaccgtcgaccgaacgcgcaccttcgaccgccgacgaccccgcctccgcgtaactatctcgccctcaatcttacgtcctaactaaaaaaatcctttatcttttaacgcttcctttacgttaaaaaatctcaaactctaccgac

SEQ ID NO: 26813 - DNA, 728 bp, Artificial Sequence
  chemically treated genomic DNA (Homo sapiens) CpG-island No: 26813
gcggttcgcgtcgcggtcgttagagggcgcggagcggcggggtttttcgtacggagggttttgcgtgaggtatcgcgtggggcggggttgcgggcgggtttttagttgttgggtttttatcggttgggtttcgtcgatcggtaagcggaacgcggtagcggggttgggtttgtgcggcggtcgtcggagcgttttggaaggcgtacggggcgaagatggcggcggagcgataggaggcgttgagggagttcgtggcggtgacgggcgtcgaggaggatcgggttcgtttttttttcgagtcggtcggttgggatttgtaggtagcgtcgcgcggcgggttgtgtcgggtgggtcggggattgttgggagcgggcgtttggtgttttaagttcgcggcggtcgaagcgtatagttattttcgttttatcgcggttcgatttaggttttatggtttcgggatcgtttgttacgcgtcgtttgttcggtttgggagtgggggaacgcgggttagttttagttagttttgtcgtgttagttttattttgtttcgttcgtttgcggcgttagcgagatttcgggcgttgcggtagtcggcgaggagagggagcgtttgggggcgtggttgtcgcgtcgagtatttgttggaggtcgggttggttcgagtgagtagtttttgggtgaagttttattcgggattaggtggtcgtttatttttattttcgaagttt

SEQ ID NO: 26814 - DNA, 728 bp, Artificial Sequence
  chemically treated genomic DNA (Homo sapiens) CpG-island No: 26814
aaacttcgaaaataaaaataaacgaccacctaatcccgaataaaacttcacccaaaaactactcactcgaaccaacccgacctccaacaaatactcgacgcgacaaccacgcccccaaacgctccctctcctcgccgactaccgcaacgcccgaaatctcgctaacgccgcaaacgaacgaaacaaaataaaactaacacgacaaaactaactaaaactaacccgcgttcccccactcccaaaccgaacaaacgacgcgtaacaaacgatcccgaaaccataaaacctaaatcgaaccgcgataaaacgaaaataactatacgcttcgaccgccgcgaacttaaaacaccaaacgcccgctcccaacaatccccgacccacccgacacaacccgccgcgcgacgctacctacaaatcccaaccgaccgactcgaaaaaaaaacgaacccgatcctcctcgacgcccgtcaccgccacgaactccctcaacgcctcctatcgctccgccgccatcttcgccccgtacgccttccaaaacgctccgacgaccgccgcacaaacccaaccccgctaccgcgttccgcttaccgatcgacgaaacccaaccgataaaaacccaacaactaaaaacccgcccgcaaccccgccccacgcgatacctcacgcaaaaccctccgtacgaaaaaccccgccgctccgcgccctctaacgaccgcgacgcgaaccgc

SEQ ID NO: 26815 - DNA, 728 bp, Artificial Sequence
  chemically treated genomic DNA (Homo sapiens) CpG-island No: 26815
ggatttcggaagtggaaatgagcggttatttagtttcgagtggggttttatttaagagttgtttattcggattagttcggtttttagtagatattcggcgcggtagttacgtttttaggcgtttttttttttcgtcggttgtcgtagcgttcgaagtttcgttgacgtcgtaagcgggcgaggtagggtgaaattggtacggtagaattggttggggttggttcgcgtttttttatttttaagtcgagtaggcgacgcgtgataagcggtttcgggattatgaggtttgggtcgggtcgcggtagagcggggatgattgtgcgtttcggtcgtcgcgggtttaaggtattaggcgttcgtttttagtagttttcggtttattcgatatagttcgtcgcgcggcgttatttgtaagttttagtcggtcgattcgagaaagaagcgggttcggtttttttcggcgttcgttatcgttacgaatttttttagcgttttttgtcgtttcgtcgttattttcgtttcgtgcgttttttaaagcgtttcggcggtcgtcgtataggtttagtttcgttgtcgcgtttcgtttgtcggtcgacgaggtttagtcgatgagggtttagtagttgggagttcgttcgtagtttcgttttacgcggtgttttacgtaaagtttttcgtgcgggaagtttcgtcgtttcgcgttttttggcgatcgcggcgcgaatcgt

SEQ ID NO: 26816 - DNA, 728 bp, Artificial Sequence
  chemically treated genomic DNA (Homo sapiens) CpG-island No: 26816
acgattcgcgccgcgatcgccaaaaaacgcgaaacgacgaaacttcccgcacgaaaaactttacgtaaaacaccgcgtaaaacgaaactacgaacgaactcccaactactaaaccctcatcgactaaacctcgtcgaccgacaaacgaaacgcgacaacgaaactaaacctatacgacgaccgccgaaacgctttaaaaaacgcacgaaacgaaaataacgacgaaacgacaaaaaacgctaaaaaaattcgtaacgataacgaacgccgaaaaaaaccgaacccgcttctttctcgaatcgaccgactaaaacttacaaataacgccgcgcgacgaactatatcgaataaaccgaaaactactaaaaacgaacgcctaataccttaaacccgcgacgaccgaaacgcacaatcatccccgctctaccgcgacccgacccaaacctcataatcccgaaaccgcttatcacgcgtcgcctactcgacttaaaaataaaaaaacgcgaaccaaccccaaccaattctaccgtaccaatttcaccctacctcgcccgcttacgacgtcaacgaaacttcgaacgctacgacaaccgacgaaaaaaaaaaacgcctaaaaacgtaactaccgcgccgaatatctactaaaaaccgaactaatccgaataaacaactcttaaataaaaccccactcgaaactaaataaccgctcatttccacttccgaaatcc

SEQ ID NO: 26817 - DNA, 667 bp, Artificial Sequence
  chemically treated genomic DNA (Homo sapiens) CpG-island No: 26817
ttttcggaggtttcggggtttttgggttttcggtttttttttcggaggtttgggttttcgggacgtcgcgcgtcgtgtggggcgcgtacgtagggttgggcgtgagggggcgtgcgcgtgcgtaggcgacgcgtcgaggtattaggtagagtcgtggaatcgtcgttaggtcgttgttggtttacgtcgttcgtcgcgtcgttcgttcgtttagcgttcgtcgtcgttatgggagtgtaggtggaaattatttttttaggagacggtgagtagtggcgcgcggcggttcggagtatttttgtcgtcgcgcgtatcggtttagtatgttcgtttttgtttttttagggcgtattttttttaagcgcggttagatttgcgtggtgtattatatcggtgagtcgggggtttagcggggagggggttcgggtcgtagttcgtagttcgggtgcggttggtcgtcgaggtttgggggttcggggtttggggttcggggcgtggcggcggcgaggttcgtatggttcgaggttgaggtttgggcggtggtttaggggtagtttggggtttgcggaattcgggcgggtttgaatcggcggttgtgagcgtcggttgcgggttaggtgttatttgattcgttagaagtatttttgtattttagatgttgttttta

SEQ ID NO: 26818 - DNA, 667 bp, Artificial Sequence
  chemically treated genomic DNA (Homo sapiens) CpG-island No: 26818
taaaaacaacatctaaaatacaaaaatacttctaacgaatcaaataacacctaacccgcaaccgacgctcacaaccgccgattcaaacccgcccgaattccgcaaaccccaaactacccctaaaccaccgcccaaacctcaacctcgaaccatacgaacctcgccgccgccacgccccgaaccccaaaccccgaacccccaaacctcgacgaccaaccgcacccgaactacgaactacgacccgaaccccctccccgctaaacccccgactcaccgatataatacaccacgcaaatctaaccgcgcttaaaaaaaatacgccctaaaaaaacaaaaacgaacatactaaaccgatacgcgcgacgacaaaaatactccgaaccgccgcgcgccactactcaccgtctcctaaaaaaataatttccacctacactcccataacgacgacgaacgctaaacgaacgaacgacgcgacgaacgacgtaaaccaacaacgacctaacgacgattccacgactctacctaatacctcgacgcgtcgcctacgcacgcgcacgccccctcacgcccaaccctacgtacgcgccccacacgacgcgcgacgtcccgaaaacccaaacctccgaaaaaaaaaccgaaaacccaaaaaccccgaaacctccgaaaa

SEQ ID NO: 26819 - DNA, 667 bp, Artificial Sequence
  chemically treated genomic DNA (Homo sapiens) CpG-island No: 26819
taagggtagtatttaaggtgtagaaatgtttttgacgggttagataatatttagttcgtagtcgacgtttatagtcgtcgatttagattcgttcgggtttcgtaagttttaggttgtttttgagttatcgtttaggttttagtttcgggttatgcggatttcgtcgtcgttacgtttcggattttaggtttcgggtttttaggtttcgacggttagtcgtattcgggttgcggattgcggttcgggtttttttttcgttgggttttcgatttatcggtgtagtgtattacgtaggtttggtcgcgtttggggaaggtgcgttttgaggagatagagacgggtatgttgagtcgatgcgcgcggcggtagaggtatttcgagtcgtcgcgcgttattatttatcgttttttggggagatggtttttatttgtatttttatggcggcggcggacgttgagcgggcgggcggcgcgacgggcggcgtggattaatagcgatttggcggcggttttacggttttgtttagtatttcggcgcgtcgtttgcgtacgcgtacgtttttttacgtttagttttgcgtgcgcgttttatacggcgcgcgacgtttcggaaatttaggttttcggaagagggatcggaagtttagaagtttcgagattttcggaag

SEQ ID NO: 26820 - DNA, 667 bp, Artificial Sequence
  chemically treated genomic DNA (Homo sapiens) CpG-island No: 26820
cttccgaaaatctcgaaacttctaaacttccgatccctcttccgaaaacctaaatttccgaaacgtcgcgcgccgtataaaacgcgcacgcaaaactaaacgtaaaaaaacgtacgcgtacgcaaacgacgcgccgaaatactaaacaaaaccgtaaaaccgccgccaaatcgctattaatccacgccgcccgtcgcgccgcccgcccgctcaacgtccgccgccgccataaaaatacaaataaaaaccatctccccaaaaaacgataaataataacgcgcgacgactcgaaatacctctaccgccgcgcgcatcgactcaacatacccgtctctatctcctcaaaacgcaccttccccaaacgcgaccaaacctacgtaatacactacaccgataaatcgaaaacccaacgaaaaaaaaacccgaaccgcaatccgcaacccgaatacgactaaccgtcgaaacctaaaaacccgaaacctaaaatccgaaacgtaacgacgacgaaatccgcataacccgaaactaaaacctaaacgataactcaaaaacaacctaaaacttacgaaacccgaacgaatctaaatcgacgactataaacgtcgactacgaactaaatattatctaacccgtcaaaaacatttctacaccttaaatactaccctta

SEQ ID NO: 26821 - DNA, 680 bp, Artificial Sequence
  chemically treated genomic DNA (Homo sapiens) CpG-island No: 26821
agggcggaggcgggaatgtgaaagttgagttttagttgcggagtttgtatcgaagtttaggaaaggcgggtcgaaaaaattggggtgaaggggttatttagtggatgggtaagacgggtcgtttttttcgaagagagagagttggatgcggggaaggttttgaggtggcggttgaggaacgtgggggaaagggggaggtgaacgcgtttagaaaaggggcgggaagcgcgcgtttagtatttttagttcgtagattcgggtttttgatcgcgcgtttagcgtcgacggtgcggacgttagaacggtagtcgcgcggtttttttcgtttcgtcgggatttgagaggttcgtagcgtgtttttcgaagtggcgggcgggtttttgttttttcggtcgggagttaggaagtcgaggaagggaatacgttgtttttttttgtttttttcgttttttttttttacgaagaatagggtaggaggttttgggcgtgtcggagcgagttcgtttcgggttttttcgtttattttaattttgtgagtttttcgatcgcgcggcgttttattttatcgggcgcgttcgagtttttcgtcggaattcgtttcgttttttttatatatttttttttaggaatggaagtgggcgtttagatttaattatttgagattttgttggttgggtcgt

SEQ ID NO: 26822 - DNA, 680 bp, Artificial Sequence
  chemically treated genomic DNA (Homo sapiens) CpG-island No: 26822
acgacccaaccaacaaaatctcaaataattaaatctaaacgcccacttccattcctaaaaaaaaatatataaaaaaaacgaaacgaattccgacgaaaaactcgaacgcgcccgataaaataaaacgccgcgcgatcgaaaaactcacaaaattaaaataaacgaaaaaacccgaaacgaactcgctccgacacgcccaaaacctcctaccctattcttcgtaaaaaaaaaaaacgaaaaaaacaaaaaaaaacaacgtattcccttcctcgacttcctaactcccgaccgaaaaaacaaaaacccgcccgccacttcgaaaaacacgctacgaacctctcaaatcccgacgaaacgaaaaaaaccgcgcgactaccgttctaacgtccgcaccgtcgacgctaaacgcgcgatcaaaaacccgaatctacgaactaaaaatactaaacgcgcgcttcccgccccttttctaaacgcgttcacctccccctttcccccacgttcctcaaccgccacctcaaaaccttccccgcatccaactctctctcttcgaaaaaaacgacccgtcttacccatccactaaataaccccttcaccccaattttttcgacccgcctttcctaaacttcgatacaaactccgcaactaaaactcaactttcacattcccgcctccgccct

SEQ ID NO: 26823 - DNA, 680 bp, Artificial Sequence
  chemically treated genomic DNA (Homo sapiens) CpG-island No: 26823
gcggtttagttagtaggattttaggtagttaggtttgagcgtttatttttatttttggagaaggatgtgtgggggaggcggaacgagtttcggcggagggttcgggcgcgttcggtggagtgaagcgtcgcgcggtcgaagggtttatagagttgaagtgggcgggaaaattcggagcggattcgtttcgatacgtttagggttttttgttttatttttcgtgggggaggggaacgaaaagagtaaaagagaataacgtgttttttttttcggttttttaattttcggtcgaggagataggagttcgttcgttatttcgagggatacgttgcgggttttttagatttcggcggggcgaggagggtcgcgcggttgtcgttttagcgttcgtatcgtcgacgttgagcgcgcggttagaaattcgggtttgcggattagaggtgttgggcgcgcgtttttcgttttttttttgagcgcgtttattttttttttttttttacgttttttagtcgttattttagagtttttttcgtatttagtttttttttttcgggagaggcggttcgttttgtttatttattgaataatttttttattttagttttttcgattcgttttttttgagtttcggtataaatttcgtagttagagtttagtttttatattttcgttttcgtttt

SEQ ID NO: 26824 - DNA, 680 bp, Artificial Sequence
  chemically treated genomic DNA (Homo sapiens) CpG-island No: 26824
aaaacgaaaacgaaaatataaaaactaaactctaactacgaaatttataccgaaactcaaaaaaaacgaatcgaaaaaactaaaataaaaaaattattcaataaataaacaaaacgaaccgcctctcccgaaaaaaaaaaactaaatacgaaaaaaactctaaaataacgactaaaaaacgtaaaaaaaaaaaaaaaataaacgcgctcaaaaaaaaaacgaaaaacgcgcgcccaacacctctaatccgcaaacccgaatttctaaccgcgcgctcaacgtcgacgatacgaacgctaaaacgacaaccgcgcgaccctcctcgccccgccgaaatctaaaaaacccgcaacgtatccctcgaaataacgaacgaactcctatctcctcgaccgaaaattaaaaaaccgaaaaaaaaaacacgttattctcttttactcttttcgttcccctcccccacgaaaaataaaacaaaaaaccctaaacgtatcgaaacgaatccgctccgaattttcccgcccacttcaactctataaacccttcgaccgcgcgacgcttcactccaccgaacgcgcccgaaccctccgccgaaactcgttccgcctcccccacacatccttctccaaaaataaaaataaacgctcaaacctaactacctaaaatcctactaactaaaccgc

SEQ ID NO: 26825 - DNA, 504 bp, Artificial Sequence
  chemically treated genomic DNA (Homo sapiens) CpG-island No: 26825
tttacggtttcggtgttcgaatttagttttagtatcgatcgtcggtttagcgcgtgggtttcgtcgttagaaaattcgggcgtttttaggtatttagaaaggataatggtagcgttttatataacgtaatttacgttatcggagttatattgttgtagtcgtagtattgtattatttcgtttttttaaaattcgtataaagtttcgtagtgggttttttagcgaggattttagcgtattcgttattgcgttcggtaatagaaagcggcgcgcgtagggacgttatattaacgcgtatcgtttcgttttgcggtttcgttttttgttcgtcgttgagttggcgacgtagcgcgcgcgagttaataaagttcggaaggtagcgttatttgggcggggtcgagcgtggggtttttgtttattcgacgcgtttggtagtttttttttattttaaattatacgtttggtttaacgaagaggtcgtttaaattatttttttagataaaat

SEQ ID NO: 26826 - DNA, 504 bp, Artificial Sequence
  chemically treated genomic DNA (Homo sapiens) CpG-island No: 26826
attttatctaaaaaaataatttaaacgacctcttcgttaaaccaaacgtataatttaaaataaaaaaaaactaccaaacgcgtcgaataaacaaaaaccccacgctcgaccccgcccaaataacgctaccttccgaactttattaactcgcgcgcgctacgtcgccaactcaacgacgaacaaaaaacgaaaccgcaaaacgaaacgatacgcgttaatataacgtccctacgcgcgccgctttctattaccgaacgcaataacgaatacgctaaaatcctcgctaaaaaacccactacgaaactttatacgaattttaaaaaaacgaaataatacaatactacgactacaacaatataactccgataacgtaaattacgttatataaaacgctaccattatcctttctaaatacctaaaaacgcccgaattttctaacgacgaaacccacgcgctaaaccgacgatcgatactaaaactaaattcgaacaccgaaaccgtaaa

SEQ ID NO: 26827 - DNA, 504 bp, Artificial Sequence
  chemically treated genomic DNA (Homo sapiens) CpG-island No: 26827
gttttgtttgggaaagtgatttaaacggttttttcgttaagttaaacgtgtgatttagggtagagggaggttgttaagcgcgtcgggtaagtaggggttttacgttcggtttcgtttaggtaacgttgtttttcgggttttgttaattcgcgcgcgttgcgtcgttaatttagcggcgggtagggggcggagtcgtagggcggggcggtgcgcgttgatgtgacgtttttgcgcgcgtcgttttttgttgtcgggcgtaatggcggatacgttggagttttcgttggaggatttattgcggagttttgtgcgagttttggagaagcgggatggtatagtgttacgattatagtagtatagtttcggtggcgtgggttgcgttgtgtgggacgttgttattgttttttttaaatatttggaaacgttcgagttttttggcgacggggtttacgcgttgagtcggcggtcggtgttggagttgggttcgggtatcggggtcgtggg

SEQ ID NO: 26828 - DNA, 504 bp, Artificial Sequence
  chemically treated genomic DNA (Homo sapiens) CpG-island No: 26828
cccacgaccccgatacccgaacccaactccaacaccgaccgccgactcaacgcgtaaaccccgtcgccaaaaaactcgaacgtttccaaatatttaaaaaaaacaataacaacgtcccacacaacgcaacccacgccaccgaaactatactactataatcgtaacactataccatcccgcttctccaaaactcgcacaaaactccgcaataaatcctccaacgaaaactccaacgtatccgccattacgcccgacaacaaaaaacgacgcgcgcaaaaacgtcacatcaacgcgcaccgccccgccctacgactccgccccctacccgccgctaaattaacgacgcaacgcgcgcgaattaacaaaacccgaaaaacaacgttacctaaacgaaaccgaacgtaaaacccctacttacccgacgcgcttaacaacctccctctaccctaaatcacacgtttaacttaacgaaaaaaccgtttaaatcactttcccaaacaaaac

SEQ ID NO: 26829 - DNA, 1030 bp, Artificial Sequence
  chemically treated genomic DNA (Homo sapiens) CpG-island No: 26829
ggttcggtttcggggattcgagttttgtgggagggacgatttgtttttcgttagaagttcggggggttacgggttattcgtcggtcgtttcgtttttagtattgatttttcgtagggtcgagattaatagttttcgttatttcggattgtttttttcgttgaagaattcgtaaggttgcggcgtttgttgtatggtttcggcgatagcgttttcgtatcgggggtagttcgcgggtcgggtcggtggtttgataggtagggcgcgggtcgtttcgtttcgtcggcggtcgtcgtttttcgttcgggtcgaggttacggtcgaggcggttcggaggcggcgtcggcgggttggcggagatttcggggtcggtttttttcgtcgaggcggttttcgtttttcgtagcgttcgtagaggaagcgcggcgattcgtaagttcgggcgatttcgggcggcgattttttttttcggcggcgttggttcgtttttggggcggtttttttttttttgtttgggttcgcggttcgttaggggtatagttggtttagtttcgtttcgattttcgttacggtcgcggcgggcggtgagtagcggcggcggcggcggcggttgttcgtttttttatcgtttttttttcgtttttttagtcgatagcgtcgttcggttttgtttattcgagttatttttatagagttttggggatcgattcggagtgcgcgtcgggcgagcgagtttcgttatggtcggtatagcgttggtcgtcgttgttgtttttttagtagtagcgtagagtgttttggggtcgtcgttgagttttgagttttagtagtcgaggttcggttcgttttttcggttcggcgtttattatttcgaatagtttaagaggtttaatacggagtatgcgcgtcgcggagtaggtataggcgttagttcggcgcggggggtgcgggtttggggtttcgggggagttcgtttttttcgagattgtgttgggggtcgttttagattttttagtttgattgttttttatt

SEQ ID NO: 26830 - DNA, 1030 bp, Artificial Sequence
  chemically treated genomic DNA (Homo sapiens) CpG-island No: 26830
aataaaaaacaatcaaactaaaaaatctaaaacgacccccaacacaatctcgaaaaaaacgaactcccccgaaaccccaaacccgcaccccccgcgccgaactaacgcctatacctactccgcgacgcgcatactccgtattaaacctcttaaactattcgaaataataaacgccgaaccgaaaaaacgaaccgaacctcgactactaaaactcaaaactcaacgacgaccccaaaacactctacgctactactaaaaaaacaacaacgacgaccaacgctataccgaccataacgaaactcgctcgcccgacgcgcactccgaatcgatccccaaaactctataaaaataactcgaataaacaaaaccgaacgacgctatcgactaaaaaaacgaaaaaaaaacgataaaaaaacgaacaaccgccgccgccgccgccgctactcaccgcccgccgcgaccgtaacgaaaatcgaaacgaaactaaaccaactatacccctaacgaaccgcgaacccaaacaaaaaaaaaaaaaccgccccaaaaacgaaccaacgccgccgaaaaaaaaaatcgccgcccgaaatcgcccgaacttacgaatcgccgcgcttcctctacgaacgctacgaaaaacgaaaaccgcctcgacgaaaaaaaccgaccccgaaatctccgccaacccgccgacgccgcctccgaaccgcctcgaccgtaacctcgacccgaacgaaaaacgacgaccgccgacgaaacgaaacgacccgcgccctacctatcaaaccaccgacccgacccgcgaactacccccgatacgaaaacgctatcgccgaaaccatacaacaaacgccgcaaccttacgaattcttcaacgaaaaaaacaatccgaaataacgaaaactattaatctcgaccctacgaaaaatcaatactaaaaacgaaacgaccgacgaataacccgtaaccccccgaacttctaacgaaaaacaaatcgtccctcccacaaaactcgaatccccgaaaccgaacc

SEQ ID NO: 26831 - DNA, 1030 bp, Artificial Sequence
  chemically treated genomic DNA (Homo sapiens) CpG-island No: 26831
ggtaaaaagtagttaaattgaagagtttggagcggtttttagtatagtttcgggaaaagcggattttttcggggttttaggttcgtatttttcgcgtcgggttggcgtttgtgtttgtttcgcggcgcgtatgtttcgtgttaggttttttgggttattcgggataatgagcgtcgggtcgagggggcgggtcgagtttcggttgttgggatttagggtttagcggcgattttaaggtattttgcgttgttgttaaaggggtagtaacggcggttagcgttgtgtcggttatagcgaggttcgttcgttcgacgcgtatttcgggtcggtttttagagttttgtggaggtgattcgagtgggtagggtcgggcggcgttgtcggttgggagggcggggaggaggcgatgaggagacgagtagtcgtcgtcgtcgtcgtcgttgtttatcgttcgtcgcggtcgtagcgggagtcggggcggggttgggttagttgtatttttgacgggtcgcgaatttagataaaggaggaggagtcgttttagaagcgggttagcgtcgtcgggaaaggaggtcgtcgttcggggtcgttcgggtttgcgggtcgtcgcgttttttttgcgggcgttgcgggaggcgagggtcgtttcggcggaggaagtcgatttcggggttttcgttagttcgtcggcgtcgttttcgagtcgtttcggtcgtagtttcggttcgggcgggaggcggcggtcgtcggcgaggcgaggcggttcgcgttttgtttgttaggttatcggttcggttcgcgggttgttttcgatgcggaggcgttgtcgtcggggttatgtagtaggcgtcgtagttttacgagttttttagcgaggagaatagttcgaaatggcggggattgttggtttcggttttgcggaaggttagtgttaggggcggggcggtcggcgggtggttcgtggtttttcgagtttttaacggggagtaggtcgttttttttatagggttcgagttttcggggtcgagtt

SEQ ID NO: 26832 - DNA, 1030 bp, Artificial Sequence
  chemically treated genomic DNA (Homo sapiens) CpG-island No: 26832
aactcgaccccgaaaactcgaaccctataaaaaaaacgacctactccccgttaaaaactcgaaaaaccacgaaccacccgccgaccgccccgcccctaacactaaccttccgcaaaaccgaaaccaacaatccccgccatttcgaactattctcctcgctaaaaaactcgtaaaactacgacgcctactacataaccccgacgacaacgcctccgcatcgaaaacaacccgcgaaccgaaccgataacctaacaaacaaaacgcgaaccgcctcgcctcgccgacgaccgccgcctcccgcccgaaccgaaactacgaccgaaacgactcgaaaacgacgccgacgaactaacgaaaaccccgaaatcgacttcctccgccgaaacgaccctcgcctcccgcaacgcccgcaaaaaaaacgcgacgacccgcaaacccgaacgaccccgaacgacgacctcctttcccgacgacgctaacccgcttctaaaacgactcctcctcctttatctaaattcgcgacccgtcaaaaatacaactaacccaaccccgccccgactcccgctacgaccgcgacgaacgataaacaacgacgacgacgacgacgactactcgtctcctcatcgcctcctccccgccctcccaaccgacaacgccgcccgaccctacccactcgaatcacctccacaaaactctaaaaaccgacccgaaatacgcgtcgaacgaacgaacctcgctataaccgacacaacgctaaccgccgttactacccctttaacaacaacgcaaaataccttaaaatcgccgctaaaccctaaatcccaacaaccgaaactcgacccgccccctcgacccgacgctcattatcccgaataacccaaaaaacctaacacgaaacatacgcgccgcgaaacaaacacaaacgccaacccgacgcgaaaaatacgaacctaaaaccccgaaaaaatccgcttttcccgaaactatactaaaaaccgctccaaactcttcaatttaactactttttacc

SEQ ID NO: 26833 - DNA, 728 bp, Artificial Sequence
  chemically treated genomic DNA (Homo sapiens) CpG-island No: 26833
atcgtgtggacggtaatttattcgttttttttttgatcgtgtggacggttatttattcgttttttttttgatcgtgtggacggtaatttattcgttttttttttgatcgtgtggacggtaatttattcgttttttttttgattttgtagacggttatttattcgttttttttttgatcgtgtagacggttatttatattttttttttttgatcgtgtagacggtaatttattcgttttttttttgatcgagtagacggtgatttattcgttttttttttgatcgtgtagacggtgatttattcgttttttttttgattttgtggatagtaatttatattttttttttttgatcgtgtagacggtgatttattcgttttttttttgatcgagtagacggtaatttattcgttttttttttgatcgtgtagacggtaatttattcgttttttttttgatcgagtagacggtaattcgttttttttttgatcgtgtagacggttatttattcgttttttttttgatcgtgtggacggttatttattcgttttttttttgatcgtgtggacggttatttatacgttttttttttgattttgtcgacggttatttatacgttttttttttgattatgtagacggttatttattttttttttttttgattttgtagacggttatttattcgttttttttttaattatgtagacggttatttatttgtttttttt

SEQ ID NO: 26834 - DNA, 728 bp, Artificial Sequence
  chemically treated genomic DNA (Homo sapiens) CpG-island No: 26834
aaaaaaaacaaataaataaccgtctacataattaaaaaaaaaacgaataaataaccgtctacaaaatcaaaaaaaaaaaaaataaataaccgtctacataatcaaaaaaaaaacgtataaataaccgtcgacaaaatcaaaaaaaaaacgtataaataaccgtccacacgatcaaaaaaaaaacgaataaataaccgtccacacgatcaaaaaaaaaacgaataaataaccgtctacacgatcaaaaaaaaaacgaattaccgtctactcgatcaaaaaaaaaacgaataaattaccgtctacacgatcaaaaaaaaaacgaataaattaccgtctactcgatcaaaaaaaaaacgaataaatcaccgtctacacgatcaaaaaaaaaaaatataaattactatccacaaaatcaaaaaaaaaacgaataaatcaccgtctacacgatcaaaaaaaaaacgaataaatcaccgtctactcgatcaaaaaaaaaacgaataaattaccgtctacacgatcaaaaaaaaaaaatataaataaccgtctacacgatcaaaaaaaaaacgaataaataaccgtctacaaaatcaaaaaaaaaacgaataaattaccgtccacacgatcaaaaaaaaaacgaataaattaccgtccacacgatcaaaaaaaaaacgaataaataaccgtccacacgatcaaaaaaaaaacgaataaattaccgtccacacgat

SEQ ID NO: 26835 - DNA, 728 bp, Artificial Sequence
  chemically treated genomic DNA (Homo sapiens) CpG-island No: 26835
ggagagggtaagtgagtgatcgtttatatggttagggggagggcgaatgagtgatcgtttatagggttagggagagggagagtgagtgatcgtttatatgattagggagagggcgtgtgagtgatcgtcgataggattagggagagggcgtgtgagtgatcgtttatacggttagggagagggcgagtgagtgatcgtttatacggttagggagagggcgagtgagtgatcgtttatacggttagggagagggcgagttatcgtttattcggttagggagagggcgagtgagttatcgtttatacggttagggagagggcgagtgagttatcgtttattcggttagggagagggcgagtgagttatcgtttatacggttagggagaaggagtgtgagttattgtttatagggttagggagagggcgagtgagttatcgtttatacggttagggagagggcgagtgagttatcgtttattcggttagggagagggcgagtgagttatcgtttatacggttagggagagggagtgtgagtgatcgtttatacggttagggagagggcgagtgagtgatcgtttatagggttagggagagggcgagtgagttatcgtttatacggttagggagagggcgagtgagttatcgtttatacggttagggagagggcgagtgagtgatcgtttatacggttagggagagggcgagtgagttatcgtttatacggt

SEQ ID NO: 26836 - DNA, 728 bp, Artificial Sequence
  chemically treated genomic DNA (Homo sapiens) CpG-island No: 26836
accgtataaacgataactcactcgccctctccctaaccgtataaacgatcactcactcgccctctccctaaccgtataaacgataactcactcgccctctccctaaccgtataaacgataactcactcgccctctccctaaccctataaacgatcactcactcgccctctccctaaccgtataaacgatcactcacactccctctccctaaccgtataaacgataactcactcgccctctccctaaccgaataaacgataactcactcgccctctccctaaccgtataaacgataactcactcgccctctccctaaccctataaacaataactcacactccttctccctaaccgtataaacgataactcactcgccctctccctaaccgaataaacgataactcactcgccctctccctaaccgtataaacgataactcactcgccctctccctaaccgaataaacgataactcgccctctccctaaccgtataaacgatcactcactcgccctctccctaaccgtataaacgatcactcactcgccctctccctaaccgtataaacgatcactcacacgccctctccctaatcctatcgacgatcactcacacgccctctccctaatcatataaacgatcactcactctccctctccctaaccctataaacgatcactcattcgccctccccctaaccatataaacgatcactcacttaccctctcc

SEQ ID NO: 26837 - DNA, 541 bp, Artificial Sequence
  chemically treated genomic DNA (Homo sapiens) CpG-island No: 26837
ttattattcgtaagtgtttgcggagtgcgcgcgaggggtcggagatggggtttcgggcgtttggggttggggatatcgagttcggaatagtcgagtttggttaggcgtcggggtcgttcgttggttggtagagtttacggcgtcggtttggagtatggcggggggcgggggttataggaaagtttttttgtagttcggggagttggggcgtcgagtagtcggacgcgtttcgggttcgggggtttgcggagcggtttcgggtcggggagggggtatgtaggttggaggagtgtgtgtgtgtgcgcgtcgagttcggttggacgttcgttttttcgagcggcgtgtgtggcggcggcggcgttggtggcggggtttggcgacgagggggagggcgttgggggagcggagggggagtgcgatgcggtgttttgtacgttggtaatagcggcgagtaaggagtggtgtacgtgtgtgtaaggagagaagtagtaggtcgttttgtttggttttttttttatgtattttggatttaggcgaagtt

SEQ ID NO: 26838 - DNA, 541 bp, Artificial Sequence
  chemically treated genomic DNA (Homo sapiens) CpG-island No: 26838
aacttcgcctaaatccaaaatacataaaaaaaaaaccaaacaaaacgacctactacttctctccttacacacacgtacaccactccttactcgccgctattaccaacgtacaaaacaccgcatcgcactccccctccgctcccccaacgccctccccctcgtcgccaaaccccgccaccaacgccgccgccgccacacacgccgctcgaaaaaacgaacgtccaaccgaactcgacgcgcacacacacacactcctccaacctacataccccctccccgacccgaaaccgctccgcaaacccccgaacccgaaacgcgtccgactactcgacgccccaactccccgaactacaaaaaaactttcctataacccccgccccccgccatactccaaaccgacgccgtaaactctaccaaccaacgaacgaccccgacgcctaaccaaactcgactattccgaactcgatatccccaaccccaaacgcccgaaaccccatctccgacccctcgcgcgcactccgcaaacacttacgaataataa

SEQ ID NO: 26839 - DNA, 541 bp, Artificial Sequence
  chemically treated genomic DNA (Homo sapiens) CpG-island No: 26839
agtttcgtttgagtttaggatgtatgagaagagagttaagtaaagcgatttattgtttttttttttatatatacgtgtattattttttgttcgtcgttgttgttagcgtgtaaggtatcgtatcgtatttttttttcgtttttttagcgttttttttttcgtcgttaaatttcgttattagcgtcgtcgtcgttatatacgtcgttcggaggggcgagcgtttagtcgggttcggcgcgtatatatatatatttttttagtttgtatgtttttttttcggttcggagtcgtttcgtaggttttcgagttcgaggcgcgttcggttgttcggcgttttaatttttcgggttgtaaagaaatttttttatggttttcgtttttcgttatgttttaggtcgacgtcgtagattttgttagttagcgggcggtttcggcgtttggttaggttcggttgtttcgggttcggtgtttttagttttagacgttcggagttttattttcggtttttcgcgcgtatttcgtagatatttacgggtgatga

SEQ ID NO: 26840 - DNA, 541 bp, Artificial Sequence
  chemically treated genomic DNA (Homo sapiens) CpG-island No: 26840
tcatcacccgtaaatatctacgaaatacgcgcgaaaaaccgaaaataaaactccgaacgtctaaaactaaaaacaccgaacccgaaacaaccgaacctaaccaaacgccgaaaccgcccgctaactaacaaaatctacgacgtcgacctaaaacataacgaaaaacgaaaaccataaaaaaatttctttacaacccgaaaaattaaaacgccgaacaaccgaacgcgcctcgaactcgaaaacctacgaaacgactccgaaccgaaaaaaaaacatacaaactaaaaaaatatatatatatacgcgccgaacccgactaaacgctcgcccctccgaacgacgtatataacgacgacgacgctaataacgaaatttaacgacgaaaaaaaaaacgctaaaaaaacgaaaaaaaaatacgatacgataccttacacgctaacaacaacgacgaacaaaaaataatacacgtatatataaaaaaaaaaacaataaatcgctttacttaactctcttctcatacatcctaaactcaaacgaaact

SEQ ID NO: 26841 - DNA, 597 bp, Artificial Sequence
  chemically treated genomic DNA (Homo sapiens) CpG-island No: 26841
gcgtgtgcgtggggtggcgggagagtgcggtcgtgcgcggcgttttgggttgttcggcgggcggtggtcggggtcggggtcgtggtcgtggtcgtggcggcggcggcggcggcggcggcggtcgtgttgttgaggtggggaggttacggaaaagtagtggggtcggagtttcgcgggcggtcggtcgttttttcgcgtcgtcggtgtttttagtcgtgggtcgtcgttttcgtcgtcgtttgcgtttttttttttcgttgttcgttcggcgtcgtcgtcgtttatgcgtcgtagagcgtttcgcggttcgggtcgtttcggttttcgaggtatgttcggcgcggagataggcgatcggcggcggcggcggaggaggaggagggggaggcggcggcggcggcggggggaggcggtcgcgcggtttcgcgggtagttcggtttagggtttcgtcgttttcgggtttttattttcgcgtcgttattcgttttcgttttcgtttttcgttatttttttttattattcggagtagttcggtggtaggtggggcgtatatttttttttgcggggggcgcggggtttaggtcgggaggagcggg

SEQ ID NO: 26842 - DNA, 597 bp, Artificial Sequence
  chemically treated genomic DNA (Homo sapiens) CpG-island No: 26842
cccgctcctcccgacctaaaccccgcgccccccgcaaaaaaaaatatacgccccacctaccaccgaactactccgaataataaaaaaaaataacgaaaaacgaaaacgaaaacgaataacgacgcgaaaataaaaacccgaaaacgacgaaaccctaaaccgaactacccgcgaaaccgcgcgaccgcctccccccgccgccgccgccgcctccccctcctcctcctccgccgccgccgccgatcgcctatctccgcgccgaacatacctcgaaaaccgaaacgacccgaaccgcgaaacgctctacgacgcataaacgacgacgacgccgaacgaacaacgaaaaaaaaaaacgcaaacgacgacgaaaacgacgacccacgactaaaaacaccgacgacgcgaaaaaacgaccgaccgcccgcgaaactccgaccccactacttttccgtaacctccccacctcaacaacacgaccgccgccgccgccgccgccgccgccacgaccacgaccacgaccccgaccccgaccaccgcccgccgaacaacccaaaacgccgcgcacgaccgcactctcccgccaccccacgcacacgc

SEQ ID NO: 26843 - DNA, 597 bp, Artificial Sequence
  chemically treated genomic DNA (Homo sapiens) CpG-island No: 26843
ttcgtttttttcggtttagatttcgcgtttttcgtaggggagggtgtgcgttttatttgttatcgggttgtttcgggtggtagaaaggggtgacgggggacgggggcgggggcgggtggcggcgcgggggtgagaattcggaggcggcggggttttgggtcgggttgttcgcgggatcgcgcggtcgttttttttcgtcgtcgtcgtcgtttttttttttttttttttcgtcgtcgtcgtcggtcgtttgttttcgcgtcgggtatgtttcgggagtcggggcggttcgggtcgcggggcgttttgcggcgtatggacggcggcggcgtcgggcgagtagcgggaggagaaggcgtaggcggcggcggaagcggcgatttacggttgggagtatcggcggcgcgaggggacggtcggtcgttcgcgaggtttcggttttattattttttcgtagtttttttattttagtagtacggtcgtcgtcgtcgtcgtcgtcgtcgttacggttacggttacggtttcggtttcggttatcgttcgtcgggtagtttagagcgtcgcgtacggtcgtattttttcgttattttacgtatacgt

SEQ ID NO: 26844 - DNA, 597 bp, Artificial Sequence
  chemically treated genomic DNA (Homo sapiens) CpG-island No: 26844
acgtatacgtaaaataacgaaaaaatacgaccgtacgcgacgctctaaactacccgacgaacgataaccgaaaccgaaaccgtaaccgtaaccgtaacgacgacgacgacgacgacgacgaccgtactactaaaataaaaaaactacgaaaaaataataaaaccgaaacctcgcgaacgaccgaccgtcccctcgcgccgccgatactcccaaccgtaaatcgccgcttccgccgccgcctacgccttctcctcccgctactcgcccgacgccgccgccgtccatacgccgcaaaacgccccgcgacccgaaccgccccgactcccgaaacatacccgacgcgaaaacaaacgaccgacgacgacgacgaaaaaaaaaaaaaaaaaaacgacgacgacgacgaaaaaaaacgaccgcgcgatcccgcgaacaacccgacccaaaaccccgccgcctccgaattctcacccccgcgccgccacccgcccccgcccccgtcccccgtcacccctttctaccacccgaaacaacccgataacaaataaaacgcacaccctcccctacgaaaaacgcgaaatctaaaccgaaaaaaacgaa

SEQ ID NO: 26845 - DNA, 631 bp, Artificial Sequence
  chemically treated genomic DNA (Homo sapiens) CpG-island No: 26845
ggttacgttttttttgtttatattttttttatttcggttacgtttttacgtcgtcgcggtttttttatttttagtttagttacgtttttttttcgtcgcgtcggcgtatcgttcgttcgaatggtttcgtgggcggagtttgcgtagtttttcggatttcggcgtatatcgtttttcgtttttcgtttttggttattaagcgttttcgtggatacgtattttttgcgaggttttcgtgcgtattttggtcgagtcgaatcgagtcgagttttgtttttttaggtcgttcgtaatggtggatgagttggtgttgttgttgtacgcgtttttgatgcggtatcgcgttttgagtatcgagaatagttagtttatggaatagttgcggttgttggtgtgcgagagggttagtttgttgcgttaggtacgttcgtcgagttgttcggtgttttttttcgaaacgtttaatggcgagagttttcggtttttcgagtttatcgtgtagacggcgttttatatgttcgtgaacgagaatcgattttgtaacgacgttatgaaggtggtatttttaattagtttttttatcggggaagtcgaggagtgggtggtgttttatatcgagatggatagtttt

SEQ ID NO: 26846 - DNA, 631 bp, Artificial Sequence
  chemically treated genomic DNA (Homo sapiens) CpG-island No: 26846
aaaactatccatctcgatataaaacaccacccactcctcgacttccccgataaaaaaactaattaaaaataccaccttcataacgtcgttacaaaatcgattctcgttcacgaacatataaaacgccgtctacacgataaactcgaaaaaccgaaaactctcgccattaaacgtttcgaaaaaaaacaccgaacaactcgacgaacgtacctaacgcaacaaactaaccctctcgcacaccaacaaccgcaactattccataaactaactattctcgatactcaaaacgcgataccgcatcaaaaacgcgtacaacaacaacaccaactcatccaccattacgaacgacctaaaaaaacaaaactcgactcgattcgactcgaccaaaatacgcacgaaaacctcgcaaaaaatacgtatccacgaaaacgcttaataaccaaaaacgaaaaacgaaaaacgatatacgccgaaatccgaaaaactacgcaaactccgcccacgaaaccattcgaacgaacgatacgccgacgcgacgaaaaaaaaacgtaactaaactaaaaataaaaaaaccgcgacgacgtaaaaacgtaaccgaaataaaaaaaatataaacaaaaaaaacgtaacc

SEQ ID NO: 26847 - DNA, 631 bp, Artificial Sequence
  chemically treated genomic DNA (Homo sapiens) CpG-island No: 26847
ggggttatttatttcgatgtagggtattatttatttttcggttttttcggtgaggaggttgattaggaatgttatttttatggcgtcgttgtagaatcggttttcgtttacgagtatgtaagacgtcgtttgtacgataaattcggggagtcgggagttttcgttattaaacgtttcggggaagggtatcgggtagttcggcggacgtatttggcgtagtaggttggttttttcgtatattagtagtcgtagttgttttatgagttggttgttttcgatgtttagggcgcggtgtcgtattaggagcgcgtgtagtagtagtattaatttatttattattgcgaacggtttggaaggataggattcggttcggttcggttcggttaaggtgcgtacggaggtttcgtaggaagtgcgtgtttacggaggcgtttggtggttaggggcggggggcggggggcggtgtgcgtcggggttcgggaggttacgtaagtttcgtttacgaggttattcggacggacggtgcgtcggcgcgacgggggaggggcgtggttaggttgggagtgggggggtcgcggcggcgtgggggcgtggtcgggatgggaagggtgtagataaagagggcgtggtt

SEQ ID NO: 26848 - DNA, 631 bp, Artificial Sequence
  chemically treated genomic DNA (Homo sapiens) CpG-island No: 26848
aaccacgccctctttatctacacccttcccatcccgaccacgcccccacgccgccgcgacccccccactcccaacctaaccacgcccctcccccgtcgcgccgacgcaccgtccgtccgaataacctcgtaaacgaaacttacgtaacctcccgaaccccgacgcacaccgccccccgccccccgcccctaaccaccaaacgcctccgtaaacacgcacttcctacgaaacctccgtacgcaccttaaccgaaccgaaccgaaccgaatcctatccttccaaaccgttcgcaataataaataaattaatactactactacacgcgctcctaatacgacaccgcgccctaaacatcgaaaacaaccaactcataaaacaactacgactactaatatacgaaaaaaccaacctactacgccaaatacgtccgccgaactacccgatacccttccccgaaacgtttaataacgaaaactcccgactccccgaatttatcgtacaaacgacgtcttacatactcgtaaacgaaaaccgattctacaacgacgccataaaaataacattcctaatcaacctcctcaccgaaaaaaccgaaaaataaataataccctacatcgaaataaataacccc

SEQ ID NO: 26849 - DNA, 511 bp, Artificial Sequence
  chemically treated genomic DNA (Homo sapiens) CpG-island No: 26849
ggtcgtaacgggttttagttttcgcgtttcgttgtgtaggttggttggggagggttgcggggtgtatcgcggcggggtgtatattggcggggcgttgattcggtttcggtcgttcggtcggtcgttcgatttattcgttttttcgggaattggcgtcgatatcgaaaaggttgggatttgcgtttttggtttgtgggtttcggacgaatcgcgcgtgggttttcgcgcggaacgtagaggcgaacgttgggttgtcggcgtttggatagtaaaagcggcgcgcgtcggttttttttcgtttcgttacgttttcgcggtcgcgttgtttagcggattggagtacgatttcgaggtagtggttcgtttatcgcgtgttgggcgggaaggttcgaaaggcgcggagcgtcgaggggagcgtcgaggggagggttgagggggacgcgattgtttagggatttcgcgaagtaagatcgaggttttaaaataagttattttggttaggcgcggtggt

SEQ ID NO: 26850 - DNA, 511 bp, Artificial Sequence
  chemically treated genomic DNA (Homo sapiens) CpG-island No: 26850
accaccgcgcctaaccaaaataacttattttaaaacctcgatcttacttcgcgaaatccctaaacaatcgcgtccccctcaaccctcccctcgacgctcccctcgacgctccgcgcctttcgaaccttcccgcccaacacgcgataaacgaaccactacctcgaaatcgtactccaatccgctaaacaacgcgaccgcgaaaacgtaacgaaacgaaaaaaaaccgacgcgcgccgcttttactatccaaacgccgacaacccaacgttcgcctctacgttccgcgcgaaaacccacgcgcgattcgtccgaaacccacaaaccaaaaacgcaaatcccaaccttttcgatatcgacgccaattcccgaaaaaacgaataaatcgaacgaccgaccgaacgaccgaaaccgaatcaacgccccgccaatatacaccccgccgcgatacaccccgcaaccctccccaaccaacctacacaacgaaacgcgaaaactaaaacccgttacgacc

SEQ ID NO: 26851 - DNA, 511 bp, Artificial Sequence
  chemically treated genomic DNA (Homo sapiens) CpG-island No: 26851
gttatcgcgtttggttaaggtaatttgttttgaagtttcggttttgtttcgcgaggtttttgagtagtcgcgttttttttagtttttttttcggcgtttttttcggcgtttcgcgtttttcgagttttttcgtttagtacgcggtgagcgggttattgtttcgaagtcgtgttttagttcgttgggtagcgcggtcgcggaggcgtggcgaggcggggaggggtcggcgcgcgtcgtttttattgtttaggcgtcggtagtttagcgttcgtttttacgtttcgcgcgggagtttacgcgcggttcgttcggaatttatagattagagacgtaggttttagttttttcggtgtcggcgttagttttcggaggagcgggtgagtcgggcggtcgatcgggcggtcgggatcgggttagcgtttcgttagtgtgtatttcgtcgcggtgtatttcgtagttttttttagttagtttgtatagcgaggcgcgaaggttgggattcgttgcgatt

SEQ ID NO: 26852 - DNA, 511 bp, Artificial Sequence
  chemically treated genomic DNA (Homo sapiens) CpG-island No: 26852
aatcgcaacgaatcccaaccttcgcgcctcgctatacaaactaactaaaaaaaactacgaaatacaccgcgacgaaatacacactaacgaaacgctaacccgatcccgaccgcccgatcgaccgcccgactcacccgctcctccgaaaactaacgccgacaccgaaaaaactaaaacctacgtctctaatctataaattccgaacgaaccgcgcgtaaactcccgcgcgaaacgtaaaaacgaacgctaaactaccgacgcctaaacaataaaaacgacgcgcgccgacccctccccgcctcgccacgcctccgcgaccgcgctacccaacgaactaaaacacgacttcgaaacaataacccgctcaccgcgtactaaacgaaaaaactcgaaaaacgcgaaacgccgaaaaaaacgccgaaaaaaaaactaaaaaaaacgcgactactcaaaaacctcgcgaaacaaaaccgaaacttcaaaacaaattaccttaaccaaacgcgataac

SEQ ID NO: 26853 - DNA, 630 bp, Artificial Sequence
  chemically treated genomic DNA (Homo sapiens) CpG-island No: 26853
acgtcggtgggcggggggaggaggcggttttagcgttattttgtgggagcgaagcggtggttgggttgcgtttgggttcgtcgttgtttcggtgtttttgtcgggttttttagtagcggtttagcgggtgagtcgcggagtttttttattgaggacgtcgtaggtgtttcggtttttgtattggggcggttcgaggtagacgtagcggtttcggattttgtttcgggaagttagtcgtgagatcgggtttagttttgttcgagcgggttcgcgcgggagcgtcgttaggttttggtacggggaggtcggtggcgtcgaaacggggggtcgggttcgcggtgtcgcgtagtttgaggcggaggttggtttcggattcggatagtgtcggagttttcggtattttgtatttcgagggacgttgttagtttgggtttggtgtttttgcgttttatttcgggtcgcgtcgagaaatttttttttcggttggtacgcgcgggtttttgggaggcgacggtcggtatcgttaggatttgtcgtcgcgggttttggggttcgggttcgtagagttttcggaagttttaaaatgaggaatagagggaaattttttttttgttttttatatttggttta

SEQ ID NO: 26854 - DNA, 630 bp, Artificial Sequence
  chemically treated genomic DNA (Homo sapiens) CpG-island No: 26854
taaaccaaatataaaaaacaaaaaaaaaatttccctctattcctcattttaaaacttccgaaaactctacgaacccgaaccccaaaacccgcgacgacaaatcctaacgataccgaccgtcgcctcccaaaaacccgcgcgtaccaaccgaaaaaaaaatttctcgacgcgacccgaaataaaacgcaaaaacaccaaacccaaactaacaacgtccctcgaaatacaaaataccgaaaactccgacactatccgaatccgaaaccaacctccgcctcaaactacgcgacaccgcgaacccgaccccccgtttcgacgccaccgacctccccgtaccaaaacctaacgacgctcccgcgcgaacccgctcgaacaaaactaaacccgatctcacgactaacttcccgaaacaaaatccgaaaccgctacgtctacctcgaaccgccccaatacaaaaaccgaaacacctacgacgtcctcaataaaaaaactccgcgactcacccgctaaaccgctactaaaaaacccgacaaaaacaccgaaacaacgacgaacccaaacgcaacccaaccaccgcttcgctcccacaaaataacgctaaaaccgcctcctccccccgcccaccgacgt

SEQ ID NO: 26855 - DNA, 630 bp, Artificial Sequence
  chemically treated genomic DNA (Homo sapiens) CpG-island No: 26855
tgaattaggtgtaaagaataggagaaaagtttttttttgttttttattttggggttttcgggggttttgcgagttcgagttttaaggttcgcggcgataggttttggcggtgtcggtcgtcgttttttagaagttcgcgcgtgttagtcgagggaggagtttttcggcgcggttcggggtggggcgtaggagtattaggtttaagttggtagcgtttttcgaagtataaagtatcgaaggtttcggtattgttcgggttcggggttaattttcgttttaggttacgcggtatcgcgggttcggtttttcgtttcggcgttatcggttttttcgtgttaggatttaacgacgttttcgcgcgagttcgttcgggtaggattaggttcggttttacggttgatttttcggggtagggttcgaagtcgttgcgtttgtttcgggtcgttttaatgtagaagtcgaggtatttacggcgtttttagtgagaaggtttcgcgatttattcgttaggtcgttgttgggaagttcgatagggatatcgaagtagcgacggatttaagcgtagtttagttatcgtttcgtttttataaaatggcgttagggtcgtttttttttttcgtttatcggcgt

SEQ ID NO: 26856 - DNA, 630 bp, Artificial Sequence
  chemically treated genomic DNA (Homo sapiens) CpG-island No: 26856
acgccgataaacgaaaaaaaaaaacgaccctaacgccattttataaaaacgaaacgataactaaactacgcttaaatccgtcgctacttcgatatccctatcgaacttcccaacaacgacctaacgaataaatcgcgaaaccttctcactaaaaacgccgtaaatacctcgacttctacattaaaacgacccgaaacaaacgcaacgacttcgaaccctaccccgaaaaatcaaccgtaaaaccgaacctaatcctacccgaacgaactcgcgcgaaaacgtcgttaaatcctaacacgaaaaaaccgataacgccgaaacgaaaaaccgaacccgcgataccgcgtaacctaaaacgaaaattaaccccgaacccgaacaataccgaaaccttcgatactttatacttcgaaaaacgctaccaacttaaacctaatactcctacgccccaccccgaaccgcgccgaaaaactcctccctcgactaacacgcgcgaacttctaaaaaacgacgaccgacaccgccaaaacctatcgccgcgaaccttaaaactcgaactcgcaaaacccccgaaaaccccaaaataaaaaacaaaaaaaaacttttctcctattctttacacctaattca

SEQ ID NO: 26857 - DNA, 893 bp, Artificial Sequence
  chemically treated genomic DNA (Homo sapiens) CpG-island No: 26857
gggttacgggaggataagcgattcgagtttgtgggggcggtatcggttttggtgacgttttaatgttatatgtaaatagaacgacgttatggtttatcgggcgtgcggtaattaatcgggagtcgggaacgcggtttcggcggtcgtcggcggagatagataaaggttcgggcgcggggggcgtagggcgtgttcgtggtaggggagtttttaggtttattcgggtcgggatttatttgggggcgggaggggggcggtacggcgttgaggtagttgtgcggcggggcgttttagggtcgtcggtcgtttataggtcgggtcgtatcgtcgggattcgcgggggaggcggcggggtcgcggtcgtttcgggttgttgagttcgttcgcggggttttgagtttgtgcggtcgttgcggcggggtttacggtataaattggaacgtttaaatagttgattgtgacgttataaaggggttcgttcgtttcgcgttatcggttggcggggcggcggttaatttcgggttgcggatttttttttgttttttttttttttttttttttcggtttgcgggtcgggcgttcgggtcgggaaacgttttcggaatcgggagggtgagtgttcggggaggtagttgcggggagttgggagttttgcgtcgcggcgagtttttcgcgaggaggatttttatttttttttatcggttttttatttttttgatttttttcggatcgtagcgtttttattttttttattgttttttaaatttttttattgtattttatatttaagtttttcgatgcggattttgttttcgatttatattacgttcgtgtatttgtattttttttattgtttttatttttgtttttttttttttttttggtttattttt

SEQ ID NO: 26858 - DNA, 893 bp, Artificial Sequence
  chemically treated genomic DNA (Homo sapiens) CpG-island No: 26858
aaaaataaaccaaaaaaaaaaaaaaaaacaaaaataaaaacaataaaaaaaatacaaatacacgaacgtaatataaatcgaaaacaaaatccgcatcgaaaaacttaaatataaaatacaataaaaaaatttaaaaaacaataaaaaaaataaaaacgctacgatccgaaaaaaatcaaaaaaataaaaaaccgataaaaaaaaataaaaatcctcctcgcgaaaaactcgccgcgacgcaaaactcccaactccccgcaactacctccccgaacactcaccctcccgattccgaaaacgtttcccgacccgaacgcccgacccgcaaaccgaaaaaaaaaaaaaaaaaaaaaacaaaaaaaaatccgcaacccgaaattaaccgccgccccgccaaccgataacgcgaaacgaacgaacccctttataacgtcacaatcaactatttaaacgttccaatttataccgtaaaccccgccgcaacgaccgcacaaactcaaaaccccgcgaacgaactcaacaacccgaaacgaccgcgaccccgccgcctcccccgcgaatcccgacgatacgacccgacctataaacgaccgacgaccctaaaacgccccgccgcacaactacctcaacgccgtaccgcccccctcccgcccccaaataaatcccgacccgaataaacctaaaaactcccctaccacgaacacgccctacgccccccgcgcccgaacctttatctatctccgccgacgaccgccgaaaccgcgttcccgactcccgattaattaccgcacgcccgataaaccataacgtcgttctatttacatataacattaaaacgtcaccaaaaccgataccgcccccacaaactcgaatcgcttatcctcccgtaaccc

SEQ ID NO: 26859 - DNA, 893 bp, Artificial Sequence
  chemically treated genomic DNA (Homo sapiens) CpG-island No: 26859
ggaggtgagttagaggggggagggagagtaggaataagggtagtggggagaatgtaggtgtacggacgtggtgtgggtcgagaatagggttcgtatcgggggatttggatataggatgtagtgaaaggatttggggagtagtgggagaggtgagggcgttgcgattcgggaagaattaggaaaataaggagtcggtaggagggagtggagatttttttcgcggagagttcgtcgcggcgtagggtttttagtttttcgtagttgttttttcgaatatttattttttcggtttcgagaacgtttttcggttcgagcgttcggttcgtaaatcgggaggggaggggaggggaggggtagggggggattcgtagttcgggattggtcgtcgtttcgttagtcggtgacgcgaggcgggcgggtttttttgtgacgttataattagttgtttgaacgttttaatttgtgtcgtgagtttcgtcgtagcggtcgtatagatttaaagtttcgcgggcgagtttagtagttcggagcgatcgcggtttcgtcgtttttttcgcgagtttcggcgatgcggttcggtttgtgagcggtcggcgattttgggacgtttcgtcgtataattattttaacgtcgtgtcgtttttttttcgtttttaggtgagtttcgattcgggtgggtttgggggtttttttgttacggatacgttttgcgtttttcgcgttcgggtttttgtttgttttcgtcggcggtcgtcggggtcgcgttttcggttttcgattggttgtcgtacgttcggtagattatgacgtcgttttatttgtatatgatattgagacgttattaaggtcggtatcgtttttataggttcgggtcgtttgttttttcgtgattt

SEQ ID NO: 26860 - DNA, 893 bp, Artificial Sequence
  chemically treated genomic DNA (Homo sapiens) CpG-island No: 26860
aaatcacgaaaaaacaaacgacccgaacctataaaaacgataccgaccttaataacgtctcaatatcatatacaaataaaacgacgtcataatctaccgaacgtacgacaaccaatcgaaaaccgaaaacgcgaccccgacgaccgccgacgaaaacaaacaaaaacccgaacgcgaaaaacgcaaaacgtatccgtaacaaaaaaacccccaaacccacccgaatcgaaactcacctaaaaacgaaaaaaaaacgacacgacgttaaaataattatacgacgaaacgtcccaaaatcgccgaccgctcacaaaccgaaccgcatcgccgaaactcgcgaaaaaaacgacgaaaccgcgatcgctccgaactactaaactcgcccgcgaaactttaaatctatacgaccgctacgacgaaactcacgacacaaattaaaacgttcaaacaactaattataacgtcacaaaaaaacccgcccgcctcgcgtcaccgactaacgaaacgacgaccaatcccgaactacgaatccccccctacccctcccctcccctcccctcccgatttacgaaccgaacgctcgaaccgaaaaacgttctcgaaaccgaaaaaataaatattcgaaaaaacaactacgaaaaactaaaaaccctacgccgcgacgaactctccgcgaaaaaaatctccactccctcctaccgactccttattttcctaattcttcccgaatcgcaacgccctcacctctcccactactccccaaatcctttcactacatcctatatccaaatcccccgatacgaaccctattctcgacccacaccacgtccgtacacctacattctccccactacccttattcctactctccctcccccctctaactcacctcc

SEQ ID NO: 26861 - DNA, 549 bp, Artificial Sequence
  chemically treated genomic DNA (Homo sapiens) CpG-island No: 26861
ggtgcgcggcgttggtaatttaaattgatatcgggttggagaggtaggaaaagcggaagagggagcgaaaattaacgtgttcggtgatagattttagcgtcgattgagtttttaaagcgattttagttttgttttattaatattatcgcgcgttcgggaatagtcgtttcgggaagaaatttgaggggattgcggggggtacgagggatagttgagggaagggaggacgcgagagaaatagcgcgagtacgttgagggtcgggggttgttaggagaggggttcgcggattcgtagagcggaggaaggttcgggagaaaaggggcgggacggaggagaattcgggatcgtttggtagaaaaagagaagggagtttttgaattttgggaagaggaggcgtgggtagggacgtttagttcgagattcgatagtagggaatcggagcgtttcgggggaggggtttaatgttggggaagggatgttttaaaagaggagaagttttaaattagacgatcggagaaggttgagggaattgttatgaaggggcggga

SEQ ID NO: 26862 - DNA, 549 bp, Artificial Sequence
  chemically treated genomic DNA (Homo sapiens) CpG-island No: 26862
tcccgccccttcataacaattccctcaaccttctccgatcgtctaatttaaaacttctcctcttttaaaacatcccttccccaacattaaacccctcccccgaaacgctccgattccctactatcgaatctcgaactaaacgtccctacccacgcctcctcttcccaaaattcaaaaactcccttctctttttctaccaaacgatcccgaattctcctccgtcccgccccttttctcccgaaccttcctccgctctacgaatccgcgaacccctctcctaacaacccccgaccctcaacgtactcgcgctatttctctcgcgtcctcccttccctcaactatccctcgtaccccccgcaatcccctcaaatttcttcccgaaacgactattcccgaacgcgcgataatattaataaaacaaaactaaaatcgctttaaaaactcaatcgacgctaaaatctatcaccgaacacgttaattttcgctccctcttccgcttttcctacctctccaacccgatatcaatttaaattaccaacgccgcgcacc

SEQ ID NO: 26863 - DNA, 549 bp, Artificial Sequence
  chemically treated genomic DNA (Homo sapiens) CpG-island No: 26863
tttcgtttttttatagtaatttttttagtttttttcgatcgtttaatttaaagtttttttttttttaagatattttttttttagtattaagtttttttttcggagcgtttcggttttttgttgtcggatttcgggttaagcgtttttatttacgttttttttttttaggatttagaaatttttttttttttttttgttaggcgatttcggattttttttcgtttcgttttttttttttcggattttttttcgttttgcgggttcgcgggttttttttttggtaattttcggtttttagcgtgttcgcgttgtttttttcgcgttttttttttttttagttgtttttcgtgtttttcgtagtttttttaggttttttttcggagcggttgttttcgggcgcgcggtggtgttggtggggtagagttgaagtcgttttagaggtttagtcggcgttggggtttgttatcgaatacgttggttttcgttttttttttcgttttttttgtttttttaattcggtattagtttgaattgttagcgtcgcgtatt

SEQ ID NO: 26864 - DNA, 549 bp, Artificial Sequence
  chemically treated genomic DNA (Homo sapiens) CpG-island No: 26864
aatacgcgacgctaacaattcaaactaataccgaattaaaaaaacaaaaaaaacgaaaaaaaaaacgaaaaccaacgtattcgataacaaaccccaacgccgactaaacctctaaaacgacttcaactctaccccaccaacaccaccgcgcgcccgaaaacaaccgctccgaaaaaaaacctaaaaaaactacgaaaaacacgaaaaacaactaaaaaaaaaaaaaacgcgaaaaaaacaacgcgaacacgctaaaaaccgaaaattaccaaaaaaaaaacccgcgaacccgcaaaacgaaaaaaaatccgaaaaaaaaaaaacgaaacgaaaaaaaatccgaaatcgcctaacaaaaaaaaaaaaaaaaatttctaaatcctaaaaaaaaaaaacgtaaataaaaacgcttaacccgaaatccgacaacaaaaaaccgaaacgctccgaaaaaaaaacttaatactaaaaaaaaaatatcttaaaaaaaaaaaaactttaaattaaacgatcgaaaaaaactaaaaaaattactataaaaaaacgaaa

SEQ ID NO: 26865 - DNA, 748 bp, Artificial Sequence
  chemically treated genomic DNA (Homo sapiens) CpG-island No: 26865
ttttggcggttagtttagaaatcgtttagaatttagtttagggtaggtattggagggcgaagtgcgtcgggcgggggcggtattgatttcgaggcggcgggagcggcgaaggcgtcggcgtttttattcgtattttgtatttgtttcgtttttaagttttttcggttttcggtttatattcgcgtcggagcgcgtcggttggggtaggaaattcgattcgcgcgggcgggttgcggtcggggattttcgcgcgttatagggagagggttcggggcgcgttttttggggtttcgatcgcggtagttagtttggtgtacgggttagggtgttttttaggttttcgggcgggcgggcgtatttcggatgtaagcgtatttgttttcgtttagttggttggaggttgagtcgtttatgatcgcgagttgtttgtgttgagcgcggaaattgttcggttcgcgttcgttgttagtttttggaggttgattcgacggcgaattcggttttgaaattaagagtaaatttttttcgagaggcgagagataggaggtaagaggcgtcgttttttggggcgttttttttaggttcgcgttttttgatgattcgtgggtcggttcgggggttgttttttcgttttcgtttagttggtgagtttcgacgggttggtaatcgaggaggtcggttagtttttttttttcgtttacggttattttttgtttttatttttttggggtatttaagaaatattttg

SEQ ID NO: 26866 - DNA, 748 bp, Artificial Sequence
  chemically treated genomic DNA (Homo sapiens) CpG-island No: 26866
caaaatatttcttaaataccccaaaaaaataaaaacaaaaaataaccgtaaacgaaaaaaaaaaactaaccgacctcctcgattaccaacccgtcgaaactcaccaactaaacgaaaacgaaaaaacaacccccgaaccgacccacgaatcatcaaaaaacgcgaacctaaaaaaaacgccccaaaaaacgacgcctcttacctcctatctctcgcctctcgaaaaaaatttactcttaatttcaaaaccgaattcgccgtcgaatcaacctccaaaaactaacaacgaacgcgaaccgaacaatttccgcgctcaacacaaacaactcgcgatcataaacgactcaacctccaaccaactaaacgaaaacaaatacgcttacatccgaaatacgcccgcccgcccgaaaacctaaaaaacaccctaacccgtacaccaaactaactaccgcgatcgaaaccccaaaaaacgcgccccgaaccctctccctataacgcgcgaaaatccccgaccgcaacccgcccgcgcgaatcgaatttcctaccccaaccgacgcgctccgacgcgaatataaaccgaaaaccgaaaaaacttaaaaacgaaacaaatacaaaatacgaataaaaacgccgacgccttcgccgctcccgccgcctcgaaatcaataccgcccccgcccgacgcacttcgccctccaatacctaccctaaactaaattctaaacgatttctaaactaaccgccaaaa

SEQ ID NO: 26867 - DNA, 748 bp, Artificial Sequence
  chemically treated genomic DNA (Homo sapiens) CpG-island No: 26867
taaggtgttttttggatgttttaaagggatgaaaataagaagtgatcgtgggcgaggaggaggagttggtcgattttttcggttgttagttcgtcggagtttattagttaggcgagggcgggaagatagttttcgggtcggtttacggattattagaaggcgcggatttggaggaggcgttttagaaggcgacgttttttgttttttgtttttcgtttttcgaaggaagtttgtttttaattttagagtcgggttcgtcgtcggattaatttttaggagttagtagcgggcgcggatcgggtagttttcgcgtttagtataggtagttcgcggttatgggcggtttagtttttagttagttggacgagggtaagtgcgtttatattcgaggtacgttcgttcgttcgggggtttggggagtattttgattcgtgtattaggttggttgtcgcggtcggggttttaaggggcgcgtttcgggttttttttttgtagcgcgcggggattttcgatcgtagttcgttcgcgcgagtcgggttttttgttttagtcggcgcgtttcggcgcgggtgtggatcggggatcgggagggtttgggagcgaggtaggtgtaggatgcgggtggggacgtcggcgttttcgtcgttttcgtcgtttcggggttagtgtcgttttcgttcggcgtatttcgttttttagtatttgttttggattgagttttgagcggtttttgaattggtcgttaaga

SEQ ID NO: 26868 - DNA, 748 bp, Artificial Sequence
  chemically treated genomic DNA (Homo sapiens) CpG-island No: 26868
tcttaacgaccaattcaaaaaccgctcaaaactcaatccaaaacaaatactaaaaaacgaaatacgccgaacgaaaacgacactaaccccgaaacgacgaaaacgacgaaaacgccgacgtccccacccgcatcctacacctacctcgctcccaaaccctcccgatccccgatccacacccgcgccgaaacgcgccgactaaaacaaaaaacccgactcgcgcgaacgaactacgatcgaaaatccccgcgcgctacaaaaaaaaaacccgaaacgcgccccttaaaaccccgaccgcgacaaccaacctaatacacgaatcaaaatactccccaaacccccgaacgaacgaacgtacctcgaatataaacgcacttaccctcgtccaactaactaaaaactaaaccgcccataaccgcgaactacctatactaaacgcgaaaactacccgatccgcgcccgctactaactcctaaaaattaatccgacgacgaacccgactctaaaattaaaaacaaacttccttcgaaaaacgaaaaacaaaaaacaaaaaacgtcgccttctaaaacgcctcctccaaatccgcgccttctaataatccgtaaaccgacccgaaaactatcttcccgccctcgcctaactaataaactccgacgaactaacaaccgaaaaaatcgaccaactcctcctcctcgcccacgatcacttcttattttcatccctttaaaacatccaaaaaacacctta

SEQ ID NO: 26869 - DNA, 900 bp, Artificial Sequence
  chemically treated genomic DNA (Homo sapiens) CpG-island No: 26869
ttcgggcgttgttcgggggttacgtcggatcgcggtgggcgtcgggggggcgtggtcggttagtttagggcggggcggtggcgcgggttttttaggttaatacgcggcggcgtattttttttcgcgtcgcgggttttttcgcgtcgtgtacgttttcgtttcgcgttttcgtttttcgttcgttcgttttttttcgtttttttcgtagcgtcggtcgagtcggtttttttttagttttttatgaatattgagcggtttttgttgtatttttcgagttttattgcggaagttgaggttcgttatattgtgcggcggcgtcggcgttcgcggtagttgatattagagttttgtttcggtcgcggttagcggagttttgggttggggtaggagtcggtgagtggggcgggcggggaggcgaaggacgcggaagtagcgggtcgggatacgcgtttattcggtagcgttgtaggcgattgacgggggtttcggagtgtggggggggtgtgtgttcgcgggggtgtgaagggatatggcgtcgtcgtcgttttcggtcgttttcgcggcggagacggcgggtgaagcgggtttttattgttttcgtgttttcgagggtcgtgggagggaagggagttggtttgcggaggatttagttagcgaagcgtcgggattttttttttcgtcgcgagtttttcgttgtttttttttttgcgcggaggtcggcgttgcggcgcggttttttcgttttcgggggcgggggttttagtttttttgtagttttatttcggaggcggacggagtggaatgcgagttttttttttgggttttcgtttcgtagttagggatgtgtgtttgtatcgtgggggtggggtagggggtattttgtgtagatatcgttttttt

SEQ ID NO: 26870 - DNA, 900 bp, Artificial Sequence
  chemically treated genomic DNA (Homo sapiens) CpG-island No: 26870
aaaaaaacgatatctacacaaaataccccctaccccacccccacgatacaaacacacatccctaactacgaaacgaaaacccaaaaaaaaaactcgcattccactccgtccgcctccgaaataaaactacaaaaaaactaaaacccccgcccccgaaaacgaaaaaaccgcgccgcaacgccgacctccgcgcaaaaaaaaaaacaacgaaaaactcgcgacgaaaaaaaaaatcccgacgcttcgctaactaaatcctccgcaaaccaactcccttccctcccacgaccctcgaaaacacgaaaacaataaaaacccgcttcacccgccgtctccgccgcgaaaacgaccgaaaacgacgacgacgccatatcccttcacacccccgcgaacacacaccccccccacactccgaaacccccgtcaatcgcctacaacgctaccgaataaacgcgtatcccgacccgctacttccgcgtccttcgcctccccgcccgccccactcaccgactcctaccccaacccaaaactccgctaaccgcgaccgaaacaaaactctaatatcaactaccgcgaacgccgacgccgccgcacaatataacgaacctcaacttccgcaataaaactcgaaaaatacaacaaaaaccgctcaatattcataaaaaactaaaaaaaaaccgactcgaccgacgctacgaaaaaaacgaaaaaaaacgaacgaacgaaaaacgaaaacgcgaaacgaaaacgtacacgacgcgaaaaaacccgcgacgcgaaaaaaaatacgccgccgcgtattaacctaaaaaacccgcgccaccgccccgccctaaactaaccgaccacgcccccccgacgcccaccgcgatccgacgtaacccccgaacaacgcccgaa

SEQ ID NO: 26871 - DNA, 900 bp, Artificial Sequence
  chemically treated genomic DNA (Homo sapiens) CpG-island No: 26871
gaaggagcgatatttgtataaagtgttttttattttatttttacgatgtagatatatatttttagttgcgaggcgaaagtttagagaaaaaattcgtattttatttcgttcgttttcggagtagggttgtagagaggttggggttttcgttttcggaggcgaggggatcgcgtcgtagcgtcggttttcgcgtagaggaaagggtagcgaaaggttcgcggcgaaggaaggaatttcggcgtttcgttgattgggtttttcgtaaattagttttttttttttttacgattttcgaagatacgggaataatgagaattcgttttattcgtcgttttcgtcgcgagagcggtcgggggcggcggcggcgttatgtttttttatattttcgcggatatatattttttttatatttcggggttttcgttagtcgtttgtaacgttgtcgagtagacgcgtgtttcggttcgttgttttcgcgtttttcgttttttcgttcgttttatttatcggtttttgttttagtttagggtttcgttggtcgcggtcggagtaagattttggtattagttgtcgcggacgtcggcgtcgtcgtataatatggcgagttttagttttcgtaatggagttcgggaaatataataggggtcgtttaatatttatgagagattgaggggaagtcggttcggtcggcgttgcggggagggcgggaaggagcgagcgagcgaggggcggaggcgcgggacgaggacgtgtacggcgcggggaggttcgcggcgcgagggagggtgcgtcgtcgcgtgttggtttggagaattcgcgttatcgtttcgttttgggttggtcggttacgttttttcggcgtttatcgcggttcgacgtagttttcgggtaacgttcgga

SEQ ID NO: 26872 - DNA, 900 bp, Artificial Sequence
  chemically treated genomic DNA (Homo sapiens) CpG-island No: 26872
tccgaacgttacccgaaaactacgtcgaaccgcgataaacgccgaaaaaacgtaaccgaccaacccaaaacgaaacgataacgcgaattctccaaaccaacacgcgacgacgcaccctccctcgcgccgcgaacctccccgcgccgtacacgtcctcgtcccgcgcctccgcccctcgctcgctcgctccttcccgccctccccgcaacgccgaccgaaccgacttcccctcaatctctcataaatattaaacgacccctattatatttcccgaactccattacgaaaactaaaactcgccatattatacgacgacgccgacgtccgcgacaactaataccaaaatcttactccgaccgcgaccaacgaaaccctaaactaaaacaaaaaccgataaataaaacgaacgaaaaaacgaaaaacgcgaaaacaacgaaccgaaacacgcgtctactcgacaacgttacaaacgactaacgaaaaccccgaaatataaaaaaaatatatatccgcgaaaatataaaaaaacataacgccgccgccgcccccgaccgctctcgcgacgaaaacgacgaataaaacgaattctcattattcccgtatcttcgaaaatcgtaaaaaaaaaaaaaactaatttacgaaaaacccaatcaacgaaacgccgaaattccttccttcgccgcgaacctttcgctaccctttcctctacgcgaaaaccgacgctacgacgcgatcccctcgcctccgaaaacgaaaaccccaacctctctacaaccctactccgaaaacgaacgaaataaaatacgaattttttctctaaactttcgcctcgcaactaaaaatatatatctacatcgtaaaaataaaataaaaaacactttatacaaatatcgctccttc

SEQ ID NO: 26873 - DNA, 690 bp, Artificial Sequence
  chemically treated genomic DNA (Homo sapiens) CpG-island No: 26873
  unsure (265)
gtaggtgcgcgtcggcgaggttcggtttagtttcgtcgcggcggttgttttattttcggtttcgttttttattcgtcgttcgttttcgttttcgtcgtcgtcgtcgtcgttttcgttcgttttttagacgtttttagttatcgggatgggcgcggcgggtttttgttcgtagtttcggaaaattttacgcgttcgcgttattacgtacgtcgcgcgtcgcgcgcgttcgttaggttcgacgggtacgcgtacgtttgtgcgcgtntaaatcgtatcgggtttcgagcgcgtgttcgagcggtttaaaggggtcgtgttgttgttttcgggtatcgttgtttcgggagaatttcggcggttcggttttgcggggaatcggcgggatggggatcggggtagtggattttcggagttgggatggggcggggggaacgcgggcgtggagtttttcggggatagggtaaggttgggtaatcgtgggcgggggtttttttaggggcgggggtggggtaacggcgggcggggggtatttaatcgatagggtaggggcgggaaggttacgggcgggggcggttttttcggggacggggcgggtgggggtatcgcggcgagatcgttttttgtagaggaggtaataggtttcgttagtaggttagggtttcgggtaggcgtaggtgtttttcggttttt

SEQ ID NO: 26874 - DNA, 690 bp, Artificial Sequence
  chemically treated genomic DNA (Homo sapiens) CpG-island No: 26874
  unsure (426)
aaaaaccgaaaaacacctacgcctacccgaaaccctaacctactaacgaaacctattacctcctctacaaaaaacgatctcgccgcgatacccccacccgccccgtccccgaaaaaaccgcccccgcccgtaaccttcccgcccctaccctatcgattaaataccccccgcccgccgttaccccacccccgcccctaaaaaaacccccgcccacgattacccaaccttaccctatccccgaaaaactccacgcccgcgttccccccgccccatcccaactccgaaaatccactaccccgatccccatcccgccgattccccgcaaaaccgaaccgccgaaattctcccgaaacaacgatacccgaaaacaacaacacgacccctttaaaccgctcgaacacgcgctcgaaacccgatacgatttanacgcgcacaaacgtacgcgtacccgtcgaacctaacgaacgcgcgcgacgcgcgacgtacgtaataacgcgaacgcgtaaaattttccgaaactacgaacaaaaacccgccgcgcccatcccgataactaaaaacgtctaaaaaacgaacgaaaacgacgacgacgacgacgaaaacgaaaacgaacgacgaataaaaaacgaaaccgaaaataaaacaaccgccgcgacgaaactaaaccgaacctcgccgacgcgcacctac

SEQ ID NO: 26875 - DNA, 690 bp, Artificial Sequence
  chemically treated genomic DNA (Homo sapiens) CpG-island No: 26875
  unsure (426)
agaggtcggggggtatttgcgtttgttcgggattttgatttgttagcggggtttgttgttttttttgtaggaagcgatttcgtcgcggtgtttttattcgtttcgttttcggagggatcgttttcgttcgtggttttttcgtttttgttttgtcgattgagtgtttttcgttcgtcgttattttattttcgtttttggaggagttttcgtttacggttatttaattttattttgttttcggagggttttacgttcgcgtttttttcgttttattttaatttcgagggtttattgtttcggtttttatttcgtcggtttttcgtagggtcgggtcgtcggggttttttcggggtagcggtattcgaaggtagtagtacggtttttttaagtcgttcggatacgcgttcggggttcgatgcggtttgnacgcgtataggcgtgcgcgtgttcgtcgggtttggcgagcgcgcgcgacgcgcggcgtgcgtggtgacgcgagcgcgtggggtttttcgaggttgcgggtaggggttcgtcgcgtttatttcgatggttggaggcgtttgaggggcggacggaggcggcggcggcggcggcgggagcgggagcgggcggcgagtggggagcggggtcgggagtggagtagtcgtcgcggcgggattggatcgagtttcgtcggcgcgtatttgt

SEQ ID NO: 26876 - DNA, 690 bp, Artificial Sequence
  chemically treated genomic DNA (Homo sapiens) CpG-island No: 26876
  unsure (265)
acaaatacgcgccgacgaaactcgatccaatcccgccgcgacgactactccactcccgaccccgctccccactcgccgcccgctcccgctcccgccgccgccgccgccgcctccgtccgcccctcaaacgcctccaaccatcgaaataaacgcgacgaacccctacccgcaacctcgaaaaaccccacgcgctcgcgtcaccacgcacgccgcgcgtcgcgcgcgctcgccaaacccgacgaacacgcgcacgcctatacgcgtncaaaccgcatcgaaccccgaacgcgtatccgaacgacttaaaaaaaccgtactactaccttcgaataccgctaccccgaaaaaaccccgacgacccgaccctacgaaaaaccgacgaaataaaaaccgaaacaataaaccctcgaaattaaaataaaacgaaaaaaacgcgaacgtaaaaccctccgaaaacaaaataaaattaaataaccgtaaacgaaaactcctccaaaaacgaaaataaaataacgacgaacgaaaaacactcaatcgacaaaacaaaaacgaaaaaaccacgaacgaaaacgatccctccgaaaacgaaacgaataaaaacaccgcgacgaaatcgcttcctacaaaaaaaacaacaaaccccgctaacaaatcaaaatcccgaacaaacgcaaataccccccgacctct

SEQ ID NO: 26877 - DNA, 1077 bp, Artificial Sequence
  chemically treated genomic DNA (Homo sapiens) CpG-island No: 26877
tcgcgggggtgtttcggtcgcgtagcggagtaggatgggttggagtgtagtcggggagcgggtattcggcgtttcggggttgttcgggtatttggtaagcgtttttcgaggttttcgtttatttgcgttttcgtcgtatttttttttattcggcggcgggttttcggggagcgatgagtcgttcgtgtttggtgcgttcggatgttcggaggtttttaggatatcgaggttatcggtgggtatcgaatgttttcgagttgtttacggttcggcgtgggttttaaaaatcgtttttggtgaaataaggcgtttttagagtcgtttcgtatcggggtgtgtttgggtttggttttcgtaggtggttttcggggtcggttttcggtgtcgtcggttttcggtgttattagttttcggtgtcgtcggttttcggtgtcgacggttttcggtgtcgacggttttcggtgtcggtttttagtgtcggttttcggtgttgtcggtttttggtgtcggttttcggtgttgtcggttttcggtgttgtcgattttcggtgttgacggttttcggtgttgtcggttttcggtgtcggttttcggtgttgtcggttttcggtgttgtcggtttttggtgtcggttttcggtgttgtcggttttcggtgtcggttttcggtgttgtcggttttcggtgttgtcgattttcggtgtcgtcggttttcggtgtcgtcggtttttggtgtcggttttcggtgtcggttttcggtgttgtcggttttcggtgttggttttcggtgttgtcggttttcggtgttgtcggttttcggtgtcgtcggttttcggtgttgtcggtttttcgtgttgacggttttcggtgtcggttttcggtgtcggttttcggtgttgtcggttttcggtgttggttttcggtgttgtcggttttcggtgtcgtcggttttcggtgtcgtcggttttcggtgttgtcggtttttcgtgttgacggttttcggtgttgttagttttcggtgttgttttcgttttttaggtaggatttattattttttttgttttgttcgtagcgattt

SEQ ID NO: 26878 - DNA, 1077 bp, Artificial Sequence
  chemically treated genomic DNA (Homo sapiens) CpG-island No: 26878
aaatcgctacgaacaaaacaaaaaaaataataaatcctacctaaaaaacgaaaacaacaccgaaaactaacaacaccgaaaaccgtcaacacgaaaaaccgacaacaccgaaaaccgacgacaccgaaaaccgacgacaccgaaaaccgacaacaccgaaaaccaacaccgaaaaccgacaacaccgaaaaccgacaccgaaaaccgacaccgaaaaccgtcaacacgaaaaaccgacaacaccgaaaaccgacgacaccgaaaaccgacaacaccgaaaaccgacaacaccgaaaaccaacaccgaaaaccgacaacaccgaaaaccgacaccgaaaaccgacaccaaaaaccgacgacaccgaaaaccgacgacaccgaaaatcgacaacaccgaaaaccgacaacaccgaaaaccgacaccgaaaaccgacaacaccgaaaaccgacaccaaaaaccgacaacaccgaaaaccgacaacaccgaaaaccgacaccgaaaaccgacaacaccgaaaaccgtcaacaccgaaaatcgacaacaccgaaaaccgacaacaccgaaaaccgacaccaaaaaccgacaacaccgaaaaccgacactaaaaaccgacaccgaaaaccgtcgacaccgaaaaccgtcgacaccgaaaaccgacgacaccgaaaactaataacaccgaaaaccgacgacaccgaaaaccgaccccgaaaaccacctacgaaaaccaaacccaaacacaccccgatacgaaacgactctaaaaacgccttatttcaccaaaaacgatttttaaaacccacgccgaaccgtaaacaactcgaaaacattcgatacccaccgataacctcgatatcctaaaaacctccgaacatccgaacgcaccaaacacgaacgactcatcgctccccgaaaacccgccgccgaataaaaaaaaatacgacgaaaacgcaaataaacgaaaacctcgaaaaacgcttaccaaatacccgaacaaccccgaaacgccgaatacccgctccccgactacactccaacccatcctactccgctacgcgaccgaaacacccccgcga

SEQ ID NO: 26879 - DNA, 1077 bp, Artificial Sequence
  chemically treated genomic DNA (Homo sapiens) CpG-island No: 26879
gggtcgttgcgggtagagtagagggggtggtgggttttgtttggggggcgggggtagtatcgagaattggtagtatcgagaatcgttagtacggaaaatcggtagtatcgagaatcggcggtatcgagaatcggcggtatcgagaatcggtagtatcgagaattagtatcgagaatcggtagtatcgagaatcggtatcgagaatcggtatcgagaatcgttagtacggaaaatcggtagtatcgagaatcggcggtatcgagaatcggtagtatcgagaatcggtagtatcgagaattagtatcgagaatcggtagtatcgagaatcggtatcgagaatcggtattaagaatcggcggtatcgagaatcggcggtatcgagaatcggtagtatcgagaatcggtagtatcgagaatcggtatcgagaatcggtagtatcgagaatcggtattaagaatcggtagtatcgagaatcggtagtatcgagaatcggtatcgagaatcggtagtatcgagaatcgttagtatcgagaatcggtagtatcgagaatcggtagtatcgagaatcggtattaagaatcggtagtatcgagaatcggtattgagaatcggtatcgagaatcgtcggtatcgagaatcgtcggtatcgagaatcggcggtatcgagaattggtggtatcgagaatcggcggtatcgagaatcggtttcgagagttatttgcggggattaggtttaggtatatttcgatgcggggcggttttgagggcgttttgttttattaaaggcggtttttggaatttacgtcggatcgtgaataattcgagggtattcgatatttatcggtagtttcggtgttttagaaattttcgggtattcgagcgtattaggtacgggcggtttatcgtttttcggggattcgtcgtcgagtgggggaaggtgcggcgggggcgtagatggacggaggtttcgaaaaacgtttgttaggtgttcgggtagtttcgagacgtcgggtattcgtttttcggttgtattttagtttattttgtttcgttgcgcggtcggggtattttcgcgg

SEQ ID NO: 26880 - DNA, 1077 bp, Artificial Sequence
  chemically treated genomic DNA (Homo sapiens) CpG-island No: 26880
ccgcgaaaataccccgaccgcgcaacgaaacaaaataaactaaaatacaaccgaaaaacgaatacccgacgtctcgaaactacccgaacacctaacaaacgtttttcgaaacctccgtccatctacgcccccgccgcaccttcccccactcgacgacgaatccccgaaaaacgataaaccgcccgtacctaatacgctcgaatacccgaaaatttctaaaacaccgaaactaccgataaatatcgaataccctcgaattattcacgatccgacgtaaattccaaaaaccgcctttaataaaacaaaacgccctcaaaaccgccccgcatcgaaatatacctaaacctaatccccgcaaataactctcgaaaccgattctcgataccgccgattctcgataccaccaattctcgataccgccgattctcgataccgacgattctcgataccgacgattctcgataccgattctcaataccgattctcgatactaccgattcttaataccgattctcgatactaccgattctcgatactaccgattctcgatactaacgattctcgatactaccgattctcgataccgattctcgatactaccgattctcgatactaccgattcttaataccgattctcgatactaccgattctcgataccgattctcgatactaccgattctcgatactaccgattctcgataccgccgattctcgataccgccgattcttaataccgattctcgataccgattctcgatactaccgattctcgatactaattctcgatactaccgattctcgatactaccgattctcgataccgccgattctcgatactaccgattttccgtactaacgattctcgataccgattctcgataccgattctcgatactaccgattctcgatactaattctcgatactaccgattctcgataccgccgattctcgataccgccgattctcgatactaccgattttccgtactaacgattctcgatactaccaattctcgatactacccccgccccccaaacaaaacccaccaccccctctactctacccgcaacgaccc

SEQ ID NO: 26881 - DNA, 732 bp, Artificial Sequence
  chemically treated genomic DNA (Homo sapiens) CpG-island No: 26881
cggtcgttttttcgttagttaagttcgtcgttttgattttcggtagtaagtcgttattatggtgaagatcgtgatagttaagatttaggcgtattaggattagaagtcgggtacgagcgggttgcggaagcgggtgaaggtgttttagagtagcgttaattacgcggagaattttatttagagtattatttttatcgtggagtcggcgtagcggtaggaggttacgttggtggtgggcggggacggtcggttttatatgaaggaggttatttagtttatcgttcgtatcgttgtcgttaacggggtaagggatgcgcggtttcgcgtcgttgtgtattttggcgcgtgtgcgacgtgcggttcgcggcgttttttttcgttcggggtcggtcgttttcgcgcgttgtcgtttcggtttttatttttcgtttttttttttttttcgcgttcgtttttttggtttggaggttcgacggaggtcgtcgggttggggaaagtggttacgggattcggtagatttgttcgtttgattttcggggcgtcgggaggtgcgggcgcggagttttttaaggttacgttcgatttttcgtttttagtcgttgtttttttttttttcgtttttcgtttttttcgaggcgtttgatatttgttttaattttgtagttttggaagatacgattacggcgtagagtgttgtcgttttaagtaggaaaggttagattgtcgtcgttt

SEQ ID NO: 26882 - DNA, 732 bp, Artificial Sequence
  chemically treated genomic DNA (Homo sapiens) CpG-island No: 26882
aaacgacgacaatctaacctttcctacttaaaacgacaacactctacgccgtaatcgtatcttccaaaactacaaaattaaaacaaatatcaaacgcctcgaaaaaaacgaaaaacgaaaaaaaaaaaaacaacgactaaaaacgaaaaatcgaacgtaaccttaaaaaactccgcgcccgcacctcccgacgccccgaaaatcaaacgaacaaatctaccgaatcccgtaaccactttccccaacccgacgacctccgtcgaacctccaaaccaaaaaaacgaacgcgaaaaaaaaaaaaaaacgaaaaataaaaaccgaaacgacaacgcgcgaaaacgaccgaccccgaacgaaaaaaaacgccgcgaaccgcacgtcgcacacgcgccaaaatacacaacgacgcgaaaccgcgcatcccttaccccgttaacgacaacgatacgaacgataaactaaataacctccttcatataaaaccgaccgtccccgcccaccaccaacgtaacctcctaccgctacgccgactccacgataaaaataatactctaaataaaattctccgcgtaattaacgctactctaaaacaccttcacccgcttccgcaacccgctcgtacccgacttctaatcctaatacgcctaaatcttaactatcacgatcttcaccataataacgacttactaccgaaaatcaaaacgacgaacttaactaacgaaaaaacgaccg

SEQ ID NO: 26883 - DNA, 732 bp, Artificial Sequence
  chemically treated genomic DNA (Homo sapiens) CpG-island No: 26883
aggcggcggtagtttaattttttttgtttaaggcgatagtattttgcgtcgtaatcgtattttttaaggttgtaaggttagggtaaatgttagacgtttcgggaggggcgggggacggggagagggaaggtagcggttagagacggagagtcgggcgtgattttgggaggtttcgcgttcgtatttttcggcgtttcgggagttaggcgagtaggtttgtcgggtttcgtggttattttttttagttcggcgattttcgtcgggtttttaggttagaagagcgagcgcgaaggagagggaggagcgggaggtggaaatcgaggcggtagcgcgcggaagcggtcggtttcgagcgagggagggcgtcgcgggtcgtacgtcgtatacgcgttagggtgtatagcggcgcggggtcgcgtattttttatttcgttggcggtagcgatgcgagcgatgagttggatggttttttttatgtagaatcggtcgttttcgtttattattagcgtggttttttgtcgttgcgtcggttttacggtggagatgatattttggatgaagtttttcgcgtagttggcgttgttttggaatatttttattcgttttcgtagttcgttcgtgttcggtttttggttttggtacgtttgggttttaattgttacgatttttattatggtggcgatttgttgtcgggggttagagcggcggatttggttggcggaggggcggtcg

SEQ ID NO: 26884 - DNA, 732 bp, Artificial Sequence
  chemically treated genomic DNA (Homo sapiens) CpG-island No: 26884
cgaccgcccctccgccaaccaaatccgccgctctaacccccgacaacaaatcgccaccataataaaaatcgtaacaattaaaacccaaacgtaccaaaaccaaaaaccgaacacgaacgaactacgaaaacgaataaaaatattccaaaacaacgccaactacgcgaaaaacttcatccaaaatatcatctccaccgtaaaaccgacgcaacgacaaaaaaccacgctaataataaacgaaaacgaccgattctacataaaaaaaaccatccaactcatcgctcgcatcgctaccgccaacgaaataaaaaatacgcgaccccgcgccgctatacaccctaacgcgtatacgacgtacgacccgcgacgccctccctcgctcgaaaccgaccgcttccgcgcgctaccgcctcgatttccacctcccgctcctccctctccttcgcgctcgctcttctaacctaaaaacccgacgaaaatcgccgaactaaaaaaaataaccacgaaacccgacaaacctactcgcctaactcccgaaacgccgaaaaatacgaacgcgaaacctcccaaaatcacgcccgactctccgtctctaaccgctaccttccctctccccgtcccccgcccctcccgaaacgtctaacatttaccctaaccttacaaccttaaaaaatacgattacgacgcaaaatactatcgccttaaacaaaaaaaattaaactaccgccgcct

SEQ ID NO: 26885 - DNA, 978 bp, Artificial Sequence
  chemically treated genomic DNA (Homo sapiens) CpG-island No: 26885
agtcgtcggttttttcgtatgaggagttgttatagttttcgaatttatttgttttgaataataggattagtgtttgtgttacgttttacgttttcgagaaattcgtaggttttcggaggtttcgtttttttaaatattgatcgagtttttttaatttttttcgtcgtttttttgcgggtgatttttaaacgttttagtttcgttttcgttttttttttttcgttattatacgtttttcggattttaggttcgtttttttgttaaaattttttgcgatttttttttttttttatttcgtatttttattattattgttttatattttggttacgatttttcgtaaagaggtcgagaaggtgcgggtttgggggaatagcggaaaattatagaacgcggtcgttattgcgtcgttttggttatttttttttggtattataaacgttttttcgcgaatggcggagttagttagttttcggggtgttcgttttagttaatcggtgtttacggatgttacgtttgtttttgttttttttgtttatgttttagaaaacgcgtattgcgtttttagttggttttaaaagttttcgcggttatttttacgaagggtaaaatttttcgtattagcggaagtaaggggttggtagagcggtatcgtaagaaattaattaattagaataatattatcgcgacgtagcgtcgtgtgattttattttcgttaagtgcgcgatttttgtcgttattttttttgttcggcgtgtttaggttcgcgttaaattattattaattagacgacgtttttatttaaagggttgtagcggagttttggtttcggtgttttttatttacggtcgtgcgggaattgcgtattttagggattcgtagtattagttttatagtatcgcgtggagttgtttgtttttttatataggaggttatatttttttcgtgtaatgttattaatggtgtcgatttttttta

SEQ ID NO: 26886 - DNA, 978 bp, Artificial Sequence
  chemically treated genomic DNA (Homo sapiens) CpG-island No: 26886
taaaaaaaatcgacaccattaataacattacacgaaaaaaatataacctcctatataaaaaaacaaacaactccacgcgatactataaaactaatactacgaatccctaaaatacgcaattcccgcacgaccgtaaataaaaaacaccgaaaccaaaactccgctacaaccctttaaataaaaacgtcgtctaattaataataatttaacgcgaacctaaacacgccgaacaaaaaaaataacgacaaaaatcgcgcacttaacgaaaataaaatcacacgacgctacgtcgcgataatattattctaattaattaatttcttacgataccgctctaccaaccccttacttccgctaatacgaaaaattttacccttcgtaaaaataaccgcgaaaacttttaaaaccaactaaaaacgcaatacgcgttttctaaaacataaacaaaaaaaacaaaaacaaacgtaacatccgtaaacaccgattaactaaaacgaacaccccgaaaactaactaactccgccattcgcgaaaaaacgtttataataccaaaaaaaaataaccaaaacgacgcaataacgaccgcgttctataattttccgctattcccccaaacccgcaccttctcgacctctttacgaaaaatcgtaaccaaaatataaaacaataataataaaaatacgaaataaaaaaaaaaaaaaatcgcaaaaaattttaacaaaaaaacgaacctaaaatccgaaaaacgtataataacgaaaaaaaaaaaacgaaaacgaaactaaaacgtttaaaaatcacccgcaaaaaaacgacgaaaaaaattaaaaaaactcgatcaatatttaaaaaaacgaaacctccgaaaacctacgaatttctcgaaaacgtaaaacgtaacacaaacactaatcctattattcaaaacaaataaattcgaaaactataacaactcctcatacgaaaaaaccgacgact

SEQ ID NO: 26887 - DNA, 978 bp, Artificial Sequence
  chemically treated genomic DNA (Homo sapiens) CpG-island No: 26887
tggggagaatcggtattattggtggtattatacgaagagaatgtgattttttatgtaaaagaataagtaattttacgcggtgttgtgaggttagtgttgcgagtttttgaggtgcgtaattttcgtacgatcgtgggtgggaaatatcgaagttaaaatttcgttatagttttttagatgaaggcgtcgtttgattggtgatagtttggcgcgaatttgagtacgtcgaataaaggaagtgacggtagaagtcgcgtatttgacgagggtgggattatacggcgttgcgtcgcggtagtattgttttgattggttgattttttgcgatatcgttttgttagttttttgttttcgttagtgcggagggttttgtttttcgtaaagatggtcgcggaggtttttggagttaattgggagcgtagtacgcgttttttggagtatgggtagaggagataggaataagcgtagtattcgtgagtatcgattggttgaagcgagtatttcgggagttgattggtttcgttattcgcgggaaggcgtttgtggtgttagagaaaagtagttagagcggcgtagtggcggtcgcgttttgtggtttttcgttatttttttagattcgtattttttcggtttttttgcggagaatcgtgattaagatgtggaatagtaatgatgggggtgcggggtggaggaggaagagaatcgtaggaggttttagtaagagggcgagtttagggttcgagaggcgtgtggtagcgggagaggaagggcgggagcggagttggggcgtttgggggttattcgtaggaaggcggcgaggaaggttagggagattcggttagtgtttgaaggggcgaagttttcgggagtttgcgggtttttcggaggcgtgggacgtggtataggtattaattttgttgtttaaaataggtggattcgaaagttatggtagttttttatacgggggagtcggcggtt

SEQ ID NO: 26888 - DNA, 978 bp, Artificial Sequence
  chemically treated genomic DNA (Homo sapiens) CpG-island No: 26888
aaccgccgactcccccgtataaaaaactaccataactttcgaatccacctattttaaacaacaaaattaatacctataccacgtcccacgcctccgaaaaacccgcaaactcccgaaaacttcgccccttcaaacactaaccgaatctccctaaccttcctcgccgccttcctacgaataacccccaaacgccccaactccgctcccgcccttcctctcccgctaccacacgcctctcgaaccctaaactcgccctcttactaaaacctcctacgattctcttcctcctccaccccgcacccccatcattactattccacatcttaatcacgattctccgcaaaaaaaccgaaaaaatacgaatctaaaaaaataacgaaaaaccacaaaacgcgaccgccactacgccgctctaactacttttctctaacaccacaaacgccttcccgcgaataacgaaaccaatcaactcccgaaatactcgcttcaaccaatcgatactcacgaatactacgcttattcctatctcctctacccatactccaaaaaacgcgtactacgctcccaattaactccaaaaacctccgcgaccatctttacgaaaaacaaaaccctccgcactaacgaaaacaaaaaactaacaaaacgatatcgcaaaaaatcaaccaatcaaaacaatactaccgcgacgcaacgccgtataatcccaccctcgtcaaatacgcgacttctaccgtcacttcctttattcgacgtactcaaattcgcgccaaactatcaccaatcaaacgacgccttcatctaaaaaactataacgaaattttaacttcgatatttcccacccacgatcgtacgaaaattacgcacctcaaaaactcgcaacactaacctcacaacaccgcgtaaaattacttattcttttacataaaaaatcacattctcttcgtataataccaccaataataccgattctcccca

SEQ ID NO: 26889 - DNA, 685 bp, Artificial Sequence
  chemically treated genomic DNA (Homo sapiens) CpG-island No: 26889
cgtcggggtcggttgagaagggtagcggggatacgggggatgttcggtcgttttcggtcgcgtacgttagttttttttaggaacgcgcgggttcgtatttttcgtacgcggttgtcgattggttgggacggcgtcgggcgtgacgttagggttcgttttatcgtttttcggtttcgtttcgcggggtggtttggtagtttggtttggagtagttgaaatcggtttgagcgtggttgttttttgtcgttcgacgtcgcggtaggtcgtttggggggagcgttggcgaggtacggacggcgggcgttcggtatttttgttcgcggttttcgttttcgggcggggcggcggcgacgcggatttgcggattagcgaattcggaggtgaggtagcgagtcgggtgcgggggtcgggcggttatttacgtggcgggttgagttgttagggcggttcgggacgcggcgggtttggggcgtcggggtcgaggcgcgggcggggttttcgggtcgggtcgggtcggttattgttcgtaggggaacggcggtcgggcgttcgttgcgttaaatcggtggttgggacgtatttttcgatttttattgtttattgtcgcgtttttgttgggttgtttggggtttagtttttttttaaaaaatacgtggagtatttgaggagtagtagggtgcgtgga

SEQ ID NO: 26890 - DNA, 685 bp, Artificial Sequence
  chemically treated genomic DNA (Homo sapiens) CpG-island No: 26890
tccacgcaccctactactcctcaaatactccacgtattttttaaaaaaaaactaaaccccaaacaacccaacaaaaacgcgacaataaacaataaaaatcgaaaaatacgtcccaaccaccgatttaacgcaacgaacgcccgaccgccgttcccctacgaacaataaccgacccgacccgacccgaaaaccccgcccgcgcctcgaccccgacgccccaaacccgccgcgtcccgaaccgccctaacaactcaacccgccacgtaaataaccgcccgacccccgcacccgactcgctacctcacctccgaattcgctaatccgcaaatccgcgtcgccgccgccccgcccgaaaacgaaaaccgcgaacaaaaataccgaacgcccgccgtccgtacctcgccaacgctccccccaaacgacctaccgcgacgtcgaacgacaaaaaacaaccacgctcaaaccgatttcaactactccaaaccaaactaccaaaccaccccgcgaaacgaaaccgaaaaacgataaaacgaaccctaacgtcacgcccgacgccgtcccaaccaatcgacaaccgcgtacgaaaaatacgaacccgcgcgttcctaaaaaaaactaacgtacgcgaccgaaaacgaccgaacatcccccgtatccccgctacccttctcaaccgaccccgacg

SEQ ID NO: 26891 - DNA, 685 bp, Artificial Sequence
  chemically treated genomic DNA (Homo sapiens) CpG-island No: 26891
tttacgtattttgttattttttaaatgttttacgtattttttagaagggaattaagttttaggtagtttagtagaagcgcggtagtgaataataaaagtcgaagagtgcgttttagttatcgatttagcgtagcgaacgttcggtcgtcgtttttttgcgggtagtggtcggttcggttcggttcgaggatttcgttcgcgtttcggtttcgacgttttaggttcgtcgcgtttcgggtcgttttgatagtttagttcgttacgtgagtggtcgttcggttttcgtattcggttcgttgttttattttcgggttcgttagttcgtaggttcgcgtcgtcgtcgtttcgttcgagagcgaggatcgcgggtagaggtatcgggcgttcgtcgttcgtgtttcgttagcgttttttttaggcggtttgtcgcggcgtcgagcggtaggaagtagttacgtttaaatcggttttagttgttttagattaaattgttaggttatttcgcggggcggggtcggagggcggtggggcgggttttgacgttacgttcggcgtcgttttagttaatcggtagtcgcgtgcggggggtgcgggttcgcgcgtttttggaaagggttgacgtacgcggtcgagggcggtcgggtatttttcgtgttttcgttgttttttttagtcgatttcggcg

SEQ ID NO: 26892 - DNA, 685 bp, Artificial Sequence
  chemically treated genomic DNA (Homo sapiens) CpG-island No: 26892
cgccgaaatcgactaaaaaaaacaacgaaaacacgaaaaatacccgaccgccctcgaccgcgtacgtcaaccctttccaaaaacgcgcgaacccgcaccccccgcacgcgactaccgattaactaaaacgacgccgaacgtaacgtcaaaacccgccccaccgccctccgaccccgccccgcgaaataacctaacaatttaatctaaaacaactaaaaccgatttaaacgtaactacttcctaccgctcgacgccgcgacaaaccgcctaaaaaaaacgctaacgaaacacgaacgacgaacgcccgatacctctacccgcgatcctcgctctcgaacgaaacgacgacgacgcgaacctacgaactaacgaacccgaaaataaaacaacgaaccgaatacgaaaaccgaacgaccactcacgtaacgaactaaactatcaaaacgacccgaaacgcgacgaacctaaaacgtcgaaaccgaaacgcgaacgaaatcctcgaaccgaaccgaaccgaccactacccgcaaaaaaacgacgaccgaacgttcgctacgctaaatcgataactaaaacgcactcttcgacttttattattcactaccgcgcttctactaaactacctaaaacttaattcccttctaaaaaatacgtaaaacatttaaaaaataacaaaatacgtaaa

SEQ ID NO: 26893 - DNA, 799 bp, Artificial Sequence
  chemically treated genomic DNA (Homo sapiens) CpG-island No: 26893
  unsure (402)
ttcgagtcgttcggcgtggttcgttttgtttggatattattggtcgtttgagttgtttgttaggtcgtttcgttaagcgattgtttcgtagttcggagtttttggaagtagtttcgggaaatttcgcgtgttgtcgggatcgcgttttagtttattaggggggggagggggtggcgcgcgcgttatttttagtcgtttttaaagcgtttcgcgttgatttttacgggttcggttgtcggttttcgttttgttttggtgagtttcgcgtcggttcgtggggggaggggtcgggagtttcgatgcgattcgatttagttcgggtttcgtgtttggtttcgtttcgtttgcgtttcgaggtttcggggtgggggtggggacgggttgggggcggtttcggtttantttagacgttcggttgtgggtttatttcggtcgaaacgtttttcgttttcgtttttttttttttcgtttatatagttcgcggttcggttcgttgggcgtttttcgcgcggtttgatggggtcggtcgtgtttttttcgttttcgttcgttgttttatgcggtcggatttcgcgaagggtttgaggcgttcgcggttttgtcgttttttttcgtcggagtcgtttcgttttcgtcgcggtcggtttagttcgagagggatgtgttgatgattcggacgggtttgaggggatgggggtggggggcggaaggcggggtgtagattttagggttatttgagtcgggagaaaagttttgtgtgagtagaaatcgaaaggtcgatttgtgtgggaagtttttt

SEQ ID NO: 26894 - DNA, 799 bp, Artificial Sequence
  chemically treated genomic DNA (Homo sapiens) CpG-island No: 26894
  unsure (398)
aaaaaacttcccacacaaatcgacctttcgatttctactcacacaaaacttttctcccgactcaaataaccctaaaatctacaccccgccttccgccccccacccccatcccctcaaacccgtccgaatcatcaacacatccctctcgaactaaaccgaccgcgacgaaaacgaaacgactccgacgaaaaaaaacgacaaaaccgcgaacgcctcaaacccttcgcgaaatccgaccgcataaaacaacgaacgaaaacgaaaaaaacacgaccgaccccatcaaaccgcgcgaaaaacgcccaacgaaccgaaccgcgaactatataaacgaaaaaaaaaaaaacgaaaacgaaaaacgtttcgaccgaaataaacccacaaccgaacgtctaaantaaaccgaaaccgcccccaacccgtccccacccccaccccgaaacctcgaaacgcaaacgaaacgaaaccaaacacgaaacccgaactaaatcgaatcgcatcgaaactcccgacccctccccccacgaaccgacgcgaaactcaccaaaacaaaacgaaaaccgacaaccgaacccgtaaaaatcaacgcgaaacgctttaaaaacgactaaaaataacgcgcgcgccaccccctcccccccctaataaactaaaacgcgatcccgacaacacgcgaaatttcccgaaactacttccaaaaactccgaactacgaaacaatcgcttaacgaaacgacctaacaaacaactcaaacgaccaataatatccaaacaaaacgaaccacgccgaacgactcgaa

SEQ ID NO: 26895 - DNA, 799 bp, Artificial Sequence
  chemically treated genomic DNA (Homo sapiens) CpG-island No: 26895
  unsure (398)
gggaggttttttatataaatcggtttttcggtttttgtttatataaaatttttttttcggtttagataattttgggatttgtatttcgtttttcgttttttatttttatttttttaggttcgttcggattattagtatatttttttcgggttaggtcggtcgcggcgggagcgaagcggtttcggcggggagaagcggtagggtcgcgggcgttttaggtttttcgcgggattcggtcgtatggagtagcgagcggaggcgggaaaagtacggtcggttttattaggtcgcgcggagagcgtttaacgggtcggatcgcgggttatatgggcggggggaggaagagcgagggcgagaagcgtttcggtcgggataggtttatagtcgagcgtttggantagatcgaagtcgtttttagttcgtttttatttttatttcggggtttcggagcgtaaacgaaacgggattaggtacggagttcgggttgagtcgggtcgtatcggggttttcggtttttttttttacgggtcggcgcgagatttattagggtagagcgggggtcggtagtcgggttcgtgagaattagcgcgaggcgttttgaaaacgattagaaatggcgcgcgcgttatttttttttttttttgatggattgagacgcgatttcggtagtacgcggggtttttcggaattgtttttagggatttcgagttacggggtaatcgtttggcgaggcggtttgataggtagtttagacgattagtagtatttaggtaaaacggattacgtcggacgattcgag

SEQ ID NO: 26896 - DNA, 799 bp, Artificial Sequence
  chemically treated genomic DNA (Homo sapiens) CpG-island No: 26896
  unsure (402)
ctcgaatcgtccgacgtaatccgttttacctaaatactactaatcgtctaaactacctatcaaaccgcctcgccaaacgattaccccgtaactcgaaatccctaaaaacaattccgaaaaaccccgcgtactaccgaaatcgcgtctcaatccatcaaaaaaaaaaaaaaataacgcgcgcgccatttctaatcgttttcaaaacgcctcgcgctaattctcacgaacccgactaccgacccccgctctaccctaataaatctcgcgccgacccgtaaaaaaaaaaaccgaaaaccccgatacgacccgactcaacccgaactccgtacctaatcccgtttcgtttacgctccgaaaccccgaaataaaaataaaaacgaactaaaaacgacttcgatctantccaaacgctcgactataaacctatcccgaccgaaacgcttctcgccctcgctcttcctccccccgcccatataacccgcgatccgacccgttaaacgctctccgcgcgacctaataaaaccgaccgtacttttcccgcctccgctcgctactccatacgaccgaatcccgcgaaaaacctaaaacgcccgcgaccctaccgcttctccccgccgaaaccgcttcgctcccgccgcgaccgacctaacccgaaaaaaatatactaataatccgaacgaacctaaaaaaataaaaataaaaaacgaaaaacgaaatacaaatcccaaaattatctaaaccgaaaaaaaaattttatataaacaaaaaccgaaaaaccgatttatataaaaaacctccc

SEQ ID NO: 26897 - DNA, 611 bp, Artificial Sequence
  chemically treated genomic DNA (Homo sapiens) CpG-island No: 26897
tgttcgttacgattggcgtcggttcgagtttcggggcggttaagttggagtggcgcggttcgggttggggtttggtggggaagttcgcgggggcggcgatcgaatttatcgtggtcggagacgtggttgttttagggcgcgtggtcggcgggtcgcgtggcgtcgtcgagttgtaggaaaagtgttaggtagtggagggcgtttagcgttacggcgagcggggtttttatcgtgcgttttcgggtcgggggcgtcgtcgttttatatttgggtttcggagatcgtagaatcggcgttagttgttttttgttttgagcggtttggttgttcggtttcggtagttgtttttcgttcgttgttttcggattcggtttagtttttagttttcgttcggtttcggtttagtttcggttttggggagcgagcgtacgtttagtcggtcgttttcgattgcgggatttttttttttcgcggaaggttacgtcgggtcgtcgtcgtattttttttttttttttcgttttttttttttttttttttttttttttttttttttcgttcggagtaggcggcggagggatttgtcgtttgatttattattaaagttttgttta

SEQ ID NO: 26898 - DNA, 611 bp, Artificial Sequence
  chemically treated genomic DNA (Homo sapiens) CpG-island No: 26898
taaacaaaactttaataataaatcaaacgacaaatccctccgccgcctactccgaacgaaaaaaaaaaaaaaaaaaaaaaaaaaaaaaaaaaaacgaaaaaaaaaaaaaaaatacgacgacgacccgacgtaaccttccgcgaaaaaaaaaaatcccgcaatcgaaaacgaccgactaaacgtacgctcgctccccaaaaccgaaactaaaccgaaaccgaacgaaaactaaaaactaaaccgaatccgaaaacaacgaacgaaaaacaactaccgaaaccgaacaaccaaaccgctcaaaacaaaaaacaactaacgccgattctacgatctccgaaacccaaatataaaacgacgacgcccccgacccgaaaacgcacgataaaaaccccgctcgccgtaacgctaaacgccctccactacctaacacttttcctacaactcgacgacgccacgcgacccgccgaccacgcgccctaaaacaaccacgtctccgaccacgataaattcgatcgccgcccccgcgaacttccccaccaaaccccaacccgaaccgcgccactccaacttaaccgccccgaaactcgaaccgacgccaatcgtaacgaaca

SEQ ID NO: 26899 - DNA, 611 bp, Artificial Sequence
  chemically treated genomic DNA (Homo sapiens) CpG-island No: 26899
tgggtaaaattttgatgataaattaagcggtagattttttcgtcgtttgtttcgagcgggaggagggaggggaggagggaggggaggagggaggcggaaggaggaaggagggtgcggcggcggttcggcgtggtttttcgcggaagggaagagtttcgtagtcgaaggcggtcggttgggcgtgcgttcgttttttaaagtcggggttgggtcgaagtcgggcgagggttgggagttgggtcgggttcggggatagcgggcgaggggtagttgtcggagtcgggtagttaggtcgtttagggtaggggatagttggcgtcggttttgcggttttcggggtttagatgtgaggcggcggcgttttcggttcgagagcgtacgatgggggtttcgttcgtcgtagcgttgggcgttttttattatttggtattttttttgtaattcggcggcgttacgcggttcgtcggttacgcgttttgggataattacgttttcggttacggtgagttcggtcgtcgttttcgcggatttttttattaaattttaattcgggtcgcgttattttaatttggtcgtttcggggttcgaatcggcgttagtcgtggcgggta

SEQ ID NO: 26900 - DNA, 611 bp, Artificial Sequence
  chemically treated genomic DNA (Homo sapiens) CpG-island No: 26900
tacccgccacgactaacgccgattcgaaccccgaaacgaccaaattaaaataacgcgacccgaattaaaatttaataaaaaaatccgcgaaaacgacgaccgaactcaccgtaaccgaaaacgtaattatcccaaaacgcgtaaccgacgaaccgcgtaacgccgccgaattacaaaaaaaataccaaataataaaaaacgcccaacgctacgacgaacgaaacccccatcgtacgctctcgaaccgaaaacgccgccgcctcacatctaaaccccgaaaaccgcaaaaccgacgccaactatcccctaccctaaacgacctaactacccgactccgacaactacccctcgcccgctatccccgaacccgacccaactcccaaccctcgcccgacttcgacccaaccccgactttaaaaaacgaacgcacgcccaaccgaccgccttcgactacgaaactcttcccttccgcgaaaaaccacgccgaaccgccgccgcaccctccttcctccttccgcctccctcctcccctccctcctcccctccctcctcccgctcgaaacaaacgacgaaaaaatctaccgcttaatttatcatcaaaattttaccca

SEQ ID NO: 26901 - DNA, 913 bp, Artificial Sequence
  chemically treated genomic DNA (Homo sapiens) CpG-island No: 26901
gagtgcgcgcgtgtgtacgagcgtgtgcgcgttttttaggggttttatgtttagatacggggaggtgtgtacgagggagatgtgagacgtttgtggggataggttgtgtgtgtgagattttcgttacgcgatgtattcggttcgggttattaggaggttcgggtgggcgtgggttaggtgtgcgtagtttttcgtggagcgtgtggacgcgtgtgttagttttcggtggttagtgttattcggggggaagtgtatatgtaggttggcgtgtatgtgagtataaagcggtcgaggagtgtgtgtttattacggtttttcgtcggggttttttttcgaggaaggagtgagtatgtgaggaggatttcgttgtgatcggcggggacgtcgacggttaagttttttagcggcgtgtgtgtgagaaggtcgggttcgttgaggaacgtcgcgcggggtcgatcggcgcgcgtttgtgcgcgtgcgtgtgcgcgtggggcgcggcgcgcgtcgcgtcggagggagggaggttgttagttcggattcggtcgtagcgttcggggcggttttttttcgagtttgggatcgtcgcgttttcgtcgtcgtcgcgtgttggcgtgattttcggttcgtgtcgcgttttttcgcgttcgtagtcggttcggttttttgtttatttagacgtcgtttttttcgggttttcggtgtcggtttcgcgcggagggagaggaaatgagtgcggcggtttcgtcggcgtcggagcggggttggaagagcgagaaattagatgaggtttaggttttggcgcggagttgcgtcgttcgtagattcgatttttagtcgtgcgacgggttgtttatttgtgttacgtatagttatggtaagtgttttaagttgtattggtgttgttatttaggat

SEQ ID NO: 26902 - DNA, 913 bp, Artificial Sequence
  chemically treated genomic DNA (Homo sapiens) CpG-island No: 26902
atcctaaataacaacaccaatacaacttaaaacacttaccataactatacgtaacacaaataaacaacccgtcgcacgactaaaaatcgaatctacgaacgacgcaactccgcgccaaaacctaaacctcatctaatttctcgctcttccaaccccgctccgacgccgacgaaaccgccgcactcatttcctctccctccgcgcgaaaccgacaccgaaaacccgaaaaaaacgacgtctaaataaacaaaaaaccgaaccgactacgaacgcgaaaaaacgcgacacgaaccgaaaatcacgccaacacgcgacgacgacgaaaacgcgacgatcccaaactcgaaaaaaaaccgccccgaacgctacgaccgaatccgaactaacaacctccctccctccgacgcgacgcgcgccgcgccccacgcgcacacgcacgcgcacaaacgcgcgccgatcgaccccgcgcgacgttcctcaacgaacccgaccttctcacacacacgccgctaaaaaacttaaccgtcgacgtccccgccgatcacaacgaaatcctcctcacatactcactccttcctcgaaaaaaaaccccgacgaaaaaccgtaataaacacacactcctcgaccgctttatactcacatacacgccaacctacatatacacttccccccgaataacactaaccaccgaaaactaacacacgcgtccacacgctccacgaaaaactacgcacacctaacccacgcccacccgaacctcctaataacccgaaccgaatacatcgcgtaacgaaaatctcacacacacaacctatccccacaaacgtctcacatctccctcgtacacacctccccgtatctaaacataaaacccctaaaaaacgcgcacacgctcgtacacacgcgcgcactc

SEQ ID NO: 26903 - DNA, 913 bp, Artificial Sequence
  chemically treated genomic DNA (Homo sapiens) CpG-island No: 26903
attttaggtgatagtattagtgtagtttgaagtatttgttatggttgtgcgtggtatagatagatagttcgtcgtacggttggaagtcgggtttgcgggcggcgtaatttcgcgttagggtttgagttttatttagtttttcgtttttttaatttcgtttcgacgtcggcgaggtcgtcgtatttatttttttttttttcgcgcggagtcgatatcgggagttcgggagaagcgacgtttgggtgggtaggaagtcgagtcggttgcggacgcgggagggcgcggtacgggtcgggagttacgttagtacgcggcggcggcgggagcgcggcggttttaggttcgaggaggagtcgtttcgggcgttgcgatcgggttcgggttggtagttttttttttttcggcgcggcgcgcgtcgcgttttacgcgtatacgtacgcgtataggcgcgcgtcggtcggtttcgcgcgacgttttttagcgagttcggtttttttatatatacgtcgttggggagtttggtcgtcggcgttttcgtcggttatagcgaggttttttttatatatttatttttttttcggagaaagatttcgacggagggtcgtggtgaatatatatttttcggtcgttttgtatttatatgtacgttagtttatatatgtattttttttcgagtgatattggttatcgagaattgatatacgcgtttatacgttttacggagggttgcgtatatttggtttacgtttattcgaattttttagtggttcgggtcgggtgtatcgcgtagcgaggattttatatatatagtttgtttttataggcgttttatatttttttcgtatatattttttcgtgtttgggtatggagtttttgggaggcgcgtatacgttcgtgtatacgcgcgtattt

SEQ ID NO: 26904 - DNA, 913 bp, Artificial Sequence
  chemically treated genomic DNA (Homo sapiens) CpG-island No: 26904
aaatacgcgcgtatacacgaacgtatacgcgcctcccaaaaactccatacccaaacacgaaaaaatatatacgaaaaaaatataaaacgcctataaaaacaaactatatatataaaatcctcgctacgcgatacacccgacccgaaccactaaaaaattcgaataaacgtaaaccaaatatacgcaaccctccgtaaaacgtataaacgcgtatatcaattctcgataaccaatatcactcgaaaaaaaatacatatataaactaacgtacatataaatacaaaacgaccgaaaaatatatattcaccacgaccctccgtcgaaatctttctccgaaaaaaaaataaatatataaaaaaaacctcgctataaccgacgaaaacgccgacgaccaaactccccaacgacgtatatataaaaaaaccgaactcgctaaaaaacgtcgcgcgaaaccgaccgacgcgcgcctatacgcgtacgtatacgcgtaaaacgcgacgcgcgccgcgccgaaaaaaaaaaaactaccaacccgaacccgatcgcaacgcccgaaacgactcctcctcgaacctaaaaccgccgcgctcccgccgccgccgcgtactaacgtaactcccgacccgtaccgcgccctcccgcgtccgcaaccgactcgacttcctacccacccaaacgtcgcttctcccgaactcccgatatcgactccgcgcgaaaaaaaaaaaaataaatacgacgacctcgccgacgtcgaaacgaaattaaaaaaacgaaaaactaaataaaactcaaaccctaacgcgaaattacgccgcccgcaaacccgacttccaaccgtacgacgaactatctatctataccacgcacaaccataacaaatacttcaaactacactaatactatcacctaaaat

SEQ ID NO: 26905 - DNA, 518 bp, Artificial Sequence
  chemically treated genomic DNA (Homo sapiens) CpG-island No: 26905
tcgtttatttttggttttcgttttcgcggggtttcgatttttgttttaggattcggtttttcgcgtttcgtttcgttcggtggtcgcgcgttcgtttatttggtatagtaggtttttcgcgtagtcggcgtacgcggtttattcggcggcgtttacgcggttcgttagggtttagaagcggcgggttagttcggcgtcgcgttttttatcgtagtagtcgaagttcgagtattgcgcgtagaggcgtagcggttgcgtcggtcggaagggcggtttgaagtttaggtattgcggatgcgcggcggtttcgagtatttaaagcgttagtagcgtttcggttttggttcgggttatcgttacgtttcgcgggggaagaggcggagggacggtagtttcggttttttttcggggcgttcgcggcggtagggaaggggcgggcgttttttttttttatacgtagggtttcgagtttggggatttttttttttaggaggttatttttggtcggggatattcgg

SEQ ID NO: 26906 - DNA, 518 bp, Artificial Sequence
  chemically treated genomic DNA (Homo sapiens) CpG-island No: 26906
ccgaatatccccgaccaaaaataacctcctaaaaaaaaaaatccccaaactcgaaaccctacgtataaaaaaaaaaaacgcccgccccttccctaccgccgcgaacgccccgaaaaaaaaccgaaactaccgtccctccgcctcttcccccgcgaaacgtaacgataacccgaaccaaaaccgaaacgctactaacgctttaaatactcgaaaccgccgcgcatccgcaatacctaaacttcaaaccgcccttccgaccgacgcaaccgctacgcctctacgcgcaatactcgaacttcgactactacgataaaaaacgcgacgccgaactaacccgccgcttctaaaccctaacgaaccgcgtaaacgccgccgaataaaccgcgtacgccgactacgcgaaaaacctactataccaaataaacgaacgcgcgaccaccgaacgaaacgaaacgcgaaaaaccgaatcctaaaacaaaaatcgaaaccccgcgaaaacgaaaaccaaaaataaacga

SEQ ID NO: 26907 - DNA, 518 bp, Artificial Sequence
  chemically treated genomic DNA (Homo sapiens) CpG-island No: 26907
tcgagtgttttcgattagaggtgattttttagaaggggaggtttttaaattcgaggttttgcgtgtagggaaggggagcgttcgttttttttttgtcgtcgcgagcgtttcgggaggggatcggggttgtcgttttttcgttttttttttcgcggggcgtagcgatggttcgggttagggtcggggcgttgttggcgttttgggtgttcggggtcgtcgcgtattcgtagtgtttggattttaggtcgttttttcggtcgacgtagtcgttgcgtttttgcgcgtagtattcggatttcggttgttgcgatgaggggcgcgacgtcgagttgattcgtcgtttttgggttttggcgagtcgcgtggacgtcgtcgagtgggtcgcgtgcgtcggttacgcgagggatttgttgtgttaggtgagcgggcgcgcggttatcgggcggggcggggcgcgggaggtcgagttttggagtagagatcggaatttcgcgggggcgagggttaagagtgggcgg

SEQ ID NO: 26908 - DNA, 518 bp, Artificial Sequence
  chemically treated genomic DNA (Homo sapiens) CpG-island No: 26908
ccgcccactcttaaccctcgcccccgcgaaattccgatctctactccaaaactcgacctcccgcgccccgccccgcccgataaccgcgcgcccgctcacctaacacaacaaatccctcgcgtaaccgacgcacgcgacccactcgacgacgtccacgcgactcgccaaaacccaaaaacgacgaatcaactcgacgtcgcgcccctcatcgcaacaaccgaaatccgaatactacgcgcaaaaacgcaacgactacgtcgaccgaaaaaacgacctaaaatccaaacactacgaatacgcgacgaccccgaacacccaaaacgccaacaacgccccgaccctaacccgaaccatcgctacgccccgcgaaaaaaaaaacgaaaaaacgacaaccccgatcccctcccgaaacgctcgcgacgacaaaaaaaaaacgaacgctccccttccctacacgcaaaacctcgaatttaaaaacctccccttctaaaaaatcacctctaatcgaaaacactcga

SEQ ID NO: 26909 - DNA, 555 bp, Artificial Sequence
  chemically treated genomic DNA (Homo sapiens) CpG-island No: 26909
tcgcgtgcgcggatttgatttcgttgtaggtttcgggggagggattttttttcgtttcgtttcgtttcgtttgttggcggtagacgcgtcgtaaatgcgttttggggatcggaggataacgagatagatttataggtagtgggaagttcgggggtttcgcgaggtcgtcggtggggagttttgtggtcggttcggcgttttcggatttcggcgtttaggttttagtgggagatttttttattttttttagtggtttttatttcgcgaattgtagattatttttcgaattttagggatttagcggtcgagtgagcggaggtggagcggggtttcgagcgtcgtttcgggtagggggtaggttttcggagttttcgttttatcggggtagagagtattgatcgcgttgcgggacgcggttggtaaggttttggttttgtaggggcgcggacgttagcgtttagtttagttttgggttaggagtggagacgtagtttcgtcgcgtgtttcggtaggggattcgggtggggacgggggcggaggagtttgggggtaggg

SEQ ID NO: 26910 - DNA, 555 bp, Artificial Sequence
  chemically treated genomic DNA (Homo sapiens) CpG-island No: 26910
ccctacccccaaactcctccgcccccgtccccacccgaatcccctaccgaaacacgcgacgaaactacgtctccactcctaacccaaaactaaactaaacgctaacgtccgcgcccctacaaaaccaaaaccttaccaaccgcgtcccgcaacgcgatcaatactctctaccccgataaaacgaaaactccgaaaacctaccccctacccgaaacgacgctcgaaaccccgctccacctccgctcactcgaccgctaaatccctaaaattcgaaaaataatctacaattcgcgaaataaaaaccactaaaaaaaataaaaaaatctcccactaaaacctaaacgccgaaatccgaaaacgccgaaccgaccacaaaactccccaccgacgacctcgcgaaacccccgaacttcccactacctataaatctatctcgttatcctccgatccccaaaacgcatttacgacgcgtctaccgccaacaaacgaaacgaaacgaaacgaaaaaaaatccctcccccgaaacctacaacgaaatcaaatccgcgcacgcga

SEQ ID NO: 26911 - DNA, 555 bp, Artificial Sequence
  chemically treated genomic DNA (Homo sapiens) CpG-island No: 26911
ttttgtttttaggttttttcgttttcgtttttattcgggttttttgtcggagtacgcggcggggttgcgtttttatttttagtttagggttgagttaaacgttggcgttcgcgtttttgtagggttagggttttgttagtcgcgtttcgtagcgcggttagtattttttgtttcgatggggcgagagtttcgggaatttgttttttgttcggagcggcgttcggagtttcgttttattttcgtttattcgatcgttaaatttttgggattcgggagataatttgtaattcgcggggtggaaattattgggaagggtgggaaggttttttattggggtttgaacgtcggggttcgggggcgtcgagtcggttatagaattttttatcggcggtttcgcgggattttcgggttttttattgtttgtaagtttgtttcgttatttttcggtttttaaagcgtatttacggcgcgtttatcgttagtaggcggggcggggcggggcgggggggggtttttttttcggaatttgtaacgagattaaattcgcgtacgcga

SEQ ID NO: 26912 - DNA, 555 bp, Artificial Sequence
  chemically treated genomic DNA (Homo sapiens) CpG-island No: 26912
tcgcgtacgcgaatttaatctcgttacaaattccgaaaaaaaaacccccccccgccccgccccgccccgcctactaacgataaacgcgccgtaaatacgctttaaaaaccgaaaaataacgaaacaaacttacaaacaataaaaaacccgaaaatcccgcgaaaccgccgataaaaaattctataaccgactcgacgcccccgaaccccgacgttcaaaccccaataaaaaaccttcccacccttcccaataatttccaccccgcgaattacaaattatctcccgaatcccaaaaatttaacgatcgaataaacgaaaataaaacgaaactccgaacgccgctccgaacaaaaaacaaattcccgaaactctcgccccatcgaaacaaaaaatactaaccgcgctacgaaacgcgactaacaaaaccctaaccctacaaaaacgcgaacgccaacgtttaactcaaccctaaactaaaaataaaaacgcaaccccgccgcgtactccgacaaaaaacccgaataaaaacgaaaacgaaaaaacctaaaaacaaaa

SEQ ID NO: 26913 - DNA, 1695 bp, Artificial Sequence
  chemically treated genomic DNA (Homo sapiens) CpG-island No: 26913
ggcgtcgtcgttcggatcgtgggtatttgtttatttggggagagggaagaggatcggggacgcgggtcggggagggggttcgattgttattttcgcgcgtcgtttttaagggaagttcggttttattttttttatcgttttttttttcgtagtcgtatttgtattttaaaagcgttttgtagttttgggattggttaaggtcgcgtttttcgggcgtagaaatttgaatcgtcgggagtcggtcgcgggcgggggtcggaaatttcgcggatggatcgtattatcgtcgtagtttttttcgcgcgcgtttcgtttttttcgtatattttcggagcggtttaatcgttcggtcgggagggcgggatcgcggtcggaacgcgtttttgagagggtattggacgggcgggcgtatcgcgtagggggacggcgggggtcgcgtttttgttttttagtcgttttcgggggcggggtcgggtttcggagattcgtttatttttcgttcggggtgggcggggcggcgggggtttcgggagttgggtcgggggcgggttttcgtttgtttttttagaattttgagagcgttcggtatcgcggtcgtcgacgtagtagtcgttttcgttcgttaatttcgaggcgcgcgggttttcgggcggtttcggcgggcgcggcgagagggacgcgttaggcggcgcggggcgggtcgtacgcgttttcggtcgtttttcgttcgcgcgcggatcggtttagcggagtttcggcgcggggaagcgtcggtcgggcgagggcgagggcgatgtcgcggtgacggtttcgttatggttaagttcgcggcgacggcggcggcggcgtcggaggagttgagttaggtgtcggacgaggagttgttgcgttggagtaaggaggagttggcgcggcggttgcggcgcgtcgagggcgagaaggtgggttttatgttggagtacggcggtttgatgcgcgacgtgaatcggcggttgtagtagtatttgttggagattcgcggttttaaggacgtgaattagcggttgtaggacgataattaggagttgcgcgagttttgttgttttttcgacgacgatcggtagaaggggcgtaagttggcgcgcgagtggtagcgtttcgggcgttacgcggtcggcgtcgtgtggtacgaggtggttcgttcgtagtagaagttgcgcgagttcgaggcgcgttaggaggttttgttgcgcgagaatttggagtttaaggagttggtgttgttgttggacgaggagcgcgcggtattggcggcgacgggggtcgtaagcggtggcggcggcggcgggggcggcgtcggttttcgtagttttatcgatagttaggttagtttgagcgggtcgttgtcgggtggcgcgttcggcgcgggggttcgcgacgtgggcgacggtagtagtacgtttagcgcgggtagcggcggtagtttcgattattattattacgttttattttcgttgttgtttttcgggtcgtataaggttttcgacggtaaggtaggagttatacgtcggtttttggacgatttgtcggcgtcgtcgtattatcgtagtatttttaacggtttgtacggtaaggattatacgggtcgggtagcgcgggtttttttggttgtagttttttttttaggttgcggcgagaggaggtggtttttggttg

SEQ ID NO: 26914 - DNA, 1695 bp, Artificial Sequence
  chemically treated genomic DNA (Homo sapiens) CpG-island No: 26914
caaccaaaaaccacctcctctcgccgcaacctaaaaaaaaaactacaaccaaaaaaacccgcgctacccgacccgtataatccttaccgtacaaaccgttaaaaatactacgataatacgacgacgccgacaaatcgtccaaaaaccgacgtataactcctaccttaccgtcgaaaaccttatacgacccgaaaaacaacaacgaaaataaaacgtaataataataatcgaaactaccgccgctacccgcgctaaacgtactactaccgtcgcccacgtcgcgaacccccgcgccgaacgcgccacccgacaacgacccgctcaaactaacctaactatcgataaaactacgaaaaccgacgccgcccccgccgccgccgccaccgcttacgacccccgtcgccgccaataccgcgcgctcctcgtccaacaacaacaccaactccttaaactccaaattctcgcgcaacaaaacctcctaacgcgcctcgaactcgcgcaacttctactacgaacgaaccacctcgtaccacacgacgccgaccgcgtaacgcccgaaacgctaccactcgcgcgccaacttacgccccttctaccgatcgtcgtcgaaaaaacaacaaaactcgcgcaactcctaattatcgtcctacaaccgctaattcacgtccttaaaaccgcgaatctccaacaaatactactacaaccgccgattcacgtcgcgcatcaaaccgccgtactccaacataaaacccaccttctcgccctcgacgcgccgcaaccgccgcgccaactcctccttactccaacgcaacaactcctcgtccgacacctaactcaactcctccgacgccgccgccgccgtcgccgcgaacttaaccataacgaaaccgtcaccgcgacatcgccctcgccctcgcccgaccgacgcttccccgcgccgaaactccgctaaaccgatccgcgcgcgaacgaaaaacgaccgaaaacgcgtacgacccgccccgcgccgcctaacgcgtccctctcgccgcgcccgccgaaaccgcccgaaaacccgcgcgcctcgaaattaacgaacgaaaacgactactacgtcgacgaccgcgataccgaacgctctcaaaattctaaaaaaacaaacgaaaacccgcccccgacccaactcccgaaacccccgccgccccgcccaccccgaacgaaaaataaacgaatctccgaaacccgaccccgcccccgaaaacgactaaaaaacaaaaacgcgacccccgccgtccccctacgcgatacgcccgcccgtccaataccctctcaaaaacgcgttccgaccgcgatcccgccctcccgaccgaacgattaaaccgctccgaaaatatacgaaaaaaacgaaacgcgcgcgaaaaaaactacgacgataatacgatccatccgcgaaatttccgacccccgcccgcgaccgactcccgacgattcaaatttctacgcccgaaaaacgcgaccttaaccaatcccaaaactacaaaacgcttttaaaatacaaatacgactacgaaaaaaaaaacgataaaaaaaataaaaccgaacttcccttaaaaacgacgcgcgaaaataacaatcgaaccccctccccgacccgcgtccccgatcctcttccctctccccaaataaacaaatacccacgatccgaacgacgacgcc

SEQ ID NO: 26915 - DNA, 1695 bp, Artificial Sequence
  chemically treated genomic DNA (Homo sapiens) CpG-island No: 26915
tagttagggattattttttttcgtcgtagtttgggaaaagggttgtagttagggagattcgcgttgttcggttcgtgtagtttttatcgtgtaggtcgttggggatgttgcggtggtgcggcggcgtcgataagtcgtttagggatcgacgtgtggtttttgttttgtcgtcgggggttttgtgcggttcggggggtagtagcgggggtgggacgtggtggtggtggtcggggttgtcgtcgttgttcgcgttggacgtattgttgtcgtcgtttacgtcgcgggttttcgcgtcgggcgcgttattcgatagcggttcgtttaggttggtttggttgtcgatggagttgcgggagtcggcgtcgttttcgtcgtcgtcgttatcgtttgcggttttcgtcgtcgttagtgtcgcgcgtttttcgtttagtagtagtattagttttttgagttttaggttttcgcgtagtagggttttttggcgcgtttcgagttcgcgtagtttttgttgcgagcgggttatttcgtgttatacggcgtcggtcgcgtggcgttcgaagcgttgttattcgcgcgttagtttgcgttttttttgtcggtcgtcgtcgaggaagtagtagagttcgcgtagtttttggttgtcgttttgtagtcgttggtttacgtttttgaggtcgcggatttttagtaggtgttgttgtagtcgtcggtttacgtcgcgtattaggtcgtcgtgttttagtatgaggtttattttttcgttttcggcgcgtcgtagtcgtcgcgttagtttttttttgttttagcgtagtagtttttcgttcggtatttggtttagttttttcgacgtcgtcgtcgtcgtcgtcgcgggtttagttatggcggggtcgttatcgcggtatcgttttcgttttcgttcggtcggcgttttttcgcgtcggggtttcgttgggtcggttcgcgcgcgggcggggggcggtcgggggcgcgtgcggttcgtttcgcgtcgtttggcgcgtttttttcgtcgcgttcgtcggggtcgttcgggagttcgcgcgtttcggggttgacgagcggaggcggttgttgcgtcggcggtcgcggtgtcgggcgtttttagggttttggagaagtaggcggaggttcgttttcggtttagttttcggagttttcgtcgtttcgtttatttcgggcggagagtgggcgggttttcgaggttcggtttcgttttcgagggcgattggggagtagaggcgcggttttcgtcgtttttttgcgcggtgcgttcgttcgtttagtgtttttttagaggcgcgtttcggtcgcggtttcgttttttcggtcgggcgattgggtcgtttcgggggtgtgcgggaggggcggggcgcgcgcgggggaagttgcggcggtggtacggtttattcgcggggttttcgattttcgttcgcggtcggttttcggcggtttaagtttttgcgttcggaggacgcggttttagttaattttagggttatagggcgtttttaaaatgtaggtacggttgcggggagggggacggtgggaaaggtagggtcgggttttttttaaaggcgacgcgcgaaaatagtagtcgagtttttttttcggttcgcgttttcggtttttttttttttttttagataaataaatatttacgattcgggcgacggcgtt

SEQ ID NO: 26916 - DNA, 1695 bp, Artificial Sequence
  chemically treated genomic DNA (Homo sapiens) CpG-island No: 26916
aacgccgtcgcccgaatcgtaaatatttatttatctaaaaaaaaaaaaaaaaaccgaaaacgcgaaccgaaaaaaaaactcgactactattttcgcgcgtcgcctttaaaaaaaacccgaccctacctttcccaccgtccccctccccgcaaccgtacctacattttaaaaacgccctataaccctaaaattaactaaaaccgcgtcctccgaacgcaaaaacttaaaccgccgaaaaccgaccgcgaacgaaaatcgaaaaccccgcgaataaaccgtaccaccgccgcaacttcccccgcgcgcgccccgcccctcccgcacacccccgaaacgacccaatcgcccgaccgaaaaaacgaaaccgcgaccgaaacgcgcctctaaaaaaacactaaacgaacgaacgcaccgcgcaaaaaaacgacgaaaaccgcgcctctactccccaatcgccctcgaaaacgaaaccgaacctcgaaaacccgcccactctccgcccgaaataaacgaaacgacgaaaactccgaaaactaaaccgaaaacgaacctccgcctacttctccaaaaccctaaaaacgcccgacaccgcgaccgccgacgcaacaaccgcctccgctcgtcaaccccgaaacgcgcgaactcccgaacgaccccgacgaacgcgacgaaaaaaacgcgccaaacgacgcgaaacgaaccgcacgcgcccccgaccgccccccgcccgcgcgcgaaccgacccaacgaaaccccgacgcgaaaaaacgccgaccgaacgaaaacgaaaacgataccgcgataacgaccccgccataactaaacccgcgacgacgacgacgacgacgtcgaaaaaactaaaccaaataccgaacgaaaaactactacgctaaaacaaaaaaaaactaacgcgacgactacgacgcgccgaaaacgaaaaaataaacctcatactaaaacacgacgacctaatacgcgacgtaaaccgacgactacaacaacacctactaaaaatccgcgacctcaaaaacgtaaaccaacgactacaaaacgacaaccaaaaactacgcgaactctactacttcctcgacgacgaccgacaaaaaaaacgcaaactaacgcgcgaataacaacgcttcgaacgccacgcgaccgacgccgtataacacgaaataacccgctcgcaacaaaaactacgcgaactcgaaacgcgccaaaaaaccctactacgcgaaaacctaaaactcaaaaaactaatactactactaaacgaaaaacgcgcgacactaacgacgacgaaaaccgcaaacgataacgacgacgacgaaaacgacgccgactcccgcaactccatcgacaaccaaaccaacctaaacgaaccgctatcgaataacgcgcccgacgcgaaaacccgcgacgtaaacgacgacaacaatacgtccaacgcgaacaacgacgacaaccccgaccaccaccaccacgtcccacccccgctactaccccccgaaccgcacaaaacccccgacgacaaaacaaaaaccacacgtcgatccctaaacgacttatcgacgccgccgcaccaccgcaacatccccaacgacctacacgataaaaactacacgaaccgaacaacgcgaatctccctaactacaacccttttcccaaactacgacgaaaaaaaataatccctaacta

SEQ ID NO: 26917 - DNA, 1299 bp, Artificial Sequence
  chemically treated genomic DNA (Homo sapiens) CpG-island No: 26917
ttaacggaatttgggcgcgtaggcggggttcgggtcgagattcgtttaattaaagttttggcgggggcgaacgtagttagttgcgatatcgtggttggcggcggttgagtcggtcgtttttgttttcgggagttgttagtttattggttggggaggatttcgaacggaacgtcggttgggtggcggggcggggtcgcgtttatgcgttcgaagcgtgggttaatgaacggcggcggttgcggttcgggggcggggttcggggcgggaggagaagcgttgggtcgcggtcgcggggtcgttttaggttgtcgtttcgtttttttcgttcggtcgtcgtcgtcgttatcgtcgttatcgtttgggggttggttgaggcggacggcggggttcgggtcggagtacgtcgttttcgttgcgttaggggaagcgggtaggtgagtgttggcggcggtttttgcgttcgcgcggttcgcggggggaaattcgcgtcgcgttttcgagttttgcgaggtcgtttttcgttttggttagcgtttttcggtcgaagttcggttcgcgttttcgttagggttttcgtcggtcgttgtggtttcggggtttgaaggggtaggtgtgcgttcgggggttagggcgaggagggttcggcggggtcggagggcgtcggtcggtttttgttcgggcgttttgcggggcgagaggcgcgcgttcgtcgttgttttgttttttttggcgtttacgttttcgggtttcgcgttattcggtttcgaggtggtgttaggtgtaggtagcgtttttttcgagtttgtttcgttgttttcggttttcgcgtttgttttcgggtggggttcgggtttttcgcgttagtcggttcggttttgcgcgcggtcgggtcgcgtttttattttttttttttttttcgttatttcgttgttcggggaaggttgtgcggttttatgtttttttttgcgagttttcggtgtttattagggtgttcggggattagttttcgttttttttcgcgtcgtttagttaggaagacggacgtaggaaataggtcgtttttttttttacgcgtttttggtcgtgttttatacgcgtagtgttttattagggagaggtaattcggtgttttagagtttgttatttcggcgttaatttttttttttcgtggttttagttcggcgatgtaatttttgttttttttcggtttttatttgggaaaaggagttgatagtgacgcgcgtttttggttgcggggtttatttttgttcggtcggtgttgggaggagggtattttag

SEQ ID NO: 26918 - DNA, 1299 bp, Artificial Sequence
  chemically treated genomic DNA (Homo sapiens) CpG-island No: 26918
ctaaaataccctcctcccaacaccgaccgaacaaaaataaaccccgcaaccaaaaacgcgcgtcactatcaactccttttcccaaataaaaaccgaaaaaaaacaaaaattacatcgccgaactaaaaccacgaaaaaaaaaaattaacgccgaaataacaaactctaaaacaccgaattacctctccctaataaaacactacgcgtataaaacacgaccaaaaacgcgtaaaaaaaaaaacgacctatttcctacgtccgtcttcctaactaaacgacgcgaaaaaaaacgaaaactaatccccgaacaccctaataaacaccgaaaactcgcaaaaaaaaacataaaaccgcacaaccttccccgaacaacgaaataacgaaaaaaaaaaaaaaaataaaaacgcgacccgaccgcgcgcaaaaccgaaccgactaacgcgaaaaacccgaaccccacccgaaaacaaacgcgaaaaccgaaaacaacgaaacaaactcgaaaaaaacgctacctacacctaacaccacctcgaaaccgaataacgcgaaacccgaaaacgtaaacgccaaaaaaaacaaaacaacgacgaacgcgcgcctctcgccccgcaaaacgcccgaacaaaaaccgaccgacgccctccgaccccgccgaaccctcctcgccctaacccccgaacgcacacctaccccttcaaaccccgaaaccacaacgaccgacgaaaaccctaacgaaaacgcgaaccgaacttcgaccgaaaaacgctaaccaaaacgaaaaacgacctcgcaaaactcgaaaacgcgacgcgaatttccccccgcgaaccgcgcgaacgcaaaaaccgccgccaacactcacctacccgcttcccctaacgcaacgaaaacgacgtactccgacccgaaccccgccgtccgcctcaaccaacccccaaacgataacgacgataacgacgacgacgaccgaacgaaaaaaacgaaacgacaacctaaaacgaccccgcgaccgcgacccaacgcttctcctcccgccccgaaccccgcccccgaaccgcaaccgccgccgttcattaacccacgcttcgaacgcataaacgcgaccccgccccgccacccaaccgacgttccgttcgaaatcctccccaaccaataaactaacaactcccgaaaacaaaaacgaccgactcaaccgccgccaaccacgatatcgcaactaactacgttcgcccccgccaaaactttaattaaacgaatctcgacccgaaccccgcctacgcgcccaaattccgttaa

SEQ ID NO: 26919 - DNA, 1299 bp, Artificial Sequence
  chemically treated genomic DNA (Homo sapiens) CpG-island No: 26919
ttgaaatgttttttttttaatatcggtcgggtaggggtgagtttcgtagttaggggcgcgcgttattgttagtttttttttttaagtggagatcgggaaaagataagagttgtatcgtcgggttggagttacgaggaggaagagttaacgtcggaatgataaattttaaagtatcgaattgtttttttttagtagggtattgcgcgtgtggagtacggttaggggcgcgtgggaagaaagacgatttattttttacgttcgtttttttaattggacggcgcgggaggaggcgggggttggttttcgggtattttggtgggtatcgagaattcgtagagaggaatataaaatcgtatagtttttttcgagtagcggggtgacgggaggaaggaaggaaatgggagcgcgattcggtcgcgcgtagagtcgagtcgattagcgcgaggggttcgggttttattcgagagtaggcgcgagggtcggggatagcggggtaagttcggggagagcgttgtttgtatttggtattatttcgagatcgggtggcgcggggttcgggagcgtgggcgttagaggggatagggtagcggcgagcgcgcgtttttcgtttcgtagggcgttcgggtagaggtcgatcggcgtttttcgatttcgtcgggtttttttcgttttggttttcgagcgtatatttgtttttttaagtttcggggttatagcggtcggcggggattttggcgggggcgcgggtcggatttcggtcgaggggcgttggttagggcgagggacggtttcgtagagttcggagacgcggcgcgagttttttttcgcgggtcgcgcgggcgtagagatcgtcgttagtatttatttgttcgttttttttagcgtagcgggaacgacgtatttcggttcggatttcgtcgttcgttttaattaatttttaggcggtggcggcggtggcggcggcggcggtcggacgggaggggcgggacggtagtttgagacggtttcgcgatcgcggtttaacgttttttttttcgtttcggatttcgttttcgggtcgtagtcgtcgtcgtttattggtttacgtttcggacgtatgggcgcggtttcgtttcgttatttagtcggcgtttcgttcggggttttttttagttagtgggttggtagttttcgggggtaagagcggtcggtttagtcgtcgttaattacgatgtcgtaattggttgcgttcgttttcgttagagttttgattggacgaatttcgattcgggtttcgtttacgcgtttaagtttcgttag

SEQ ID NO: 26920 - DNA, 1299 bp, Artificial Sequence
  chemically treated genomic DNA (Homo sapiens) CpG-island No: 26920
ctaacgaaacttaaacgcgtaaacgaaacccgaatcgaaattcgtccaatcaaaactctaacgaaaacgaacgcaaccaattacgacatcgtaattaacgacgactaaaccgaccgctcttacccccgaaaactaccaacccactaactaaaaaaaaccccgaacgaaacgccgactaaataacgaaacgaaaccgcgcccatacgtccgaaacgtaaaccaataaacgacgacgactacgacccgaaaacgaaatccgaaacgaaaaaaaaaacgttaaaccgcgatcgcgaaaccgtctcaaactaccgtcccgcccctcccgtccgaccgccgccgccgccaccgccgccaccgcctaaaaattaattaaaacgaacgacgaaatccgaaccgaaatacgtcgttcccgctacgctaaaaaaaacgaacaaataaatactaacgacgatctctacgcccgcgcgacccgcgaaaaaaaactcgcgccgcgtctccgaactctacgaaaccgtccctcgccctaaccaacgcccctcgaccgaaatccgacccgcgcccccgccaaaatccccgccgaccgctataaccccgaaacttaaaaaaacaaatatacgctcgaaaaccaaaacgaaaaaaacccgacgaaatcgaaaaacgccgatcgacctctacccgaacgccctacgaaacgaaaaacgcgcgctcgccgctaccctatcccctctaacgcccacgctcccgaaccccgcgccacccgatctcgaaataataccaaatacaaacaacgctctccccgaacttaccccgctatccccgaccctcgcgcctactctcgaataaaacccgaacccctcgcgctaatcgactcgactctacgcgcgaccgaatcgcgctcccatttccttccttcctcccgtcaccccgctactcgaaaaaaactatacgattttatattcctctctacgaattctcgatacccaccaaaatacccgaaaaccaacccccgcctcctcccgcgccgtccaattaaaaaaacgaacgtaaaaaataaatcgtctttcttcccacgcgcccctaaccgtactccacacgcgcaataccctactaaaaaaaaacaattcgatactttaaaatttatcattccgacgttaactcttcctcctcgtaactccaacccgacgatacaactcttatcttttcccgatctccacttaaaaaaaaaaactaacaataacgcgcgcccctaactacgaaactcacccctacccgaccgatattaaaaaaaaaacatttcaa

SEQ ID NO: 26921 - DNA, 691 bp, Artificial Sequence
  chemically treated genomic DNA (Homo sapiens) CpG-island No: 26921
tatagtcggtttgtaattaaataatttaatttataaatatttcggaaagaaaaaaaatataagttggtttgatttagtttttcgtttttgtttcgtttcgtttcgtttttcgtttttcgtttttcgttttttagggttttcgttttcgtacgggggagtgagagcgagttcgtcgtttcgtattcgtcgtttcgcgttcgttcgcgttagttcgcggcgggggcggtttcgatcgcgtcgttcgttttttttcgtttcgtttcgtttcgttcgcgttcgcgtttcgttcgcgttcgtcgcgattttagtttcgcggcgttttcgtcgggtgcgtgcgttcgcgcgttcgttagttaggtttttcgcgttcgtcgttcgcgtcgcgttggttcgggttttttcgttcgcgttttatggttgtatacgagtgggattggttttaacgcgaggagtttatcgggtagattagcgatattcgagtgtagaatttgtaaggtaacgtagtttaggttcgtttcgggatggttgggcgttcggggggttcggggcgtcgtttcgatatttggtaattttttcgcgtcgttttcgttcgtcggtcgttcgttgtttttgttatttgtttcgaggtgggaggttggggttggatattcgtttttaagttttagggcggttagtcgcggttaggtttata

SEQ ID NO: 26922 - DNA, 691 bp, Artificial Sequence
  chemically treated genomic DNA (Homo sapiens) CpG-island No: 26922
tataaacctaaccgcgactaaccgccctaaaacttaaaaacgaatatccaaccccaacctcccacctcgaaacaaataacaaaaacaacgaacgaccgacgaacgaaaacgacgcgaaaaaattaccaaatatcgaaacgacgccccgaaccccccgaacgcccaaccatcccgaaacgaacctaaactacgttaccttacaaattctacactcgaatatcgctaatctacccgataaactcctcgcgttaaaaccaatcccactcgtatacaaccataaaacgcgaacgaaaaaacccgaaccaacgcgacgcgaacgacgaacgcgaaaaacctaactaacgaacgcgcgaacgcacgcacccgacgaaaacgccgcgaaactaaaatcgcgacgaacgcgaacgaaacgcgaacgcgaacgaaacgaaacgaaacgaaaaaaaacgaacgacgcgatcgaaaccgcccccgccgcgaactaacgcgaacgaacgcgaaacgacgaatacgaaacgacgaactcgctctcactcccccgtacgaaaacgaaaaccctaaaaaacgaaaaacgaaaaacgaaaaacgaaacgaaacgaaacaaaaacgaaaaactaaatcaaaccaacttatattttttttctttccgaaatatttataaattaaattatttaattacaaaccgactata

SEQ ID NO: 26923 - DNA, 691 bp, Artificial Sequence
  chemically treated genomic DNA (Homo sapiens) CpG-island No: 26923
tgtaaatttggtcgcggttggtcgttttggggtttgggggcgggtatttaattttagttttttatttcgaggtaagtgataggaataacgagcggtcggcgagcgggggcggcgcgggggagttgttaagtgtcggagcggcgtttcgggtttttcgagcgtttagttatttcggggcgagtttgggttgcgttattttgtaggttttgtattcggatgtcgttaatttgttcgatgagtttttcgcgttggaattagttttattcgtgtgtagttatgaagcgcgggcgggagagttcgggttagcgcggcgcgggcggcgggcgcggagagtttggttggcgggcgcgcgagcgtacgtattcggcgagggcgtcgcggagttggagtcgcggcgggcgcgggcggggcgcgggcgcgggcggggcggggcggggcggggaggggcgggcggcgcggtcggggtcgttttcgtcgcgggttggcgcgagcgagcgcggggcggcgggtgcggggcggcgggttcgtttttattttttcgtgcgggggcgggggttttgaggagcgaggggcgaggggcgaggggcggggcggggcggggtaggggcgggaggttgggttaggttagtttgtgtttttttttttttcggggtgtttgtaggttggattgtttggttataaatcggttgtg

SEQ ID NO: 26924 - DNA, 691 bp, Artificial Sequence
  chemically treated genomic DNA (Homo sapiens) CpG-island No: 26924
cacaaccgatttataaccaaacaatccaacctacaaacaccccgaaaaaaaaaaaaacacaaactaacctaacccaacctcccgcccctaccccgccccgccccgcccctcgcccctcgcccctcgctcctcaaaacccccgcccccgcacgaaaaaataaaaacgaacccgccgccccgcacccgccgccccgcgctcgctcgcgccaacccgcgacgaaaacgaccccgaccgcgccgcccgcccctccccgccccgccccgccccgcccgcgcccgcgccccgcccgcgcccgccgcgactccaactccgcgacgccctcgccgaatacgtacgctcgcgcgcccgccaaccaaactctccgcgcccgccgcccgcgccgcgctaacccgaactctcccgcccgcgcttcataactacacacgaataaaactaattccaacgcgaaaaactcatcgaacaaattaacgacatccgaatacaaaacctacaaaataacgcaacccaaactcgccccgaaataactaaacgctcgaaaaacccgaaacgccgctccgacacttaacaactcccccgcgccgcccccgctcgccgaccgctcgttattcctatcacttacctcgaaataaaaaactaaaattaaatacccgcccccaaaccccaaaacgaccaaccgcgaccaaatttaca

SEQ ID NO: 26925 - DNA, 1083 bp, Artificial Sequence
  chemically treated genomic DNA (Homo sapiens) CpG-island No: 26925
ggtagtcgaatttcgagagtttagagagtttgttaaatttagtcggtttcggcgcgcgggttttcgggggttttaaaaatttcgggtaattgcggtttaacgttaaggtttagtttaggcgttgggtcgtaaacgttttttcggttttcgcgcgcgcgttcgttgtttttttgtttttgagtggttggggggtcgggattaattttttatcgttaggttttgtttaattataggttcgtttttatgtcgttacggggcgagcggagcgtggggcgcggaggggcggtgcgggattagtgggatttttaagcggttgtgcgtcgttgtcgcgggtcgtgcgttggttgtcggttagtcgggcgtgcgtagttttcgtaggcgtcggcgggaggggtcgaggcggaggcgcggcgtaggttgttgtaggtttaggtgaatggagtaatttgatagcggggacgaggcgacggcgagcgcgaggaaatggcggcgggggcggcggcgtcgggcggtttcgggaggtttgggttgtgacgcgcgcgtcggagcggggttcgatggttttcgaaggttcgcggcgtttcgtgttgtaggtgaggcgggttttcgcggagtagttttgtgttcggggcggggagcgggtcgtttggtcgcgttttcgttttcgcgcggaggttcgcgtgtcggttatggtttcgagtcgcgcgttcgggtttggcgggcgttgacgaagggcgcggtttcgtttgtttcgtcgtttcgtatagcgcggtttgtggattcggcgtttgttcgtttcggttttgtttttgggttcggatttcggcgttttttcgcgaggtagttttgggagatttttcgggtcgtcgtggcgtggtgggggatgtcggcgtttgtttatttttcggtttggcgaggtttggggtttttgataggtttcgttacgcgcgttaaggtggcgcgggagtagcggaggtggagacgcgcgtttgatttgtcggagtattttggggtttttttttgatggggtcgttgtgtcgcgttcggaggggacgaagttgggttttcggtttttttcgggag

SEQ ID NO: 26926 - DNA, 1083 bp, Artificial Sequence
  chemically treated genomic DNA (Homo sapiens) CpG-island No: 26926
ctcccgaaaaaaaccgaaaacccaacttcgtcccctccgaacgcgacacaacgaccccatcaaaaaaaaaccccaaaatactccgacaaatcaaacgcgcgtctccacctccgctactcccgcgccaccttaacgcgcgtaacgaaacctatcaaaaaccccaaacctcgccaaaccgaaaaataaacaaacgccgacatcccccaccacgccacgacgacccgaaaaatctcccaaaactacctcgcgaaaaaacgccgaaatccgaacccaaaaacaaaaccgaaacgaacaaacgccgaatccacaaaccgcgctatacgaaacgacgaaacaaacgaaaccgcgcccttcgtcaacgcccgccaaacccgaacgcgcgactcgaaaccataaccgacacgcgaacctccgcgcgaaaacgaaaacgcgaccaaacgacccgctccccgccccgaacacaaaactactccgcgaaaacccgcctcacctacaacacgaaacgccgcgaaccttcgaaaaccatcgaaccccgctccgacgcgcgcgtcacaacccaaacctcccgaaaccgcccgacgccgccgcccccgccgccatttcctcgcgctcgccgtcgcctcgtccccgctatcaaattactccattcacctaaacctacaacaacctacgccgcgcctccgcctcgacccctcccgccgacgcctacgaaaactacgcacgcccgactaaccgacaaccaacgcacgacccgcgacaacgacgcacaaccgcttaaaaatcccactaatcccgcaccgcccctccgcgccccacgctccgctcgccccgtaacgacataaaaacgaacctataattaaacaaaacctaacgataaaaaattaatcccgaccccccaaccactcaaaaacaaaaaaacaacgaacgcgcgcgcgaaaaccgaaaaaacgtttacgacccaacgcctaaactaaaccttaacgttaaaccgcaattacccgaaatttttaaaacccccgaaaacccgcgcgccgaaaccgactaaatttaacaaactctctaaactctcgaaattcgactacc

SEQ ID NO: 26927 - DNA, 1083 bp, Artificial Sequence
  chemically treated genomic DNA (Homo sapiens) CpG-island No: 26927
ttttcgggagggatcgagagtttagtttcgtttttttcgggcgcggtatagcggttttattagaggagggttttagggtgtttcggtaggttaggcgcgcgtttttattttcgttgttttcgcgttattttagcgcgcgtgacgggatttgttaagagttttaggtttcgttaggtcggggagtggataggcgtcggtattttttattacgttacggcggttcggaaagttttttagggttgtttcgcggggaggcgtcggggttcgggtttaggagtagagtcgaggcgggtagacgtcgggtttataggtcgcgttgtgcgggacgacgaggtaggcgaggtcgcgtttttcgttagcgttcgttaggttcggacgcgcggttcggggttatggtcggtacgcgggttttcgcgcggaggcgggagcgcggttaggcgattcgtttttcgtttcggatataaagttgtttcgcgggagttcgttttatttgtagtacggggcgtcgcgggttttcgagaattatcggatttcgtttcggcgcgcgcgttatagtttaggtttttcggagtcgttcggcgtcgtcgttttcgtcgttattttttcgcgttcgtcgtcgtttcgttttcgttgttaggttattttatttatttgggtttgtagtagtttgcgtcgcgttttcgtttcgatttttttcgtcggcgtttgcggagattgcgtacgttcggttggtcggtagttagcgtacggttcgcggtaacggcgtatagtcgtttggagattttattggtttcgtatcgttttttcgcgttttacgtttcgttcgtttcgtggcggtatgagagcgagtttgtgattggatagggtttggcggtgaaaggttaatttcggttttttagttatttaggagtagggagatagcgggcgcgcgcgcggaggtcggagaggcgtttgcggtttagcgtttggattggattttggcgttgggtcgtagttgttcggagtttttggggttttcgggaattcgcgcgtcgaggtcggttaagtttggtagattttttgagttttcggaattcgattgtt

SEQ ID NO: 26928 - DNA, 1083 bp, Artificial Sequence
  chemically treated genomic DNA (Homo sapiens) CpG-island No: 26928
aacaatcgaattccgaaaactcaaaaaatctaccaaacttaaccgacctcgacgcgcgaattcccgaaaaccccaaaaactccgaacaactacgacccaacgccaaaatccaatccaaacgctaaaccgcaaacgcctctccgacctccgcgcgcgcgcccgctatctccctactcctaaataactaaaaaaccgaaattaacctttcaccgccaaaccctatccaatcacaaactcgctctcataccgccacgaaacgaacgaaacgtaaaacgcgaaaaaacgatacgaaaccaataaaatctccaaacgactatacgccgttaccgcgaaccgtacgctaactaccgaccaaccgaacgtacgcaatctccgcaaacgccgacgaaaaaaatcgaaacgaaaacgcgacgcaaactactacaaacccaaataaataaaataacctaacaacgaaaacgaaacgacgacgaacgcgaaaaaataacgacgaaaacgacgacgccgaacgactccgaaaaacctaaactataacgcgcgcgccgaaacgaaatccgataattctcgaaaacccgcgacgccccgtactacaaataaaacgaactcccgcgaaacaactttatatccgaaacgaaaaacgaatcgcctaaccgcgctcccgcctccgcgcgaaaacccgcgtaccgaccataaccccgaaccgcgcgtccgaacctaacgaacgctaacgaaaaacgcgacctcgcctacctcgtcgtcccgcacaacgcgacctataaacccgacgtctacccgcctcgactctactcctaaacccgaaccccgacgcctccccgcgaaacaaccctaaaaaactttccgaaccgccgtaacgtaataaaaaataccgacgcctatccactccccgacctaacgaaacctaaaactcttaacaaatcccgtcacgcgcgctaaaataacgcgaaaacaacgaaaataaaaacgcgcgcctaacctaccgaaacaccctaaaaccctcctctaataaaaccgctataccgcgcccgaaaaaaacgaaactaaactctcgatccctcccgaaaa

SEQ ID NO: 26929 - DNA, 588 bp, Artificial Sequence
  chemically treated genomic DNA (Homo sapiens) CpG-island No: 26929
gtaacgatgtggagacggaaatattcgaggatattcggaggaattcggggagttttgagtggtaatcgaggggtagagtatggtagtgggcggggttatttcggtacgttcgaagggcgttggcggaaattatcgaagatgttcgaagtcgtcgggacggattcgagtattttacgtaagatggcggagttggaggaggtgattttggacgggaagtttttttaggcgttgcgggtgatcgatttgaaggtcgtattggagtagcgaggtttagttaagagcgggtagaagagtgttttggttaagcggtttaaaggggtgaggagtcggcgttgttggggtgtcggaggagagcggattcggtagagacgagtttttgtcgcggcgtaggcgtagtattcgggttcggcgcgagttcgtttaggtcgttagcgcgagtttttggattcgcgcgtacggtggttgatgaggttcgcgttggaatggagatcgcgtcggttttcgttttaacggtagtagcgcgagtttaaatgggagggtgtgtattattttttaggagtgttttaagttttttttttttttttttat

SEQ ID NO: 26930 - DNA, 588 bp, Artificial Sequence
  chemically treated genomic DNA (Homo sapiens) CpG-island No: 26930
ataaaaaaaaaaaaaaaaaacttaaaacactcctaaaaaataatacacaccctcccatttaaactcgcgctactaccgttaaaacgaaaaccgacgcgatctccattccaacgcgaacctcatcaaccaccgtacgcgcgaatccaaaaactcgcgctaacgacctaaacgaactcgcgccgaacccgaatactacgcctacgccgcgacaaaaactcgtctctaccgaatccgctctcctccgacaccccaacaacgccgactcctcacccctttaaaccgcttaaccaaaacactcttctacccgctcttaactaaacctcgctactccaatacgaccttcaaatcgatcacccgcaacgcctaaaaaaacttcccgtccaaaatcacctcctccaactccgccatcttacgtaaaatactcgaatccgtcccgacgacttcgaacatcttcgataatttccgccaacgcccttcgaacgtaccgaaataaccccgcccactaccatactctacccctcgattaccactcaaaactccccgaattcctccgaatatcctcgaatatttccgtctccacatcgttac

SEQ ID NO: 26931 - DNA, 588 bp, Artificial Sequence
  chemically treated genomic DNA (Homo sapiens) CpG-island No: 26931
gtgggggaaggaggaaggagtttaagatatttttggagagtagtgtatatttttttatttgggttcgcgttgttgtcgttaaggcgggaatcggcgcgatttttattttagcgcgaattttattaattatcgtgcgcgcggatttagaggttcgcgttggcggtttgagcgagttcgcgtcgagttcggatattgcgtttgcgtcgcggtagaggttcgtttttatcgggttcgttttttttcgatattttagtaacgtcgattttttatttttttgagtcgtttgattagggtatttttttgttcgtttttggttaggtttcgttgttttagtgcggtttttaggtcggttattcgtagcgtttgaagaggtttttcgtttagagttattttttttagtttcgttattttgcgtgaggtattcgggttcgtttcgacggtttcgggtattttcggtaattttcgttaacgtttttcgaacgtatcgagatgatttcgtttattgttatattttatttttcgattattatttagaatttttcgggttttttcggatgttttcggatgttttcgtttttatatcgttat

SEQ ID NO: 26932 - DNA, 588 bp, Artificial Sequence
  chemically treated genomic DNA (Homo sapiens) CpG-island No: 26932
ataacgatataaaaacgaaaacatccgaaaacatccgaaaaaacccgaaaaattctaaataataatcgaaaaataaaatataacaataaacgaaatcatctcgatacgttcgaaaaacgttaacgaaaattaccgaaaatacccgaaaccgtcgaaacgaacccgaatacctcacgcaaaataacgaaactaaaaaaaataactctaaacgaaaaacctcttcaaacgctacgaataaccgacctaaaaaccgcactaaaacaacgaaacctaaccaaaaacgaacaaaaaaataccctaatcaaacgactcaaaaaaataaaaaatcgacgttactaaaatatcgaaaaaaaacgaacccgataaaaacgaacctctaccgcgacgcaaacgcaatatccgaactcgacgcgaactcgctcaaaccgccaacgcgaacctctaaatccgcgcgcacgataattaataaaattcgcgctaaaataaaaatcgcgccgattcccgccttaacgacaacaacgcgaacccaaataaaaaaatatacactactctccaaaaatatcttaaactccttcctccttcccccac

SEQ ID NO: 26933 - DNA, 526 bp, Artificial Sequence
  chemically treated genomic DNA (Homo sapiens) CpG-island No: 26933
ttattttcggtcgtcgtttggatagaggcgcgtaattcggagggcgtaggtttcggttcggagaagggggtgtcgtcggcgtttcgattttttaggaatggggaaatagaggtacggtggattcggcggcggggttgggtttggggttggacgttgatttaggatttcgtttttgttcgttttgcgtcgcgtttttttcgggtcggttttgatcgagtagttttacgcgggttcggggttcgtttattcgataggagcggggggttgtagtttacgagtttacgagttcgtagcgacgtattcggagtgtaatttcgtagagttacggagatattttttcggtgtgggcgtttcgtcgcgtttttttttcgcgggttgcggttattttagggtaggatagagtcgagatgttcgggtgggagcgatgttcgcgtgggggcgatgtaacgggggagatgtttggggggagggtggtaaggtgaaatttggtggagaataatgggggtgggtgggcgatttttgggga

SEQ ID NO: 26934 - DNA, 526 bp, Artificial Sequence
  chemically treated genomic DNA (Homo sapiens) CpG-island No: 26934
tccccaaaaatcgcccacccacccccattattctccaccaaatttcaccttaccaccctccccccaaacatctcccccgttacatcgcccccacgcgaacatcgctcccacccgaacatctcgactctatcctaccctaaaataaccgcaacccgcgaaaaaaaaacgcgacgaaacgcccacaccgaaaaaatatctccgtaactctacgaaattacactccgaatacgtcgctacgaactcgtaaactcgtaaactacaaccccccgctcctatcgaataaacgaaccccgaacccgcgtaaaactactcgatcaaaaccgacccgaaaaaaacgcgacgcaaaacgaacaaaaacgaaatcctaaatcaacgtccaaccccaaacccaaccccgccgccgaatccaccgtacctctatttccccattcctaaaaaatcgaaacgccgacgacacccccttctccgaaccgaaacctacgccctccgaattacgcgcctctatccaaacgacgaccgaaaataa

SEQ ID NO: 26935 - DNA, 526 bp, Artificial Sequence
  chemically treated genomic DNA (Homo sapiens) CpG-island No: 26935
tttttaggaatcgtttatttatttttattgttttttattaggttttattttattattttttttttaggtatttttttcgttgtatcgtttttacgcgggtatcgtttttattcgggtatttcggttttgttttgttttggggtggtcgtagttcgcggggaggaagcgcggcgaggcgtttatatcgggaaagtgttttcgtgattttgcgaggttatatttcgggtgcgtcgttgcgggttcgtgggttcgtgggttgtagtttttcgtttttgtcgggtggacgagtttcgggttcgcgtggagttgttcggttaaggtcggttcgggaggggcgcggcgtagggcgggtaggggcggggttttaggttaacgtttagttttagatttagtttcgtcgtcggatttatcgtgtttttgtttttttatttttgagaaatcggaacgtcggcggtattttttttttcgggtcggagtttgcgtttttcggattgcgcgtttttgtttaggcggcggtcgggggtgg

SEQ ID NO: 26936 - DNA, 526 bp, Artificial Sequence
  chemically treated genomic DNA (Homo sapiens) CpG-island No: 26936
ccacccccgaccgccgcctaaacaaaaacgcgcaatccgaaaaacgcaaactccgacccgaaaaaaaaaataccgccgacgttccgatttctcaaaaataaaaaaacaaaaacacgataaatccgacgacgaaactaaatctaaaactaaacgttaacctaaaaccccgcccctacccgccctacgccgcgcccctcccgaaccgaccttaaccgaacaactccacgcgaacccgaaactcgtccacccgacaaaaacgaaaaactacaacccacgaacccacgaacccgcaacgacgcacccgaaatataacctcgcaaaatcacgaaaacactttcccgatataaacgcctcgccgcgcttcctccccgcgaactacgaccaccccaaaacaaaacaaaaccgaaatacccgaataaaaacgatacccgcgtaaaaacgatacaacgaaaaaaatacctaaaaaaaaaataataaaataaaacctaataaaaaacaataaaaataaataaacgattcctaaaaa

SEQ ID NO: 26937 - DNA, 1211 bp, Artificial Sequence
  chemically treated genomic DNA (Homo sapiens) CpG-island No: 26937
cgttagtttcggtttcgcgttcgtttagagggtcgtttttttttcgtcgattcggtttggggtttaggcgttaatttcgtttttcgggggggtcgcgcggggagtttcgatcgttttagggttaacggtttaggttttagtttacgaggtttgatcgtatcgtattgagcggtttttgcgttaggtaagggggttcggggcgggatcgggaatcgcgttgttagtcgtttcggaaattcgcggtgggtcgttgggtgcgcgtcgagtcgttgttaattgttaagttacgggacgaaattaaggcgttcgcgtttcgtttagttagagcgtttaagtttttttcgtcgttcgttagcgtcggagcgtttattgcgtttgcgtagtttgtttttttggattcgggggcggagtcgaagcgcgtattgcgtttgcgtttttcgttcgatttcgttttagcggtcgggttttcggcgtttcgttttttcgttcggttagggacgaggcggggcgggtacgcggatattgcgtttgcgagagtaggtttcgttttcgatcggtttcgttttcggttagtttcgtttcgcgtcgcgcggggttttgggaggggcgtagcgttcggcggcgtcgcgggcggcgggcggcggggtcgcgggaggggcgcgggggtagataaagtcgcggtaatgaatggagcgttcgttcgcgtcgtcgtcgttcgtagtcggtcgggagtcgttttagaggtcgggtcgaggtgagtgcgcgggcgtcgtcgtttcgtcgtttgtcgcgagtttcgtttttcgcggatcgcgtcggggtcgggtcgggtcgcgttattgtttgcgtcgcgtcggggttagggtcggggttaggcgggcgggggcgcggtttcgtggtttcggggttttcgttcggcgtcgtttcggattcgttttcgcgcggatttcggttttgatagttggcgcgggggcggcgtcgattgagcggtcgagtgtcgggggtcggcgttcggtttggtttacgtgttcgcgtcgttgttttcgggcggacgggacggggttcgggttcggggcgtcgttcgggttcgtcgggagcgcgttgtttcggttacgtcgagttaatttcgcgagtttcgtttttgggatttttttggacgtgttattttcgttttatttttaggaagggttatttgggttttgttttatgtt

SEQ ID NO: 26938 - DNA, 1211 bp, Artificial Sequence
  chemically treated genomic DNA (Homo sapiens) CpG-island No: 26938
aacataaaacaaaacccaaataacccttcctaaaaataaaacgaaaataacacgtccaaaaaaatcccaaaaacgaaactcgcgaaattaactcgacgtaaccgaaacaacgcgctcccgacgaacccgaacgacgccccgaacccgaaccccgtcccgtccgcccgaaaacaacgacgcgaacacgtaaaccaaaccgaacgccgacccccgacactcgaccgctcaatcgacgccgcccccgcgccaactatcaaaaccgaaatccgcgcgaaaacgaatccgaaacgacgccgaacgaaaaccccgaaaccacgaaaccgcgcccccgcccgcctaaccccgaccctaaccccgacgcgacgcaaacaataacgcgacccgacccgaccccgacgcgatccgcgaaaaacgaaactcgcgacaaacgacgaaacgacgacgcccgcgcactcacctcgacccgacctctaaaacgactcccgaccgactacgaacgacgacgacgcgaacgaacgctccattcattaccgcgactttatctacccccgcgcccctcccgcgaccccgccgcccgccgcccgcgacgccgccgaacgctacgcccctcccaaaaccccgcgcgacgcgaaacgaaactaaccgaaaacgaaaccgatcgaaaacgaaacctactctcgcaaacgcaatatccgcgtacccgccccgcctcgtccctaaccgaacgaaaaaacgaaacgccgaaaacccgaccgctaaaacgaaatcgaacgaaaaacgcaaacgcaatacgcgcttcgactccgcccccgaatccaaaaaaacaaactacgcaaacgcaataaacgctccgacgctaacgaacgacgaaaaaaacttaaacgctctaactaaacgaaacgcgaacgccttaatttcgtcccgtaacttaacaattaacaacgactcgacgcgcacccaacgacccaccgcgaatttccgaaacgactaacaacgcgattcccgatcccgccccgaacccccttacctaacgcaaaaaccgctcaatacgatacgatcaaacctcgtaaactaaaacctaaaccgttaaccctaaaacgatcgaaactccccgcgcgacccccccgaaaaacgaaattaacgcctaaaccccaaaccgaatcgacgaaaaaaaaacgaccctctaaacgaacgcgaaaccgaaactaacg

SEQ ID NO: 26939 - DNA, 1211 bp, Artificial Sequence
  chemically treated genomic DNA (Homo sapiens) CpG-island No: 26939
gatatgaagtagggtttaggtggttttttttggaggtgggacgggaatgatacgtttagagaagttttagggacggggttcgcggggttaattcgacgtggtcgggatagcgcgttttcggcggattcgggcggcgtttcgagttcgagtttcgtttcgttcgttcggaagtaacggcgcgggtacgtgggttaggtcgggcgtcgattttcggtattcggtcgtttagtcggcgtcgttttcgcgttagttgttagggtcggggttcgcgcgggggcgggttcggggcggcgtcgggcggggatttcgaggttacggaatcgcgttttcgttcgtttggtttcggttttggtttcggcgcggcgtagataatggcgcggttcggttcggtttcggcgcggttcgcgggggacggggttcgcggtaggcggcggggcggcggcgttcgcgtatttatttcggttcggtttttggggcggttttcggtcggttgcggacgacggcggcgcgggcggacgttttatttattatcgcggttttgtttgttttcgcgtttttttcgcggtttcgtcgttcgtcgttcgcgacgtcgtcggacgttgcgttttttttagggtttcgcgcggcgcggggcggggttggtcgggggcggggtcgatcgggggcggggtttattttcgtaggcgtagtgttcgcgtattcgtttcgtttcgtttttggtcgggcgggaggacggagcgtcggaggttcggtcgttggggcggggtcgggcggaagacgtaggcgtaatgcgcgtttcggtttcgttttcgggtttaggagggtaaattacgtaggcgtagtgggcgtttcggcgttggcgggcgacgggaagggtttaggcgttttggttgggcggggcgcgggcgttttggtttcgtttcgtggtttggtagttggtagcggttcggcgcgtatttaacggtttatcgcgggttttcgggacggttagtagcgcggttttcggtttcgtttcgaatttttttatttggcgtagaggtcgtttagtgcggtgcggttaggtttcgtgggttgggatttaagtcgttgattttaaggcgatcggggtttttcgcgcggttttttcgggggacgggattaacgtttaagttttaagtcgggtcggcgggaggagggcggttttttgggcgagcgcggggtcggggttggcg

SEQ ID NO: 26940 - DNA, 1211 bp, Artificial Sequence
  chemically treated genomic DNA (Homo sapiens) CpG-island No: 26940
cgccaaccccgaccccgcgctcgcccaaaaaaccgccctcctcccgccgacccgacttaaaacttaaacgttaatcccgtcccccgaaaaaaccgcgcgaaaaaccccgatcgccttaaaatcaacgacttaaatcccaacccacgaaacctaaccgcaccgcactaaacgacctctacgccaaataaaaaaattcgaaacgaaaccgaaaaccgcgctactaaccgtcccgaaaacccgcgataaaccgttaaatacgcgccgaaccgctaccaactaccaaaccacgaaacgaaaccaaaacgcccgcgccccgcccaaccaaaacgcctaaacccttcccgtcgcccgccaacgccgaaacgcccactacgcctacgtaatttaccctcctaaacccgaaaacgaaaccgaaacgcgcattacgcctacgtcttccgcccgaccccgccccaacgaccgaacctccgacgctccgtcctcccgcccgaccaaaaacgaaacgaaacgaatacgcgaacactacgcctacgaaaataaaccccgcccccgatcgaccccgcccccgaccaaccccgccccgcgccgcgcgaaaccctaaaaaaaacgcaacgtccgacgacgtcgcgaacgacgaacgacgaaaccgcgaaaaaaacgcgaaaacaaacaaaaccgcgataataaataaaacgtccgcccgcgccgccgtcgtccgcaaccgaccgaaaaccgccccaaaaaccgaaccgaaataaatacgcgaacgccgccgccccgccgcctaccgcgaaccccgtcccccgcgaaccgcgccgaaaccgaaccgaaccgcgccattatctacgccgcgccgaaaccaaaaccgaaaccaaacgaacgaaaacgcgattccgtaacctcgaaatccccgcccgacgccgccccgaacccgcccccgcgcgaaccccgaccctaacaactaacgcgaaaacgacgccgactaaacgaccgaataccgaaaatcgacgcccgacctaacccacgtacccgcgccgttacttccgaacgaacgaaacgaaactcgaactcgaaacgccgcccgaatccgccgaaaacgcgctatcccgaccacgtcgaattaaccccgcgaaccccgtccctaaaacttctctaaacgtatcattcccgtcccacctccaaaaaaaaccacctaaaccctacttcatatc

SEQ ID NO: 26941 - DNA, 764 bp, Artificial Sequence
  chemically treated genomic DNA (Homo sapiens) CpG-island No: 26941
gtcgttcgtgagttttcgtaatttagacgcgttcggtttcgcgtttcggggttgggattatcgagggcgagttgtagttttcgttattcggttcgtcgtcggatttcgttttttataaatagttcggtaaggttttttttcgtcgtttttttatttagcgaagttttttttttagttttttcggcggcggcgtcgtgacgttattttcgttttttagcgcgtacgtgggaggaagtgttggtgttttttgtcgttgttttcgtttttttggttacgttcgttagtcggtcggtcgtcgtttttagtcgtgtgtcgttatgggagtttcggcgttttttcgttggtttagtcgtaagtattcgtttattatagttaattgcgtggaagagaaggtgaggaggcgttaggcggtcgttatattcgagttcgggttttcggtacgtttaggtcgcggtttatgggtttcgtcgtttgttttcggggagttttgtcggagttcgcgttttgttgttagtttcgcgagtagtcgtagttttatacgcgatgggacgcgggttgtgggatttagtatttcgggggcgaggaatttaggattttcggcggggtaagggtttatagggtttcgaattcgtaggagggtcgttttttttttattcgttttttttcggtatcggaaggtttcgtttattgttttgttttttttttagatcgcgtattttgggtttcggaagaggtttagaggttgttgttgagtaatgtatgtt

SEQ ID NO: 26942 - DNA, 764 bp, Artificial Sequence
  chemically treated genomic DNA (Homo sapiens) CpG-island No: 26942
aacatacattactcaacaacaacctctaaacctcttccgaaacccaaaatacgcgatctaaaaaaaaaacaaaacaataaacgaaaccttccgataccgaaaaaaaacgaataaaaaaaaaacgaccctcctacgaattcgaaaccctataaacccttaccccgccgaaaatcctaaattcctcgcccccgaaatactaaatcccacaacccgcgtcccatcgcgtataaaactacgactactcgcgaaactaacaacaaaacgcgaactccgacaaaactccccgaaaacaaacgacgaaacccataaaccgcgacctaaacgtaccgaaaacccgaactcgaatataacgaccgcctaacgcctcctcaccttctcttccacgcaattaactataataaacgaatacttacgactaaaccaacgaaaaaacgccgaaactcccataacgacacacgactaaaaacgacgaccgaccgactaacgaacgtaaccaaaaaaacgaaaacaacgacaaaaaacaccaacacttcctcccacgtacgcgctaaaaaacgaaaataacgtcacgacgccgccgccgaaaaaactaaaaaaaaaacttcgctaaataaaaaaacgacgaaaaaaaaccttaccgaactatttataaaaaacgaaatccgacgacgaaccgaataacgaaaactacaactcgccctcgataatcccaaccccgaaacgcgaaaccgaacgcgtctaaattacgaaaactcacgaacgac

SEQ ID NO: 26943 - DNA, 764 bp, Artificial Sequence
  chemically treated genomic DNA (Homo sapiens) CpG-island No: 26943
ggtatgtattgtttaataatagtttttgaatttttttcgagatttaaaatgcgcggtttggagaggaaataaagtagtgggcggggtttttcggtgtcgggaaaaagcgagtaggggaggagcgatttttttgcgagttcggaattttataggtttttgtttcgtcgagggttttgaatttttcgttttcggggtgttgaattttatagttcgcgttttatcgcgtgtggggttgcgattgttcgcgaggttggtagtagggcgcgagtttcggtaaggtttttcgggggtaggcggcggagtttatgggtcgcggtttagacgtgtcgggggttcgggttcgagtgtggcggtcgtttggcgtttttttatttttttttttacgtagttgattatgatggacgggtatttgcggttgagttagcggaagaacgtcgggatttttatagcggtatacggttggaggcggcggtcgatcggttgacgagcgtaattaaagagacgggagtagcggtagagggtattagtatttttttttacgtgcgcgttggagaacggaagtgacgttacggcgtcgtcgtcggggaagttgggaaggaggtttcgttggatgagggagcggcggaaaagggttttgtcgggttgtttgtgggaggcggagttcggcggcggatcgggtggcgaaggttgtagttcgttttcggtggttttagtttcggagcgcgaggtcgagcgcgtttgagttgcgggggtttacgggcgat

SEQ ID NO: 26944 - DNA, 764 bp, Artificial Sequence
  chemically treated genomic DNA (Homo sapiens) CpG-island No: 26944
atcgcccgtaaacccccgcaactcaaacgcgctcgacctcgcgctccgaaactaaaaccaccgaaaacgaactacaaccttcgccacccgatccgccgccgaactccgcctcccacaaacaacccgacaaaacccttttccgccgctccctcatccaacgaaacctccttcccaacttccccgacgacgacgccgtaacgtcacttccgttctccaacgcgcacgtaaaaaaaaatactaataccctctaccgctactcccgtctctttaattacgctcgtcaaccgatcgaccgccgcctccaaccgtataccgctataaaaatcccgacgttcttccgctaactcaaccgcaaatacccgtccatcataatcaactacgtaaaaaaaaaaataaaaaaacgccaaacgaccgccacactcgaacccgaacccccgacacgtctaaaccgcgacccataaactccgccgcctacccccgaaaaaccttaccgaaactcgcgccctactaccaacctcgcgaacaatcgcaaccccacacgcgataaaacgcgaactataaaattcaacaccccgaaaacgaaaaattcaaaaccctcgacgaaacaaaaacctataaaattccgaactcgcaaaaaaatcgctcctcccctactcgctttttcccgacaccgaaaaaccccgcccactactttatttcctctccaaaccgcgcattttaaatctcgaaaaaaattcaaaaactattattaaacaatacatacc

SEQ ID NO: 26945 - DNA, 932 bp, Artificial Sequence
  chemically treated genomic DNA (Homo sapiens) CpG-island No: 26945
cgtattgttgcgttaattcgaggtcggttaggaatttattggatgtttgaagggtgggtgcggaattgatgattaggaagcgggaagatatcgtttcggagaatagggaagcgagtcgggtattggggaggtgcgttgggtattggggaggtgcgttggattttgacgtcggagcggaagatttcgttggaggtcggggttggtcgggcggggcggggcgggtagaggcggaggggcggggtcgggttgggagaggtttcgttttcgggcgcgttcgtgtgcgtggtcggggggcgtcgcgtagagtttcgttttatgatgtcgggtttgaggacgaggtcgggcggcgttgtggtaatttttattttgcggatacgcgtttttaatattcggttcggcggtttcgtagtttaagaagtggggtttttgtggtcgtgcgtcgatttttaattttagtcgtttttaacgtttttattcgttttcggtgcgcgcgttttttttacgttttcgttttcgttttcgtcgggttcgcgcgtcgcgtttttttttattcggtacgttttgtcgtttcgttcggtcgtagttagcgtggagtcgttttgcgggtaattgagattttcgtagttgtatcgttttttttcgtcgttagtcgttcgtcgttatggacgtgtatttttcgcgtcggtaggggttgtttcgcgttcggttttttggcggttttagtcgcgggttatttttcgttaggtacgcggggtagaggtagtcgaggggcggtcgggcgggggatgcgggttgtcggggttcggcgacgtttttcgtcgtagggcgtggttcgatatggttttttcgggacggttttttgttgaacggtttagggaggaattttttttaggaacggcgttttttgtagaggttttataatggtttttttt

SEQ ID NO: 26946 - DNA, 932 bp, Artificial Sequence
  chemically treated genomic DNA (Homo sapiens) CpG-island No: 26946
aaaaaaaaccattataaaacctctacaaaaaacgccgttcctaaaaaaaattcctccctaaaccgttcaacaaaaaaccgtcccgaaaaaaccatatcgaaccacgccctacgacgaaaaacgtcgccgaaccccgacaacccgcatcccccgcccgaccgcccctcgactacctctaccccgcgtacctaacgaaaaataacccgcgactaaaaccgccaaaaaaccgaacgcgaaacaacccctaccgacgcgaaaaatacacgtccataacgacgaacgactaacgacgaaaaaaaacgatacaactacgaaaatctcaattacccgcaaaacgactccacgctaactacgaccgaacgaaacgacaaaacgtaccgaataaaaaaaaacgcgacgcgcgaacccgacgaaaacgaaaacgaaaacgtaaaaaaaacgcgcgcaccgaaaacgaataaaaacgttaaaaacgactaaaattaaaaatcgacgcacgaccacaaaaaccccacttcttaaactacgaaaccgccgaaccgaatattaaaaacgcgtatccgcaaaataaaaattaccacaacgccgcccgacctcgtcctcaaacccgacatcataaaacgaaactctacgcgacgccccccgaccacgcacacgaacgcgcccgaaaacgaaacctctcccaacccgaccccgcccctccgcctctacccgccccgccccgcccgaccaaccccgacctccaacgaaatcttccgctccgacgtcaaaatccaacgcacctccccaatacccaacgcacctccccaatacccgactcgcttccctattctccgaaacgatatcttcccgcttcctaatcatcaattccgcacccacccttcaaacatccaataaattcctaaccgacctcgaattaacgcaacaatacg

SEQ ID NO: 26947 - DNA, 932 bp, Artificial Sequence
  chemically treated genomic DNA (Homo sapiens) CpG-island No: 26947
aaggggagttattgtggggtttttatagagggcgtcgtttttgggaaaaatttttttttgagtcgtttagtaaagaatcgtttcgaggaagttatgtcggattacgttttgcggcgggaggcgtcgtcggatttcgatagttcgtatttttcgttcggtcgtttttcggttgtttttgtttcgcgtatttgacggagggtgattcgcggttggagtcgttaggggatcgagcgcggggtagtttttgtcggcgcggggggtatacgtttatggcggcggacgattggcggcggaggaggacggtgtagttgcgagggttttagttgttcgtagggcggttttacgttagttgcggtcgggcggggcggtagggcgtgtcgggtgggagggggcgcggcgcgcgggttcggcgggggcgggggcgggggcgtggagggggcgcgcgtatcgagagcggatgggggcgttgggagcggttggagttgggggtcggcgtacggttatagggattttattttttaagttgcgaggtcgtcggatcggatgttgggagcgcgtgttcgtagggtgagggttgttatagcgtcgttcggtttcgtttttaagttcggtattatagagcggggttttgcgcggcgtttttcggttacgtatacggacgcgttcgggggcggagttttttttagttcggtttcgttttttcgtttttgttcgtttcgtttcgttcgattagtttcggtttttagcgaagtttttcgtttcggcgttaggatttagcgtatttttttagtatttagcgtatttttttagtattcggttcgtttttttgtttttcggaacggtgttttttcgttttttggttattaatttcgtatttattttttaaatatttaatagatttttagtcggtttcgggttagcgtagtagtgcg

SEQ ID NO: 26948 - DNA, 932 bp, Artificial Sequence
  chemically treated genomic DNA (Homo sapiens) CpG-island No: 26948
cgcactactacgctaacccgaaaccgactaaaaatctattaaatatttaaaaaataaatacgaaattaataaccaaaaaacgaaaaaacaccgttccgaaaaacaaaaaaacgaaccgaatactaaaaaaatacgctaaatactaaaaaaatacgctaaatcctaacgccgaaacgaaaaacttcgctaaaaaccgaaactaatcgaacgaaacgaaacgaacaaaaacgaaaaaacgaaaccgaactaaaaaaaactccgcccccgaacgcgtccgtatacgtaaccgaaaaacgccgcgcaaaaccccgctctataataccgaacttaaaaacgaaaccgaacgacgctataacaaccctcaccctacgaacacgcgctcccaacatccgatccgacgacctcgcaacttaaaaaataaaatccctataaccgtacgccgacccccaactccaaccgctcccaacgcccccatccgctctcgatacgcgcgccccctccacgcccccgcccccgcccccgccgaacccgcgcgccgcgccccctcccacccgacacgccctaccgccccgcccgaccgcaactaacgtaaaaccgccctacgaacaactaaaaccctcgcaactacaccgtcctcctccgccgccaatcgtccgccgccataaacgtataccccccgcgccgacaaaaactaccccgcgctcgatcccctaacgactccaaccgcgaatcaccctccgtcaaatacgcgaaacaaaaacaaccgaaaaacgaccgaacgaaaaatacgaactatcgaaatccgacgacgcctcccgccgcaaaacgtaatccgacataacttcctcgaaacgattctttactaaacgactcaaaaaaaaatttttcccaaaaacgacgccctctataaaaaccccacaataactcccctt

SEQ ID NO: 26949 - DNA, 587 bp, Artificial Sequence
  chemically treated genomic DNA (Homo sapiens) CpG-island No: 26949
tttgcgcgtttcgggggagggagcgagggttgcgagttgcgcgttcggtcggggagggtagcgttttttttcgcgtcggcgttcgggtttcggttgttgtttcgggaaggcggtttcgcgagtcgtcgcggttcgttggggttcgggattagacgagttttcggtttcgatagcgtgttcgtttaaaagttcgttcggttggtttttagtttcgatcggtttcgttttgttttttttcgtttttgtcgggttcggatttgcgtcgttcgcgagggttggaaggtattggaagcgtcgtcggggttgtttagaggtcgggttttcgttttattttgcgtaaatttgtttttttaaggttagcgttgcgagttggttatatcgtttttttaaggtggatcggggaagttgcggtcgattttttttcgttttcggatttcggtcgcgcggttgtttttcgttttttattggcgagaggttggaggcggcgaaggagtcggggcgcgggggcgcggggggcgggggggcgtttgttttttaattttttttaggaggtcgtgtttttgagttttaaagttgaaggttttttt

SEQ ID NO: 26950 - DNA, 587 bp, Artificial Sequence
  chemically treated genomic DNA (Homo sapiens) CpG-island No: 26950
aaaaaaaccttcaactttaaaactcaaaaacacgacctcctaaaaaaaattaaaaaacaaacgcccccccgccccccgcgcccccgcgccccgactccttcgccgcctccaacctctcgccaataaaaaacgaaaaacaaccgcgcgaccgaaatccgaaaacgaaaaaaaatcgaccgcaacttccccgatccaccttaaaaaaacgatataaccaactcgcaacgctaaccttaaaaaaacaaatttacgcaaaataaaacgaaaacccgacctctaaacaaccccgacgacgcttccaataccttccaaccctcgcgaacgacgcaaatccgaacccgacaaaaacgaaaaaaaacaaaacgaaaccgatcgaaactaaaaaccaaccgaacgaacttttaaacgaacacgctatcgaaaccgaaaactcgtctaatcccgaaccccaacgaaccgcgacgactcgcgaaaccgccttcccgaaacaacaaccgaaacccgaacgccgacgcgaaaaaaaacgctaccctccccgaccgaacgcgcaactcgcaaccctcgctccctcccccgaaacgcgcaaa

SEQ ID NO: 26951 - DNA, 587 bp, Artificial Sequence
  chemically treated genomic DNA (Homo sapiens) CpG-island No: 26951
agaggggtttttagttttggggtttagaggtacgattttttggggagggttaaaaggtagacgttttttcgtttttcgcgttttcgcgtttcgattttttcgtcgtttttagtttttcgttagtgggaagcggggagtagtcgcgcggtcggagttcggaggcgaggggaggtcggtcgtaattttttcggtttattttaagaggacgatgtagttagttcgtagcgttgattttagaaaaataagtttgcgtaaagtggagcggggattcggtttttgggtagtttcggcggcgtttttagtgttttttagttttcgcgggcggcgtaggttcgggttcggtagggacggggaggggtagagcgggatcggtcggggttggggattagtcgggcgggtttttgaacgggtacgttgtcggagtcggaggttcgtttagtttcgagttttagcgggtcgcggcggttcgcggggtcgttttttcgggatagtagtcggggttcgggcgtcggcgcgggggaggacgttgtttttttcggtcgggcgcgtagttcgtagttttcgttttttttttcggggcgcgtagg

SEQ ID NO: 26952 - DNA, 587 bp, Artificial Sequence
  chemically treated genomic DNA (Homo sapiens) CpG-island No: 26952
cctacgcgccccgaaaaaaaaaacgaaaactacgaactacgcgcccgaccgaaaaaaacaacgtcctcccccgcgccgacgcccgaaccccgactactatcccgaaaaaacgaccccgcgaaccgccgcgacccgctaaaactcgaaactaaacgaacctccgactccgacaacgtacccgttcaaaaacccgcccgactaatccccaaccccgaccgatcccgctctacccctccccgtccctaccgaacccgaacctacgccgcccgcgaaaactaaaaaacactaaaaacgccgccgaaactacccaaaaaccgaatccccgctccactttacgcaaacttatttttctaaaatcaacgctacgaactaactacatcgtcctcttaaaataaaccgaaaaaattacgaccgacctcccctcgcctccgaactccgaccgcgcgactactccccgcttcccactaacgaaaaactaaaaacgacgaaaaaatcgaaacgcgaaaacgcgaaaaacgaaaaaacgtctaccttttaaccctccccaaaaaatcgtacctctaaaccccaaaactaaaaacccctct

SEQ ID NO: 26953 - DNA, 673 bp, Artificial Sequence
  chemically treated genomic DNA (Homo sapiens) CpG-island No: 26953
ttcgttttcggggattgggagaataggatagtagtaggagtcggggggtcgtcgaagatggggaatattatttcgtgttgcgtgtcgtttagttttaagtttcggaggaatgtttattttcggttggagttttatcggttagatacggatttgagtcgcgaggatacgggttgtaatttgtagtatattagcgatcgggagaatatagacggtgagtgcggttcgtcgagttttttattcgttttcgcggtaatagtcgtatagttaacgtcggggcggttcggttgtttttgtttgtttagtcggtttcggcgattcgtgtataatcggggtttcgttcgcgtagtttaggcgttcggggtttcgtagtttttgggcgtatttttcgttggttatttttaagtgagcggtcgcggaaattttgtaggttcgcggtatcgagtacggcgggtttagggcgggtgtgtgcgcgtgggtcgcgaggtgataggagtcggttttcgtttttaatggagcggttagagttgggtgggggcggttcgggagttcggggttttcggtattatttgaatgtagttcgaagttaagttgtgtacgcgtttgttttataaaagcgaagtgagtggatttttattttggaatttcggtgtttttaatttcgagttggagaatt

SEQ ID NO: 26954 - DNA, 673 bp, Artificial Sequence
  chemically treated genomic DNA (Homo sapiens) CpG-island No: 26954
aattctccaactcgaaattaaaaacaccgaaattccaaaataaaaatccactcacttcgcttttataaaacaaacgcgtacacaacttaacttcgaactacattcaaataataccgaaaaccccgaactcccgaaccgcccccacccaactctaaccgctccattaaaaacgaaaaccgactcctatcacctcgcgacccacgcgcacacacccgccctaaacccgccgtactcgataccgcgaacctacaaaatttccgcgaccgctcacttaaaaataaccaacgaaaaatacgcccaaaaactacgaaaccccgaacgcctaaactacgcgaacgaaaccccgattatacacgaatcgccgaaaccgactaaacaaacaaaaacaaccgaaccgccccgacgttaactatacgactattaccgcgaaaacgaataaaaaactcgacgaaccgcactcaccgtctatattctcccgatcgctaatatactacaaattacaacccgtatcctcgcgactcaaatccgtatctaaccgataaaactccaaccgaaaataaacattcctccgaaacttaaaactaaacgacacgcaacacgaaataatattccccatcttcgacgaccccccgactcctactactatcctattctcccaatccccgaaaacgaa

SEQ ID NO: 26955 - DNA, 673 bp, Artificial Sequence
  chemically treated genomic DNA (Homo sapiens) CpG-island No: 26955
ggttttttaattcgaggttggagatatcgggattttaaaatgggaatttatttatttcgtttttataggataaacgcgtgtataatttggtttcgggttgtatttaggtagtgtcgggaatttcgagttttcgggtcgtttttatttagttttggtcgttttattaaggacgagggtcggtttttgttatttcgcgatttacgcgtatatattcgttttaggttcgtcgtgttcgatgtcgcgggtttgtaaagttttcgcggtcgtttatttgggggtaattagcgaggggtacgtttagaggttgcggggtttcgggcgtttaggttgcgcgggcgaagtttcggttatgtacgggtcgtcgagatcggttgggtaagtaagagtagtcgggtcgtttcgacgttggttgtgcgattgttgtcgcgggggcgggtagggggttcggcgggtcgtatttatcgtttatgttttttcggtcgttgatgtgttgtaggttgtagttcgtgttttcgcggtttaggttcgtgtttggtcggtaggattttagtcgggagtgggtattttttcggagtttgggattggacgatacgtagtacgaggtagtgttttttattttcggcggtttttcgatttttgttgttattttgtttttttagttttcgggagcggg

SEQ ID NO: 26956 - DNA, 673 bp, Artificial Sequence
  chemically treated genomic DNA (Homo sapiens) CpG-island No: 26956
cccgctcccgaaaactaaaaaaacaaaataacaacaaaaatcgaaaaaccgccgaaaataaaaaacactacctcgtactacgtatcgtccaatcccaaactccgaaaaaatacccactcccgactaaaatcctaccgaccaaacacgaacctaaaccgcgaaaacacgaactacaacctacaacacatcaacgaccgaaaaaacataaacgataaatacgacccgccgaaccccctacccgcccccgcgacaacaatcgcacaaccaacgtcgaaacgacccgactactcttacttacccaaccgatctcgacgacccgtacataaccgaaacttcgcccgcgcaacctaaacgcccgaaaccccgcaacctctaaacgtacccctcgctaattacccccaaataaacgaccgcgaaaactttacaaacccgcgacatcgaacacgacgaacctaaaacgaatatatacgcgtaaatcgcgaaataacaaaaaccgaccctcgtccttaataaaacgaccaaaactaaataaaaacgacccgaaaactcgaaattcccgacactacctaaatacaacccgaaaccaaattatacacgcgtttatcctataaaaacgaaataaataaattcccattttaaaatcccgatatctccaacctcgaattaaaaaacc

SEQ ID NO: 26957 - DNA, 517 bp, Artificial Sequence
  chemically treated genomic DNA (Homo sapiens) CpG-island No: 26957
acggcgggattagtcgacgagcgggcgggtagcgggcgtgggcgtagttttcggatttttcgcggcgcggtgcggcgcggttagggaggatgttggcggttttttttcgttagcggcgttcgttttcgtcgtagttttcgtttcgtttcgttatcgttttttttttttgttttggaagtagatcggcggtcgcggggaggttcggggcggcgtagtttcgcgcggttgtgggatcgttttcgggggtcgtttttttttcgggtattggggtcgcgggagacgtcgtcgggagttcggtttttggaggtttttttttattcggtttttgttttttttattttttcgggttggacggaacggggtttagcgcgggatgcgaggtgcgttttcggggttcgtagcgggcgggagcgtagttagggttcggtcggggacgtaggtttagggcgttgaggttgtatttgttttttcgaaatcgggttggttttttttgtttttttatttttttaatttattt

SEQ ID NO: 26958 - DNA, 517 bp, Artificial Sequence
  chemically treated genomic DNA (Homo sapiens) CpG-island No: 26958
aaataaattaaaaaaataaaaaaacaaaaaaaaccaacccgatttcgaaaaaacaaatacaacctcaacgccctaaacctacgtccccgaccgaaccctaactacgctcccgcccgctacgaaccccgaaaacgcacctcgcatcccgcgctaaaccccgttccgtccaacccgaaaaaataaaaaaaacaaaaaccgaataaaaaaaaacctccaaaaaccgaactcccgacgacgtctcccgcgaccccaatacccgaaaaaaaaacgacccccgaaaacgatcccacaaccgcgcgaaactacgccgccccgaacctccccgcgaccgccgatctacttccaaaacaaaaaaaaaaaacgataacgaaacgaaacgaaaactacgacgaaaacgaacgccgctaacgaaaaaaaaccgccaacatcctccctaaccgcgccgcaccgcgccgcgaaaaatccgaaaactacgcccacgcccgctacccgcccgctcgtcgactaatcccgccgt

SEQ ID NO: 26959 - DNA, 517 bp, Artificial Sequence
  chemically treated genomic DNA (Homo sapiens) CpG-island No: 26959
aaataaattagaaaaataaaaagataaaaagagttagttcggtttcggagaggtaggtgtagttttagcgttttgggtttgcgttttcgatcgggttttggttgcgttttcgttcgttgcgggtttcggggacgtatttcgtatttcgcgttgggtttcgtttcgtttagttcgggggagtggaggaggtagaggtcgggtggggaagggtttttagaaatcgagttttcgacgacgtttttcgcgattttagtgttcgagagaggagcggttttcgggagcgattttataatcgcgcggggttgcgtcgtttcgaattttttcgcggtcgtcgatttgtttttagggtagagggaaggggcggtgacggggcggggcgggggttgcggcgagggcgggcgtcgttggcgagggagggtcgttagtattttttttggtcgcgtcgtatcgcgtcgcgaggagttcgggggttgcgtttacgttcgttgttcgttcgttcgtcggttagtttcgtcgt

SEQ ID NO: 26960 - DNA, 517 bp, Artificial Sequence
  chemically treated genomic DNA (Homo sapiens) CpG-island No: 26960
acgacgaaactaaccgacgaacgaacgaacaacgaacgtaaacgcaacccccgaactcctcgcgacgcgatacgacgcgaccaaaaaaaatactaacgaccctccctcgccaacgacgcccgccctcgccgcaacccccgccccgccccgtcaccgccccttccctctaccctaaaaacaaatcgacgaccgcgaaaaaattcgaaacgacgcaaccccgcgcgattataaaatcgctcccgaaaaccgctcctctctcgaacactaaaatcgcgaaaaacgtcgtcgaaaactcgatttctaaaaacccttccccacccgacctctacctcctccactcccccgaactaaacgaaacgaaacccaacgcgaaatacgaaatacgtccccgaaacccgcaacgaacgaaaacgcaaccaaaacccgatcgaaaacgcaaacccaaaacgctaaaactacacctacctctccgaaaccgaactaactctttttatctttttatttttctaatttattt

SEQ ID NO: 26961 - DNA, 1182 bp, Artificial Sequence
  chemically treated genomic DNA (Homo sapiens) CpG-island No: 26961
cgtgtaggtttttcgcgttttttttcgggtcgggtatttggtagagtcgcgtttttcgcgttttcggttttcgcgttttcggttttcgcgttttgttttttcggggtttcgcgcgttcgtcgtttcgtttttttttgggtcgtcggttttacgggcggcgggggcgagggcggggcgtatcggggtgcggggttttcggcgttcgacgattttgacgacgtcgagtttttcgaggagtcggtcgggttttagtcgttttagagttagggcgcgtgcgtttgttttagtagtcggcggtttaggcggtagtgtagtagttcgcggtagtacggttcgtattttttttagcgcggtttttggtagcgttttatgtattcgttttttatttcgtttttcggggatatggtgtcgttcgtcgtttcgagcgttagtcgtttttcgttgttcgtagtttacgggattcggtatacgatatagaggtcgtttcgttttttcgtcggttttgttcgtcgcgacgtttaaattcggagtttcgttcggacgggagtagggggcgggtttcggcgagggcggggagggggcggggcgggggcggttttattcggcggtcgggattaagagtagaggcggggatcggggttgttggggtcgaggggcgcgtcgtcgaggagggttgtttagtgggcggaaggtagggaggttgcgggttggggcgaggggatcgtaggagattggggttgagcgggaggaggagcgagggaggggagcggcggggttcgtgatcgggtggttttggggttttcggaggcgttttttgagttaggcgtgcggtttcgcggggttgttttatttttttttcgtcgcgttcggtcgattttttgcgtttaggttcgaggcgcgcgtggcgtagtagttaaagcgtagttcgttttttcgcgcgttttttttttgagtaagatgtcgtcgcggcggttcgcgttttagttgtaggcgggaggcggtggcgtcgttttagtttcggagtttttacgcgcgttttcggttttcgggttttcgttcgtttcgtgggggcggttgttttcgtagagagcgcgaggcgcgggggtgcgggcgtgtttgttagttcgaggggtttaggtttaggtttttggtttatttatttgaggtgttcgtttattttgg

SEQ ID NO: 26962 - DNA, 1182 bp, Artificial Sequence
  chemically treated genomic DNA (Homo sapiens) CpG-island No: 26962
ccaaaataaacgaacacctcaaataaataaaccaaaaacctaaacctaaacccctcgaactaacaaacacgcccgcacccccgcgcctcgcgctctctacgaaaacaaccgcccccacgaaacgaacgaaaacccgaaaaccgaaaacgcgcgtaaaaactccgaaactaaaacgacgccaccgcctcccgcctacaactaaaacgcgaaccgccgcgacgacatcttactcaaaaaaaaaacgcgcgaaaaaacgaactacgctttaactactacgccacgcgcgcctcgaacctaaacgcaaaaaatcgaccgaacgcgacgaaaaaaaaataaaacaaccccgcgaaaccgcacgcctaactcaaaaaacgcctccgaaaaccccaaaaccacccgatcacgaaccccgccgctcccctccctcgctcctcctcccgctcaaccccaatctcctacgatcccctcgccccaacccgcaacctccctaccttccgcccactaaacaaccctcctcgacgacgcgcccctcgaccccaacaaccccgatccccgcctctactcttaatcccgaccgccgaataaaaccgcccccgccccgccccctccccgccctcgccgaaacccgccccctactcccgtccgaacgaaactccgaatttaaacgtcgcgacgaacaaaaccgacgaaaaaacgaaacgacctctatatcgtataccgaatcccgtaaactacgaacaacgaaaaacgactaacgctcgaaacgacgaacgacaccatatccccgaaaaacgaaataaaaaacgaatacataaaacgctaccaaaaaccgcgctaaaaaaaatacgaaccgtactaccgcgaactactacactaccgcctaaaccgccgactactaaaacaaacgcacgcgccctaactctaaaacgactaaaacccgaccgactcctcgaaaaactcgacgtcgtcaaaatcgtcgaacgccgaaaaccccgcaccccgatacgccccgccctcgcccccgccgcccgtaaaaccgacgacccaaaaaaaaacgaaacgacgaacgcgcgaaaccccgaaaaaacaaaacgcgaaaaccgaaaacgcgaaaaccgaaaacgcgaaaaacgcgactctaccaaatacccgacccgaaaaaaaacgcgaaaaacctacacg

SEQ ID NO: 26963 - DNA, 1182 bp, Artificial Sequence
  chemically treated genomic DNA (Homo sapiens) CpG-island No: 26963
ttagggtggacgggtattttaaataagtgggttagggatttgggtttgggtttttcggattggtaggtacgttcgtattttcgcgtttcgcgttttttacggaagtagtcgtttttacggagcgggcggaggttcgggggtcgggagcgcgcgtggaggtttcgggattgaggcggcgttatcgtttttcgtttgtagttggagcgcgggtcgtcgcggcgatattttgtttaggaggaaagcgcgcgggagagcgagttgcgttttagttgttgcgttacgcgcgtttcgggtttgggcgtagaggatcggtcgggcgcggcgggaaggaggtaaggtagtttcgcgggatcgtacgtttagtttaggggacgttttcggagattttaggattattcgattacgggtttcgtcgtttttttttttcgttttttttttcgtttagttttagttttttgcggttttttcgttttagttcgtagtttttttgtttttcgtttattgagtagtttttttcggcggcgcgtttttcgattttagtagtttcggttttcgtttttgtttttggtttcggtcgtcgggtgaggtcgttttcgtttcgtttttttttcgttttcgtcgggattcgttttttgttttcgttcgggcggggtttcgggtttaaacgtcgcggcgggtagggtcggcggaggggcggggcggtttttgtgtcgtgtatcgggtttcgtaggttgcgggtagcgaggagcggttggcgttcgaggcggcggacggtattatgttttcggggagcggggtgaagagcgagtatatgaagcgttattaggagtcgcgttgggaggagtacgggtcgtgttatcgcgagttgttgtattatcgtttaggtcgtcggttgttggagtaggcgtacgcgttttggttttgggacgattggggttcggtcggtttttcggaggattcggcgtcgttagagtcgtcgggcgtcgggggtttcgtatttcggtgcgtttcgttttcgttttcgtcgttcgtagagtcggcgatttaggaggaggcggaacggcgggcgcgcggggtttcggaggagtaggacgcggaggtcggggacgcggaggtcgaggacgcggaggacgcggttttgttaggtattcggttcggaggggagcgcgaggggtttgtacg

SEQ ID NO: 26964 - DNA, 1182 bp, Artificial Sequence
  chemically treated genomic DNA (Homo sapiens) CpG-island No: 26964
cgtacaaacccctcgcgctcccctccgaaccgaatacctaacaaaaccgcgtcctccgcgtcctcgacctccgcgtccccgacctccgcgtcctactcctccgaaaccccgcgcgcccgccgttccgcctcctcctaaatcgccgactctacgaacgacgaaaacgaaaacgaaacgcaccgaaatacgaaacccccgacgcccgacgactctaacgacgccgaatcctccgaaaaaccgaccgaaccccaatcgtcccaaaaccaaaacgcgtacgcctactccaacaaccgacgacctaaacgataatacaacaactcgcgataacacgacccgtactcctcccaacgcgactcctaataacgcttcatatactcgctcttcaccccgctccccgaaaacataataccgtccgccgcctcgaacgccaaccgctcctcgctacccgcaacctacgaaacccgatacacgacacaaaaaccgccccgcccctccgccgaccctacccgccgcgacgtttaaacccgaaaccccgcccgaacgaaaacaaaaaacgaatcccgacgaaaacgaaaaaaaaacgaaacgaaaacgacctcacccgacgaccgaaaccaaaaacaaaaacgaaaaccgaaactactaaaatcgaaaaacgcgccgccgaaaaaaactactcaataaacgaaaaacaaaaaaactacgaactaaaacgaaaaaaccgcaaaaaactaaaactaaacgaaaaaaaaaacgaaaaaaaaaaacgacgaaacccgtaatcgaataatcctaaaatctccgaaaacgtcccctaaactaaacgtacgatcccgcgaaactaccttacctccttcccgccgcgcccgaccgatcctctacgcccaaacccgaaacgcgcgtaacgcaacaactaaaacgcaactcgctctcccgcgcgctttcctcctaaacaaaatatcgccgcgacgacccgcgctccaactacaaacgaaaaacgataacgccgcctcaatcccgaaacctccacgcgcgctcccgacccccgaacctccgcccgctccgtaaaaacgactacttccgtaaaaaacgcgaaacgcgaaaatacgaacgtacctaccaatccgaaaaacccaaacccaaatccctaacccacttatttaaaatacccgtccaccctaa

SEQ ID NO: 26965 - DNA, 662 bp, Artificial Sequence
  chemically treated genomic DNA (Homo sapiens) CpG-island No: 26965
gttgcggtcgtagtagtcggagtcggagtcgtagttatcggtgtttttttttttcgtcgtcgtttagtcgtcgttcggtttttttcgggttcgagcgtagattaggttttagtcgcgcggcgtcggtagtttcgcgttttttttcgggtttttttcgggtttcgggtatcgcgttttgtggggcggtcgtttgtttgttcgttcgttcgtagttttttcgttgcgcggtttttgggcggtcgttgttatgggtatcgatagtcgcgcggttaaggcgtttttggcgcgggttcgtattttgtatttgtagacggggaatttgttgaattggggtcgtttgcggaagaagtgttcgtttacgtatagcgaggaggtgagcgtggcgatattcgtcgcggggttttcggggtaggtttcgggcggggtcgggcggtttcggtaagggagaagcgttcgcgggcgagggagggtggtagggtttcgcgcgtatttgggtttcgttcgcggttagatgttgaggttagtgtcgacgcgattttgggtttaaattcgttgtcgagggtaacgcgtttaaaaaatttagtcggtgtagttgcgtattgagtgatatttttttcggtgtttaaggttggtagtaaaatttttaaatattttgggttttt

SEQ ID NO: 26966 - DNA, 662 bp, Artificial Sequence
  chemically treated genomic DNA (Homo sapiens) CpG-island No: 26966
aaaaacccaaaatatttaaaaattttactaccaaccttaaacaccgaaaaaaatatcactcaatacgcaactacaccgactaaattttttaaacgcgttaccctcgacaacgaatttaaacccaaaatcgcgtcgacactaacctcaacatctaaccgcgaacgaaacccaaatacgcgcgaaaccctaccaccctccctcgcccgcgaacgcttctcccttaccgaaaccgcccgaccccgcccgaaacctaccccgaaaaccccgcgacgaatatcgccacgctcacctcctcgctatacgtaaacgaacacttcttccgcaaacgaccccaattcaacaaattccccgtctacaaatacaaaatacgaacccgcgccaaaaacgccttaaccgcgcgactatcgatacccataacaacgaccgcccaaaaaccgcgcaacgaaaaaactacgaacgaacgaacaaacaaacgaccgccccacaaaacgcgatacccgaaacccgaaaaaaacccgaaaaaaaacgcgaaactaccgacgccgcgcgactaaaacctaatctacgctcgaacccgaaaaaaaccgaacgacgactaaacgacgacgaaaaaaaaaaacaccgataactacgactccgactccgactactacgaccgcaac

SEQ ID NO: 26967 - DNA, 662 bp, Artificial Sequence
  chemically treated genomic DNA (Homo sapiens) CpG-island No: 26967
agggatttaggatgtttgagagttttgttattagttttaagtatcgagagaggtgttatttagtgcgtagttgtatcggttaagttttttagacgcgttgttttcggtagcgggtttggatttaaggtcgcgtcgatattggttttagtatttgatcgcgggcggagtttaggtgcgcgcgaggttttgttattttttttcgttcgcgggcgttttttttttgtcggaatcgttcggtttcgttcgaggtttgtttcgggagtttcgcggcgagtgtcgttacgtttattttttcgttgtgcgtggacgggtatttttttcgtaggcggttttagtttagtaggtttttcgtttgtaggtgtagggtgcgggttcgcgttaggagcgttttggtcgcgcggttgtcggtgtttatggtagcggtcgtttaggggtcgcgtagcgaaggggttgcgggcgggcgggtaggtaggcggtcgttttataggacgcggtgttcgaggttcgagagagattcgagagggagcgcgaggttgtcggcgtcgcgcggttggagtttggtttgcgttcgggttcgagggaggtcggacggcggttgggcggcggcgggaaaggaaggtatcggtggttgcggtttcggtttcggttattgcggtcgtagt

SEQ ID NO: 26968 - DNA, 662 bp, Artificial Sequence
  chemically treated genomic DNA (Homo sapiens) CpG-island No: 26968
actacgaccgcaataaccgaaaccgaaaccgcaaccaccgataccttcctttcccgccgccgcccaaccgccgtccgacctccctcgaacccgaacgcaaaccaaactccaaccgcgcgacgccgacaacctcgcgctccctctcgaatctctctcgaacctcgaacaccgcgtcctataaaacgaccgcctacctacccgcccgcccgcaaccccttcgctacgcgacccctaaacgaccgctaccataaacaccgacaaccgcgcgaccaaaacgctcctaacgcgaacccgcaccctacacctacaaacgaaaaacctactaaactaaaaccgcctacgaaaaaaatacccgtccacgcacaacgaaaaaataaacgtaacgacactcgccgcgaaactcccgaaacaaacctcgaacgaaaccgaacgattccgacaaaaaaaaaacgcccgcgaacgaaaaaaaataacaaaacctcgcgcgcacctaaactccgcccgcgatcaaatactaaaaccaatatcgacgcgaccttaaatccaaacccgctaccgaaaacaacgcgtctaaaaaacttaaccgatacaactacgcactaaataacacctctctcgatacttaaaactaataacaaaactctcaaacatcctaaatccct

SEQ ID NO: 26969 - DNA, 578 bp, Artificial Sequence
  chemically treated genomic DNA (Homo sapiens) CpG-island No: 26969
agatttcgcgggtcgtttttatgaattgtcggtagttttggtagacgttgcgttttaggttttgcgtcgtttttttcgttagcgtttggatgcgttgtcggtgtttttggaggtttcggtttttattcgattgttgcgagagttgttttacgtatagtcgcgttttaaaattttttgattttagttgtcgacgtaggcggttcgttttattgttcgatatcgttatcgttattttttttcgggttttacgtatttattgttattatcggcgtcgtagtcgtcgcggttgtttagatttatttaaggttaatcgagtttttgggttgaggaagtaggaatgggaacgagacgagtacgtttgcgtcgggtttgagcgttagatattgcgtttgcgtaagtgggtcgagcgtagatattgcgtttgcgtagtaatgttatcggttaaagcgtatgcgtaagatgagttattgcggaagtgaggggagggagaggtcgagagaaatttcggtattgcgtatgaatcgagcgtgacgttgaggtttgaaataatcggtaaagagtaaaggttgaaattagtt

SEQ ID NO: 26970 - DNA, 578 bp, Artificial Sequence
  chemically treated genomic DNA (Homo sapiens) CpG-island No: 26970
aactaatttcaacctttactctttaccgattatttcaaacctcaacgtcacgctcgattcatacgcaataccgaaatttctctcgacctctccctcccctcacttccgcaataactcatcttacgcatacgctttaaccgataacattactacgcaaacgcaatatctacgctcgacccacttacgcaaacgcaatatctaacgctcaaacccgacgcaaacgtactcgtctcgttcccattcctacttcctcaacccaaaaactcgattaaccttaaataaatctaaacaaccgcgacgactacgacgccgataataacaataaatacgtaaaacccgaaaaaaaataacgataacgatatcgaacaataaaacgaaccgcctacgtcgacaactaaaatcaaaaaattttaaaacgcgactatacgtaaaacaactctcgcaacaatcgaataaaaaccgaaacctccaaaaacaccgacaacgcatccaaacgctaacgaaaaaaacgacgcaaaacctaaaacgcaacgtctaccaaaactaccgacaattcataaaaacgacccgcgaaatct

SEQ ID NO: 26971 - DNA, 578 bp, Artificial Sequence
  chemically treated genomic DNA (Homo sapiens) CpG-island No: 26971
agttagttttagtttttattttttgtcggttattttaaattttaacgttacgttcggtttatgcgtagtatcgaaatttttttcggtttttttttttttttattttcgtaatagtttattttgcgtatgcgttttaatcgatggtattgttgcgtaggcgtaatgtttgcgttcggtttatttgcgtaggcgtagtgtttgacgtttagattcggcgtaggcgtattcgtttcgtttttatttttgtttttttagtttaggagttcggttggttttgggtgggtttagatagtcgcggcggttgcggcgtcgatagtgatagtgagtgcgtgagattcggagagaaatggcgatggcgatgtcggatagtggggcgagtcgtttgcgtcggtagttggagttagggggttttgaggcgcggttgtacgtgaagtagttttcgtagtagtcggatggggatcgggatttttaggagtatcggtagcgtatttaggcgttggcggaggagacggcgtagaatttgaagcgtaacgtttattagaattatcggtagtttatagagacggttcgcgagattt

SEQ ID NO: 26972 - DNA, 578 bp, Artificial Sequence
  chemically treated genomic DNA (Homo sapiens) CpG-island No: 26972
aaatctcgcgaaccgtctctataaactaccgataattctaataaacgttacgcttcaaattctacgccgtctcctccgccaacgcctaaatacgctaccgatactcctaaaaatcccgatccccatccgactactacgaaaactacttcacgtacaaccgcgcctcaaaaccccctaactccaactaccgacgcaaacgactcgccccactatccgacatcgccatcgccatttctctccgaatctcacgcactcactatcactatcgacgccgcaaccgccgcgactatctaaacccacccaaaaccaaccgaactcctaaactaaaaaaacaaaaataaaaacgaaacgaatacgcctacgccgaatctaaacgtcaaacactacgcctacgcaaataaaccgaacgcaaacattacgcctacgcaacaataccatcgattaaaacgcatacgcaaaataaactattacgaaaataaaaaaaaaaaaaaaccgaaaaaaatttcgatactacgcataaaccgaacgtaacgttaaaatttaaaataaccgacaaaaaataaaaactaaaactaact

SEQ ID NO: 26973 - DNA, 674 bp, Artificial Sequence
  chemically treated genomic DNA (Homo sapiens) CpG-island No: 26973
agcgcgagacggtttgatttttgttattaagataagaagaggtttggaaaaaatgtaaaattatcgtttttttggttgtatcgggagacgggcggttgtttatcgtttcgtatacgcgggtgcgttcggagttcgttcgcgtagatacgtttgtgcgcggggcgggggttttcggcgcggttcggagcgggtttatttgttcggcgagggttttcgtttcgttagtcgttgatttttaatttgttattttttcggttgaaaggcggtcgcgggaaaggacgtttttcgtttcgtttatttaaagcgtgaatgtaaagtggtttaagttgattcgtcgttagtttttgcggtttcgagtcggcgaggtattttatagtttatatagttcggttttaatgtagtttttaggcgttttatttaggcgggtttgtatgtaaaagagtcggttattagattatcgtaattattttattgatatcgtttagggttttcgtggggtacgggagcgtattaaacgcgtttttaatgaggcgtttcgggtttattgtgcgcgtcgtcgtttttcgcgttcgtcgtcgtttcggtcgtagataggcggttttttttaggcgtatttattttttttgattttcgatttttagggttatgatattagtagttttgatttgtgatta

SEQ ID NO: 26974 - DNA, 674 bp, Artificial Sequence
  chemically treated genomic DNA (Homo sapiens) CpG-island No: 26974
taatcacaaatcaaaactactaatatcataaccctaaaaatcgaaaatcaaaaaaaataaatacgcctaaaaaaaaccgcctatctacgaccgaaacgacgacgaacgcgaaaaacgacgacgcgcacaataaacccgaaacgcctcattaaaaacgcgtttaatacgctcccgtaccccacgaaaaccctaaacgatatcaataaaataattacgataatctaataaccgactcttttacatacaaacccgcctaaataaaacgcctaaaaactacattaaaaccgaactatataaactataaaatacctcgccgactcgaaaccgcaaaaactaacgacgaatcaacttaaaccactttacattcacgctttaaataaacgaaacgaaaaacgtcctttcccgcgaccgcctttcaaccgaaaaaataacaaattaaaaatcaacgactaacgaaacgaaaaccctcgccgaacaaataaacccgctccgaaccgcgccgaaaacccccgccccgcgcacaaacgtatctacgcgaacgaactccgaacgcacccgcgtatacgaaacgataaacaaccgcccgtctcccgatacaaccaaaaaaacgataattttacattttttccaaacctcttcttatcttaataacaaaaatcaaaccgtctcgcgct

SEQ ID NO: 26975 - DNA, 674 bp, Artificial Sequence
  chemically treated genomic DNA (Homo sapiens) CpG-island No: 26975
tggttataaattagggttgttgatgttataattttgggggtcgggggttagggggagtgaatgcgtttgaaagggatcgtttgtttgcggtcggagcggcggcgggcgcggggggcgacggcgcgtataatgggttcggagcgttttattagagacgcgtttgatgcgttttcgtgttttacgggggttttgggcgatgttaatgggataattacgatgatttaatggtcggtttttttgtatgtaggttcgtttgaatggggcgtttggaggttgtattgaggtcgggttgtgtaaattgtagggtgtttcgtcgattcggagtcgtagagattggcggcgggttaatttggattattttgtatttacgttttgaataggcggagcgggaggcgttttttttcgcggtcgttttttagtcgagagagtgatagattggaggttagcggttggcgggacggaagttttcgtcgggtagatggattcgtttcgggtcgcgtcggggattttcgtttcgcgtataggcgtgtttacgcggacgggtttcgagcgtattcgcgtgtgcgaggcgatgggtagtcgttcgtttttcgatgtagttaagagaacggtggttttgtattttttttaaatttttttttgttttaatgataagagttaaatcgtttcgcgtt

SEQ ID NO: 26976 - DNA, 674 bp, Artificial Sequence
  chemically treated genomic DNA (Homo sapiens) CpG-island No: 26976
aacgcgaaacgatttaactcttatcattaaaacaaaaaaaaatttaaaaaaaatacaaaaccaccgttctcttaactacatcgaaaaacgaacgactacccatcgcctcgcacacgcgaatacgctcgaaacccgtccgcgtaaacacgcctatacgcgaaacgaaaatccccgacgcgacccgaaacgaatccatctacccgacgaaaacttccgtcccgccaaccgctaacctccaatctatcactctctcgactaaaaaacgaccgcgaaaaaaaacgcctcccgctccgcctattcaaaacgtaaatacaaaataatccaaattaacccgccgccaatctctacgactccgaatcgacgaaacaccctacaatttacacaacccgacctcaatacaacctccaaacgccccattcaaacgaacctacatacaaaaaaaccgaccattaaatcatcgtaattatcccattaacatcgcccaaaacccccgtaaaacacgaaaacgcatcaaacgcgtctctaataaaacgctccgaacccattatacgcgccgtcgccccccgcgcccgccgccgctccgaccgcaaacaaacgatccctttcaaacgcattcactccccctaacccccgacccccaaaattataacatcaacaaccctaatttataacca

SEQ ID NO: 26977 - DNA, 674 bp, Artificial Sequence
  chemically treated genomic DNA (Homo sapiens) CpG-island No: 26977
cggagcggcggcgggcgcggggggcgacggcgcgtataatgggttcggagcgttttattagagacgcgtttgatgcgttttcgtgttttacgggggttttgggcgatgttaatgggataattacgatgatttaatggtcggtttttttgtatgtaggttcgtttgaatggggcgtttggaggttgtattgaggtcgggttgtgtaaattgtagggtgtttcgtcgattcggagtcgtagagattggcggcgggttaatttggattattttgtatttacgttttgaataggcggagcgggaggcgttttttttcgcggtcgttttttagtcgagagagtgatagattggaggttagcggttggcgggacggaagttttcgtcgggtagatggattcgtttcgggtcgcgtcggggattttcgtttcgcgtataggcgtgtttacgcggacgggtttcgagcgtattcgcgtgtgcgaggcgatgggtagtcgttcgtttttcgatgtagttaagagaacggtggttttgtattttttttaaatttttttttgttttaatgataagagttaaatcgtttcgcgtttggtttttttttcggtatttgtgcgtttttttagaagtcgatttggtttcggttaagggtattcgtagagtagtttttattttttaatatt

SEQ ID NO: 26978 - DNA, 674 bp, Artificial Sequence
  chemically treated genomic DNA (Homo sapiens) CpG-island No: 26978
aatattaaaaaataaaaactactctacgaatacccttaaccgaaaccaaatcgacttctaaaaaaacgcacaaataccgaaaaaaaaaccaaacgcgaaacgatttaactcttatcattaaaacaaaaaaaaatttaaaaaaaatacaaaaccaccgttctcttaactacatcgaaaaacgaacgactacccatcgcctcgcacacgcgaatacgctcgaaacccgtccgcgtaaacacgcctatacgcgaaacgaaaatccccgacgcgacccgaaacgaatccatctacccgacgaaaacttccgtcccgccaaccgctaacctccaatctatcactctctcgactaaaaaacgaccgcgaaaaaaaacgcctcccgctccgcctattcaaaacgtaaatacaaaataatccaaattaacccgccgccaatctctacgactccgaatcgacgaaacaccctacaatttacacaacccgacctcaatacaacctccaaacgccccattcaaacgaacctacatacaaaaaaaccgaccattaaatcatcgtaattatcccattaacatcgcccaaaacccccgtaaaacacgaaaacgcatcaaacgcgtctctaataaaacgctccgaacccattatacgcgccgtcgccccccgcgcccgccgccgctccg

SEQ ID NO: 26979 - DNA, 674 bp, Artificial Sequence
  chemically treated genomic DNA (Homo sapiens) CpG-island No: 26979
aatattggagggtaggggttgttttgcgggtgtttttggtcggggttaagtcggtttttggggaaacgtataggtgtcgggaggggagttaagcgcgagacggtttgatttttgttattaagataagaagaggtttggaaaaaatgtaaaattatcgtttttttggttgtatcgggagacgggcggttgtttatcgtttcgtatacgcgggtgcgttcggagttcgttcgcgtagatacgtttgtgcgcggggcgggggttttcggcgcggttcggagcgggtttatttgttcggcgagggttttcgtttcgttagtcgttgatttttaatttgttattttttcggttgaaaggcggtcgcgggaaaggacgtttttcgtttcgtttatttaaagcgtgaatgtaaagtggtttaagttgattcgtcgttagtttttgcggtttcgagtcggcgaggtattttatagtttatatagttcggttttaatgtagtttttaggcgttttatttaggcgggtttgtatgtaaaagagtcggttattagattatcgtaattattttattgatatcgtttagggttttcgtggggtacgggagcgtattaaacgcgtttttaatgaggcgtttcgggtttattgtgcgcgtcgtcgtttttcgcgttcgtcgtcgtttcg

SEQ ID NO: 26980 - DNA, 674 bp, Artificial Sequence
  chemically treated genomic DNA (Homo sapiens) CpG-island No: 26980
cgaaacgacgacgaacgcgaaaaacgacgacgcgcacaataaacccgaaacgcctcattaaaaacgcgtttaatacgctcccgtaccccacgaaaaccctaaacgatatcaataaaataattacgataatctaataaccgactcttttacatacaaacccgcctaaataaaacgcctaaaaactacattaaaaccgaactatataaactataaaatacctcgccgactcgaaaccgcaaaaactaacgacgaatcaacttaaaccactttacattcacgctttaaataaacgaaacgaaaaacgtcctttcccgcgaccgcctttcaaccgaaaaaataacaaattaaaaatcaacgactaacgaaacgaaaaccctcgccgaacaaataaacccgctccgaaccgcgccgaaaacccccgccccgcgcacaaacgtatctacgcgaacgaactccgaacgcacccgcgtatacgaaacgataaacaaccgcccgtctcccgatacaaccaaaaaaacgataattttacattttttccaaacctcttcttatcttaataacaaaaatcaaaccgtctcgcgcttaactcccctcccgacacctatacgtttccccaaaaaccgacttaaccccgaccaaaaacacccgcaaaacaacccctaccctccaatatt

SEQ ID NO: 26981 - DNA, 556 bp, Artificial Sequence
  chemically treated genomic DNA (Homo sapiens) CpG-island No: 26981
agattcggcgaggcgcgttgggggagatttatagagtacgtaattttttttgttttttggatggttggggttcgtcggtttttgggggaggcgttttagcgatataagatgcgatcgttcgtaggaacgtatgtcgtttgtgaaaacgagaagaaatgagatcggcgggttggaagggacgtcgtttcgagcgtagcgaacgtttttttttttaggaagtacgacgggggagcgttttttttaggttttttaggtattttcgtatagttaggtattcgtaaggatgggacggaagtggtgtaagcgtttacgttttttttggttttcgttttttcgtcggtataaggatgatttagtggtcggatttggattttatttcggtcgttagggcgttgatttcgtcgttgagggtgttgagcggagttcggatcggtagttttcggttttcgggggttttaatttcggatttcgagtttagttttaattgaaggtttttgatgtagtcgatgacgtgttggagaatttttattttgtttattttgcggttttggggtag

SEQ ID NO: 26982 - DNA, 556 bp, Artificial Sequence
  chemically treated genomic DNA (Homo sapiens) CpG-island No: 26982
ctaccccaaaaccgcaaaataaacaaaataaaaattctccaacacgtcatcgactacatcaaaaaccttcaattaaaactaaactcgaaatccgaaattaaaacccccgaaaaccgaaaactaccgatccgaactccgctcaacaccctcaacgacgaaatcaacgccctaacgaccgaaataaaatccaaatccgaccactaaatcatccttataccgacgaaaaaacgaaaaccaaaaaaaacgtaaacgcttacaccacttccgtcccatccttacgaatacctaactatacgaaaatacctaaaaaacctaaaaaaaacgctcccccgtcgtacttcctaaaaaaaaaaacgttcgctacgctcgaaacgacgtcccttccaacccgccgatctcatttcttctcgttttcacaaacgacatacgttcctacgaacgatcgcatcttatatcgctaaaacgcctcccccaaaaaccgacgaaccccaaccatccaaaaaacaaaaaaaattacgtactctataaatctcccccaacgcgcctcgccgaatct

SEQ ID NO: 26983 - DNA, 556 bp, Artificial Sequence
  chemically treated genomic DNA (Homo sapiens) CpG-island No: 26983
ttgttttagaatcgtaaggtgagtaaggtggagattttttagtacgttatcgattatattagggatttttagttggagttgaattcggaattcgaagttggaattttcgggggtcgagggttgtcggttcgggtttcgtttagtatttttaacggcgagattagcgttttgacggtcgaggtgagatttagattcgattattagattatttttatatcgacggggaaacggaggttagagagggcgtgggcgtttgtattattttcgttttatttttgcgggtatttggttatgcgggggtgtttaaggagtttggaaaaagcgttttttcgtcgtgttttttggggaagggggcgttcgttgcgttcggagcggcgttttttttaattcgtcggttttattttttttcgtttttataggcggtatgcgtttttgcggacgatcgtattttgtgtcgttgaagcgttttttttagggatcggcggattttagttatttagggggtaagaggaattacgtgttttgtgggttttttttaacgcgtttcgtcggattt

SEQ ID NO: 26984 - DNA, 556 bp, Artificial Sequence
  chemically treated genomic DNA (Homo sapiens) CpG-island No: 26984
aaatccgacgaaacgcgttaaaaaaaacccacaaaacacgtaattcctcttaccccctaaataactaaaatccgccgatccctaaaaaaaacgcttcaacgacacaaaatacgatcgtccgcaaaaacgcataccgcctataaaaacgaaaaaaaataaaaccgacgaattaaaaaaaacgccgctccgaacgcaacgaacgcccccttccccaaaaaacacgacgaaaaaacgctttttccaaactccttaaacacccccgcataaccaaatacccgcaaaaataaaacgaaaataatacaaacgcccacgccctctctaacctccgtttccccgtcgatataaaaataatctaataatcgaatctaaatctcacctcgaccgtcaaaacgctaatctcgccgttaaaaatactaaacgaaacccgaaccgacaaccctcgacccccgaaaattccaacttcgaattccgaattcaactccaactaaaaatccctaatataatcgataacgtactaaaaaatctccaccttactcaccttacgattctaaaacaa

SEQ ID NO: 26985 - DNA, 588 bp, Artificial Sequence
  chemically treated genomic DNA (Homo sapiens) CpG-island No: 26985
ttatttaaggcgcgtattttttttgcgtttcgggttcgcgcgcgttgtcgcggtatcggaagtgattgagtttgtaagtttttttgtttttttaggggaaattgaggtcggtttgttcgggagagacggcgcgagtagttagttaggtaggtcggtagttaggtaggtcggttcgggttcgcggcgcggaattcggtcgcgaagagtttttgcgtttggaagttatcgggtcgatgaagggggatgtggttttttacggttcgcggggttcgtaggtgagagcgtcgttttttttgtgcgtgatagtcgttgcgtttaataggagttttcgtcgtttcgttttcgtgtcggttgggttcgttgattggttgcgttggggcggatcgtcgggggcgaggtttttttttttaggaaggtttagggggcgttttcgggggagggcggttgtttagtaacggggcggtggttcggcgggtattcggtttagtgagttcgagaagtcgttaggtcgtagtcggtttattttgggtttcggagaggtgtagttttcggtttcggagttttttcgggggcgttagaaagttattt

SEQ ID NO: 26986 - DNA, 588 bp, Artificial Sequence
  chemically treated genomic DNA (Homo sapiens) CpG-island No: 26986
aaataactttctaacgcccccgaaaaaactccgaaaccgaaaactacacctctccgaaacccaaaataaaccgactacgacctaacgacttctcgaactcactaaaccgaatacccgccgaaccaccgccccgttactaaacaaccgccctcccccgaaaacgccccctaaaccttcctaaaaaaaaaaacctcgcccccgacgatccgccccaacgcaaccaatcaacgaacccaaccgacacgaaaacgaaacgacgaaaactcctattaaacgcaacgactatcacgcacaaaaaaaacgacgctctcacctacgaaccccgcgaaccgtaaaaaaccacatcccccttcatcgacccgataacttccaaacgcaaaaactcttcgcgaccgaattccgcgccgcgaacccgaaccgacctacctaactaccgacctacctaactaactactcgcgccgtctctcccgaacaaaccgacctcaatttcccctaaaaaaacaaaaaaacttacaaactcaatcacttccgataccgcgacaacgcgcgcgaacccgaaacgcaaaaaaaatacgcgccttaaataa

SEQ ID NO: 26987 - DNA, 588 bp, Artificial Sequence
  chemically treated genomic DNA (Homo sapiens) CpG-island No: 26987
aagtggttttttggcgttttcgggagggtttcggggtcgggggttgtattttttcggagtttagggtgggtcggttgcggtttagcggtttttcgagtttattaggtcgggtattcgtcgagttatcgtttcgttgttaggtaatcgttttttttcgggggcgttttttagatttttttgagaggaggggtttcgttttcggcggttcgttttagcgtagttaattagcgagtttagtcggtacggaagcgggacggcgaaggtttttattgggcgtaacggttgttacgtataggggaggcggcgtttttatttgcgagtttcgcgagtcgtggggggttatatttttttttatcggttcggtagtttttagacgtaagagtttttcgcggtcgagtttcgcgtcgcggattcgggtcggtttatttggttgtcggtttatttggttgattgttcgcgtcgtttttttcgaataagtcggttttagttttttttgaagagataggggaatttgtaagtttagttattttcggtgtcgcggtaacgcgcgcgagttcgagacgtaaagggagtgcgcgttttgagtga

SEQ ID NO: 26988 - DNA, 588 bp, Artificial Sequence
  chemically treated genomic DNA (Homo sapiens) CpG-island No: 26988
tcactcaaaacgcgcactccctttacgtctcgaactcgcgcgcgttaccgcgacaccgaaaataactaaacttacaaattcccctatctcttcaaaaaaaactaaaaccgacttattcgaaaaaaacgacgcgaacaatcaaccaaataaaccgacaaccaaataaaccgacccgaatccgcgacgcgaaactcgaccgcgaaaaactcttacgtctaaaaactaccgaaccgataaaaaaaaatataaccccccacgactcgcgaaactcgcaaataaaaacgccgcctcccctatacgtaacaaccgttacgcccaataaaaaccttcgccgtcccgcttccgtaccgactaaactcgctaattaactacgctaaaacgaaccgccgaaaacgaaacccctcctctcaaaaaaatctaaaaaacgcccccgaaaaaaaacgattacctaacaacgaaacgataactcgacgaatacccgacctaataaactcgaaaaaccgctaaaccgcaaccgacccaccctaaactccgaaaaaatacaacccccgaccccgaaaccctcccgaaaacgccaaaaaaccactt

SEQ ID NO: 26989 - DNA, 1035 bp, Artificial Sequence
  chemically treated genomic DNA (Homo sapiens) CpG-island No: 26989
ggatttcggtcgttttttttttaagaggtaataataaaagtatttttttttcgttttaatatttcgtaggaaagtggttttattttcgggatttagtcgatcgtaggaaaaaagtacggttagttttatttattttatagacgttttcgtaggtgtcgttgtcgattttttggacgagttcgtagttttgttgcgggtttcgttttaggatgttcgcggtaggtcgtagcggggtttttatttttatttagggttcggttttcgttagtttatttcgcggttttcggattttcgttaataagtacgaacggcgtcgttttttaatatggagttttcgttcgtagtttcgtttgtacgagggacgagtaaaggttggttggcgtcgtaggttacgatttttagcggttcgcgttttcgcggttcggttttttttttttcgtttcgttaggggtcgtggaagagaaaggggtttggaagggttttcggcgtttcgtattttcgttcggtttgcggttttttttttttttcggtcgttcgcgaattgttcgacgaggttttttcgttagtcggggtttagggtcggtttcgtatttaatgggggcggtttcgtttttgttgagcgcggagttcgggatttattttttagatcgtattcgcgtttttttttcgcgcgtcggtcggtagtttcgggtttgtcgtcgtcgtcgtcgttatttagtcgttgtacggcgcgttttttcgggggcggcggaggcgcgtatagtcgtcgtcgtcgtcgtcgtcgtattacgttttttattcggggttgcgttatcgggagatacgtttttagttagtatgggtcggcgtttagcggttcgttcgagtatttcggtcgtagaattagagtgtcgttttgaggtttgttgagaatataatattttttcgatcgcgttatcgcgtttttttagtcgggcgcgtttttgtagggtttgggttgttttttttttatttttagaaataaggtatacgtttgggtattcgtgggttaacggg

SEQ ID NO: 26990 - DNA, 1035 bp, Artificial Sequence
  chemically treated genomic DNA (Homo sapiens) CpG-island No: 26990
cccgttaacccacgaatacccaaacgtataccttatttctaaaaataaaaaaaaaacaacccaaaccctacaaaaacgcgcccgactaaaaaaacgcgataacgcgatcgaaaaaatattatattctcaacaaacctcaaaacgacactctaattctacgaccgaaatactcgaacgaaccgctaaacgccgacccatactaactaaaaacgtatctcccgataacgcaaccccgaataaaaaacgtaatacgacgacgacgacgacgacgactatacgcgcctccgccgcccccgaaaaaacgcgccgtacaacgactaaataacgacgacgacgacgacaaacccgaaactaccgaccgacgcgcgaaaaaaaaacgcgaatacgatctaaaaaataaatcccgaactccgcgctcaacaaaaacgaaaccgcccccattaaatacgaaaccgaccctaaaccccgactaacgaaaaaacctcgtcgaacaattcgcgaacgaccgaaaaaaaaaaaaaaccgcaaaccgaacgaaaatacgaaacgccgaaaacccttccaaacccctttctcttccacgacccctaacgaaacgaaaaaaaaaaaaccgaaccgcgaaaacgcgaaccgctaaaaatcgtaacctacgacgccaaccaacctttactcgtccctcgtacaaacgaaactacgaacgaaaactccatattaaaaaacgacgccgttcgtacttattaacgaaaatccgaaaaccgcgaaataaactaacgaaaaccgaaccctaaataaaaataaaaaccccgctacgacctaccgcgaacatcctaaaacgaaacccgcaacaaaactacgaactcgtccaaaaaatcgacaacgacacctacgaaaacgtctataaaataaataaaactaaccgtacttttttcctacgatcgactaaatcccgaaaataaaaccactttcctacgaaatattaaaacgaaaaaaaaatacttttattattacctcttaaaaaaaaaacgaccgaaatcc

SEQ ID NO: 26991 - DNA, 1035 bp, Artificial Sequence
  chemically treated genomic DNA (Homo sapiens) CpG-island No: 26991
ttcgttggtttacgaatgtttaggcgtgtgttttatttttgagagtgggagggagatagtttaggttttgtaaggacgcgttcggttaggggggcgcggtggcgcggtcgggagggtgttgtgtttttagtaggttttagggcggtattttggttttgcggtcggagtgttcgggcgggtcgttgggcgtcgatttatgttggttgggaacgtgtttttcggtgacgtagtttcgggtggggaacgtggtgcggcggcggcggcggcggcgattgtacgcgttttcgtcgttttcgagaggacgcgtcgtgtagcggttgagtggcggcggcggcgacggtaaattcggagttgtcggtcggcgcgcgggaggaggacgcgggtgcggtttaggaagtaggtttcgggtttcgcgtttaataaagacggggtcgtttttattaggtacggagtcggttttgggtttcggttggcggggaggtttcgtcgggtagttcgcgggcggtcggggagggggaagggtcgtagatcgaacggggatacggggcgtcgggggtttttttaggttttttttttttttacggtttttggcgggacggaagggaaggggtcgggtcgcgagggcgcgggtcgttgggggtcgtagtttgcgacgttaattagtttttgttcgtttttcgtgtagacggagttgcgggcggaggttttatgttgggaagcggcgtcgttcgtgtttgttagcgggaattcgggagtcgcggggtgagttggcgggggtcgggttttaagtgaagatggaggtttcgttgcggtttgtcgcggatattttgaggcggaattcgtagtaggattacgaattcgtttagagggtcggtagcggtatttacggggacgtttataaggtaagtgaggttggtcgtgttttttttttgcggtcgattgggtttcgggaatggggttatttttttgcgaagtattggggcgagaggaggatgtttttattgttgttttttggggagaaagcggtcggggttt

SEQ ID NO: 26992 - DNA, 1035 bp, Artificial Sequence
  chemically treated genomic DNA (Homo sapiens) CpG-island No: 26992
aaaccccgaccgctttctccccaaaaaacaacaataaaaacatcctcctctcgccccaatacttcgcaaaaaaataaccccattcccgaaacccaatcgaccgcaaaaaaaaaacacgaccaacctcacttaccttataaacgtccccgtaaataccgctaccgaccctctaaacgaattcgtaatcctactacgaattccgcctcaaaatatccgcgacaaaccgcaacgaaacctccatcttcacttaaaacccgacccccgccaactcaccccgcgactcccgaattcccgctaacaaacacgaacgacgccgcttcccaacataaaacctccgcccgcaactccgtctacacgaaaaacgaacaaaaactaattaacgtcgcaaactacgacccccaacgacccgcgccctcgcgacccgaccccttcccttccgtcccgccaaaaaccgtaaaaaaaaaaaaaacctaaaaaaacccccgacgccccgtatccccgttcgatctacgacccttccccctccccgaccgcccgcgaactacccgacgaaacctccccgccaaccgaaacccaaaaccgactccgtacctaataaaaacgaccccgtctttattaaacgcgaaacccgaaacctacttcctaaaccgcacccgcgtcctcctcccgcgcgccgaccgacaactccgaatttaccgtcgccgccgccgccactcaaccgctacacgacgcgtcctctcgaaaacgacgaaaacgcgtacaatcgccgccgccgccgccgccgcaccacgttccccacccgaaactacgtcaccgaaaaacacgttcccaaccaacataaatcgacgcccaacgacccgcccgaacactccgaccgcaaaaccaaaataccgccctaaaacctactaaaaacacaacaccctcccgaccgcgccaccgcgcccccctaaccgaacgcgtccttacaaaacctaaactatctccctcccactctcaaaaataaaacacacgcctaaacattcgtaaaccaacgaa

SEQ ID NO: 26993 - DNA, 679 bp, Artificial Sequence
  chemically treated genomic DNA (Homo sapiens) CpG-island No: 26993
tttcgcggtttcgtatttttgagcgtggagcgttttattagtatcgtgtggatttgcgggttcgaaaggaatttgcgtatttgttttagggcgttttttttttttagcgtcgtttttagcgcggtcggcgtttcgtcgtcgttttttagtagtagcggtattagtttgcgtaggtgtttttgtagtatcgatacgttcgttatattttgtacggtcgatatttttaattcggtcgagtcgttttcgtcgtcgtcgttttcgggtttcgatatggtgtcgcgttcgggattttttaggagcgatgagaaggcggtcgcgatttagcgagatagttagtaagagatagaaacggtcgtcggaagtcggatcgttcgttagtttatcgtagattgaggagagcgggagtcggtttcgttttaaaggtagttattgttaggtggtttcgtttcgtttcgtcggtcgtagtcgtcgtagttattcgcgttcgttcgcggttttagcgttacggcgtcgcgcgtgcgcggggggcgggttcggcgatgtcgtcgcgcgtttttttgggatttgtagtttcggcgttggtcggggttcgtagttttcgtattgcgagttttaggagatggggatttggtttaacgttttggttcggcgttcgggtttggcgaggttggttaggggt

SEQ ID NO: 26994 - DNA, 679 bp, Artificial Sequence
  chemically treated genomic DNA (Homo sapiens) CpG-island No: 26994
acccctaaccaacctcgccaaacccgaacgccgaaccaaaacgttaaaccaaatccccatctcctaaaactcgcaatacgaaaactacgaaccccgaccaacgccgaaactacaaatcccaaaaaaacgcgcgacgacatcgccgaacccgccccccgcgcacgcgcgacgccgtaacgctaaaaccgcgaacgaacgcgaataactacgacgactacgaccgacgaaacgaaacgaaaccacctaacaataactacctttaaaacgaaaccgactcccgctctcctcaatctacgataaactaacgaacgatccgacttccgacgaccgtttctatctcttactaactatctcgctaaatcgcgaccgccttctcatcgctcctaaaaaatcccgaacgcgacaccatatcgaaacccgaaaacgacgacgacgaaaacgactcgaccgaattaaaaatatcgaccgtacaaaatataacgaacgtatcgatactacaaaaacacctacgcaaactaataccgctactactaaaaaacgacgacgaaacgccgaccgcgctaaaaacgacgctaaaaaaaaaaaacgccctaaaacaaatacgcaaattcctttcgaacccgcaaatccacacgatactaataaaacgctccacgctcaaaaatacgaaaccgcgaaa

SEQ ID NO: 26995 - DNA, 679 bp, Artificial Sequence
  chemically treated genomic DNA (Homo sapiens) CpG-island No: 26995
gtttttgattaatttcgttaagttcgggcgtcgagttaggacgttgagttaagtttttattttttaggattcgtagtgcggaggttgcgggtttcgattagcgtcgagattataagttttagaagggcgcgcggcgatatcgtcgggttcgtttttcgcgtacgcgcggcgtcgtgacgttaaggtcgcgagcgagcgcgggtggttgcggcggttgcggtcggcggggcggggcggggttatttggtagtggttgtttttagggcggagtcggttttcgttttttttagtttgcggtgggttagcggacggttcggttttcggcggtcgtttttgttttttgttggttgtttcgttgagtcgcggtcgtttttttatcgtttttggaaggtttcgagcgcgatattatgtcggagttcgggggcggcggcggcgaggacggttcggtcggattggaagtgtcggtcgtgtagaatgtggcggacgtgtcggtgttgtagaagtatttgcgtaagttggtgtcgttgttgttggaggacggcggcgaggcgtcggtcgcgttggaggcggcgttggaggagaagagcgttttggagtagatgcgtaagtttttttcggattcgtaggtttatacggtgttggtggagcgttttacgtttaaaggtgcggggtcgcggag

SEQ ID NO: 26996 - DNA, 679 bp, Artificial Sequence
  chemically treated genomic DNA (Homo sapiens) CpG-island No: 26996
ctccgcgaccccgcacctttaaacgtaaaacgctccaccaacaccgtataaacctacgaatccgaaaaaaacttacgcatctactccaaaacgctcttctcctccaacgccgcctccaacgcgaccgacgcctcgccgccgtcctccaacaacaacgacaccaacttacgcaaatacttctacaacaccgacacgtccgccacattctacacgaccgacacttccaatccgaccgaaccgtcctcgccgccgccgcccccgaactccgacataatatcgcgctcgaaaccttccaaaaacgataaaaaaacgaccgcgactcaacgaaacaaccaacaaaaaacaaaaacgaccgccgaaaaccgaaccgtccgctaacccaccgcaaactaaaaaaaacgaaaaccgactccgccctaaaaacaaccactaccaaataaccccgccccgccccgccgaccgcaaccgccgcaaccacccgcgctcgctcgcgaccttaacgtcacgacgccgcgcgtacgcgaaaaacgaacccgacgatatcgccgcgcgcccttctaaaacttataatctcgacgctaatcgaaacccgcaacctccgcactacgaatcctaaaaaataaaaacttaactcaacgtcctaactcgacgcccgaacttaacgaaattaatcaaaaac

SEQ ID NO: 26997 - DNA, 935 bp, Artificial Sequence
  chemically treated genomic DNA (Homo sapiens) CpG-island No: 26997
tacgaagtcgatttgttgcggtagtatttttcgttttttgcgaattttgagcggtcggagggtttcgcggagcgttatttcggagcgtttgggtgtcgtttttgggagaggatggggagttttagcggttagagtgtaattagtggtcgagcggcgttggggttggagtaggcggtgcgcgatttagaggcgaggagtttcgggttaaagttttatggttcgagggcgaggtcggcgggggagttttttgggaaggtgggaacgcgcgacgcggtcggagtttagagtttcgcgcgtcgcgtgtcgtgcgcgtattatggtttcgtggcgaggaggcgacgtcggtacggtggcgttggcggttcgggttcgtagggtggcgtagtttcggcgttagagtcgttatttgttcgtttcgtttcggtcggttcgttcggttatagttttggtagtagcgtcgtagggagtatttagtgcgttttcgcgtttcgcgtcgtcgcgtttattcgtagtattttttttttttaagtttggcggcggtcgtttcggttgttagtcggcgatgtttttttgtttttcgacgagtcgagttcgggcggtcgagtgcgcgtcgcgggaaggttggttggacgcgcggtatttgagattttcgcggcgagtaggttcgacgtcggtttttttaggggcgagtttttttcgggaattttttttttggtttttcggttgcgggcgttagcgtttgagaggtcgtggcgtttttcgttcgttgttttcgtttttttatttttttttttttgttcgttttttatttttcgttttttttagtacgtgtattcgtttcgtagggcgtattttttcgtgtatttttttttttagtagttggatttttattgattaatataatttttttttttttttttttttttttttttttt

SEQ ID NO: 26998 - DNA, 935 bp, Artificial Sequence
  chemically treated genomic DNA (Homo sapiens) CpG-island No: 26998
aaaaaaaaaaaaaaaaaaaaaaaaaaaaaaaattatattaatcaataaaaatccaactactaaaaaaaaaaatacacgaaaaaatacgccctacgaaacgaatacacgtactaaaaaaaacgaaaaataaaaaacgaacaaaaaaaaaaaaataaaaaaacgaaaacaacgaacgaaaaacgccacgacctctcaaacgctaacgcccgcaaccgaaaaaccaaaaaaaaaattcccgaaaaaaactcgcccctaaaaaaaccgacgtcgaacctactcgccgcgaaaatctcaaataccgcgcgtccaaccaaccttcccgcgacgcgcactcgaccgcccgaactcgactcgtcgaaaaacaaaaaaacatcgccgactaacaaccgaaacgaccgccgccaaacttaaaaaaaaaaaatactacgaataaacgcgacgacgcgaaacgcgaaaacgcactaaatactccctacgacgctactaccaaaactataaccgaacgaaccgaccgaaacgaaacgaacaaataacgactctaacgccgaaactacgccaccctacgaacccgaaccgccaacgccaccgtaccgacgtcgcctcctcgccacgaaaccataatacgcgcacgacacgcgacgcgcgaaactctaaactccgaccgcgtcgcgcgttcccaccttcccaaaaaactcccccgccgacctcgccctcgaaccataaaactttaacccgaaactcctcgcctctaaatcgcgcaccgcctactccaaccccaacgccgctcgaccactaattacactctaaccgctaaaactccccatcctctcccaaaaacgacacccaaacgctccgaaataacgctccgcgaaaccctccgaccgctcaaaattcgcaaaaaacgaaaaatactaccgcaacaaatcgacttcgta

SEQ ID NO: 26999 - DNA, 935 bp, Artificial Sequence
  chemically treated genomic DNA (Homo sapiens) CpG-island No: 26999
agaaaggagagaaaaagggagaaggaaggggattatattggttagtagaggtttaattattgaagagaagagtgtacgggggagtgcgttttacgggacgagtatacgtgttgggaagggcggggggtgagaggcgggtaggaggggaggagtagggaggcgagagtagcgggcgggaggcgttacggttttttagacgttggcgttcgtagtcgagaagttagagagaaagttttcggggagagttcgtttttgggagggtcgacgtcgagtttgttcgtcgcgagggttttaggtatcgcgcgtttagttagttttttcgcggcgcgtattcggtcgttcgggttcggttcgtcgggaagtaggggaatatcgtcggttggtagtcggggcggtcgtcgttaaatttggaggaggaggatgttgcgagtgggcgcggcggcgcggggcgcgggggcgtattgagtgttttttacggcgttgttgttagggttgtggtcgggcgagtcggtcgaagcggagcgggtaggtagcggttttagcgtcgggattgcgttattttgcgagttcgggtcgttagcgttatcgtgtcggcgtcgttttttcgttacggagttatggtgcgcgtacggtacgcggcgcgcgggattttgagtttcggtcgcgtcgcgcgtttttatttttttaaggggttttttcgtcgatttcgttttcgggttatgaggttttggttcggagtttttcgtttttgagtcgcgtatcgtttgttttagttttagcgtcgttcggttattgattgtattttggtcgttgaagttttttatttttttttagagacggtatttaggcgtttcgggatggcgtttcgcgggatttttcggtcgtttaaagttcgtaggaggcgagagatgttgtcgtagtaagtcggtttcgtg

SEQ ID NO: 27000 - DNA, 935 bp, Artificial Sequence
  chemically treated genomic DNA (Homo sapiens) CpG-island No: 27000
cacgaaaccgacttactacgacaacatctctcgcctcctacgaactttaaacgaccgaaaaatcccgcgaaacgccatcccgaaacgcctaaataccgtctctaaaaaaaaataaaaaacttcaacgaccaaaatacaatcaataaccgaacgacgctaaaactaaaacaaacgatacgcgactcaaaaacgaaaaactccgaaccaaaacctcataacccgaaaacgaaatcgacgaaaaaaccccttaaaaaaataaaaacgcgcgacgcgaccgaaactcaaaatcccgcgcgccgcgtaccgtacgcgcaccataactccgtaacgaaaaaacgacgccgacacgataacgctaacgacccgaactcgcaaaataacgcaatcccgacgctaaaaccgctacctacccgctccgcttcgaccgactcgcccgaccacaaccctaacaacaacgccgtaaaaaacactcaatacgcccccgcgccccgcgccgccgcgcccactcgcaacatcctcctcctccaaatttaacgacgaccgccccgactaccaaccgacgatattcccctacttcccgacgaaccgaacccgaacgaccgaatacgcgccgcgaaaaaactaactaaacgcgcgatacctaaaaccctcgcgacgaacaaactcgacgtcgaccctcccaaaaacgaactctccccgaaaactttctctctaacttctcgactacgaacgccaacgtctaaaaaaccgtaacgcctcccgcccgctactctcgcctccctactcctcccctcctacccgcctctcaccccccgcccttcccaacacgtatactcgtcccgtaaaacgcactcccccgtacactcttctcttcaataattaaacctctactaaccaatataatccccttccttctccctttttctctcctttct

SEQ ID NO: 27001 - DNA, 693 bp, Artificial Sequence
  chemically treated genomic DNA (Homo sapiens) CpG-island No: 27001
tatcgattttttagttcggttttgcgtagtttgtttttttttcgtttttttttattttttttaatattagttaatggttgaggtaaatgtgtcggtttttacggtatcggcgcggagcggaggttgtatattttcgttttttttcgtcgttggaggtcgcgttttgcggtaagattcggtcgtcgtaggtttcgggtagcgttcgtcgttgtttaaatttggaggaaatttaagttttagtcgttatggaggttgcgcgtagtgcgtttcggagttcgcgttatttatcggggcgttttcgggtaggttgtagcgatatagagtgtggtttaggtcgaattcgattacgtcgtaggcggttaggaagaagtgttgagttatggttgcgcggggagtattagggagcgtttcggtcgcgaagggtgtaaggagttggttggcgggacgttgcgggataggatcgggtcggacgcggcggggcggggttgcggttgttagggtatacggcgcggtagtttttttcgtttttcgcgttttcgagtatcgtttttcgatacgtttagttttcgtttttcgcgcggcgggcgttttgcgtcgttcggagttaggtagttagttcgcgtttttttggtattttaatgtcggcgatttttgatttgtttcgtaagtttaggagtttagaaggtagtaggg

SEQ ID NO: 27002 - DNA, 693 bp, Artificial Sequence
  chemically treated genomic DNA (Homo sapiens) CpG-island No: 27002
ccctactaccttctaaactcctaaacttacgaaacaaatcaaaaatcgccgacattaaaataccaaaaaaacgcgaactaactacctaactccgaacgacgcaaaacgcccgccgcgcgaaaaacgaaaactaaacgtatcgaaaaacgatactcgaaaacgcgaaaaacgaaaaaaactaccgcgccgtataccctaacaaccgcaaccccgccccgccgcgtccgacccgatcctatcccgcaacgtcccgccaaccaactccttacacccttcgcgaccgaaacgctccctaatactccccgcgcaaccataactcaacacttcttcctaaccgcctacgacgtaatcgaattcgacctaaaccacactctatatcgctacaacctacccgaaaacgccccgataaataacgcgaactccgaaacgcactacgcgcaacctccataacgactaaaacttaaatttcctccaaatttaaacaacgacgaacgctacccgaaacctacgacgaccgaatcttaccgcaaaacgcgacctccaacgacgaaaaaaaacgaaaatatacaacctccgctccgcgccgataccgtaaaaaccgacacatttacctcaaccattaactaatattaaaaaaaataaaaaaaaacgaaaaaaaaacaaactacgcaaaaccgaactaaaaaatcgata

SEQ ID NO: 27003 - DNA, 693 bp, Artificial Sequence
  chemically treated genomic DNA (Homo sapiens) CpG-island No: 27003
ttttattgttttttgggtttttaggtttgcggaatagattaggagtcgtcggtattggggtattaggaggacgcgagttgattatttgatttcgggcggcgtaggacgttcgtcgcgcgaggggcgggggttaagcgtatcgaggggcggtgttcgagggcgcgggaggcgggagaggttgtcgcgtcgtgtgttttggtagtcgtagtttcgtttcgtcgcgttcggttcggttttgtttcgtagcgtttcgttagttagttttttgtatttttcgcggtcgaggcgttttttggtgtttttcgcgtagttatggtttagtatttttttttggtcgtttgcgacgtggtcggattcgatttggattatattttgtgtcgttataatttgttcgagagcgtttcggtgagtggcgcgggtttcggggcgtattgcgcgtaatttttatggcggttggggtttgagttttttttaggtttgggtaacggcggacgttgttcggggtttgcggcggtcgagttttgtcgtaaagcgcggtttttagcggcgagaaggggcggaagtgtgtagttttcgtttcgcgtcggtgtcgtggggatcggtatatttattttagttattagttaatgttgagagggatagggaagaacgaaggaggggtaaattgcgtaagatcgggttggggaatcggtg

SEQ ID NO: 27004 - DNA, 693 bp, Artificial Sequence
  chemically treated genomic DNA (Homo sapiens) CpG-island No: 27004
caccgattccccaacccgatcttacgcaatttacccctccttcgttcttccctatccctctcaacattaactaataactaaaataaatataccgatccccacgacaccgacgcgaaacgaaaactacacacttccgccccttctcgccgctaaaaaccgcgctttacgacaaaactcgaccgccgcaaaccccgaacaacgtccgccgttacccaaacctaaaaaaaactcaaaccccaaccgccataaaaattacgcgcaatacgccccgaaacccgcgccactcaccgaaacgctctcgaacaaattataacgacacaaaatataatccaaatcgaatccgaccacgtcgcaaacgaccaaaaaaaaatactaaaccataactacgcgaaaaacaccaaaaaacgcctcgaccgcgaaaaatacaaaaaactaactaacgaaacgctacgaaacaaaaccgaaccgaacgcgacgaaacgaaactacgactaccaaaacacacgacgcgacaacctctcccgcctcccgcgccctcgaacaccgcccctcgatacgcttaacccccgcccctcgcgcgacgaacgtcctacgccgcccgaaatcaaataatcaactcgcgtcctcctaataccccaataccgacgactcctaatctattccgcaaacctaaaaacccaaaaaacaataaaa
